United States Patent Application Publication US 2004/0123343 A1 - sequence listing, part 23

SEQ ID NO: 63806 - DNA, 516 bp, Oryza sativa
  Clone ID: PAT_MRT4530_65011C.1
tttttttttttttttctcatcaaagttgggtttcttcattgatgataaagctgctttctacaccatgttcaaaacaaaaattccttgcatcatccagcaggaaagttctgaaaccacacgcatttcaacaaattaatggagaaggtacatcccgtttgcatgttccttcaattcttcgctacctgctctattatcttcctctaacaaagatgcagaagagctaattaaagggtattcttttgacaagatgcaaaagagctgatgaaagggttaaaaaaaaactaagagagtataatctgttgcaacttgcaactagcaaaatgacagactaacttagcaacatatggtatgccagtaacatcaagattgttttttttcctcgaatgccatcaagattgttgcacaatgcattctgacggcatgaagccatcaagccatcatctatcactggcaaactccaatctgaaggaaatgcctagagtcttatgctattaccgcaggtggggaggccttgat

SEQ ID NO: 63807 - DNA, 348 bp, Oryza sativa
  unsure (1)..(348): unsure at all n locations
  Clone ID: PAT_MRT4530_65012C.1
cccacgcgtacgntcaccgatctagtagaagtagtggtaggagctagcaccgtcagcttagcaaggggatgagagaatggtcttctcgtaagcgacggggccaaagctgatgaacgcgaaggaggcagtggacgagagcgagaccagccaccacgcgctgcagtgggctctgagcaacctcgcgccagccatcgcgtcgccggtgctcaagctcatcgagtggtcggtcttacccctcggctacgacttcggctgctccttcggacttgcctctacggtagccagctcttacacccactaatcctgatcataggtgatgctaggtagcacgcaaatagcaccttcttg

SEQ ID NO: 63808 - DNA, 160 bp, Oryza sativa
  Clone ID: PAT_MRT4530_65013C.1
atgcccgcgttccgcgtgggagccgctaggagtcgctcacctaggattcgcgagagcacgcacactgccacctccactggcgagtttaagtttgagagagagagagagagtcgtgggaggggaggagaaggtgaggagaggataaggacgaaaggactcg

SEQ ID NO: 63809 - DNA, 637 bp, Oryza sativa
  Clone ID: PAT_MRT4530_65014C.1
atgctcggggtgcagcagcatggccggcagcggcacggcatctcgaagccaccgccggcgaagaaggggaaggcggcggcgaggaagtacaagccgccgcaatgccctggcgccgtgagggtggtgtacatagccagccccatgaagctgacggcgagccccgaggagttccgcgccgtcgtgcaggagctcaccggccgccactccaacatcgccgaccgtcactacgttgactccaccattgatctcccgccgccgccgccgccgcctccagcatactgtgccagttatgctgcgtcggccacggcggcggcgcctcccgtcgcagctgtaccaccgccggtgctgactccgccgttgccgccgcaaacatttcagtcgtatgatcacggcggacaagggcaccgctggtagacaacactattactcctaattagtagatgaataataatgtatatatatggaggttaaattatattattatctaggaaatcaattgaattcactcatagtgaaataattaagttttgtctagttgaaactgcagggctgtaaaattattgtatatgaaggtttgcaaattattatattagtattattttttcggtcaaaataaaaaaaaaatatatattaaaaa

SEQ ID NO: 63810 - DNA, 202 bp, Oryza sativa
  Clone ID: PAT_MRT4530_65015C.1
aacatactggtcagcctacaatcaagaagacaatgtgtcattgccacttgcccgctcgcactgccaattacttgagatctaccactggccgctactacttctcctcgtgccactagcccacagcggccgcttgggccaccgtgcgacccttgccgctgccctgtgccacttcgcggccatgtcatggcctaccatcgtctag

SEQ ID NO: 63811 - DNA, 454 bp, Oryza sativa
  Clone ID: PAT_MRT4530_65016C.1
ttttatagcttagataactcttatgatgttttaatttggacatttgtgtactttgtagatgatccatacgagacctagtgtttgattaaaaaaaaaaaaaaaaaaaaaaaaaaaaaaaaaaaaaaaaaaaaaaattgaaaaaaaacaagaaaataaaaaaaaaaaaaaaaaaaaaaaaaaaaaaaaaaaaaaaaaaaaaaaggggggggcctttttaaagaatcaaaatttattaacgggtgattgaaaagaaaaatttttttaatgggggacccaaaaataaaataagggggcgccatttaaaaagttactgatgggaaaaacctgggcaaaaccaaaaaaaatatttttgaaaaaaatccccttttaacaaattggggaaaaaaaaaaaaggcccaaacaatacgcctttccaaaaattgtgcaaacctaaatgacaaagggaacacccctt

SEQ ID NO: 63812 - DNA, 469 bp, Oryza sativa
  unsure (1)..(469): unsure at all n locations
  Clone ID: PAT_MRT4530_65017C.1
gagcgacctcggtattgctaaataccgactcattgattcaaattgcttaagcattaccattgacttaacattgcagggtcataaaagagccaacttttttatggataattaatgtttcaccactcttgacacgttgtgaaccgctctagcacacaagagatgtgctcattaccacatcaagattgcactatgatgcttaggtctaatttatacttttaagaatagactgactttgaattattaacaactcaggactttttttatttgatcttacggtccttcatatgtttaagagactgctctaccttagtggcaagaccattcctgaggagcctgtgcttgggctggtacttgttagcttgcggaaggttagcagcanatgatgccgaatacggcggacttgccgcctccgaagtgtttgctgaacttgaacacaaagattcattatggagtgccttcacctcttaca

SEQ ID NO: 63813 - DNA, 218 bp, Oryza sativa
  Clone ID: PAT_MRT4530_65018C.1
aaatattaaacaacatttatcttcttcatgaaatgggcaaattacatgtgtttgtaacacatcttaaatctcttccttcatggttcaaacctttgaatcttaatttaatttaattgaaaataaaagataacatccaatccaaagatcacaccccccctcaacatacatctttaacacttactaacaattgaacaaacacctacactcattatgctttt

SEQ ID NO: 63814 - DNA, 721 bp, Oryza sativa
  Clone ID: PAT_MRT4530_65019C.1
atggctaagcgaaactacctcggtaatcgtgtaacgataccggcgcaaacatttgtagagctatcaaaggaacttgaatggggtcaatcggagttacggttgattttctatgaattttcaaaggtaaagggatttttctggaatttcatttattggacggcaagggaatattccgctagagtaacagcaaagagagggggcccacctgtcagcggccaatggaggaaagaaggcgcgggcccggcttgtcagtggcttgagagaggaaagggaggtggggccggcttggcagcagctcaggaggtcttcttcctcctcctgtcgcttgcttgcacggctcggccctgggatggcgacgcaccgcggcgatggggcgcggcgaggcgaccagcggccgagggaggtggcggcggactccggtggggctccggcggcgacggcggcgccgggaggcgaggctcggcttcgtcttcctgctctcgctttgctcggcttgaggcggcaaggtgccgcggcagcggggcgcggctccgcggccggcggccaggagaggcggtggcgacctcgggcggtgctccagcgaggcaccgccggtgacggcggcgctagaaggcgcggcacaacggctataggtggcgcggtggtggcgacgcgacatggcgatggaacggggatgacgaggggtggcgtcgacgcgacgggcgacgggacggcgaggtga

SEQ ID NO: 63815 - DNA, 216 bp, Oryza sativa
  unsure (1)..(216): unsure at all n locations
  Clone ID: PAT_MRT4530_6501C.1
cctgaccaaaagttagcccaaaattccaaaggccaataggcctttggaattggtgcccaaccttggtttaaccttaggccctggccttnggccttgttaaaacttttaaggttgggaagttaaccttaagctgactactagttaaatctttggtgaaaactatgctactttgttactaataattaatgaaagtacttgttgttaatcaaaaaaaaa

SEQ ID NO: 63816 - DNA, 114 bp, Oryza sativa
  Clone ID: PAT_MRT4530_65020C.1
tgggtaatgccaatgatccatttttagaggcaaatagacagaagcggctaaacaagaagcagctgccagaagggtacatccaacattgcatttgcctgctcctgtacagcccac

SEQ ID NO: 63817 - DNA, 1113 bp, Oryza sativa
  Clone ID: PAT_MRT4530_65021C.1
cacatcgtctggatcgtaggacaaaacgcgcgaggcctcgccgtgatctcaattctcccccaaattcgcaaatcctccgcgtttcgtcgtcgccgttgccgtcgccgccgagcagggcggattcaaggggaagctccggtgagatccatccgcgaagcgcgttccctcgcggaaccctcgctcgccgggccggccgatctggtttgtgcgggggtggttgtggttgtggttgtactagtgtttggtcgccggaatccgacgagttggagatctccgagggataggaatccgtagcgttgcggggcgccaggcgaggttacgatgcctgcggtgctcgccgcgttcgccagcctccgcgcggccgccgccatcgcctccgcggactcctccccctgctcccatctcctgaagcccccctcctccccgtgttttagtagtagtagtaatatttttagtagtagtaattatctttaacgattgcctccccatcgtcgcgcgctcacgcccctcggtcctcacttcgcaccgttcgcgttctcgtgttcgatttggttgtgctcgatccgatctctccctttcctgcttccgatcagaagcagtcggccttgttggaggtggtgattgctggttcttcgaggaaagagaaaatcatctcctgaatttggaattaagcttgtggatgggcggatctttggtggactctagcgccgaaggtgttagcagcagcttatgtctctgccacagcacctctgaaaaggcaggctttgagcatagctcatgtgctagctctggagatggaaattgtgaagctggaatagattttgggcaagatgatttggttgtcaatgaaattggaatggctattgctgaagtgatgcatgtctgcagtgatcatgatgatgatgaagggacagattcgggtgaagactttgatgaaaatgagggtctactttctctggaatcagattccactgatgatgtagtggatattgataatgaattggtcatatcgcctaccttttctagttgcaatgcatctgaatcatcaatcaacaaatcacactctggaaattcttccattaatggcactccaccgttggtttctgcaatgaa

SEQ ID NO: 63818 - DNA, 537 bp, Oryza sativa
  Clone ID: PAT_MRT4530_65022C.1
accggaccggaacgccgaagaagaatggaagaaggaagaaaccggacccgaatgttgttgaaaaatgttgggccgttcaataataacgcaaagccgggaagggcccaaaaataaaatcgtctttttggattggccaacttttcgttttgttttagcctttttgctaatgcaacccatgagaggagagaggctctcaaaatgcaggtaacccctggatctcttggtttaagtttcaaattcgattcgaaactaaaactattatagatctcgtcgtcaaagaatctaaacattaagttataagttcttggtttaagtttcaaatcctaagtttcgttcgattcgaaacgaaaactattatagatctcgtcgtcaaaaaatataaacattataagttataagtagtattgttttgtttatgtttgctgctattacattgaggtttgagggtttaaatgaaatagatatgaattattcgggtgggtttggcaatggatggcgccaacggatttgctggcctaaaaaaaaaaaaaaaaaaaa

SEQ ID NO: 63819 - DNA, 225 bp, Oryza sativa
  Clone ID: PAT_MRT4530_65024C.1
tttccaaattgacccacgcgatcggtcacttataccctctacgaatatccctctatgaacttgtcatctcccacagaagctgactacctggtgatatacagcatagtgtagtggactcttactctaatgggtgtggtcaagaatgtatgcatagctcttaatgctgatgatcatggttaatgtggtacatattccatgaattccttgtagtggaggcaagtcgat

SEQ ID NO: 63820 - DNA, 546 bp, Oryza sativa
  Clone ID: PAT_MRT4530_65025C.1
gcacgaggcctcgtgccgaattcggcacgaggtcttcgtatatagcggatcttctgggtctctgatcctgtgaatttcgggaatttttgtgatcgatcgatcgatccatggcggggctgcagcggtcgagcgagacgttccggcggtcgggctcgtcggggctcgtgtgggacgacaggcacctgtccggggagatcaagccgccgccgtcgccggcggcaaggccaaggctaggcgccactcgtcgtcgtgatccgtcgagagctagagcgactcatcgtctcatcatctgtacatacatgcaattccccatctgatcggatcatgctccaatccattagtccatttcgtagcctttttattttttcatatagtttctttgcttatcttgtaaattgtttcatgtcaagtaggtgattagcactagaaaactatgacgtgcaagcaactatgaactattaagtatttttcatgtgaacagtgaatgtgtccgtggagtatcatctgcagagcttgataatcttatttcttgtaattaatctaaaa

SEQ ID NO: 63821 - DNA, 668 bp, Oryza sativa
  Clone ID: PAT_MRT4530_65026C.1
gtgatcgatgccggccccggaaaaaaaaaaaaacccttattctagcaaatagtccattccccatatacattttatttaaaccttctccttgctactattgaggaatcccaagcaagttctagtattttcctcttcctttcttggtctttgaggggataaaattcaagagaagatctctaggttcgtcaaacatattcttgaatcttcgcttgtgtttctacgatatcctcgacaacatctccatctacatgcacgcagatctagttgtttactttttgtcaggatcatcaggagattctgaacctatgcttcccaagattcatggaaagcgttcggaccgcccaaggggaaggaatcatacaccttgggcaccacttcaggggcttctgaactctgtaaggaatataagaaaatatgtgaatgatcggagtgttggctcaaagatgatgaaatcaactgaaagagacagcatgtcaagcagtgcatctgaaacggcacctaaattaaaggacaacaatggtgaagatactaaatacaaacttctagaaataaaaacagagatcattgaacgcatagacccaaaaacacgcggtaaacgttcggcgcgccatagggtaaaagagcctgcattgtggacatcacaggatgagctccagaaatttgaaact

SEQ ID NO: 63822 - DNA, 746 bp, Oryza sativa
  Clone ID: PAT_MRT4530_65027C.1
aaccacgcgtagagagagagagagagagagagagatagggggtgcgggaggtagagtgggagagagatttagaggcgatttcgccgcgatgaggagtgcggctcgccgtggcggagatttcgtcgtgccggtgctgatctgtgtcgtgtttgagtttgtttttcgccgatcaatctcatttgacagaaatgtagatcaatattcagaagatttgagttaagttttgtgatttattctgatgaagattcatatcaagaaggttcaaagaagattcagaacaagaatcagaagactaaaccaaagaagaatgaattttaatttggatgcaatttgaagatcaagaaacaaatgaacaagtcactggattcagaagaagaagatttgttaaatagatttgatgcatcaaccagattcagaagattctttttcttcttgaatagtgttttgggttatctatctttgttagtgttttgggttttgtatatattgttagttaagttgctgggctaaatttgagtcagttcttttgttttgggcctttaaattgactacagtgttaatttgggctttcatttgatgtaaattttgtatttgggctcaatctggactatttgattgggtcgagttgtatttgagcccttcgaaaatgggcttccaaacctatttgttattgtttatctatgtatttttaaattttatttgtcaaataatagtagaagttggatctaaaaaaaaaaaaaaataaa

SEQ ID NO: 63823 - DNA, 404 bp, Oryza sativa
  Clone ID: PAT_MRT4530_65028C.1
cggacgcgtgggtggcgccgtcgccgtcggccgctgatgagaatgaaaagaacgtctactaggctccagcggcggcaagaagagcggtcgtaaccgcaccacttggatagtcgatccggatgcagaccgacaacaccagtatgtctaacactagatcaaggcacatgcacacaaccaagcattagattctgttccagattcaaacccagatgctgcctgaggattttgaaacttaatatgtttgctggggcttattcaaacttaaagattgtgaactccatgatgcttatttattaaaggcctatgaaatgttaacggtagttgtactctggtttactgacgataccatgctatactgtgctaagtaaaagaaccattctaatatatctaccttgtggaagttt

SEQ ID NO: 63824 - DNA, 435 bp, Oryza sativa
  Clone ID: PAT_MRT4530_65029C.1
ttttccttcaactaaacttggatgagatgggcgtcttcggacagcagccagcggtgggcgctccgccggctcaggggtacccgtggttggactcgtccccgccgccggtgtaccctgggtgcggatactcaccgacggagcgtgggtaccatgctcagggataccctccacattaggtgcacctgtcgtagaagggctacgcgtcgccgcacgctgcagcacactgctgacgctataacaggagctccaccacagggggccttacttaacgaagggatgctagggtgcactatgaatgtgctgactgttggaggctctcttatgatcaatgatgctccagctgacaaaggtggtaaatcggacacgaacgctgggattgatgtgggagtattgctcctttgaaaaaaaacttatggtactgctggtgatggcatg

SEQ ID NO: 63825 - DNA, 438 bp, Oryza sativa
  Clone ID: PAT_MRT4530_6502C.1
ttcacgagaagacctcctcaccccatcgacccgagcctgttcattacccgacgacccgtcagccccaactaccgctcatcagaagctccgccctgctctcgacacgcctcaccacggcgacccgaacccgagcctcccttgttctccaagatcaccagttcgagaggactcccatctgcctccccgggaatcgagccccccgctcccgtcccaacggcaccgccccctcccaaccggatcctcgagaacccgtcttccttcttcagatcttatctcacccaatcaatccccccagacaacagttcctcgcatcacagcatccacccattctcagatgacgcaccccttccatcataccaatccatcccatccatccaacaccatcatcgagagaagaactcaatcaaaaacgacctcgtgtatctcaaccaaaaaaaa

SEQ ID NO: 63826 - DNA, 721 bp, Oryza sativa
  Clone ID: PAT_MRT4530_65030C.1
atggacctcctcgagcagccgctcgaggccgtcgcgttccgcctctactccctcccggaggccgcggcccccgctggcgccgccgcgtggacctgcctcgccgccgtcctcgccgcggccgccgccgccgccgccggcatctggcgcctgcgcgccgccgcgcccgtcgtcgccgccatgggtggtgcttcttctcgcgaggatggtttggaaccggagtcgtctcctgcgacggcggcgtccgagcaggcgaggtcgtcgtcggagaggcagcccgagccggcctcgtcgccgtcgccgaaggagacgtacacggcgtacttccacgacagctgctgcgtcgggtgctgcgacatggacgacgacgacgacgacggcgaggaggtgctcgaagaggaggaggacgacgacgacgagccgtcggagacgacgccgttcgagtgggaaattgttaggtctctgcctctcagcccgacggcggcggcggaggttcgccggtacagggactcggcgccgctcggcggaagcgtcgttcggctgtggaatcacgtcgccggcgggggcgtaacggcggcgagcccgaggcggaggggactagccggcggcgttgtctcggccttctgagcatccaaaggagtaataaaaatcaaaattttatttatcgctgttgtaaaagtttgtagctttaaaatgttcagcattgtacaaaaaaaaaaaaaaa

SEQ ID NO: 63827 - DNA, 325 bp, Oryza sativa
  Clone ID: PAT_MRT4530_65031C.1
cggcacgagggatttcttgaggaggatgacgacgacgacacgattgatttgcgcacaggtgcaggtgttaattagtttgttaattagtctttgagatgagatgacaagagttgattagcgttaaggtaggagtagctagctaggaggtaattaggatcaatcaaatcaattagtagctagctgctactgctagtgcttaattgcacttaggtagctcttgttttgttcttgcttattttgatcttgccatgcatcatgcatgccatgcatcatgtgagagagtactgatcacctttcatgctggtgaagagtgatgatcagatga

SEQ ID NO: 63828 - DNA, 2364 bp, Oryza sativa
  Clone ID: PAT_MRT4530_65032C.1
cagaaaatccactgccactatatgatgttacagatatcggctacctgtgtcaatatttacaggatgttacacatctctcatcaaatcgatttcacactacaaaaaacccataaaacgaaacaatcaaaactctttaccattcccatcccaatcttgaatgcatttgctctccaaattatagcaaagaatcaagaacatagccaacccttcatgggatgacgagcatcccacgtttcaacaagcagtcagatcgtttcctttcatggtctcacgaatctatctagctccactatcatcgaacgatgactcggatgcagaatcatctgatgttgagatggagcttgtttcgcatgaactgccgttttcggtgtccaatgaaaatgatgttggcttcttcaaatgccagtacattatgcttgctgtcaaggttagcatcattttctggttcacctccagaatatcttctggtagcaagaaaatggagcaaccaagcttcctagccacagaaatgatgtatgaagcattcatttgcttttcttcatctttttctcctttggtaacaaggctccaattcacaacccgaggttccacggcaccaagtaaattgaggaaaaatatgccacttgaaaggcttctatccttgaaactctccattcgagaatgctttccagaatcctttacttttttgtttgcccaaatcagtatgtcgttatctgtgatctctttaccatttgaatggaatctcagattctttaacaattgaaggatattgtacctcatcaattgccacagaaaagctaatatcagtttcttgtttccttgcacaatatcattaccagcaatattcaccaaggaaaattttagttctttcccaatcttcagaacttgattgcaattttccactttcctgaatggtaattttattgggggcctatttgccattttccaattaactgagccaggagcaatcttgtcaatcacctcaagaagcacccatccatttctaagatcctcaaacacattgttgatgtatgtagaaattccaaggctattaatccataaccggaatgacctctcttccctcgaaacttgagcatcatcagagagtccgtcgacaaaggaaacttgtttcatttgttttgacagcccattccttttctggaaaatatgagccacaaaagcaagatttagatttggtaaaccgtcgacaatgtcttttggggtcagatatcttttgcagcccatcctatctgcatgctcaagaactaatcttgctctatgaagaagatctttaactgacattggggatggtttagcactgcattcaggtgccaagacattcagtagacaagcatatgcctcactatcttttatatctgatgaaaaatttgttactgttctttggaaacctcctttcttcaattgaaagttcatccatctgagtaatattttttcaggagataagctcataagctcctccatctccttgctgtcttcaactaattctaccaattgaggtgtgctcttcaggtttacatcagccaaaagttgtatcttaattatttgtgatatcaaacccaagataaggtgaggccttccctcggcgaggtcctgcgtgccgatgttcacgacagtgcagccgatggccttggcagaattgaggcagagggtgtggttctcgttcttctcccacaggttgagcagcttcttggtgttgatggcgcgctcgtcgatcgtccccggcacggccaggttgatgagcttgcataggagcacgccgtccttggtgaggtggaagaggtgatcggtggccggatcgatggggagcgcggtgttgaggaagggatcctcggcgaggtaggcgttgatgtggccgacgtaggaggccttctcggactcgctaatggtgtggagcagggtggtggtggcggccgtgaggaacgccgcggccgacgaggaggaggagcgcgcgatgcccccgccgccgccgcccgccttcttcccggcggcggcgcccttgagccgcagctgcatctcggcgtagacgcggaggaagagctcgaagccgacgccctggtgcggcctctcgtcggcgcgtgcgacggccttgagcacggacgcccactcctcctccgtgagctgcgccgccgcaggcgcgctgttctccttctcggcgtcccctcctttcccggccccgacgccggcggatgatagcgccgcaggcaggtcccgcagccgcagcctcccgctcggcgccgcgtcccgcagcgccgcgtactgggcctggagggcgcggaggtcggcctgcgagaagcggcgctgcaggtaagggtcggagacgacgaccagcccgtcgagccccat

SEQ ID NO: 63829 - DNA, 270 bp, Oryza sativa
  Clone ID: PAT_MRT4530_65033C.1
atgcgccgccacgggccacctcgccggcgcgcgcgtgcacctgcgggtgcgcacacggccatcgagaggctccttggcggtgccctgtgccctccccctttcacccctttgccggcgtcaacgttcggccggcgacaagcgaacctgatgtcgtgcgccgccccggcctccacccctctttatatggcgcagggtgataggggcccaccagccattgggctgggcgcccctgatcagggcgcggaaccaactgtggtgataatagtttga

SEQ ID NO: 63830 - DNA, 1437 bp, Oryza sativa
  Clone ID: PAT_MRT4530_65034C.1
atggtggatggtgtggtgaccttactagaggcaaggaagcttgtggggaaggtgatcctagcggggagtgctaatttatatgatggatctatccatgagcagagcaatttcgcaccagttgatgaaatcggtggaagaacagagatatggaggatagaagggacgatctcagatgattttcctgagggtgtttatatcagaaatggttccaaccctctctttggagccttgcacaaggtgaactcaatcttcggccagtctgaagacatctgggtcgagggagaaggcatgctgcatgccctctacttcaccaagagcagagaaggaaacacttggtcagtctcatacaacaaccgctacgtgcaatctgacacttttaatactgaaagggatcgtcagagaccatgcttcctctcagcaatcaagggtgaccctcttgccataatcgcagccagcattttgaacatgctgaggtttggcaaggtgtttagaaacatgagtaataccggtgtgtttgagcacgccgagagggttttctcagtggcagagaatgacattccctacgagattgacttggacaatcttggcacactgtgtagctgggtcgtcgatggtcagtggaacatgccattcacagcacaccccaaggtagccccagggtcaggagagttagtcatatatgggtttaacattgtgaagcccttcctaactattggagttgtctcagaggatggaaagaaacttgaacggaaggttgatctcaagctagaaagatgtacatattgccatgaaattggggtcactaaaatgtacaatattatcatggatatgcctcttacagtggaccttactaggattctaagaggagctccgttgattgattttgaaacagaaagttatgcaagaattggagtcatgccccgtcatggagatgcagattcagtaatatggttcgatgtagaaccattttgcacattgcatctcatcaattgctttgaggaagatcatgaggttgtcatcagaggatttcgagtgccgggttccataattactggcataacacttgagcacacggctaatgaagagccagctaatcaaggacccagtgagaaatcttttcctcgcttatatgagtggagattaaacatgaaaagcagggctgtcacagtgatcaataacaaatatgctggcctgcatcacaagtatgcatatgcacaagtgattgatgtccaagggagcctggaaggtggctgtggaacagtgcgaccaaaatttggaggtttcgcaaaactacatcttcaagataacaacaaggcacatgtcattgatgctcagagatttgaaaatggaccaattgctaagataacattgccacaaagagtaccctatggctttcatggcacattcatcccaagaactacatacaagaagacatga

SEQ ID NO: 63831 - DNA, 2049 bp, Oryza sativa
  Clone ID: PAT_MRT4530_65035C.1
atatttttttgcttcggttaaagcaacgctaattccccgcgtcgcaagcatgcgtttctaggagaaagtaaagcttgcgtttttgagactaaagcttgcgttttttgttttttaattgtggagtttgggaggaggaggggaaaaaatcgcgatcaggaaaaggcatctcgagaataattatttaagtccccagagcgagcagtgacgcgaaattccccaggagagatctccatctccacctccactgctcaggcggggatgtcgtcggcggcgtcggcgtcggcggccggaggggcaggcgaggagggcgccgccgccgccgcgcagccgcagcaggaggggccggtggtgacctgcaagggcgtgaacgggctcgacaaggtcgtcctccgggaggtccgaggcagctctgccgaggtgtacctgtatggcggccatgtcacatcatggaaagatgagcatggagaggagctgctttttgttagtaataaggctattttcaaacctccaaaagctatacgtggagggataccaatctgctttcctcagttttccaacttcggaaatctggacccacatggctttgcaaggaacaggacctggagtgttgaaaatgatccaccaccatttccagtaccaacttctaataaagcttacgtcgatttaatccttacgcatactgaagaagatctaaagatctggccacatagttacgagttccgtctgagagttgcacttggacctggtggagatctgatgctgacttcacgtataagaaataccaatgcagatggaaagccattctcatttacatttgcatatcacacatacttttcaatatctgatatcagcgaggtgcgagtagaaggcctggaaactctggattacctagacaacttacaagagagaaatcgatacactgaacaaggggatgcaattgtttttgaatctgaattggacagaatatatctgggcacaccgtcaaaaattgccattattgatcatgagaagaaaagaacatttgttgtgaggaaaggtggccttcctgatgctgttgtttggaacccttgggacaagaaggctaaggctatgtcagactttggggatgacgaatataaacgcatggtctgtgtggaggcagctgctatagaaaagccgattactttgaagcctggtgaggagtggactggaaagttggaactgtctgctgtcccatctagctattacagtggtcagctggatcctgatcgtgttcttcaggattcaagtgtcccggaggactcaatcagctagtccttagtggatatttgtccaggtagactattatatcatatgcataagggacattggcaacaaggagtgtcaaaacgtttattccattctattcaaatctttgttgttttttggcatgcatatctgaactgaggaatttcaaaattgatttacgttttgatatctacataacgtaaggggacgggtcggtattaataccctgtatatgcatgtttgaagtgagaaacatctcattgggttgtaaaataaaaatcaatactgtatctcttttttgatcggcaccttttccattctaatatcaagtaaaatagtacacctaaaaaaaaaaaaaaactgtcctacgcgcgtccagttctcgctctcccattctgagcttggttaaaaccaggacttgtttggatccataatttacctgtgcttgtactttggtttgaacacctttttcttgatggagatagatgcagaagtgtgaagtcaccttgatgcttcagggtagctgttattgcagtaggagaaaatgaagtatctggtgtttagcgaagctggacattatcaacgtcagctatttagagttagctccagatcgccgtgttttgattaattttccaagttgatatgaaaacgcggttgtaataatgaattgccacaaatttctgtcgaaccaaattaaattatggttagactaattatgtgattatctcttttctttctaaaaaaaaaaaaaaaaaaaactcgagactagttctctctctctcc

SEQ ID NO: 63832 - DNA, 484 bp, Oryza sativa
  Clone ID: PAT_MRT4530_65036C.1
gcaaattcttacttagcattcagaactgatttttttagaaacttttacagaacatagaaccaacccatttgctagcaatttatttatttattcatttacttcttctttatccgcattgccaacttaagaggattccctcacattataaacgtgttggttgctcttgtattggatgggagtgaatgccccgaactcatatcctgtgttatgcttgagcctgtgatcctcttgtgttgatatgccatatgcatttgctacaaactgaggttggagagcacggaaaatggaactttttcctacaatgtggcttaccatacagttttggtttggcttgaatgcaacgcaaacacatgcttctctttgagccttttttacaactacctagtgctgggggacaataagaagttgttcaccacgaagctctccttttaaaaccggcttttcattgttggtaacgacttgaacctggggttggccttgagga

SEQ ID NO: 63833 - DNA, 498 bp, Oryza sativa
  Clone ID: PAT_MRT4530_65037C.1
gggcccaaaatgggggggtttacaaatttaaaattcaggggacccaaaaacttgggttacccatagaaaacgttaagtttttgaaaatgtttttccccctcaacaaggggggacccaaaaaaaaaaacgggggggatcatcctactggggaaaaaaaaaaaaactgaaaaggttaaatcatgttttaagtttaaagttggggtttaaaggaagcccccttccgggggggttgaaaataataaagcccaggttacccgggagggaaacaatctttttttcctaaaagggggggacccctgaagggaacttcgttggaacagaaaaacctgcccacatgcttaaggccaaccccaggagcattggcttcttcacatccatagggggactcgaaaactcctcctccgggattttaaaaacggcccaatattggatggtggctaaggcggcgtggccaaggagggcccccccaaggaccccaaccacgtggccgatccccat

SEQ ID NO: 63834 - DNA, 246 bp, Oryza sativa
  Clone ID: PAT_MRT4530_65038C.1
atgacgttcttaagaaggaaattacggaagggggtgtctaaagatatagagcaagtgacagtaatagggataacagaaccattgcctacgacaatatgggaaggagtgaccgtacggtgtggagaattagaaagtggtggtggtggtggtggtggtggtggtggtgatcgagccgttgttgccagaagtgttgccaccaccttggatagtcgtgggcgcaccgccagatgcgccacccataggtga

SEQ ID NO: 63835 - DNA, 484 bp, Oryza sativa
  Clone ID: PAT_MRT4530_65039C.1
ccatttctgggatgggccgagttttaggcgctgccaaaacttaatccaaatcacttttggctatcaagcaaggatgtacaccagagcacacgccccggatcatgtgccaaccacctaaacacatgctacagagagggaagccgggcaccgaattggctatcgctatgcgagaccgatcaccaccaccacggaacgaagactctaaaaattacgccctcaagaggtaaaaattatgccctcaagagggtcgcgacaccgaaagacgccgtcgtcgtccgtccaaaaaactagacaaggtttacacccagagctctttgctaagagaggaggggtacctcaacagtgtcctctggagggttaacacgcccaaaagtatgatcattgttggcccaatgacttgggctaagctttcgctcggaacccctacaacccctgcctccatggtccgtcgcccaaccctaaaccaccatccaaacatcggcag

SEQ ID NO: 63836 - DNA, 212 bp, Oryza sativa
  Clone ID: PAT_MRT4530_6503C.1
ctcgttcccctgtgggttcccccctgccgtgcgccggccttcatggttctgtcggctggcattcgaagttggacgccgacccaagacctgacgcgatgaacagggcccaacccgtggcaccttcgttcatcgtacgcgagggccctgcagaacacgtccctcaagacgtggggcggcacaccggagaacctgaaggcaggcgcaggacgcgc

SEQ ID NO: 63837 - DNA, 171 bp, Oryza sativa
  Clone ID: PAT_MRT4530_65040C.1
atggcaaggcaaaggcgcaaggacgttaatgacggccaaaccggcctctccaagaccaaactagctacaccctgtcctggatccaacaagttgggagcagcttggtcgaggtgcaagtggccaatggaggtgaaggtggagatggtcagcgagtcagagttggaggtgtag

SEQ ID NO: 63838 - DNA, 429 bp, Oryza sativa
  unsure (1)..(429): unsure at all n locations
  Clone ID: PAT_MRT4530_65041C.1
tgnagatggtggtgggtttggtcctgaagctccatgcccactctctccagctctctcctctccctgtccaaatccaccaccagcttctttctttccattttgcttctccctttctcttttcctgttctagttggggagcagcagcagcagcaggagcagtagtagtaggttgttggttttgtacctttgggctctttgcctttgctttcttgctggggattgggaggcctgccttgaagctgaatcccaatcttcccctgcccacatctgcttcccagcatcctgcaactttggttataagggtggttgggttttgttcttgatttgcttcatcgattgggagggttcttgctgtccttggggttttgtgctgtnaatggattggagggtttttgttgcatagggcgcgaagaaaagaaggtttgtccc

SEQ ID NO: 63839 - DNA, 2432 bp, Oryza sativa
  Clone ID: PAT_MRT4530_65042C.1
atggcggggcggagtggcggcggcggcggcgggagctccgggaagagcgggacggggaggatggtgtcgctgcaggagttcgtctcgtccatggcgcctctcatagcctttcgtccatggcgcctctcatagacctggagaaggcggcggagatatcggcggagtcggcgacgagctcgaagaccctcgagaggaggggttgcgtcatggccaacctcaagtgcaccgacgcccagacggggctgatggggaagacgctcctggagttccaacccaacaagggcgacgtgcttacacctcacaagtttcggaacacacgatgtggtttcctctaaagccaaataaggcagatgctggatctgctgctcttgggcaaggtgtagtttatcgcttgatgaaggatgcactagttcaacttagtaagggcattcaaacaggcccttcagcaaaccttattcctgttttgtttggagaaaacccacctatgagttccaaggatgttgcgaagttcagtccatttaacaagaatttggatgagtcacagaaagatgctatctcgaaggccctcaggtcaagggatgttttcttgcttcatggacctcctggcactgggaagacaacaactatcattgagataatattgcaggaggtgaaacgtggatcaaagattcttgcttgtgctgcttctaacatcgccgtggataacattgttgagcgactctcccgatatagaaccaaattggtgaggttaggccatcctgctcgattactaccccaagtgttggacagtgctcttgacgcacaggtattgcgagcagataacagcagcttagcaggagatattcgcaaagaaatgaaggtgcttaatagcaaattgctgaaagctaaggataagaatacaaaaagggacatcaggaaagagctcagaacccttgccaaagaagagagaaaacgacaacagcttgctgttgctgatgtgataaaaaatgcagatgttgtactgtcgactttgactggtgcatcttccaaaaagctagatggtattacatttgatttggtcattattgatgaagctgctcaggcacttgagatggcatgttggatagccttattgaagggtccaagatgtgtgcttgctggagaccatcttcaacttcctccgactatccaaagtgctgaggctgagaagaaggggatgggaaagacactctttgaacgccttactgaagcttatggagatcaaattacatccatgctcactatccagtacagaatgcatgagctcataatgaattggtcatctaaagaactttataataacaagatcaaagctcattctagtgttgctgatcatatgctctatgacattgaagaagtgaaaagatcttcttccacagagccgactatcatactaattgacactactgggtgtgacatggaagaagtaaaagatgaggaggagagcactatgaatgagggtgaggctgcagtatccattgctcatgccaagctgcttgttgagagtggtgtccgtgcatctgatattggaataattacaccttatgctgcacaggtaacctgtctgaagatgatgagaaacaaagatactaaactgaaggacttggagatatcgacagttgatgggttccagggtagggagaaagaagccatcatcatttcaatggtcagatccaactcaaagaaagaggtcggattcttaagtgatcatagacgaatgaatgttgctgtaacacgagccagaaggcagtgctgcctagtgtgcgatgtagagaccgtaagcaacgacaaattcttgaaacgcttggttgagtactttgaggagaacggggagtacttgagtgcatcagaataccagagctgatgacttggggtgttaacccttaaccgtgatagcccgtgcttatcgcaaagatagtgaagagatatatccaaacgatgcttgtgataggaacatcgtgcacttcaaactggtgcaatatggccaatggagatactgtcattcgacttttatagattggaaacagatcgctgtgagactgaacagataattagctcaggagtggatcaatttcgtcttgactggccctgttctggtctcttcttctgtggcttatggaaatgaaacctcagttatgtgtttttatatgtccgttctttcagctgatgtacaatgatagaagactaattttattcatccatgtgcaaatctaccatagttttttgcaagaaaaaaaaaaaaaaaaaaaaaaaaaaaaagtaataataggataggaagaaggcggggctcaacttcccatgataattaatctgtatctcatccatcttgcttatttcccaatgtcgcccaaaatataaaaattaataaattaatatattttttatataattaattaaattaatatatataaaaa

SEQ ID NO: 63840 - DNA, 139 bp, Oryza sativa
  Clone ID: PAT_MRT4530_65043C.1
tttcatcccccggttggaggtttttcttttttctgtttaatctagatgaagaggttgaacaagtgtcctggttattttccctctggagagtggagaaagatgttgaacgtatttatattaaagcataaagttgttatgt

SEQ ID NO: 63841 - DNA, 915 bp, Oryza sativa
  Clone ID: PAT_MRT4530_65044C.1
atgcggtcgctcgcttgttgcgcggtgcttcttctcgcttcggttcttggatctacaggattgaatgggcttcttctcattaagaaggatggtgcaatgtcggtggcttggcatatctggttggctatcataaccagcattgacaattggccttacaattgctttggctcagcaccctttggtccatcagcaagccctcctgtggcgaagggcgctgtcagcccagctgttcccactcgaccacaaaatgcgcctactccagtaacaccccctaaagaatataatgcgcctcctccagttgagcttacgccttctggttccactcatgtggcgcccgtaggttccccgcaaggtgcagggaatggcatccctccgtatccaccacctcaaagaagttacctgccattcctccttccacttcaggagttccccgagaacagtgtaaacctccagttgcaccacctattattgcacaagcaccacgtcagcaagccactggcaccaagtagtgaccatagcaatggatcagcacctgcagaaactcctttgccccagaacacaaatatgccagcagtcccaaagaatggatcatcagtttctcatggccgacccccttcaacagtagatgctcctaaccagcaacttctagcagataccatggtgggggtggggcaccgaagaaaggagaacaccttccatttgccccatcttatccaccatctcatgctcaaggtcctgagaactcacgggctccaaggcagtctggggctaaaaggcaaaagcaccatgcacctccacctatgtttcgagggcctcatatttctccaaccatgccaccaatccctgcccaaccagggccgaaagcaccatcagcccatcctatttgggcattacctccaccaccgcctaatctag

SEQ ID NO: 63842 - DNA, 3480 bp, Oryza sativa
  Clone ID: PAT_MRT4530_65045C.1
cttctacactctagctcacagcttcgcgggttccacgcactttgaaaactcacgtttccaagccggaaaaccatggctcgcttcgccgtagtcgccgccatcgtcgccctcctcgcggtcacgggcgccgtgcatgccccgggagcggaccccgtaccggcgcccaagatggccccgctgcccgctcccccggcgaggcccccggccaccgcccccgcgccggacgccaccccgaccaccgatgcggtcgctcgcttgttgcgcggtgcttcttctcgcttcggttcttggatctacaggtactgatctgggtccttctcctgtggtcgctaactcgccagatgctcaagatcaaacttctagccctcctgaacctacaatcgccctcggtccagtaactcttccaacaggttgctctgaatttctaatgtggtgtggcattatggctctcaagatcataaccagcattgacaattgtccttacaattgctttgtctcagcaccctctgctccatcagcaagccctcctgtggcgaagggcgctgtcagcccagctgttcccactcgaccacaaaatgcgcctactccagtaacaccccctaaagaatataatgcgcctcctccagttgagcttacgcctcctgctcccactcatgtggcgccagtagctcccccgcaagctgcagttgaaaatcctgcaccagtgcttcctgggacacctgctttgttgccttctgttcaggctcctgctccatctgtggccaggaatcctaatctaccgatagtgcaacctccttctgtgaacaatccaccaagcagaccaattggatcagggaatggcgtccctccgtatccaccacctcaaagaagtttacctgccattcctccttccacttcaggagttccgcgagaaagtgtaaaacctccagttgcaccacctattattgcacaagcaccacgtcagcaagcactggcaccaagtagtgaccatagcaatggaaactcagtgcccccagcaaatacatcacctccccataagaatagtcatattccacgtgcactgccaccaaaggaatccagtagtcaaactggcacagctcacaaaccgccaattagaggatcagcacctgcagaaactcctttgccccagaacacaaatatgccagcagtcccaaagaatggatcatcagtttctcatgaccgacccccttcaacagtagctgctcctaaaccagcaacttctagcagataccatggtcggggtggggcaccgaagaaaggagaacaccttccatttgccccatcttatccaccatctcatgctcaaggtcctgagaactcacgggctccaaggcagtctggggctaaaaggcaaaagcaccatgcacctccacctatgtttcgagggcctcatatttctccaaccatgccaccaatccctccccaaccagggccgaaagcaccatcagcccatcctatttgggcattacctccaccaccgcctaatctagattgcaattcattagcatgcccagagcctctaacagatccacctgcgggagccccatgtgtttgtgttctaccaatcaaagttggagtccgcttaagtgttgatctgtattcattctttccattggtatctgattttgcggaagaagtgtcatctggggtaaatatggcacagagacaggttcgtgttatgggtgcaaatgtagctggtgatcagcctgacaagacagtagttcttgttgacctagtaccaatgcaagtgaagtttgacaatgctactgcttttttaacgtttgaaaacttatggagcaaaaaaatttccctaaaaccatcagtttttggggactacgagattctgtatgttgtatatccagggcttcctccttctccaccttcagcaccggaaagtgttggtgacggggcatttggaaacaacagaaatgcaagggcaatgaagcctctcggggttgatgtaggcaggcccaaaaaaagagtcaacggcagcctaattgctattgccgtcttgtctactgttatagcattgattatttgcactctagctgcatggttgctgataatcagattcaggggttcggatggcttggctcaaagatttccacatagcgcacttccaaaattttccagatcatctggtacaggtcaaacactgttagctggtcgctatagttcaccatcaggtccatcaggttcattgggctcaagtatcgcaacatatgcaggacaggcaaagacattcaaatttgctgagattgagaaggccacaaacagctttgatgattcaacagtacttggagagggtggcttcggatgtgtctaccagggcacgcttgaagatggaaccagggttgcagtaaaggttctgaagaggtatgatggccaaggcgagagagagttcttggctgaggttgagatgctgggacgcttgcatcaccgaaatttggtcaagttgttaggcatatgtgtagaggagaacgcaagatgtctggtttatgaacttattccgaatggcagtgtagaatcccatttgcatgtaagagtggatcttgagacagcaccactcgattggaatgcccgcatgaagatagccttgggggctgcacgagctcttgcatatttacacgaagattcaagcccttgtgtgattcatcgtgattttaagtcaagcaacatcctattggagcatgatttcacaccgaaagtgtctgatttcggactggccaggactgcaaggggggaggggaaccagcacatctccactcgtgtcatgggaacatttggatatgttgcaccggagtatgccatgacaggacatctccttgtcaagagcgatgtgtacagctatggagtagtgttgcttgagctcctcaccggtagaaagccagtggacatgtctaggcccggggggcaagaaaacctagtttcatgggctcgcccgcttctgaccaatgtggtaagcctacgtcaagctgttgatccacttcttggccctaacgtacccctggacaatgtcgcaaaagcagctgccatcgcatcaatgtgtgtacaacctgaggttgcgcatcgcccgagcatgggtgaagtagtgcaggccttaaaacttgtttgcagtgacggtgatgagggcctcggatcaggaagtttcagccaggaattggcggcacaagctgcagcaatctatgatgtaactggcatggaagctgagagggtgctgttatctgagatgtttggctcaacccctgtcttcactcccgctgcggattcaggttctttccgaaagcagtccagctcaggtccactgatgacaggcaagaacagaaagttctggcagagattgcgaagcctatcaagagggagtatgagtgagcatggtgcctcaccagattttgagacgcgctcgcagtgtagtaataggtgaggtttttttctgttcccttttcaatcttgcgaaga

SEQ ID NO: 63843 - DNA, 174 bp, Oryza sativa
  Clone ID: PAT_MRT4530_65046C.1
atgggacatccaaaaactattaacaaaaccccaaatacaatcccaataatgattaaaaggagagatgacagatatgtcgttaagcaatacagtcacagtggtagcgagcgagccgtagatgtgtccagtagcaaaaccgttgatggtttggtgggacttctagaaagtaaaaaa

SEQ ID NO: 63844 - DNA, 559 bp, Oryza sativa
  unsure (1)..(559): unsure at all n locations
  Clone ID: PAT_MRT4530_65047C.1
ccggccgggatatccaatctactagcaaatgaacaaggcccccatcattgtacactacctaagaaaagctaacactaatccggacgatcatggcgatgcagcgttcaggacgctcgaatatggctctcttcttcgtcgtcaccatcgtcgccgcgccgctgctgatgcatgatgatctcctcgccgcggctgcgcaggcagccgatggcggcggctccggctccggccagatgcagccggaaggtattctgtatgccgggtgcttcagggccggcggctgcaagctgacgccggagtggtgcccggcgaggtgtatctacttgggtttcagccccggcgccggctgcgaggtcatggacgacggccacatctactgctgctgtggcccaagccgtacatccacaaacgctgatccatcgaccaatgcttgacgcatgtatatcntccgtgcttgggtttactatgctgattaataattcagacatgcgtgcttggtgaattaagctagtacaaaatacaaaatttgtaaggcaaaaaaaaaaaaaaaaaacccgcggcc

SEQ ID NO: 63845 - DNA, 193 bp, Oryza sativa
  Clone ID: PAT_MRT4530_65048C.1
tcggctaagagtatgacgaagagtactcaaaggcgtgcgcacagctatgccgtcaagagcacagaagagacgatgaccaacggaaaacatagctacggactgttcatgatgggaacgcaagaatatgattttgttaagaaggcactgatagaccgatgtgcttacattgcattggagacatgcactaactcta

SEQ ID NO: 63846 - DNA, 1227 bp, Oryza sativa
  Clone ID: PAT_MRT4530_65049C.1
atgcggcgggagcgaggactagcggaggagttgctggatgacgccttcaccgcctccactgacatcgacccaaacacctgtgaagtcgtccccacctctactagtgaacgtccgtgtgtggtccagcaggccacatattggtacgcgaggatgcaggccgaagaggatgcaccaaagcccgaagaggatgcaggccgcgagtacgcgtgctacttacccgtactccgtattatacaggagtactgtacgaatacgactaatacaagcctgcaggtttcagccgtcagcgtcacgcgaggtcacgggctcgtccaagttttcaagggagtcaatgcaacactgtactggaccattactgctccgttccctgccgtgaggaataaaaacagagtactccagtctggagccttcatcacaggaatttctacagtgtgttcttccacttgtcatgggacattgcagatgtcgctgcaaagtgtctgttgtcgacgctgtaacggcctccatattcctgtaatgcagaagcaagacggccaattccacgccttattatttgttccagcttccacaagatctgcagttgcacattcttatacagttacatacatactcctacaacaagtagtcaaacactctaggagcatttctttgtccaaatggaccgtcgctgcaaatgacagtcaagtaggagtatcaaacactctaaaaatggtcagatatcagcagttacagcgtgccaaggccaaacgcgacccggaaatcgcgtgccgtcgcgggggccggggcccaaggccgaacgcgtgccgggaacagctacagctcgcgatttcgatggatccaccggtggattgcccggttagcataagacataaaagcatgccaaaagttcaaacgaagataccaaaccttgggtcccttcggtcggatgacgggcgacgtttttcagttcggttcaagcaaggattacgcattccggacggcggtgaacgcttgttgctgcagataaacatggagaagaacaagggggagaagaataaaaaaaacgtcggaaaagaacgtgtgcccccttggttcacattgcagccgcgccacgagagagatcacactgacagatcatttcgcgtacttgcaacaaggaagcgtaacgagcagcagcaacaagagaaagcacaagatatgggttttggtaagactatggctaaatttgagaaaaagaatagtgagaga

SEQ ID NO: 63847 - DNA, 672 bp, Oryza sativa
  Clone ID: PAT_MRT4530_6504C.1
atggccaacctcgaggagcactcgatgctcctagtcgccatctataacaggtttgttgagctttacctcacgtgtggcgatatcgcctccacgcgggcactcctcaatacgttcccgaccaaacgacacgttgtttcgtgcatagccatagtgaccggtcacgcgaggcccgagttcttggatgaggccattctaatgttcttcggtcgatcgggacattgtttcctccacgaccatggtgacggcaatgcgaggcagttcatggatgagcacatgctattgttcttcaccacagtggatgaccgcagaagagcgacctcactagccattgggtcttacccgttgctacatgcccctttggctaacaacgtgtacaggaaccgcctccgtcccaaccgttgttgtgcggaagggaggtttgctgcgatcggggagagagaggaagagatcggcgacggggcgatgatgaattggcgaggaggaattggcagcggccgaggaggagaaagaaggagatttcaagcatggatgtcgtcgctcgcccacggggtcgcgtttggacgcgattgcccctgcgctcgctgtcagttccgctcgcaatcacgtgtgcgtaggagtaattgcatcgcctcgtttcccgtttggtggttgcaatattcggtgcagatgtgc

SEQ ID NO: 63848 - DNA, 665 bp, Oryza sativa
  Clone ID: PAT_MRT4530_65050C.1
tgaagagaaaacccaatattcctgcgtatgtttctcctcaagtaccagatatcaagacttcaacagaaaggaaaacaaatccttttgatcctctgcaaataactgaaagtcggcaattcacatatgaggagctaaagaagtttactaataacttccaacagttcattggacgaggaggctttgggaacgtctattacggctgtttagaaaacaaaaccgaggttgctgtcaaaatgctctctgaattctcggagaatggccttgatcagtttttagccgaggttcaaagcttgacaaaggtgcatcacaaaaatctagtttctttggttggttattgctgggaaaaggatcacttagcactggcttatgagtacatggctagaggcaatctttgtgatcatctaagaggtaaatttggtgttggtgatacctttaactgggtaacccgtgtgcgagttgtgcttgatgctgcacaaggtctggagtatctgcacaaaggttgcaacttgccaataattcacggggatgtgaagaccaataatgtactcttgggtgaaaatctaaaagctaacatcgcagactttgggctttctaaaacttatattagcgagacacagactcacatatcaaccagtaatgccgctggaacaatgggttacatcgaa

SEQ ID NO: 63849 - DNA, 429 bp, Oryza sativa
  Clone ID: PAT_MRT4530_65051C.1
atgaccgaatcgctctacgcattgcgacgagagatacaaatcggccctaagatttggtctattcggcaccctcgcattgcttccgaggagcccctgggtgtgagctgctcgttccccattccccagcccaaccgtacgcgcgcccgcggcgaggagaggcagataaacagggcgtacctaccaacggcgcggcgtggatcgacgaaggcggcgtccgcggctggacccggccgcatcggcggcttcgccgcggcgccccccggctacggcggcgacgaggggggagaggaggaggaggaggagaagcccgtcaacgatggagaaagccgtgggctcggatgggcttccatgtttatgggccggattctttcacgtggaataaactgggctgagttttgttgtggattgaattcgtcgacggatatttaa

SEQ ID NO: 63850 - DNA, 1206 bp, Oryza sativa
  Clone ID: PAT_MRT4530_65052C.1
atgccgccgccgccacctccgccgctgtccgccgccggcgccggcggcggcggcggccggaggcggtggcagaaacggctgagccccacactcgcgcgggaccgctgctacacccgcgccttccgctccgcgggcctccgccccaccgccgtcccgctccccgacggcgccgtcgtccacctctggctgcccccggcggcgccgcccgcggcggcgctccagcccgtcctcctcctccacggcttcggcgcgcgcgccacctggcagtgggcgcccttcctccgcccgctcatcgccgcgggcctcgcgccgttcgtcccggacctcgtcttcttcggcggctccgcctcccccgccgccgaccgctccccggcgtaccaggccgcctgcgtcgccgcggccatggcggcggtgctcccgggggccccgcaggcgcaggcgcagcggtacgccgtcgtcggcgtcagctacgggggcttcgtggcgtaccacctcgcccacgcgttcccggccgcggtggagcggctcgtgctcgtcgccgccggggtgtgcctcgaggaggccgacctcgccgcggggctcttcgccgtggaggacatcgcggaggcggccagcctgctgctgccgcagcggccggaggatctcaggcggctggtcgggctcaccttttgccgcccgccgcggttcatgccgtcctgcttcatcagagactacatcagggttatgtgcactgagaatgtcaaggaaaagactgagttattacatgctttgatcaatggtaagaagctttcagaccttccaaaaattaaccagcaaaccttgataatttggggagagcaagatcgggtctttccattggaacttggcctacggcttaagagacatttgggggatacatccgagctagtcattgtcaagaacgctggacatgccataaaccgcgaaaagccagctgagctatgtagacttataaagaactgtatcgctgatccgtctgtcaagtatcgagatggtcacaaggggtcctggaagagtgcgataaaaaggtttgctgggtcgagtctgaggaagacatcatgtatctggatgatcttacttatctcaattcatagctatgctttatttaccactcccttcgtttcacaattgtccactcttctttggagaaaatgttctgctcttactgggagactgttagatttgtag

SEQ ID NO: 63851 - DNA, 670 bp, Oryza sativa
  Clone ID: PAT_MRT4530_65053C.1
acgaggagggaatgttggtgaagaagttatattttgggacaaattctgatgactaaaagttgttatattttgggacggagggagtatcatctatctcacatttgcataaatttggcatcaaccatacccatcttttcaattcaatcttggtactgccaaaacttgtaagggatcaaaccaaacgcgttacatttgccatcttctccaagatggttcttgccatcgttaaactgctcggatgattgtccttgaagaatccggcatacagagctttctgagaaagatgtgattgttgctcctcaatgtgggacaagctacgcaagcataggcagtatatcgagttgattcaaagggatcggggtttaagatgtacgctgagagctggtcacagaaggatgaggaaaggaagagacagaggagcgatgtttgggatctttttttcagtaaaatgtcttctggtgccagtctgccagagattggacaaggaacaacagtgcgatttggcatataccgaatcattactatatttttttgcagcagattaaatgcaatgttgtccacctaaatatgcttcttagggatgctactgaattattcttcccttgtttgttacggtccttacattttgagcaagtgatatttcatcctttggcaggtccagccgcattta

SEQ ID NO: 63852 - DNA, 270 bp, Oryza sativa
  Clone ID: PAT_MRT4530_65054C.1
atgaggctcggccggcttaggtcgcgcaccgctccagtggagatcaagccgacggtgcaccatgattcgacgtccccaagtctacccgagccgggtgcccatgcgcacttagggccaacatgccaaggtgatggcggtgggcagaggttggtgatccgctccactgccatggttctcctcctcggtgcggctgagggtggagccgagccaagcctcggtctcacggcgccaactcaggcaggcgtgggaccgatccaggcggcaaagtaa

SEQ ID NO: 63853 - DNA, 493 bp, Oryza sativa
  Clone ID: PAT_MRT4530_65055C.1
tccgtggaggcgcgcgcccgcgtacgcgctggcgcagaaggccgccgccacggcggcgagcgtggtgctgcggctcatgttcggcggccggcacgcgcccgtgccggccacgctgccgggcggcgcccacgcgcagtcgctcgtcatcgagttcgtcatcaccttctacctcatgttcgtcatcatggctgtcgccaccgatgaccaagcggtgggtcatatggctggagtggctgtgggtggaaccatcatgctcaatgtgctgtttgctgggccggtgtcgggggcgtcgatgaacccggcgaggagcattgggccggcgttggtggggagcaagtacacggcgctgtgggtgtacatcttgggaccgttcgccggtgcggcagccggagcttgggcctacagcctcatccgcctcactggcgagtgccggtttgaggtcctaggaatgagaaaaaaggccagctcaatgcatcggctcaattcgagcaac

SEQ ID NO: 63854 - DNA, 467 bp, Oryza sativa
  Clone ID: PAT_MRT4530_65056C.1
gccatcaaaaagtcacagctggtactcgaaggacttgggtagcaagttgtatgttgccaggatatgtcaaagcaagagaagggggaagcaaaacaagatgaactgaatttatatttctctgaaagaacatatttaacttagcagaaacaaataagctactgagtacaaaaataaaacacaatcctttcactagcaagtgacaagttaacaagaagcgtatttctaacgggggtaaggaagctcccaacaaccaagcaagagagaacctggcaagttggtggaagaaatgccattgtttagataactaagtacggcaagggatttttgatcaagggacagtggccacttatagatattggcttgttgttgaagctgatttgcacctttagaggaaacattttttggacggttgtagataagtatgtatagaataagatgtgttcgctttcaattggtaggaatattaa

SEQ ID NO: 63855 - DNA, 565 bp, Oryza sativa
  Clone ID: PAT_MRT4530_65057C.1
atggtgtacgccgtcggccacgtctccggcgcgcacctcaacccggccgtcaccctcggcttcgccgtcgccggccgcttcccgtggaggcgcgcgcccgcgtacgcgctggcgcagacggccgccgccacggcggcgagcgtggtgctgcggctcatgttcggcggccggcacgcgcccgtgccggccacgctgccgggcggcgcccacgcgcagtcgctcgtcatcgagttcgtcatcaccttctacctcatgttcgtcatcatggctgtcgccaccgatgaccaagcggtgggtcatatggctggagtggctgtgggtggaaccatcatgctcaatgtgctgtttgctgggtatgggctcgcaccatcgcacacgcacactcacactcacacacccgcaaatgatgtcgtcacactaactttgggggtctatttgacatggatgacgtgggcgcgcaggccggtgtcgggggcgtcgatgaacccggcgaggagcattgggccggcgttggtggggagcaagtacacggcgctgtgggtgtacatcttgggaccgttcgccg

SEQ ID NO: 63856 - DNA, 280 bp, Oryza sativa
  unsure (1)..(280): unsure at all n locations
  Clone ID: PAT_MRT4530_65058C.1
ngagcgagaaancagcgtgcnnatgaacnannaccaaaatganggaaaaaaaacatatacacttntagtgattgtctgattgatcatcaatggctagcaaggtcgtcttcttcgcggcggcctcatagcngccatggtagcatctncggcgcgcantgagcgagtcggagatgaggttcagggacaggcagtncagcnggaggtgcaggacancccnctggacgcgtgccggcagtnactngaccggcagctcaccagccgggaagaggttccagccgat

SEQ ID NO: 63857 - DNA, 198 bp, Oryza sativa
  Clone ID: PAT_MRT4530_65059C.1
atgagccaggtgatagccaagccaagggatcgagtgagagtgctccacaccagggtcagaggctggtgctctgtgtctccctcgagccctcacactcacctcatctcgcgcacaacaccacgtgacagcgaccacaccactggccctgcttgcgggcaccacggtaccacacggcaaatctcgtcaggaaaacgttga

SEQ ID NO: 63858 - DNA, 942 bp, Oryza sativa
  Clone ID: PAT_MRT4530_6505C.1
ttaagtggatcgcgtgctgcgtgcgcgtacgatgtggccgaagtttgtgttcttagctataaaagtcatgtaatctcggcttccggcttccggctccggccgttcacgccgcccgaagatgatgcggcgcacgttgtcgacgttctggacgcgctcaccggcgccgtcgagcgcgatggtcagcaggtcacccgcggtggcctgctcgagcaccgccgccacgcgcgcggggctccaggtcgcggcacgtattgggagccagcaagagatgacgccggcgaaaccacccaccgctccacccgccacccgcccgacgacggcgtggacgatgggcggcggcgacaagctccattcctcgctcccctcctctagctccctcttcctcggcgtccccggccccttcccttctctccaaacgatcttgaggaggagcagcggcggcaacctccccgctgccatggaccctgggactctctgcgtttgtccacagttacgccgcctaccttgacgaccggctcgagatccgcctcctcctcccaccaccgcgctcgactctggccccgcgccgcgccgttcctcgtcatcgacagcctctcccgcatccacggcatcggggagacgctgctcatcgtcaaccacgacagcgccgccgcggtttgtccgggacaggcgcgccgcgacggtggcgttggagtagacgggcagctggccctccctatgctcccccttcgccttcccccatgctcccgccgtcgccaccgccggctgtcgcgcctcctctcctgcctcgccccgccggcctcctccccaccaggcgccccccgctgccaccgaaaatggagaatctatgacataaatactctcaacagccagtttcgtagatcgtgcttgggtcatcgccatgcgctggcgcgtcagcaagaaggttaagtgcaactccat

SEQ ID NO: 63859 - DNA, 455 bp, Oryza sativa
  Clone ID: PAT_MRT4530_65060C.1
gtgttcgatttcggtccctagccctagacccttctctgtcacgcgcccagccatgccccgagccccgcgccgccgctgccgcgccgtcgccgtcaccatcccgtcgcgccgtcgcctgccgccgcgccgacgtcgccatcgccgcctgttgccgtcgccatcgctgccgcgccgccctagccggccttgcgccccgcgtcgcgcgccgccccgtcgccccgcgacgcgccccgtgctgcgctgcctcgcgccccgagccgcccgcccgtcccatcgccgctcgcccgtcgtctcgccccgtcgccgccaccgccgtcggtaagccgccgcctccttcccttgctcggtcgccgtcgccgccccaggtgcgctacgatgggacagccgttgaggtagggccgagaaccgtgccctacatcggtgtcgccattggtaggactgccatgagtgtgtga

SEQ ID NO: 63860 - DNA, 753 bp, Oryza sativa
  Clone ID: PAT_MRT4530_65061C.1
atggaggatgtcactgcattacaaatattaaatctgaaggaaaataaacttattggaacattaccagataacatcaaggaaggttgtgcacttgaggcaatagatataagtggcaatttgtttgaggggaagatacccagatctttaattgcttgcaggaacttggagatccttgacattggaggcaatcattttagtgattccttcccatgttggatgagtcaacttcctaaacttcaagtccttgtcctcaaatctaacaagttcactggacaactaatggatccttcatatatggttggtggaaacacctgtgaatttacagaactgagaattgctgatatggcttcaaacgacttcaatggaacactgccagaggcatggtttaagatgctcaagtccatgatgaccagatctgataatgagacattagtcatggaaaatcagtattaccatggacaaacataccagtttactgctacagttacatacaaagggaattacatgacaatttccaagatcttgaggaccctagtgctgattgatttctcgaataatgcattccatggcgccatccctgagactatcggggagcttattcttcttcatgggctcaacatgtctcacaatgcccttacaggatcaattccaactcagtttggcagattgaatcaacttgagtcactggacctctcctcgaatgagttctctggggagatccccgaggagtttgtgtggaccaccgttatctag

SEQ ID NO: 63861 - DNA, 987 bp, Oryza sativa
  Clone ID: PAT_MRT4530_65062C.1
atggcgcgctccagttgcccctcgctggcggtcgagaccccctcggacactggtaacaccaccgacgacttcgcctcctccacctctcccccgtccacccctccgtcgagcatgaggaccacaagaataacaatgatgccgatgacccgaagctccccgtcgcttctccctcaccgccggccaacaccaaggacatctcgccccatgcattcgcacgacccttctctgccacgcgcccggccatgcccggagccccgcgccgcccctaccgcgccgtcgccgtcaccgtcccgtcgcgccgtcgcctgccgccgcgccgacgtcgccatcgccgcctgtcgccgtcgccatcgctgccgcgccgccctagccggccttgcgccccgcgccgcgagccgccccgtcgccccgcgatgcgccccgtgccgcgctgcctcgcgccccgagccgcccgcccgtcccatcgccgctcgccagtcgtctcaccccgtcgccgtcacgccgcgctatcgtcgcatcgccgcccgtcgcgtcccgccccgagccgcgcgccgccactgtcgccgccgccgtcgacgtctcgtcgccgcgcgtcccatcgccgcctcgcgccccgcgccgccgtcgcgtcgccccttcccttctcttcctttccccctcctctcccctataaaactccaccccctccccattttccccactccatctcccccttcctctccctcttccccttctccatgcgccgccgttgtcgtgccgccgtgccgccaccttcgaagccgccgcgtcgtcgccctggagccgccgcgccgtgcgtcgccgccttgcgccgccgtcgccgtcgcgccgctctcgcgccgccacaccgccgccttcgtgccaccatgtcgtgcgctgtgcgccgtcgtcgcgccgccgtcgccgccaccgccgtcggtaagccgccgcctcctccccttgctcggtcgccgtcgccgccccgggtag

SEQ ID NO: 63862 - DNA, 350 bp, Oryza sativa
  Clone ID: PAT_MRT4530_65063C.1
atcatcgtatcactgggagaatagaatacatatggtttgggacttgggagaggcagcactcagagttgagcatgagcagctgcagagacagaggagccatcctccaccctgatgacagcattgttcttcaggaagtctgagtaccagctagcagagcgcctcggctgccttctccgttctgcgctgctgaaatcgacggcaataagtccgtaatgccaagtgttatatccaccaaataactcgtagagatccatgaatgaccaaacggaatatcccttcacattcgcaccattcctgatggcttttagtgtggccgctatatattttgccaagcagtcaatcctctccat

SEQ ID NO: 63863 - DNA, 628 bp, Oryza sativa
  Clone ID: PAT_MRT4530_65064C.1
ataggtgtttgatttcggtccccagccctagacccttctctgccacgcgcccggccatgccccgagccccgcgccgccgctgccgcgccgtcgccgtcaccgtcccatcgcgccatcgcctgccgccacgccgacgccgccatcgccgcctgtcgccgtcaccatcgctgccgcgccgccctagccggccttgcgccccgcgccgcgcgccgccccgtcgccccgcgacgcgccccgtgccgcgctgcctcgcgccccgagccgcccgcccgtcccatcgccgctcgcccgtcgtctcgccccgtcgccgtcgcgccgcgctaccgtcgcgtcaccgcccgtcgcgttccgccccgagccgcgcgccaccgctgtcgccgccgccgtcgacgtcccgtcgccgcgcgccccatcgccgcctcgcgccccgcgccaccgttgtcttgccgccgcgccgccaccttcgaagccgctgcgccgtcgccccggagccgccgcgtcgtgcgtcgccgccttgcgccgccgtcgccgtcgggccgctctcgcgccgccgcactgccgccttcgtgccgccgcgccgtgcgccgtgcgccgtcgccgccaccgccgtcgccgccaccgccgttgg

SEQ ID NO: 63864 - DNA, 217 bp, Oryza sativa
  Clone ID: PAT_MRT4530_65065C.1
ctgttgtgtttttttttaaaagaaaaacaaatggactttcttcttccttttaatatgaacccccaatgaatcccctttccctgcatgatgaatcattccatgggccctttttaaatcccccccaacaatcttgcccatgggtccctttcctttgggctaataaattgggctattaccttgcttgacctttttggtgaactttttgtcggactccttt

SEQ ID NO: 63865 - DNA, 753 bp, Oryza sativa
  Clone ID: PAT_MRT4530_65066C.1
atggtgaaagatattgaggtcgaagttgttacgattacaaccgatgattggaggggttggggaattgatatgatcggtcagattaatccaccttcaagcaaggggcataagtttatattggtagcgacagactatttcacaaagtgggtagaggcagtcccattgaagaaggctaatggacaagctgaagcatctaacaaaagtttaattaagtttatcaaaaggaagatttctgatttccctcggcaatggcatatgaagttagctgaagcattatggtcctattggatggcttgtcatgaatcaatccaagttcctccttataggcatgaagcagttttaccatgggaaagtgtcatcggctggaggagaatagatttgcaggatgagctgacagccgatgattattataatcttatggtagatgaggtagaagatctggttcaatccagattgcgagctttggaaaaaatgacgagggataaggaaaggatagcttgtcattataataagaactttgtgcccaagtctttttcggagggtgaattggtttggaagttaattttgctgataggaactcgtgacaacaaattcggcaagtggtcgccgaattgggaaggaccttttcggatttataagcctgtgtctaagggagcttatatgttgcaagggcttgatggagaagtttttggaagagctctcaatgggaaatacttgaagaaatattatccaagtgtttggattaactcatga

SEQ ID NO: 63866 - DNA, 180 bp, Oryza sativa
  Clone ID: PAT_MRT4530_65067C.1
atggccatcactttctcccggtttgacaatgcagcagcagcaggaggcatgagacatgacctgactcagactgttgctcttccttgcgcttggcccagcacaaccatagaagcgtacaagaaaacgcccaacgtggagctgcaagaccaagtctctggtgttaacatgttgttaggataa

SEQ ID NO: 63867 - DNA, 290 bp, Oryza sativa
  unsure (1)..(290): unsure at all n locations
  Clone ID: PAT_MRT4530_65068C.1
cggcggaggaggaggaggattntcggaggaggaggagnaaaagggaggaggagtcnctgcgggcgttcatgttcatctccttctggggcccnaactcctgaggccacatccatttccatgtccattttcttgggctttgcttgtgatttttgttttcttgatttctttcttcctgccttcctcgatctccatggatcaaanacgtgaatatttttgccnacggaaaaagcatgtnatgtgaaggtttttagttttttcaaaaaaaaaaaaaaaaaaaaaaaaaaaaaaaa

SEQ ID NO: 63868 - DNA, 733 bp, Oryza sativa
  Clone ID: PAT_MRT4530_65069C.1
caacaaagcatcgttcaattcagttcacaaatcacaacaacaacagcgcgagaaatttaaagaggagatcatcggatcaatctcatcaatggcgggtgcagcgaaggcgtcgtggatggtggcgatgagcgtgggcgccgtggaggcgctcaaggaccagggcggactctgccgctggaactacgcgctgcggtccatccacaaggcagccaaggccaacgccgccggcgtctcgcagggcaagaagctgcctgcctccgcggcggcggtggcggagaggaggagagcggagaaggccgaggaggggttgaggacggtcatatcacttaaagttcttctgaagcaacttaaagttatcaggcatgcatggatcttggaggaatcagatgtgcagtcagggaccatagcacaagacaggcgtcttctactggtgctaccagcaaatgctggaagccgggaacactggcgtgttcaaaaagtacgcagctgtatttcacttatttacggcgccacattttcatgccgtttgtgccaactatcccgagctagtgaatacagcttggcttcacacaacactggtgacccgctgacctgctcgtacctcgtaccgtcgtacggcacagcatttggaattaaagggtgtgatcgatactgcttgctgctgcagcaactgtggctgcaagagctaaaaatggctgcagcggcagcagctgaaaaacagccacagccatag

SEQ ID NO: 63869 - DNA, 1038 bp, Oryza sativa
  Clone ID: PAT_MRT4530_6506C.1
atggcggccccgggcggtcgatggctgcggcctctgctgcgtcgatggccgccggcgccggacgacaggagcggggagacgacggcgcgacgcgccgagtcaccgagagcgtcgacgtcatcgttgacgagggcaccgctaccatcccgttcccggcgaccgccgccgccgtcggtaacctccgcaacggcggcatcagaggagttggagcagcgggtcgttggggctgtggaccacgatgaggagggtgaaggcgaggacggccgccacaaagagctcgaagaggaggttgccccccgaccgcagcgtggcgcggaggtcgatcccgatcccggcgccaccacgcgccgcccctcccccgccgccgcctcgtgggcctcgtgggcggcggccggcgggggagccgctgccatgaacgcactcgccaagttcagcccggaggtgagccaaccaaacacgcccctatataaagcccgcgaccaacacgcaccgcaccgcaaaaccaacaccgcggagtcggaagggcggcggcgggctcctgtcgtgcctgccgtcaggaagggcggcggcgggtcgacgcgctcaccggccgcatcgcgcaggagagcctccgtggcgagcgccgccggctctcctcgcccactccctcgggctggggctcctcgcctccgcctccacgtcgggcctcctcgcccgtggcccggccctcctctggacctgcaacttccagacgcagctcacctccgcgctcgccgtagatgggacgccgcctccgcgctctccacgctgtccaccggcgcctccgccgccgcggagcttgagagcccccagctcgagctcttcttcgccgccaccgacctccacgtccacctcctctgctgggaggacaacgccgtcgttgaggccgccatcagcccgtcacgcgcgcgaagaagagcgcgtcaccatcgcgacggggagcgcgaggatcgctcactgacgccgccgctccgccactgcgctcccccgacaacgccgccgattcgcttgctcccctga

SEQ ID NO: 63870 - DNA, 583 bp, Oryza sativa
  Clone ID: PAT_MRT4530_65070C.1
ccacgcgtccgctcttcgtcttcgccaacgaccgctccgtcgtcttcgaccacaggacgggcaaggtcgtccgcgagctccccaagctcgccggcggcgggcggaaccacccggcgtcggccatgtcggcgatgctcccgctcgacctccgcaacctgacccgcggcgccgacccggagccggaggtgatcgtctgcggcggcgcgctcaagacggcgttcaggctgggggagaacaacacgtaccagccgacgctccgcgactgcgcccgcatcaacctaggcaagatcgacgcggtgtgggcggtggaggcgatgccggtgggccgcgtcatgggcgacctgctcgtcctccccaccggcgacctgctcatgctcaacggcgccgccaaggggagctccgggtgggggttcgcgcggcagcccatcctgtcgccgatcctctactcgccgcggcacccggaggggtcgcggctccggccgctggcggcgtcgacggtggcgcggatgtaccactccaccagcgccgtgctcccggacgcccctgggctggacagcggacgggacacgaacggggggggcaa

SEQ ID NO: 63871 - DNA, 685 bp, Oryza sativa
  Clone ID: PAT_MRT4530_65071C.1
cgccaccaccaccgactccgccgccgctccccggcaccgccacatccctcgccaccgctgccgctaccaactccgcctccaccaccaccctcgccacctccgccgcggcgacggcacccagaactggtcctcaccaacaccatcctccgcggcgacggcggggccaacctccttccggacggcgacgagctctggacggcgggccgcaatgaagccccacaacgcgggagcgtccatgcggccggcggccgcacatccaccggagcgcgccacggacgtcggtgggcgggggctccgcggactcggcctccgcgacggccacggagagcgccgcctcggcctcggcgaggcgcgcggggacggcggcctcgcgggcctcgagcgccgcgagggactcggagaggcgctcagcgatgccgtcccggcgcgcgcggagggcgtcttcgtcatcggcggcgtcgatggcgtcttccagggcgccgccgctctgctcgccttcactcggaccggcggcgctccggtcgggatcggcgccgaccacgcccgccgccgccgccggagctcgcttgctccgccgcccacccgcgccgtcctctgcccgggaaggagagagaggaaagggaagaagagcgagaagggagagggaagaaccgaagaagagagagaagggagagggaagaagtga

SEQ ID NO: 63872 - DNA, 1954 bp, Oryza sativa
  unsure (1)..(1954): unsure at all n locations
  Clone ID: PAT_MRT4530_65072C.1
tttgtagagagagagcacacagacaacagggggattgttagtactgggggcctttcaaaaaccacctgcanaggaagagggagaagaacaatggcctatgtcggaagaggagagcaacgacgatgccggcgagcagatgccgcagcagggcggcatcaagaccatgccgttcattctcgcgaacgatttctgcgaccggttcgcgacgatcgggttcaatgccaacctgatcacgtacctgacggcggagatgcacctgccgctggtggaggcgtccaacacgctcaccaacttccacggcgcgtccaacctcacaccgatcgtcggcggcctcatcgccgactccttcgccggcaggttctggaccatcgccgcgggctcggtggcgtaccagctcggcatggtcggcctcaccgtgtcggcgctcgtgccatcgctgcgcccgccgccgtgccgcggcgaggccgtggccgtggcaggggaagcttgccagcgcgcgaccccgtggcagctgctcgtcctctacctgtctctgctctgcacgtccgtcggcaccggcggcacgcggccgtgcgtcatggcgttcggcgccgaccagttcgagctgggcaagccaccgcggcggcgacccggcgaggccggcgcgccgaggtggagcttcttcaacctctacttcttcggcgttgagctcgccaagctggtggccgtgacggcggtggtgtacatccaggagaacgtggggtgggggtgggggctcggcgtcccgaccatcgccatgctcgccgcggttaccgcgttcgtggcgggctacccgctctacgtcaagatggctcccggtggcagcccgctgacgcggctggcccaggtcgccgtcgcggctttccggaagagaaacgtggccgtgccggacgatcctggcctccttcacgacgacaaggagctcgacgccggcgtctccaccaccggccggctgctccacaccaaccagctcacattttttgaccgggctgcggttgtcactgacggcgacatggagggaggcggcggcgcacggccgtggcggctgtcgacggtgcaccgggtggaggagctcaagtcgatcatccgcatgctgcccatctgggccgcggggatcctgctggtcacgtcggcctcgcacaaccacagcttcgccatccagcaggcgcgcaccatggaccggcgcgtcacggcgagcctggagataccgccggcgtccatgctgatcttctccaacgtcgccatgctcgctaccctggcgctctacgaccgcgcgctggtgccccggctgcgccgcctcacggggcaccccgccgggatcacgcacctccagcgcacgggcgtcggcctcgccatcagcgccgtgagcaacgccgtggcggcggccgtcgaggggaggaggcggcgcgccgcggcgagccacggcctcctcgacgagcccggcgccaccgtgccgatgagcgtgctctggatggcgccgcagtacgccatccacggcgcggccgacgcgttcatggacgtcggccgcatggagttcctgtacgaccaggcgcccgagggcatgcggagcacggcggcggcgctgtactggctgaccatgtcggcggggagctacatgagcacgctgctggtgacggcggtgcacgagaggaccagaggcgaaggggagtggctccaggacaacctcaaccgggggaggctggaccgctactactggctcgtggtgacgctgcaggtgatcaacgtcgtctacttcgtcatctgcgccaagctgtacacctacaagaagctagaaacagtcgatggagtgagcacaggggagagaaatgacatagttgatgatcaggagaatgcaggggagagagatgagaaaggaagcgatgtaaaagatgtagagcttcagcctctgctactatcggatgtaacgctcccatag

SEQ ID NO: 63873 - DNA, 359 bp, Oryza sativa
  Clone ID: PAT_MRT4530_65073C.1
gctgatgcgggctgtaagacgagggctccgtctcgttcgtgagcgactgctccacgcccggggaggacacgatgcatgcagatcgctgctgctgcgagaggatccatgcaggagctcatcaaggcctctcggcggcaaggcctggtaacctcggcgagttcgtcaccgacactctcgacaagagcaaggtcaccagtcacctccgacggggccttctcccagaggtatctgaggtacttgaccaagaggtacttgaggaggccaatgtggctactggctacgtgcttgtgtggctaacaaggaccgcagtgtctatgagctcagatgcttctactttgcttagaacgaggccgaggagg

SEQ ID NO: 63874 - DNA, 569 bp, Oryza sativa
  Clone ID: PAT_MRT4530_65074C.1
atgtcagaggacggcacgggtgggcggcggagcaagcgagctccagcggcggcggcgggcgtggtcggtgccgaccccaaccgtagcgccgccggtccgagtgaaggcgagcagagcggcggcgccctggaagacgccatcgacgccgccgaccacccggacgccctccgcgcgcgccgggacgccacctacaccgcgctctcccctcccgacgccgtgctccgcctccttgcctccctcccctgcgaggacctcgccgcccgctccacgtcgctcgacgatgacctagccgccgtggacgcatccacctccgagtccctcgcagcgctcgaggcccgcgaggccgccgtccccacgcgcctcgccgaggctgaggcggcgctctccgtggccgtcgcggaggccgagtccgcggagcccccgcccaccgacgtccggggcgcgctccggtggatgtgcggccgccggccgcatggacgctcccgcgttgtggggcttcattgcggcccgccgtccagagctcgtcgccgtccggaaggaggttggccccgccgtcgccgcggaggatg

SEQ ID NO: 63875 - DNA, 477 bp, Oryza sativa
  Clone ID: PAT_MRT4530_65075C.1
atggcagcaaccgccgctgccgcgaggaggaggagggtgcgcggcagccgccgccgccgaccgctcggcgtcgacctggccaaggcagcggccgggaggagggcgcgctcgtcctcagcgttcttggcagcggctcaagaaagggcggcggggtcgatggcgccgcctcgcctcgccgtcggccgctcgcgtggcggtggagctcggcatcgacctggccaaggcggtggtcgggaggagggcatgctcgtcctcggtgttcttggtggcggacttgaaacaccaggaatcgaaggtgccagagggcatcactgccacgcgcatgccggctcggttctctggcagtcgaaagactgtggttatccaagaccatccacatcaagccgtcagaaatacgacttagtcatgtcgctgcttgaatcaatgcccactaacgacaattggggaaagaagccccaaaggaggctaggccactga

SEQ ID NO: 63876 - DNA, 1176 bp, Oryza sativa
  Clone ID: PAT_MRT4530_65076C.1
atgccattgtcattgtcctccaacacaaggaacaatggaacatggctatccgccacatatataagccagacaggccagaagatcaaagagatcatggccggaccaaaacatggttgtgatgccaagaaacttaacgaaatgcttagggaggaacggggacagttgcgtgaacggcatcaaacgagagtagtaccaaggcgaagaagagaagggcctgcttcagtgcaggggcaggtgaaggtgaaggggtgggagatcgtgatcaggggcgagatcacctcggacgacatggcggcggccatggggttggtcgtgggttctccgttctgcgcgctcgccgcgaagagggaaaaattgttgcagcaagacgtgcatgaagatgaatcaaggctcaactatgaaaattcagtccgtagaggcaatgccattgtcattgtcctacacaaggaacatggctatgcgccacatataaatgtacagtctctccagctctctcctagtgtcaggacagaaggccccatcaccatctgtgcattttgtccacaaccacgagaatggaaggagataatcctgaggcgaggaaagggaacgggtgacatagctgaacaagttggaggatctaaacgagtgatttatgaagaccggattcagactgccctggagagcgagaaggatcagagtcctcatcaggctgtcgtgaagagcgagaaggatcagagccaggctgctatgaagagtgagaaggctgatacggagaaactcattcagttcatggaagcaaattatgagaagtatgttgctaatgtagattccttcgaagatttctaccatgccatcgttgagcttatcgaaaagttttgcgaggagcgcggccaggtgcagtacaagataccgtcgaaaaaagccctgaaggaagcgtatgagaagcatcacacggagcagggacagttgaagagggaggagttcatcaagatcggcaaggaggtgatcaggcgggacagcttcaccctgggcaaggcgaccatggacttcatcatgtacctgttcggcgccccgctgtgcgcgctcgccgccaagaggatcctccccggcctccgctggatctccgacgacgtcgccatccctctcgccacctccgcctccgtcgcctacctcatcaggaccaagcaactctga

SEQ ID NO: 63877 - DNA, 231 bp, Oryza sativa
  Clone ID: PAT_MRT4530_65077C.1
atggaggatctgctggctgctgctgctgctccggttctcgccattgttggtgtcggcgccgcctgcgccgatgaagaatcccgaggaggcggcaagcacgccgaggctcggacccagcttcgtgggctggacaaagcgggactcgacggaggcggtggagctcgcctcctcctcctccaacaccacctcgtgcagctttcccctcggcgcgccggcagtttctcgttgtaa

SEQ ID NO: 63878 - DNA, 2625 bp, Oryza sativa
  Clone ID: PAT_MRT4530_65078C.1
atggaaaagcagaacctcgatttcggcaaaatcctcggcgacatccatgagtcgctggtggcgttgaacaacaagcaaacggagacgcaagcgatcgtgaacaagctggacgcggggttcggcggatggaaaccccaagtggagtcggcaatccaggaactgcgggaggaggtgggagatctccgccagcagctggacctcgtcggcaagacgaaacaagcctctccgacgacgtcttcccctcgagttccgttgacggacgaggaaaggaaggcgccgttgctgcccacaccgccgcttgctgctcaccccaccgcagcggagggcgatggcaaatggaccagtggccacggcattccacaaaatttccggaggagggcatcgggggtggtcaccaccctgatcccaactccgggcaagggtacgttcgaaactcatgcagttcctatgaattccttggaaaattttgagttcgagggtggggatttgagttctgagagctatgggcgacaatataatcatagagttccgaagttagattttcccaaattcgatggaactgatccccaggactggagaatgcgatgtgagcattattttgatgtgaataacacttatcctgggttatgggttcgcattgctacaatttacttctcgggaagggcagcatcgtggcttcgatcgtctagggctcatgtgcggttttcaatatgggaagatttttgttctgctgtgtcggctaagtttgatagggaccagcatgagctcttgattcgccagatggattctattagactagttgttgttaatatgaagtatttgacacatcgatttattgagggattatgtagagaaattaggaatgctgttattctgcaacgtcctcgcgatttggagtctgccctggctgttgcttctttgcaggaagaggtgttagaggtgtccacgacttctggatctaaagaatttaaaagatctgacagtggcgcatcagccagaacaaatttagcctttaaaggagctatgcctttacctttgcctcctgggcgaactctgtcaactttgggcaaagacttgcgaactgacaacaagaaaggaccagaggttgttcgctcttcggggggtattgataaagtgtcaagtctgaaggcccaacgccgagctcaaggcttatgttatatttgcactgagaaatggtctcccactcataagtgtgctagttcagttcaattgcatgcagttcaagaaattttcagtttattgatgaatgaggatagtgacagtttggaacactcagtagcagttgaggagactcttgatcagtcattgatggcgatatctttgcaggccattcaaggttctgaacacagtggttctatgagaatgttgggttatgtgcaaggatttgaagttttgattcttgttgattctggcagctcggctagcttcattagttctaaggtggcagtcagtctgcaaggcatggttcctatcaagaaattagttcaggtgaaagtggctaatgtcacagtgcttccttgttctgctgagatactgaattgtcagttatatttgtggaattctgacaccgagcaagcatttcaaactctgaaacatgctcttgtcactgccccggtgttggctatgccaaattttgatgaaacatttgtggtcgaaactgatgcttccgacaaaggcattggggctgttctaattcaaaaaggtcacccgattgccttcttaagcagagctttgggtcctcgtcatcagggtctgtccacgtatgacaaggagagcttggctattatgttagcagttgaacattggcgaccttatttacaacatgctgagttcctcattcgaacagaccatcgcagcttgtccttcttggatgatcaacgtctcactactccgtggcagcacaaggctttgactaagttgcttgggctgcggtataaaatcatctataagaagggttgtgacaatggtgtagcggatgccctttctcgtcaccctttacctgattctttggaactctcggccctgtcagtggttattcccgattggattcaagaagtggttgctggttatgcttctgacccggatgcttgcagtaaagttcaaacattgtgtatcagtgtaggagctgttcctaatttcactttgaaagatggtgtgttgtattttaaagatcgcatgtggattggtcataacaaggctgttcagcagaaaatcattgctaatttgcataccgcagctattgggggccattcgggtataaatgtcacttatcaacagattaagcaattgtttgcttggcctcaattacgagctacagtcacagaatttgtgtcggcctgttcagtttgtcaacaagccaaatctgaacatgtgaagtaccctggtctgttgcaaactctaccagttcctgagcactcttggcaaatggtttcattggattttatcgaaggattgcctcgatcagcttcctttaattgcatattggtggtagtggataaattctccaaatatgcccactttgctcccaccatttttccgtgcggtctgacttacggaccgcatggaaacaaaatggagcggcgtccagaaaaatcaatcctgtaa

SEQ ID NO: 63879 - DNA, 258 bp, Oryza sativa
  Clone ID: PAT_MRT4530_65079C.1
ccctcttcttttttttttttttttaagtttaatcgggggggggcctcttctaaatgtgtaacttactcacaaaacagaaatgcgtgttgaaaatctatgcaactgtttacaccaaaaggggaaaaaaacgggtacctcgcaaaaaggagtattacttttcatggttaagagacaattgaactacgacccattctgcattacaggaagggagattaaaaatactgcagtttcagcgtttttgaggtctgaacagacact

SEQ ID NO: 63880 - DNA, 390 bp, Oryza sativa
  Clone ID: PAT_MRT4530_6507C.1
atggaggccggagtgtttgcaaggttcctgaagatccttgagttcctctccttccataattcccatgcaacaagtataattatcgacttgagagctttctttggcatgttttgtgctgagggctgcccaaaggttgataaattctcgaaagtgctgcgtagttgtgaagagctgtggttgcaggtctgcgatccacttgttcccgttagagctccagaacttagccttagcgcgccatttccaatagttatttccgtcgccacattgaagagctttctatcagtctcatcgcagggcaccggcagtcctagccaggcaatggcgcagaaatacttctggtatatgatggttacagagttcatccgcaagcgcacggatataccattgtag

SEQ ID NO: 63881 - DNA, 342 bp, Oryza sativa
  Clone ID: PAT_MRT4530_65080C.1
atgtgggtcgttgaggccgtagagatggacgcggagcgcggcggtggcggcggagaggggacgcgcggcgctggtgtggcggaggcagggcgcgaggaaggaggagaggctgcagtccgcggcagcatcgaggatgcggagcttgatctcgacctccatcacggggccacggcctcgacccccgtgggcaccctcaacacgctcctcgccgtcgagctgttgaagcggatggacagaagggcgagggcctgtccacagactgttgctcccaccatctacacctacagcatcctcgtcgactgcttaccgtcgcgccgcgcgtacccccaccccccgacctaa

SEQ ID NO: 63882 - DNA, 846 bp, Oryza sativa
  Clone ID: PAT_MRT4530_65081C.1
atggggttcggaggtggtgtggtgcagattctcaaggtggatgggattgctggctggctgatcggtgctggacctgctccttccttctctcgctctctcacatgtgctttgctttgctttgcttccggtgcttctcaatctcactcatctcgtggtaaaccaacttgtgtcaagtgtcagctcgatcgtgatgaggttttggagcacgccgtgaaatggagagcacgaaagatacagaaaacctcctttagaggctcctttggaacaagggatttggttagggctatttggattcaaattacgtcagagcctcttagtttgaaggatttgggcttgcctccaaagtcaccacacctctcatcatcagctcatcgatcagtagtagtaccaccaccaccaccaccacaaaccgaaggattgaattctcctcatcttggtacagctggagtagcagccatgcttggcccaagtcaatgcgaaacaacagcggctcgtgataagttagcatcacatcagctcggggagagagaggcccccagtctccccacccacgctagaccattgaagaggtggcgagccggcgagcgccctccatggccggcagaggaaggcgacggcgacgtagtggctgctgtcatcggaacccctcctacgctctctccacaccaacaacaagtagatccatatagggcggcgccatggctgagtatccaactccatgtccgtgagagagatgaagagccagcggatggagaatcgcgttccggcgtcgcttccaaacgaaaggtccagtcttgcgatgtaaaaacactcgaacatcgaaagcaaccggtctctcctttcctt

SEQ ID NO: 63883 - DNA, 985 bp, Oryza sativa
  Clone ID: PAT_MRT4530_65082C.1
cgccgctcctcccctcctcgctgccgcccatcgtcgttccgccgcccaaatcaaacccaagagaaagagaaagagaaagggaaccccctcttccttcctccctcccgcccccgcctccccccatggcctcgagctcgcgcggcggcggcggcggcggcggcggcgtcgggcccgacgggggcgtcggggacgggccgacgacgctcgacgagctgtacaagatcaacgtggtgccggccgagctgcacttcaagttccgcaaggagctccagggcctccgcgtcggcctcaacttcgagttctataatcttgaggtgaatgattttgaggcgaaggtagttctgaagcctctggactatgaacggaagtggaagttccactacaagcccatcagcggtgatatacagcttctttccaagaagataccagtaacgaagtttctcaatctacaggtcggcattggtcacaatttccatctcaatgccactggatggaagtggaagctctctacgtgtttggggggagatggtgtctctcagataagaaacaaatcgacactcagcatgttcccagggtttgatttgagggtcggttggagagctgaatatgtgcttcctgagattcatggggctgttggaacaggagaacctgccttcagtatgaactacgggcgattgcaagcatcaatagatcgagttgaggctatcgtaacacagtcagatcggtattgaccccttacaaggtatataccaggagggtgaagatgatacatctcaaatccaatggagttcttctcacttgagtcacttctgtattttgaggttttgtatctgatgtacagtaattagcgaagtgttattctaggaacagaggttgtccaaacccttgcacggcacttgttttagcaaacatgatgaataatgttcctgatgattgtgtttggcacattcactcctcctgacatactgaacttgtgacttagatt

SEQ ID NO: 63884 - DNA, 470 bp, Oryza sativa
  Clone ID: PAT_MRT4530_65083C.1
cggcacgaggggaaaacatatggcttgacgggagtctattgcctgtgaacatagcagagtttttggagaagttgccacgatgttcttctagtccattgaatatcttgagcttgagcggcaataacatgactggaacactaccaaaatcaatttggcagtttaacaacttagacacccttgatctttccaacaacaacattagtggagctatagcaccgggggtacagaacctcactcggttggtttcacttattcttagttctaacaaactaactggacagataccaaagctaccgaaaagcctccaggtattggacatctccatgaacttcttgtcagggaatttgccatcaaaatttggtgctccacgtcttacagaacttattctgtctaacaatcgcattactggtcatgtttctggatctatttgtaagttgcaagacatgtatatgttggatttatcaaataat

SEQ ID NO: 63885 - DNA, 642 bp, Oryza sativa
  Clone ID: PAT_MRT4530_65084C.1
tgcccctctgtacacgcgcgcgctcctctcctccacttcttctcttcctactacaaaaataattcctctctctcccggccagagtaggcgaggggtggggcgggccgtggccgaagcaggccggcggagcggtggcggccggagcaagcgaggggcaaggctgagctccacacgcatctctagcaggcggcgaccacggcacaaacgaggggtaaggctgcagaggacgatgacaacaacgccggtgccgcaggtgagaggctggcctcggtggcgcccgtcctcgccactgacgtggccctccaagccaccgatgtccttgtcgttgtcgtctttcacgatggacctaccgcggatttcctctgctcgatctccagcacacttgccttcttcctgccggccgtcactatcgacttctccacgctcccctccgcctcctccccaccaaggtcgccacccgccgtcggttcgctctgcccactgcccgcctcgctcgcttgctccgtcgttctcctcgccgcccgcccttcctttccacgcagatccaagccgacgcccaatggcggcggcaacggctgtgaggcggcaccgtggcgcgatgagaaagaggagggagagccgacaggggagagggaatgacat

SEQ ID NO: 63886 - DNA, 216 bp, Oryza sativa
  Clone ID: PAT_MRT4530_65085C.1
atggcgaagatcgaaggagcagaagcttccaacccagatcacaagaaaagcagagccgccatgctgttcaacaactcaggagagattcagacaccgagaaaagaggaagaggaagtggaagatgcagaggaagaggaagagaggtcaggtcagaccttcttctctaactccgacgacctcctcttcttctccgacaccggtgacaccctaggttag

SEQ ID NO: 63887 - DNA, 240 bp, Oryza sativa
  Clone ID: PAT_MRT4530_65086C.1
aaccaaccatataaaaaataaactcaaacggacgaaatatgtggcctgtagaattttccaaagctctaccaaaaaacttctctcctcgaaaacacaatcttgcaagcggaatttggaggttttagtatcgccaaacccggcgttgccagggagaatcggatgtaacattttctgtagattatttgcctgattccgagtccagaaatagaaatggaggcgaggggtgggggggaggggggc

SEQ ID NO: 63888 - DNA, 168 bp, Oryza sativa
  Clone ID: PAT_MRT4530_65087C.1
atggagatggagctccagggagtcgagcacgtcgtcggactgaccgtggcgagttcgactgagggagatgacagtggcagccacggacgcggaccaaagcgtacccggcataagtggtgtcgacaagggttttgtggtgttgatctgagaaggatgccagcagtataa

SEQ ID NO: 63889 - DNA, 451 bp, Oryza sativa
  unsure (1)..(451): unsure at all n locations
  Clone ID: PAT_MRT4530_65088C.1
acagggcaaatatcattgttgactcttgggtaactcaaaggacaagcccttgaaggaataattgatatacagtttgtgaacactgaatatcatattgcatacacctcaataactcaatctctatccacaaactgtgatattcaattctacacaccaacatgaacaccaacgcccttaaatatacgtaagatacatatatacactgttaatcaaaccgaattacatccatccatcaacttaacattcatgaacatgaaaagaccaacaaattagtgcccttccaacaaactgaacatttacctgggaaagtaatgcgaccggccaaccaggggaccatgtatctttaatttcttggtcatcgtctaattttttggttttaaattttaaacttgtttcaaaggcacgannacattattaacnatttaaaaaaaaaaaccaattcagtaatgtc

SEQ ID NO: 63890 - DNA, 1751 bp, Oryza sativa
  Clone ID: PAT_MRT4530_65089C.1
atgatgacgccgccgaagactcttcgcatcgaggactcgagctctagcggcaccggttatggcagcacaccgcgtcaggccgtggtggagcgcgtcgtgcccaattccagcgtcgtggagctgccgatgctaaccagggctaactatcatcagtgggccttggttatgcgggcgagcgtgcaacgcctcatgaaggagtttgagaacatggcgttccgcgacggggagaccgttggtgactttgtgatgcgcatcaacgggctcaccgcaagcctgcgcgacctcggggaggagatggaagacagtcgcgtggtgaagaaggtcgcgcgtggtcccgaagaggagctcgtcggacgcctgcaagtggcggaggacgccgacgctgaagatcacgtggaggcccatggcgagcagctacttctcaccgaggagcagtgggaggcacgtcggcgccagcgtcgcgaaaaggagcgtgtgcgtgagggcggcgccaaggacgacggccgaaacagcgacaatgacgacggcggcagcagtgtgagctccggcgggggcggttacagtcggcgcagctgagaggggcccgacggcggtgtggtcaccaccgacgaggcgctccgagttgtgcaggctgctgaccttgccggcgtgacacacgttgtggtggtgtacgacctgggggccggtgaccccagtggtgagtcgacgtacaatgtgctcgacgggttcacgtccttcttctcgaacctcttctcccgtgtgcagtccttgccactaaacgagttcttggctaaggtggtggagaccgacgtcaggtacactctcatcaagacgtcactcacagatgactacagccctgagagcacctatggcttggtcctggccaaagagggcgcgtccagcactacttcctcaacagaaaccggcaaggtgtccaagttgcagattgctggtcttgtggcagatgtcttctccaacgtggcagtcgcggagaacaaggttgtccaagtttccactagctcatcagtaacatccaagaccatagaggaggctttctcagctatccctgaggacagtagaaggaaggagtaccaagatgctgttgcaaaagcacaggcagaagaggagactcgggcttcgcagcgaactcgtcaggcagaagaggacactactacggtcaaagccggggggaagaagacgccctctgatgaggcagctgcaagtgaggcgcaagcttctctggagaaccttctgagcagagccaaagggttcggcacggacttctcatgggagaagctcagcacacaacttgcaggagtggccactcaggactcagacgaggtggaaccaaaagcgcagatcgccaccgtgagaggccaggcaaaagcaaagaagctggcaccacagagagctgttgtgaagcccgcggcgcagaagacaagaccaacaccaaagcagccggaatccaagccggatgtgaggcccgtgtttgggggactcttcaagcaagaaacaatctttgtggatgaggactgagctaatgcagactctgccatttttcttaatcttttgtatgctatatctatgaagctcttggtgtattcttggaaagtgaatgagtgacagttgtataaaattggctgcaaaaccgtataacattctctgcaggtgagaattgttcgcttaaaaaaaaaaaaaaaaaaaaaaaaaaaaaaaaaaaaaaaaaaaaaaaaaaaaaacctgcagcccgg

SEQ ID NO: 63891 - DNA, 962 bp, Oryza sativa
  Clone ID: PAT_MRT4530_6508C.1
atgagccgatggtggggagcaagcaggcatcaagggaggaagatggagggcaggatggcaagctcgagctcaccgattccaatcccctctctctcgcctccgtcttctcaccagcggtctcctccccttactccccgtctccttgctcatgcttgcaggaggaaggtgatgaaagccataagcctgaaaggcgtgctgaggacagagatcaacccgtcgctcgacaaggtgaccgtcgtcggcgacgtggacagcagggtgctcgtcaagaagctctccaaggtcggcaagatcgccgaggtgatggcgccgccgccgtcgtcaacggcggcgccttcggaagaaggcaagaagagcgacggcaatggcggcgagaagccgacctcgccggcggacgagaagagcgccgcgcgcaaggacgaaggcaaggacggcaaaggcgacaagtcgtcgtcggcggcggcgtgcaagcaggaatgcagcaagtgcacggccgggaaggaagccgccacacgcgccgacgaggctggccgcgccggtgggaagacggcgtcgtccaaggacacggtcacagccaagaacagcgacgacgtcgacggcgacaaatccgaaccggcggcggtggcggtggagtaccagtaccaccaccactacagccggccggagccggccatggtggtgccggttcacctcccgtactacgccgcgaacgcgacgccgtactatgccggaggatactacccgatcccgccgccgatgccggcgatgctccgtcaccctcctcagctccggccgcagccgtcacgcttcgacgaggactacttcaacgaggacaacaccgtcggctgccacgtcatgtgaaaccgcaaaacacgccaagctcctcctggctcccgccatgtacaaccgatcgatcaccaagaaatcagcgaccaccattcgtttaaaaaaaaaaaaaaaaa

SEQ ID NO: 63892 - DNA, 363 bp, Oryza sativa
  Clone ID: PAT_MRT4530_65090C.1
atggccagtggccggtgtggatgtcaggatccggacataggagttctgccgatgccctctgatgtgcggcgacaagtgcgtacaccggcgcgagcatcagagagggctgagcatagcgggatggagggttctgacgggggagtgctcaccggagatgtgcccttccccctcatctgcggtggatccggagttggggcgggcttggtgcggcgctgggacaacgaaggccggcgactcgacggtcatggagattggaggcacccccaacgtgccgtgccgatcgaaagcaccagatcatcccggcaaagggcgacggacggcggttggacggaggccagcgatgcatcatgtcctcgttcatga

SEQ ID NO: 63893 - DNA, 1257 bp, Oryza sativa
  Clone ID: PAT_MRT4530_65091C.1
cggcacgaggcgcggcaagcggaagaaggggaggcagatctccctcggccaaccccaagcagatcccgacgatgctgcccacgacggcgtccaaagggcgcggcgccgcccgctctgcgccgccgctcttcggcccctacctccgccgcatcgtcaagtggcaacaaatggatatcgagtacacattttggcaaatggtccatctctgtacttcaccaaaagtagtctatcagcacaccaaatatcacaagcaaacaaagaatcagtgggctcgggatgatcctgcttttgttgtcattctaattcttttccttgtgtttgcaacatcagcttactgtgcagcgtatggagagagtccttcacatgctgctttaacaatcacttcagttgtgcttgtccatttcttgtttgctgggatagttctggccacactttgctggtttcttacaaattcttacttgagggaggaacctaacagtcatgtggttgagcaacgtgtggagtggctctatgcatttgatgttcattgcaactcattcttcccagcctttgtcatcctatatgtgcttcaatattttctatcgcctctgttggtcgcacatggcttctttcctgctctattatcaaacctcttgtttgtggtggcaatttcttattatcactacctgaattttctaggatatgatgttcttccatttttggacagaacaacatttttcttgtacccgattgggcttgtcatcattctctctccactgatgatactcatagggttcaatccaacaagatactttttgagcttgtacttccgttaaggtcgataactagaacagtaagagaagactggtgacaaaactaatggcagattgggtacacactttttactctagcttcttaaatctttgtgtgaatttgaggagagtgaggctcaggaaaaggtcgatttgttcttgagatatattactgccagcgtgggccacgggcacaggccttttggttggagcccattttggtgtcaacttgttcataatatgtattgtttccattgattaaagagtcaaggaccagtgtacaattttagtgggaaccggaacttaagccgattgtatcgaaggggcaccaacattgtaatccacctgcctaagaatcatgagtttttagtggcatatttcctttgattgcagatagcacggttaagcatcagggcgtgggttattgccttgttggtttataagaaaaaaaatagcattcttcatt

SEQ ID NO: 63894 - DNA, 795 bp, Oryza sativa
  unsure (1)..(795): unsure at all n locations
  Clone ID: PAT_MRT4530_65092C.1
gtcagtagccgggccccacccttctcccagatctcccgttccctccgatctcctcggcggcggcggcggcgagcggcggatggccagccggcgggagggccccctgatgcgcggcggcgcgggcggcggggcagggcagccgctctcgcgcgggtcgcgcatcgcggcggcggtcgccgtcggcgtcgcgctcggctgcgtgtgcgccttcctctaccccgacggcctcctctcccgctcctccgacgccgccctccattggcctcgccaggctgactcagttgcctgtgagacttctgagggagttaccagcctaaagtcacatgtagtattgttggagaggaaaaatgctgaatttaggaagcagattaatgaactaacaatgaagcttcaattagctgggcaaggaaaagacgaggttctatataaggctggtccttttggtactgtcaaggctattagaaaaaatccaacagttatccctgatgaatccataaatcccagattggccaagatattgcaacaggttgctataaagaaagaactaattgttgcgttggcaaactccaatgtgagagagatgcttgagatgtggtttactaacatcaaacgagttgggatttcaaattatttaattgttgcattggatgacagcactgaaaccttttgcaagtctaaaggtgttccattttataggcggggatccctgacgaagagttgancatattggaaaggtaggtgggaaccatgctgtgtctggactaaagtttcgcatattgaggggattcttgcagc

SEQ ID NO: 63895 - DNA, 371 bp, Oryza sativa
  Clone ID: PAT_MRT4530_65093C.1
aggcacagagacaagaaagaccaaacgcaagcggcaagaacgcgcagggccgcacgccgaagacgaagcacagaaggaaagcacacgaaatcagcgccgacgagacgccgcccaaacgcaccgccagagcgggaagcgaccagacactggacccgacagcgacgagaaaaggagcctccagggcgcgagtagcaggagagaagggagacgaaggagagggaaagggaggaagggcgaagggaggagaaggaagagggggggggaagaggagggaaggaagagagggagtagggagcgagaagagcagaggagagaggaaaagcggcagactagagctagtggcatcacatcaaaactttccacacacttaa

SEQ ID NO: 63896 - DNA, 1377 bp, Oryza sativa
  Clone ID: PAT_MRT4530_65094C.1
atggccagccggcgggagggccccctgatgcgcggcggcgcgggcggcggggcagggcagccgctctcgcgcgggtcgcgcatcgcggcggcggtcgccgtcggcgtcgcgctcggctgcgtgtgcgccttcctctaccccgacggcctcctctcccgctcctccgacgccgccctccattggcctcgccagtatttcaagtggttgtcatctatagctaatagatgtgattctcaaggcactagcaatgagccattgtcaagaaattgggctgaaagagaagatacagctgactcagttgcctgtgagacttctgagggagttaccagcctaaagtcacatgtagtattgttggagaggaaaaatgctgaatttaggaagcagattaatgaactaacaatgaagcttcaattagctgggcaaggaaaagacgaggttctatataaggctggtccttttggtactgtcaaggctattagaaaaaatccaacagttatccctgatgaatccataaatcccagattggccaagatattgcaacaggttgctataaagaaagaactaattgttgcgttggcaaactccaatgtgagagagatgcttgagatgtggtttactaacatcaaacgagttgggatttcaaattatttaattgttgcattggatgacagcactgaaaccttttgcaagtctaaaggtgttccattttataggcgggatcctgacgaaggagttgacaatattggaaaggtaggtggaaaccatgctgtgtctggactaaagtttcgcatattgagggaattcttgcagcttggatatagtgtgctcctatcagatatcgatattattttcttccagaatccgtttgatcatctttacagagatgctgatgtagagtcaatgagtgatggtcatgacaataggacagcttatggtttcaatgatgtatttgatgagcccttaatgggctgggcaagatacgcacacacaatgcgcatatgggtttataattccggatttttcttcataaggccaacaattccttctattgagcttttggatagagtagctggccgcctttctcgtgaacccaaatcatgggatcaagctgttttcaatgaggaactgttcttcccctcacatccaggttatgaaggtctccatatatccaaaagaaccatggatatataccaatttatgaacagcaaagttctattcaagactgtgaggaaagatgctaatctgcggaagttgaagccagtgattgtgcacttgaattaccatcctgataagtcggaacgcatgaaagcagtgattgagttttacgtcaatggaaaacagaatgcacttgaacattttcctgatggatcagaataa

SEQ ID NO: 63897 - DNA, 1377 bp, Oryza sativa
  Clone ID: PAT_MRT4530_65095C.1
atggcgcccgcggcggcgaaggcgtcggatctgtaccgtgaggagaccgaccgcgacgacgacgacgacgacgtcggcctcgccgtcatcctccccgacgcctgggagctccccaggcgccgcgtcctgcgcaacgtcttccgccgcctcccgcgcaacccggacttcgacggcgccaccttcctctccaagccatggctcgcgctcgccgtggacgggcacaacgtcgtcgccgagccgcagcggctcatgccggggctgctgcttccggaggagatggcgctcgacccggcctcccgcgccttcctcagcctcgccgacgggcgcttccacgacatcgccttcccccacgcccgcggcgcgcgctgcgtcgggagctcccgcggatggctcgtgatgctccgggagggccccgagggagtcgtcggcgccgcggccaccgcaactgtacatgtcatccacccgctgcttccgcacctcgagttccgcctccccgacgagttctccctcttcgagatccatgccgccgcggacttggaggagcacgtcgtgcggttgccactatcgaaggaggcgcgcctccgtgccggcctccccctggctgagaggctgcagcgcgtgtacaagcccgacgagaagaactacccctacatcaccatggtcgcgctctcgtgcagccccgccggctccgacgacgacgactgcgtcgcgctctgcgtctacctctgcggccgctgcctcgccatcgcgcgccccggggacgcgtcgtgggcgcgcgtcgaggtgggctgggagtacatggagccgacagagtacaaccgcaagttcgtgagcgtggtccacctcaacggcagcttctacgcggcgtgctacgacggcacggtgctgcgcgtcaccatcccgccggcgggcagcagcagcagcagcgcgtcgacccctcctcgggtggagaagttcgcggacaggccttacagatcgaagtggtccatgtggagatcgcggtggtggctcgccgacgacggcgcaggctctctggtgttcatcgggactgagcgctgcctgaatccctcggacgacgaaaggtacctctccgtgttccggtgggacgccgagctgcggttctggcgccggcccaagagcttcggcggccgcgcgctgttcctcagcgccggcacggcgttcttcgccgacgcgaggatcctgccgtggtgcgccggcgactgcatctacttcaccgacgacgagagcgtggtcaccggggagaacgtcaccgtgagatgctacgacatgcgcagccggaagctctacttcgtggaagacgctggggccaaggtggcgctggccccacctgtctgggtcatgccgttccatgaatag

SEQ ID NO: 63898 - DNA, 1215 bp, Oryza sativa
  Clone ID: PAT_MRT4530_65096C.1
atgaccgtcacctttgacgggtcgttaggtttaccgtcattggtgaggcatctagccgtggcccgtcacagggagttacaacccgtcacaggtgatgggccgtcacctgtgacggatatgacttctggcccgtcattgattttaagtttgcacccgtcaaagtctctcttctcttcttcccaccgaccgccggcctccttcgcccacctccaaaggtcgccgcctccttcgccctccgccccatggtcgccgccgccgtctctccgccaccccgtcatcggctccttcgcctaccgcctccgggtcgctgcctccttcgcccaccacccacggtcgccgcctccttcccgcctccaccacgccagatccaggtcatatcgagccaaagacgaagacaacgccggtgccaggaccatcggccaatggggcaccacgcggctgcccaacgccatcgacaagcccctccgtccatcgtcgcttatctccggtcgacgacgagcttctacatcccccagcctccccctgacggtcccagcaaccatgaactcgggggctccagatccggacaccctgaactcacaggtcgcggatccaaccatcccgagtttgggtgctccagatcctgcggtcctagcttcagcgataccagatccgttcgtgagtcaattggcaggagagtatggatgcaagaatgatacattgatagtttattatgagaagtgccacgaactaatgaaagagtttcggctggttactttaaagcatgtctctcgagaacaaaatgttgaagctaatgatttagctcaaggggcgtcggggtataagccgatgatcaaagatgttaaagttgaaattgcagcgatgacagccgatgattggaggatggcttgtcatggatccatccaagtccctccttacaaacttgtttatgggcatgaggctgttttgccgtgggaggttagaatcggctctcgaagaacggagttccaaaacgatttaacagtcgatgagtattacaaccttatggccgatgagagggaggatctggttcagtcacgattgcgagcccttgcaaaggttaccaaggataaggaacgtgttgctcggcattataataagaaagtgcgcggcattgcattcttcaagttgcaccaagagctcaatcttgcgagcttcaagctgatcaatattggatttgatcggaccttcagatag

SEQ ID NO: 63899 - DNA, 5490 bp, Oryza sativa
  Clone ID: PAT_MRT4530_65097C.1
tttttttttttttttgactgaaaaatagcaacagatcattgcttatcggtccactaaatttcttaaccattgcaaggcaccgatggatacaccagaatgcgctttacaggcattcaggaactgcagatcgagtgtcatcccccaggatagtccactagagttacatgggcaaacagatgtaacgtttccacataaaatacatgttacatctaaatcatatgtaaggctgcagatgtgctccaaaaagagaaaattggtctgtcataagaaactaaaaacaaacaaactgaacctaattacagcggcttcagatgtttcttgaggcccaggacctataccgtttccatctccagtcataccctcccaagcaaattagaagcatgcctgagtccctgacagctaagaaaatctagcaaagcaactgccaatgccaaggaaaattgtttccaggaaagtatgaaatatgaacatttacagcaattacatcaaagcatcattcctctcacattcacatcatcacaaggaaagtatccatgtatgaattgtatattccagcaagggtgcagtacacgaacccaagtaccacatgcagctgcctaagctcattggatgccgaagtcgctgagaaatgataccagcaaaagctcattgccatgacaattgtttgtatgaagatcgttcggcatcccaactgccctctggttccttcctctttattccaacacctggaggcatttgatacattctcgtatgctcgtccacaaaggcatgtggtggcgcaataaaattttgtctaactggtaaagttactctatcgtccttcacttctacatccacacttccagggccagaattaagatcaagaccctgtcttccccatttccgattattgtcatgtccaacagtgctgcttccttcagggaggtttattgcatattgtcgagtatgctgagcaggtaatgcacctgctggcccaacaagcgtcggagcaattgtagggaaataaggaattcctccaggtgcagaattcgcatatgatgtagacccaattgaaaaccccggtgcttgaaggtggacactaggagtaaaagggaatcctgcatactgatacgcaggaggatgaaacatcatagtcggtgaagtagaaataactggagtccggctgggatcacttccatgttggacaccatctgccaacgatgtgatgatcctctgggttccacttccagctgctgtctcgactgggtgaggctgttctcctctagaaggtaaaaacgactttatagctacaggagcacaagcattggcagaagcaaaccatggtgatatgttactcatttcagcactgttcattctcatgctagcgacttgaggtaggaatggtatgctactggtatttttagatgacagactccttggtgcatgttccgtaccagcttcatcaagagttggtccattattaagatcaaaatcccttgagctatttgcatcggaactagagaaaactccaggtaatggtcttgataataatgggacttcaaccctgtggttagtgttagacacaatttgcccattctctgcaacttcatcggccctattcaagtcaagcttaaagccaacactacgtacaggaccattgcttcttctagtgttgccagattcagaaccagttgtctgaacagaactctgagagacgtcttcctcaagaaattgctcatctgcaacatttaagtcaatgtcaagtgctgggcggtttttccctgcagcatcagaaaccagaatgccagatgcactgagagtcatctcaaaaattttccttggctccgctgggcgaaatgcgcttgtggctgctgaacctttccagccagtctcagacttcaaccttattaggttgtccgggggaacaaaggggcctttatcaggagcagctattgggtcctcgttcccacttgcatcaggtgatacaaacggagaaggacgaggtaaatgaatcgctgaagaacacacagcaggagaggtagctggctcagacagatgcccctcgtctccaggtattccttcattcaaatcaaagtcaagcttggcagtggcatttgacctggtcttggcagagaatgaagaaccatcatcagatgagacaaggtcgtctttcccacctgcatcatcgctagatttctttgagctgcgttgtgcactatgttcagtttcctgtgagacagtgcctccaggtcttgtgtgactgcttgattcactggaattgtcttttgattctttagaactaatcccattttctggaccatgtttgactccagttgctacagcaagttttgtaacatcagctggatgttccttcttttcatcctctttcagcaccgtgttactaccaaccagcaaaccatcagccttattcacctccacagtcgatgatgaaaatgaaggcttcaatttcaatttatttgcagtactgtcaccagatttatcaatgtgttctgaataatctggtagacccagaagatgcttttgatctgttggctttaacaaaccatgagcttgtttgtcaccaccacataatggttcctcggcagggagcatttttctatttgaaacagccagcttacattgatcacctaatgtggagcccacatcagaactggttgtacaaccatcttcaactttacctcgaacagtaaatgcagacctatattcactcgtagtagatgattttatatttgagtttgtatcaatcttgaaaccaataggttgtttggcatttgactttacaccatcatcaccacgtgaaggtggatgtgaacatttatcggtgtcctctacttcacgattttcagtcttcgctttagaatctatttctggtagaggggacgatccagcagatgttgtgcccttgtcaccctgtgacaacaagttgtttacagacagcatattaacatcctcccggtgcagctcctttccaaccaaacctacaccacttttttcactcttctcagagatgactttctcaacttcatttgatggccctgcatgctgtggcaagctcacatcacattccacttttagcttcccaatgttgtctccttcacagccctgttcatttgctgatgaatttctaggcgaaggagatgaggaaatcaactcagatttagatatttctccagcgacactggcaagaagattcattgctgtatcatccccagcttgcaaggaatgactagcttcagagtacttgatttcaatcaaagcattcatagggttgaacaatttagtcagcccagtctcacttgaacagattcccttttcatttgcatatgatgaacaagcaactcgtgaaacaggtacatctctgccagctccttcagttgtcttgctgtcatcagtcaacatagcacgaggtgatttatcgccttcctcagaaactgaagctcctttaacatcattgctgtgccaagactcagcatttgtatcattgcctaaatgaggattggaattttcagtcttcattttcactctacggtcactttgttcatgtttgtctgccacaggagatgaagctctactcccagtaaatgatgggtcctcaaaagaaccgccacttgcgctcctagcagggcttcgaccaggatttgggaaccggacaatcaatctatggctgttaccctgatctgattgtatgtcagctcctttctcacatgctgtgccagattgtgacactttttcctgcactgaagagtgatcaagtgaagacgatcttgccacggcagcttctttctggatccctgaaccaagaagcccattgtttgttcttcgatgcacacgagaagaactaccggaagttttataggcaacaccagaagctgcagttgagcttcgggcatcctccttcgaagaaccgattgtttttgcatgttcactagaacatgactggctgttgttcagagactggcttgaactgctgcttttctcctctttcactgcaggcagctcagagccacaagtgccaccagttgatttggagggttgctccttcaagttggttacagcatttcctggttgcatatgttgcaattttgaagaaccagatatcactggactcgatttcgcagcagcatcggcggctacaggtttagaagtcaaggccttcgatgaagaaagctgagacactgggcttttcagactagactcacttgagccacttcgtctgtttccagcactagaaatttctggaaacccaggtttgcctggccaggatacagcctgacctgataccactggtttcacatcatttgacttcatttcagcatcaacgcgcttcttccaattttcgacaagacactttgccttcttctgtatctccggatttttatggcttcgcagatgattaacagacttcccaatactgcaactttgtaaagcagtaagattaataggcaatttcgccagtgcacgaagcagcgccaggacaggttcttccataggcttatcagtttctttaggactaccaccttcaccagacttccctttatgagcttcttgaagccaatcatcaaacacaggaaggcctcgcagttgcacaaacctaccaaggcagtcaggactttctgtagctgcaataatatcagctagaattacccggccaggcaaatctatctttcgctcagttcgatcaagttgcatgagatgtaccagcttctctacagcttcagcatgtggaagtccacctttttctgttatctttgtaatttcagactttagattctccaccttaaagttgcctgattcgccatcctcagcctttaggggacgctcacggtctcgcttagctggatcagttccttgctcacccctgtccctcttcttccctttggaaagaccgcagttttgggcaccatcagaaccagacttttgctgggcagacgacggtccattgagccgctttggtgagcgcccacctgactgaactgctgcatgcatttctagctttgttctgtgtagaagccgatttacttcttcctgccgctcatttatataatcctggtcggtaagccaccataaacacttgttgtcaatatcatacacgcgccgacacacaaatgaagaaattccagctggaagctcaacgcctttacgcaaaaaagcaactttgcaaggatgcagcagtgagacagcggatgtctcgtcctggtggaaagaatagaagatctcgtttggtgcggcgcacagctgtgttcccttgttaagcttgatgtcagctggtctatacagccaacttacacgtaacttgggaaagccttcctcctttttctcaatccaacgtatcaacccaatgaaagggggaacttcaacagcctgaaaaagagcgcagtcgccaacacggaattcacgcccgtccgccgccttcgcgccacccatgcatagccttgcatcatccccgccgccgatccctcctcgccgtcccccggcgccgcgccgcaccat

SEQ ID NO: 63900 - DNA, 1274 bp, Oryza sativa
  Clone ID: PAT_MRT4530_65098C.1
tcagtatggtcggccggtgccgtagttccccggcgggaagtagtcgcagacgagcagcgagtcgccggagtcgcacacgatgcggccgcacccgacctgcgtcgtgttccgccacaccacctgcgtgtaccgcgtgcacggcgacgacgacccggacgacgcggccgccgccgcgccggcgcacgtgttgctgccgtagtcgtaccgccgccggccctcgtccacccacgccgccgccagcgccggcgcgttccaccgccgccccttcccgacgaacgcgttctcgccgaagttgaacagcggcgagcgccgcggcgcgcagtcgccgcgccgcgacgctgcgtaccccttcgcgtaccgggcgatgcccgcgctccacgccagtggcgccacgcccaccgcgcgccgcgcctcgttgtgcaccgccaggatccccgccaccgtctgcgcggcacgcgcgcggcgtccggcgtccgcgcccgagacgccattgccggcgccggtggtggcagcgaagcactgggaagccattgccaggattacaacgacagcgacatgggacacgtaggtgttagacattttcgtctctttcttgtctgcgacttctgtgacggatatgacttctggcccgtcattgattttaagtttgcacccgtcaaaggtgatcaattttgacatataaaaaaggaacccccaccccccacccatggggcccaccgccacctgctcagtctctctcctcctcctctcagtctctcttctcttcttcccaccgaccgccggcctccttcgcccacctccaaaggtcgccgcctccttcgccctccgccccattgtcgccgccgccgtctctccgccgccccgtcatcggctccttcgcccaccgcctacgggtcgctgcctccttcgcccaccgcccacggtcgccgcatcgagccaaagacgaagacaacgccgctgcccaacgccatcgacaagcccctccgtccatcgccgcttatctccggtcgacgacgagcttctacatcccccaccctccccctgacggtcccagcaaccatgaactcgggggctccagatccggacaccctgaactcagaggtcgcggatccaaccatcccgagtttgggtgctccagatccgttcgtgaggtaagcggtccgccgtccacaccaccccacgtcgtcgaggtcaacatgtcgtggggagagcaggcgtcggctgtccccttccaccccattctcggtagtcactgccgcctcatctattttact

SEQ ID NO: 63901 - DNA, 857 bp, Oryza sativa
  Clone ID: PAT_MRT4530_65099C.1
atggacggcagaggcgaggcagagcacgggagcggcggcaacggtgaggaggcgaatgggagaggaaaggaagggagggggaagacgggtttaaatgggcggcaatgtcggcgcgggctggcgcggcagagggtgacggcggcggcgaccaggcgtctctcttctctcctcccaccaaccaccggcctccttcgcccacctccaaaggtcgccgcctccttcgccctccgccccatggtcgccgccgccgtctctccgccgccccgtcatcggctccttcgcccaccgcctacgggtcgctgcctccttcgcccaccgcccacggtcgccgcctccttcacccaccgcccacggtcgccgccatgcctccaccactctagatccgggtcgccgcctccttcccgcctccaccacgccagatccgggtcgtatcgagccaaagacgaagacaacgccggtgccaggaccatcggcgaacggggcaccacgccgctgcccaacgccatcgacaagcccctccgtccatcgccgcttatctccggtcgacgacgagcttctacatcccccaccctccccctgacggtcccagcaaccatgaactcgggggctccagatccggacaccctgaactcagaggtcgcggatccaaccatcccgagtttgggtgctccagatcctgcagtcctagcttcagcgacgccagatccgttcgtgaggtaagcggtccgccgtccacaccaccccacgtcgtcgaggtcaacatgtcgtggggagagcaggcgtcggctgtccccttccaccccattctcggtagtcactgccgcctcatctgtgacgttttttactctctgagccat

SEQ ID NO: 63902 - DNA, 478 bp, Oryza sativa
  Clone ID: PAT_MRT4530_6509C.1
ggggtttgtttgttgggttttttttttttttttttttttttttttttttgttttttggaaaagtaagaagcctgtaacctttactgagttcgggcagaggcacccaccaccgccatgcgggaaacttgtggtgttacacttcactttacgggggggggggggggggaacaccccagcctggggtctgggctggggtcttattccatgatcccggggtggttgggtgctaaaatcgaagggagagggcaccgtgcccttgtcccccgtggggcttggggcttggggcctggacactcgagacgcaatacccactaccttctccctcaaggggcgggggacggaatacttccctcctccgtggctggcggcggcctaaggccttggcttgagtgcggggtgcgggaaaccggcattctccgcgctctgggtgcctcaagaccgggtcgggttgcggaatgatcgaccattgggctgggcc

SEQ ID NO: 63903 - DNA, 372 bp, Oryza sativa
  Clone ID: PAT_MRT4530_650C.1
atgcgtggtgttaatcttgcagctcttcttgtcatcttcctaggggtgctttccgcggcggccacgacggcggcgggtcgtctccccggcgtcgcgacgaccccaacgccggctgcttcgctccccatcaacagggagccgcgcggcttgcaccacgcgccttcgccggcccctgccaagatgacgacgacgcagccgccggcttctgcttcgccggcccctgccaagatgacgacgacgcagccaccggcttcggcttcgctgcctatcaacagagagccgcgtgacttccacgtcgccgccgcgacggccggcagcggcagcatcagcaaagcggcgttgcttcttctgccggtgatggtagctctgtga

SEQ ID NO: 63904 - DNA, 189 bp, Oryza sativa
  Clone ID: PAT_MRT4530_65100C.1
atggagtttggatgggccctcgacggcctatgcggctttcggattcacctaggcacgagaggggactgcccgctgccttacgaggagtggggggaatttgttattgggactaacaagtatagatttccaaatgagctgttcggctcgagcacaaccgggctcagggccgacccatcatgccgaggctga

SEQ ID NO: 63905 - DNA, 279 bp, Oryza sativa
  Clone ID: PAT_MRT4530_65101C.1
atggcactgcaatttattataacgatttgttttttcaggtggacctctggatggggctgccggacttgccatgtcgtacgaggagagtggctcaatgaccagttagactccgagctcggcgcagtactaccgtgtaggtggctggcgcgcaaccttgccaccatccaccgtggcacgacgcgttgtgccgctaaatgcctccggtacaacatgaacgcgggacacgaggtggagggcgaggccatgagaaaggccatgcatggagcacattctctatga

SEQ ID NO: 63906 - DNA, 395 bp, Oryza sativa
  Clone ID: PAT_MRT4530_65102C.1
gtgggaaaatagtgattttattatgcgggtggagcattcatatgcaaaaatcaaatttatgcatacggtgcttatatcgatcacatacaaacattggaaaataataaaggggaaaatagcaagaaaaaaccaaaccctagaccctagctccggggcccacccactttatcgccggcactagctgccggaggccgagcccaccgaagtcgacgccagatccggcgccgcctggtgctgtgcctcccattggcgccagatccgttgcgtctttgccaaatccatgcaggagggaggcggtggaaccacccagcggtggaggaggtggagcccaagggcgtcgaaccggacggtgcttgccaccgtggcagatctgccgtgccgaaattggatccacg

SEQ ID NO: 63907 - DNA, 1175 bp, Oryza sativa
  Clone ID: PAT_MRT4530_65103C.1
tttttttgaatggtcaaaacaaccgggataacatatggctactgccatgtagagattattgtaagcttacaaaaattccaatatatgttcggtacaccatagaaaacattactgaggctaactgtgacaagatgggagatgaaaatatatagaggatgaacttaaaacaatcactaacttctaaatacccaactcaagagatagaagttcacagtgccaacccaactatacactgttgctagctttaggccactgagaaaatggtagaaactcataaaacgttatctttttccaatgcaaatggttcgttcgaccgaatcgaagactcggtcggattcactggcatgagacgacaatttaactctcctcccctcagacaagcagtactgatgcttttggtgaaagaggcatggggggccttgagaccgcgaagcagtaagtgttaggggactgaagctaacaactgcatcccccagcctgtgcctgagactgggatgagttggcgttgcttgacttcaagttcacatcaaccatgtcttcctgctttgctgatgagagggtctccattccaggaagtgcagccgcaatcttacggaacaacgccttaatgttaaaaccagctttagcactggtttcaatgaacatcacaccgagatctttcgctttgccctctccttcctctatggagacttgcctcttgtcaacaagatcagttttgttcccaaccagcacaatgataacatcactgcccctctcagttctaacttcctctatccattttgaagtgtttaggaaagactgtctgcttgcaacatcaaatacgatgacagcaacggaagagtctctgatatagcttggaatcaaactcctgaatcgttcctgaccagctgtatcccaaagttgcagtctgacagtcctatcttcaaggtacattgtctttgacaggaagtcaataccgattgtagcctggtaggtgttgtcgaacttgtcgtacatgaagcgggtgatgatgctggtcttgccgacggactggtcgccgaggaacaccagcttgtacttggcgagcgccgacacgggggccatctcgtgcctcctcttcttctccttctccttctccttcctcccttctccggccggcgacggcggcggcggtgcctcgtgccgaattcctgcag

SEQ ID NO: 63908 - DNA, 383 bp, Oryza sativa
  unsure (1)..(383): unsure at all n locations
  Clone ID: PAT_MRT4530_65104C.1
gggcccccggccccgctccacngacgctttctgaggccgggtcgccgagaggtgagccggcggcgggcgagtggagatgagcagaggcggagatggggaatcggttgcgacttgcgagctggctaggccgaggcgatacggcgtcgtggtcacgagctgagctcgcgccttcgcgcatggggaaacaccgcccaggtgatgctccgaccaacaacggcgacgacgcagacctccgagagaccaccagacgttggattgggaagaagctaaagccaatgggcgtgtctgggccgagggtggtgagctggaggaacaggttctacgtggcggtcaactgggccaccacgctcgtgtgcggcagggacaacatcaggatcggctga

SEQ ID NO: 63909 - DNA, 293 bp, Oryza sativa
  Clone ID: PAT_MRT4530_65105C.1
ggaacccaacaaagggaaaagggggtcaagggtttaagaaaatggcctgggaattaccgggcaaaaaaaaggggggttggaaaaagcctcaatacacactgggggaaaaccgggaacggtgttggggctccaaatttggggaggggcaagggtctgggaaaaacaatttttttgggggggaacttaaaaggtttttttattaaaaaacacgggggggggcaaaggctaactatttggccctttggggattggttaggtttagggggggcatgagaaaaggggggttttttttt

SEQ ID NO: 63910 - DNA, 675 bp, Oryza sativa
  Clone ID: PAT_MRT4530_65106C.1
atggccaaatccggcttctctagcggcgatgctgagagaggactcagaggaagaggaggcgggcgcgagcgcacgtcggcgagagtgagggggacgggaggggattcagcagcggtggccgacggcgacgggaatcgccatcgcggagtagccgggaagggaggtggctcattatatgaggggcgcaagggtttggagagactgcgcgagtgcgagtctctcccctccaccacccgccgcgatgtcttccgctgctccgccgctgccgcgctcaccggcggcgacgcccgactcgacggcgtcaactgcccggacgcgcgtggtccgtgcgccctcacgaccgccgcgggcgccacgccgccggagtgggcggagcgccgccccgccgtgtccgtggactacgaccggggccagcgcgaggcccgcgccgaggtggagggcgtgggcgccgtggcgttccccgcgcgccaccgcctgcgcgtggaggggagccggtggcagcgggactggaaggtgttggaggccgccgcgcgcgtgctcgcgatcccgcgcgccgaggccggcgctgtcgacgccgtgctcaactgctgggccggccgcttcgcccgcggcaacttccctctcctcatccgcgtaagggcatcatcccacgctctgaagtatttcatgaattga

SEQ ID NO: 63911 - DNA, 372 bp, Oryza sativa
  Clone ID: PAT_MRT4530_65107C.1
gagttggtgaggtacctttgctttgatgtctggaattcggggagcaaccttttggtgctacgtcgactgagtttggccttataggtgatatattttccacgccgttctctaattgtcttgaaaagggaaagggatgactaatggaattggaccgccgaggtagcgattgctgatctggagagcctaagaaacctgaataccatgacggcaacgacactgatcttggagggaattcagacttatctgacagagaactcccggagctgcttctgggggaatctcctttgtcagcaaactgactggcttccctaaaatggtaaacaatcacaataacgttgttttacaatcacaataagtttgtcaaaatggtaa

SEQ ID NO: 63912 - DNA, 1052 bp, Oryza sativa
  Clone ID: PAT_MRT4530_65108C.1
cggacacggcggggcggcgctccgcccactccggcggcgtggcgcccgcggcggtcgtgagggcgcacggaccacgcgcgtccgggcagttgacgccgtcgagtcgggcgtcgccgccgccttctctggcgccggccgcctccactccccctctcccgcttcttccccgcgcgccgcagcgcccgctgcgctcgccgccgcgcccgctccgccgtcggccgcacacccgcatctgcccgcctgcgcgccacaccggcccacaccctgcgtccctacctcgcactcgcgcagtctctccaaacccttgcgcccctcatataatgagccacctcccttcccggctactccgcgatggcgattcccgtcgccgtcggccaccgctgctgaatcccctcccgtccccctcactctcgccgacgtgcgctcgcgcccgcctcctcttcctctgagtcctctctcagcatcgccggacccaccgccgcagtgctcgccttcacccccgcagcaggccatggtggctgtcctctcccgccggccgccgtctcctagctccactcctgccacccgccgccctccatagctggtcgctacggcggtgcctcacggcagacgccgacagacctcctttcccgactcgccccgccagcccagattatgagaagaaaccctctcctcctccttctcctctcctctccggcgtccaagaaccctcccgtgtcccggcgccgccgccggatctggacaaggacaaggcgccgccgaagccgaagccacccaagcccaagcccaagccgcccaagtcggagccggagcctgggccaccaccgccgccgaggtcatgcgcgccaacccgggccactacgtcgcgctcgtcaccctccgcgtcgccgaggagaagcggccgccaccgccgccgccgccgccgccggcgcgggccgaacggcgcggcaccggcaccggcacgcatcacctggaatccaagcccgccgccgccgccgccgtcgccgccggagttaggatcaattccggcggcgacgaccacacgcagctcg

SEQ ID NO: 63913 - DNA, 6639 bp, Oryza sativa
  Clone ID: PAT_MRT4530_65109C.1
atggatcggcaatggatgtacgctgaccggcggtccaaagagtttattgacggcgtgcactattttttgagagtggccgaagctaacaggcaaaggggttttatttgttgtccatgcaataagtgtaagaatcagaaggagtattctgcatccaggactattcatttccacttgtttgagtcggggttcataccaagctataattgttggacatcccacggagagcaaggtgttgaaatggaagaagatgaagtggaagacgacaatattccggactttgctcagtatgttggatttgaagaaaatcaaacgggtgaggaggaaatagctgctgatggtaacgacgttgcggatgatcttggtcagatgttgcaggacgctatggaggactgcgaaagtgaaaaggaggcccataaattggacaagatgttggaggaccacagaacttcgttgtacccaggttgcgagcaggggcacaaaaattggataccactctggagttcttgcaatggaaggcaaaaaatggggttagtgacaaggcatttggcgatttattgaaactcgtcaagaacattcttctcgggggaaacaaattgcccgagacaacgtacgaggctaagaagatagtctgcccgttaggactggaagttcataagattcacgcatgtccgaacgattgtatcctatatcgcggtgaggagtatgagaacctagaagcatgccctgtttgcaaagcactacgatacaagattagacgagacgatccaggagaagttgacgggcagctaacaaagaagagaattcctgctaagatgatgtggtatttccctatgatagcacggctaaggcgtttgttcaggaacaaggggaatgctagaatgttgcgatggcacgctgaagagcgtcaacaggacgggatgctgagacaccccgccgatggttcgcagtggcgaaacatcgacagaaaatttaaagaatttggaaaggacgcacgaaacatacggtttggtttgagtacggatggcatgaatccttttggagagatgagcagcggccatagcacttggcccgttacgatgtgtatctacaacctcccccctagctatgcataaagaggaagtacataatgatgccgattattattcaaggccccaagcaacctggtaacgacaacgatgtgtacctaagaccactgatcgaagatcttaaacagttgtggaagaaggaaggtgtccccgtgtgggacgaggacaaacaggaggagtttaacctacgagcgctgctgttcgtaaccatcaacgattggcctgcacttagcaacctatccggacagtccaacaaggggtacaaggcttgcactcactgtatggatgaaacagaaagtacgtatcttaagcactgtaggaaggttgtatacatgggtcatcgtcgattccttgcagcaaaccacctggtacggaagaaaggcaagcacttcgaacataaggccgaccaccgtacgaagcctaaacatcgcagcgggaaaacaatgtttgctatggttaaagatcttaaagtagtgttcggaaaggggcctggaagccagcttatagagagcgaagatggtcacgcggcgatgtggaaaaagaactctatattttgggagttaccatattgggaattcttggacgtacgctacgcaatcgacgtgatgcacctcactaagaacctttgcgtaaaccttcttggcttcctaggtgtatacggaaagtcgaaagatacactggaagcacgtaatgatctgaagcatatggaacaacgcggcgaccttcacccggaaccaaaggagaaaggaagccattacttgagtccagccagctacactcttagcaaggcagagaaggaaagtatgtttgaatgcttggagagcataaaggtaccgtctggatactccacgaatatcaagcgaataataagcacgaaggagaagaagttcacaaacctaaagtctcatgactgtcacgtgttgatgacacaactgctaccagttgtaataaggggtatccttccagacaatgtccgggcaacaataacaaagctatgtgcattcatgaacgcaatttcgcagaaggtcatcgatccggatagattagaagcccttcagaatgaagtggtgcaatgtctcgtcagttttgagttgatatttccaccttcatttttcaatataatgacgcatctgctttgtcaccttgtgaaagagatccgtattctcaggcctgtgtacctacacaacatgtttcctttcgagaggtacatgggcgttctgaagaagtatgttcgtaaccgtgctcgtccagaggcaagcatcgccaagggttatggaacagagaaggtcatcgaattttgcgtagaatttatcgaagaccttcgcccaatcggggtacctgaatcacgccatgaagggagactacggggaaagggaactctcggaaggaaagcaataatgacggtagacaacaatttattccgtaaagcccatttcattgttctgcaacactcttcattggtagctccttacatcgaggagcacttggctctagttcgcgccaggaacatcggtaagtccgatgcatggattacacagcatcacattgatactttccccacgtggctacgacaacatctcatgggtaacgagtcgatcaaccaacaacttgtcttcctggcgaggggaccgtctgggtcgatcgcgacattccagggatatgagatcaatgggtacacattctacacgagagcccaagacatgaagagcacgaaccaaaacagcgttgttcgtgtcgatgccatgggacacgatggaacaactgccacgtattacggtgccatcgaggatatatgggaacttgactatggtcctctcaaggttcctctgttccggtgccaatgggttaggttgactggtggaggcgtaatgattgatgacagtggtatgacaattgttgaccttaacaaggttggatactcggacgaaccttttgtccttgccaatgatgtaacgcaagtccttttcgtgaaggacatgtctagcaaaggaaagaagggcagagggcctgacgagcctaagcgtcaagtggttctcccagcgcgccctcgtcttctccaccaacacttaatgtttttggccgatcgatctctctcggcctctctccttcgccgccactgcctagggtaaatccccgcgccgacgccgccgtatctcgccgtcgtctcgagctcgtcgtcctcgccgccgcctccgcctcctccgccgccgccgcatctctcagatgtttcttgtatcaacagatggctgaccacgatgaggaacagatattgtatgatacaatcgcggagggaagcagccagtactggaataaagaagaggggaatggggatccaaaccagtacttgaacgaggaagggaacgtggagagggatgcggaggggaaccagcaggggcacgtggaaagtgatgtggaggggaaccaggaggaggaggctagtggtagtcaaccctccgttggacagaagagggcacacgggcaacgaggtgcagcgaagaagcttgagggtcggcacatcataacggaagtggaagaagatggacgtcctagtgccccggccgaagccgccaagaactatgtacgtcacagcggttgggttgtgcgggataacgtgcctgttagtacggtgtactggcgaagaacaagggcacgcggagatcatgagagctctgtcccagattcggagaaagagatgctgtggaccacaatgctcgagacattcacccttcccgcaggtacagaggacaaagtgaaaaggtggactctgaagaaaatggcagaacagtttcagagcttcaagggagagttgtacaagaaatatatcctgaaggggcagacaccgaacttcgacacattcccaaagctaagggatcactgggacgagttcattgcatataagacaggtgaacaagggcaggcgatgatggaaagaaacaaagaaaatgccgccaagaagaagtaccatcaccacttggggtcaggaggctatagcgtcgcgaagccgaagtgggaggagatggaggctagcttgattgagaggggtttcgaaccggcaaccgccaattggtcggaacgatcgaagttctggtattatgctcacggtggaacgctcaacccagctgatggctcactggtcttcggcgatcagatacgagaggctgcgcgacgactaacagatgcagtggaagcctcatctcagggcacgttctgaccggacagagatagggacgagctgacactcgccctgtagactccagagcatccaggacgaacacgagggaaatgggtgattccttggaagattggtttcaaggaggacatccacacgtacaggagtcggatgaggagtaagagagataccgaggcgaagattgcagatctagagttccgggtattgagctacgaactcagcatgcaagaggaggtggcaaggaaggttgatgaacgcatggccgcacatcggtcccatgatccccagccgaccattcctcctgcaatggtgagcccgtcaggaaactgtagcagctgcgcctcaacggggcaagtaggatcacagagcatggacgccatgcaaacacaggacgaatcgacctgtcctgttgatgacatcactcagcggacaccatgtgagctgcatattccttacaagaacttatcaataaaggtggcgtcgggcatggccatcccaacggacccttcaggtacttaccactgcaggccgattccagcaggatactcgaaggtcgaagttgagttggtcgaaggcgcgtacgaggacctcgagctggattaccctggaggagacggtgagacgcatctacgagacacaagccatgccattattctatggcgcaggcggtacatcatcctccctgggcgacaagcggcgtctcgtgtaccatatcctccggctccgccatctcctcctcaggatcctgcaccgtctcctcctcatgctccgccagcaccatctccacctcaggctccagcaccgactcctcctcaggatcctgcaccgactcctcctcgggctcctacacctactcctccgcaagctcctcttccagcaccttcaaagtcaagggccccccagctccaccgcctgcccacacaagggcaacgaagaaggcgaaagttgacgccgccaagaacaaggacccggcgtacgattgcacgcaagaggagcttgacacttacgttgcatcagaagtcaagagacaattcaagcctcgaagtccagaaaagaagattcctatagaccccagtgttaggaacttcttcaggggtatgtctgcatctgtcaaggaggccatcaagctatcggactatgagcgaacgctgaagaaagcatcttctagaaagtccaaaccagtccctcagcttggagagcaaccaaaccaggagatagagccgttggtgaccggtaaagaaatgacgatagaacaatttattattgataccggtctaactacggatcaattgctaggagtcgcaccaatcgaaaaggcggaagtgaaatacatgtacgaactcggtaaaccgcttgtcaagcctgagctgctgcagtccctacccacacaaatgtacaagttccatcagctgtacatggagatgagcgccaccggtagagagatgatcggagcgaggatcagggacacggacttcttgcaaggagatgacattctttggatcaatttcaagggaatctacgaactataccagctggacgccctcgacgtctctattatgagttgctggattttaatggagattcaaagggcccgacggcggagggttttcgatactggattcatcgaccctcggagagtaaacgtcgcaatgctcgaccaatatccacaagaaacagaggacaatctcgtccatctcctgaaggcgcagcattacaagacgttcatactgttgccgtacaacacagaattccactgggtgcttttactcttcgacctgtcggcctgcaccgtcaacgtatatgactcaatggataaaaaagagtctacgtttgataaggttttcgaacttatagacagggcttggtatcggttccgtcatttgatccgcggcaaatggagagaaagacttaggcggaaattcaaatttccttttattcgcatgagggataacctgaccacacacaaggaatttatcgcggcggttcaagaccaactcatgggattcatcaacgaagaaatccttgatcccaagggtgaattctactacgacggaaacacaattcaccgatccttagcttctgagctagcagcgagtactactactacgtcgaaatcgtagctagctaggacatattataaatcatatatctcaaaaactaagagtatgtgtcttctttttcatatttaacatccgtgcaacacctacaaccgtattatctcatatttcacatgatctcctcaaaaattgttattcacatatatgtcattatcatgttgccttctatcctatatatggacacctctcccaagacgtacgtactcttcatatactgtgtatataataatcactgactcctgctatt

SEQ ID NO: 63914 - DNA, 366 bp, Oryza sativa
  Clone ID: PAT_MRT4530_6510C.1
aagagatttgtaaggccacaataggtgtccgtgccatatgaaattttaagtgttgtgatatattgcacgggtactgccagttcttcaagttgagatgcaacatgcttacttgtaactcaaacaggaagagtgctcttctcagttcacatgtcaagtaaggggaaggtgctgattgagggagagaccaggactcgtcccaaattgcttcttgctggatggatgaacttcatcttcatctcatccagatgtgctctggttcttttgtgttgcttttatcatgtccatgccatgtgaattaagatctgatttgccttttgcatagtgcaagtagtagtaataatttaccaaaaaaaaaaaaaaaaaaaa

SEQ ID NO: 63915 - DNA, 528 bp, Oryza sativa
  Clone ID: PAT_MRT4530_65110C.1
atgtcgcgccatcagttggacgcgcatcagttggatcgcgactcgcgagcgcgcgtggtcggtcgcgccgcgcggcacacggcagcccaagcgcgcgacgcgatcgatctcggcagctctcgcgctcggcgccccaccacctcaccagccggctgccgcgatcgatgcacgggcgtacggcagcgtctcgcggtctcgccgcgtgcgagggaccagcagcaggaacccggctgcacgcagtcggaaccgcccattcagcggcaggccgtgccgcgcgaccgggcccgcggtgacgcgctgacgagggaattgatagatcgatcgatcggcccaggggaattatccgtcggcaatgcaggacgtacacggtacacgtacggggtcccctccgtcggtcgtctgccatcgcccgtcgatcgggcgcgcgcgctcgcgcggggaccggacgtggtttctcagtttctgtggcgggcgggccaaccttacgagagagtcaaagctttcggtactgtgctctccgtccgctag

SEQ ID NO: 63916 - DNA, 6096 bp, Oryza sativa
  Clone ID: PAT_MRT4530_65111C.1
atggatcggcaatggatgtacgctgaccggcggtccaaagagtttattgacggcgtgcactattttttgagagtggccgaagctaacaggcaaaggggttttatttgttgtccatgcaataagtgtaagaatcagaaggagtattctgcatccaggactattcatttccacttgtttgagtcggggttcatgccaagctataattgttggacatcccacggagagcaaggtgttgaaatggaagaagatgaagtggaagacgacaatattccggactttgctcagtatgttggatttgaaggaaatcaaacgggcgaggaggaaatagctgctgatggtaacgacgttgcggatgatcttggtcagatgttgcaggacgccagggaggactgcgaaagtgaaaaggaggcccataaattggacaagatgttggaggaccacagaacttcgttgtacccaggttgcgagcaggggcacaaaaagttggataccactctggagttgttgcaatggaaggcaaaaaatggggttagtgacaaggcatttggcgatttattgaaactcgtcaagaacattcttccggggggaaacaaattgcccgagacaacgtacgaggctaagaagatagtctgcccgttaggactggaagttcataagattcacgcatgtccgaacgattgtatcctatatcgcggtgaggagtatgagaacctagaagcatgccctgtttgcaaagcactacgatacaagattagacgggacgatccaggagaagttgacgggcagctaacaaagaagagaattcctgctaaggtgatgtggtatttccctataataccacggctaaggcgtttgttcaggaacaaggggaatgctagaatgttgcgatggcacgctgaagagcgtcaacaggacgggatgctgagacaccccgccgatggttcgcagtggcgaaacatcgacagaaaatttaaagaatttggaaaggacgcacgaaacatacggtttggtttgagtacggatggcatgaatccttttggagagatgagcagcggccatagcacttggcccgttacgatgtgtatctacaacctccccccctggctatgcatgaagaggaagtacataatgatgccgattattattcaaggccccaagcaacctggtaacgacattgacgtgtacctaagaccactggtagaagatcttaaacagttgtggaagaaggaaggtgtccccatgtgggacgaggacaaacaggaggagtttaacctacgagcgctgatgttcgtaaccatcaacgattggcctgcacttagcaacctatccggacagtccaacaaggggtacaaggtttgcactcactgtatggatgaaacagaaagtacgtatcttaagcactgtaggaaggttgtatacatgggtcatcgtcgattccttgcagcaaaccacccggtacggaagaaaggcaagcactttgaacataaggccgaccaccgtacgaagcctaaacatcgcagcgggaaaacagtgtttgctatggttaaagatcttaaagtagtgttcggaaaggggcctggaagccagcatatagagagcgaagatggtgtatacggaaagtcgaaagatacactggaagcacgtaatgatctgaagcatatggaacaacgcggcgaccttcacccggaaccaaaggagaaaggaagccattacttgagtccagccagctacactcttagcaaggcagagaaggaaagtatgtttgaatgcttggagagcataaaggtaccgtctggatactccacgaatatcaagcgaataataagcacgaaggagaagaagttcacaaacctaaagtctcatgactgtcacgtgttgatgacacaactgctaccagttgtaataaggggtatccttccagacaatgtccgggcaacaataacaaagctatgtgcattcatgaacgcaatttcgcagaaggtcatcgatccggatagattagaagcccttcagaatgaagtggtgcaatgtctcgtcagttttgagttgatatttccaccttcatttttcaatataatgacgcatctgctttgtcaccttgtgaaagagatccgtattctcaggcctgtgtacctacacaacatgtttcctttcgagaggtacatgggcgttctgaagaagtatgttcgtaaccgtgctcgtccagaggcaagcatcgccaagggttatggaacagagaaggtcatcgaattttgcgtagaatttatcgaagaccttcgcccaatcggggtacctgaatcacgccatgaagggagactacggggaaagggaactctcggaaggaaagcaataatgacggtagacaacaatttattccgtaaagcccatttcattgttctgcaacactcttcattggtagctccttacatcgaggagcacttggctctagttcgcgccaggaacatcggtaagtccgatgcatggattacacagcatcacattgatactttccccacgtggctacgacaacatctcatgggtaacgagtcgatcaaccaacaacttgtcttcctggcgaggggaccgtctgggtcgatcgcgacattccagggatatgagatcaatgggtacacattctacacgagagcccaagacatgaagagcacgaaccaaaacagcgttgttcgtgtcgatgccatgggacacgatggaacaactgccacgtattacggtgccatcgaggatatatgggaacttgactatggtcctctcaaggttcctctgttccggtgccaatgggttaggttgactggtggaggcgtaatgattgatgacagtggtatgacaattgttgaccttaacaaggttggatactcggacgaaccttttgtccttgccaatgatgtaacgcaagtccttttcgtgaaggacatgtctagcaaaggaaagaagggcagagggcctgacgagcctaagcgtcaagtggttctcccaggcaaaagaaaaatcgtcggagttgaggacaagactgacgaggattatgatcagttggatgggcaaccccttttcacggtgacgattgaccctagcatcctcctatcaaatgaagacacaccttactcacgcagcgatcacaaggagggaacaatagtgaggagaaaaaacacatatatggctgaccacgatgaggaacagatattgtatgatacaatcgcggagggaagcagccagtactggaataaagaagaggggaatggggatccaaaccagtacttgaacgaggaagggaacgtggagagggatgcggaggggaaccagcaggggcacgtggaaagtgatgtggaggggaaccaggaggaggaggctagtggtagtcaaccctccgttggacagaagagggcacacgggcaacgaggtgcagcgaagaagcttgagggtcggcacatcataacggaagtggaagaagatggacgtcctagtgccccggccgaagccgccaagaactatgtacgtcacagcggttgggttgtgcgggataacgtgcctgttagtacggtgtactggcgaagaacaagggcacgcggagatcatgagagctctgtcccagattcggagaaagagatgctgtggaccacaatgctcgagacattcacccttcccgcaggtacagaggacaaagtgaaaaggtggactctgaagaaaatggcagaacagtttcagagcttcaagggagagttgtacaagaaatatatcctgaaggggcagacaccgaacttcgacacattcccaaagctaagggatcactgggacgagttcattgcatataagacaggtgaacaagggcaggcgatgatggaaagaaacaaagaaaatgccgccaagaagaagtaccatcaccacttggggtcaggaggctatagcgtcgcgaagccgaagtgggaggagatggaggctagcttgattgagaggggtttcgaaccggcaaccgccaattggtcggaacgatcgaagttctggtattatgctcacggtggaacgctcaacccagctgatggctcactgactccagagcatccaggacgaacacgagggaaatgggtgattccttggaagattggtttcaaggaggacatccacacgtacaggagtcggatgaggagtaagagagataccgaggcgaagattgcagatctagagttccgggtattgagctacgaactcagcatgcaagaggaggtggcaaggaaggttgatgaacgcatggccgcacatcggtcccatgatccccagccgaccattcctcctgcaatggtgagcccgtcaggaaactgtagcagctgcgcctcaacggggcaagtaggatcacagagcatggacgccatgcaaacacaggacgaatcgacctgtcctgttgatgacatcactcagcggacaccatgtgagctgcatattccttacaagaacttatcaataaaggtggcgtcgggcatggccatcccaacggacccttcaggtacttaccactgcaggccgattccagcaggatactcgaaggtcgaagttgagttggtcgaaggcgcgtacgaggacctcgagctggattaccctggaggagacggatcctgcaccgtctcctcctcatgctccgccagcaccatctccacctcaggctccagcaccgactcctcctcaggatcctgcaccgactcctcctcgggctcctacacctactcctccgcaagctcctcttccagcaccttcaaagtcaagggccccccagctccaccgcctgcccacacaagggcaacgaagaaggcgaaagttgacgccgccaagaacaaggacccggcgtacgattgcacgcaagaggagcttgacacttacgttgcatcagaagtcaagagacaattcaagcctcgaagtccagaaaagaagattcctatagaccccagtgttaggaacttcttcaggggtatgtctgcatctgtcaaggaggccatcaagctatcggactatgagcgaacgctgaagaaagcatcttctagaaagtccaaaccagtccctcagcttggagagcaaccaaaccaggagatagagccgttggtgaccggtaaagaaatgacgatagaacaatttattattgataccggtctaactacggatcaattgctaggagtcgcaccaatcgaaaaggcggaagtgaaatacatgtacgaactcggtaaaccgcttgtcaagcctgagctgctgcagtccctacccacacaaatgtacaagttccatcagctgtacatggagatgagcgccaccggtagagagatgatcggagcgaggatcagggacacggacttcttgcaaggagatgacattctttggatcaatttcaagggaatctacgaactataccagctggacgccctcgacgtctctattatgagttgctggattttaatggagattcaaagggcccgacggcggagggttttcgatactggattcatcgaccctcggagagtaaacgtcgcaatgctcgaccaatatccacaagaaacagaggacaatctcgtccatctcctgaaggcgcagcattacaagacgttcatactgttgccgtacaacacagaattccactgggtgcttttactcttcgacctgtcggcctgcaccgtcaacgtatatgactcaatggataaaaaagagtctacgtttgataaggttttcgaacttatagacagggcttggtatcggttccgtcatttgatccgcggcaaatggagagaaagacttaggcggaaattcaaatttccttgcgcaaagcaaaagcagggaactaacttgtgcggctattacgtgtgtgagtattgccactgccttgcagaccaaatcatcaccacaagagagctcgattttattcgcatgagggataacctgaccacacacaaggaatttatcgcggcggttcaagaccaactcatgggattcatcaacgaagaaatccttgatcccaagggtgaattctactacgacggaaacacaattcaccgatccttagcttctgagctagcagcgagtactactactacgtcgaaatcgtag

SEQ ID NO: 63917 - DNA, 2802 bp, Oryza sativa
  Clone ID: PAT_MRT4530_65112C.1
atggaagaagatgaagtggaagaggacaatattccagactttgctcagtacgctggatttgaaggaaatcaaacaggcgaggaggacagagatgctgattataacgacgttgcggaagatcttggtcagatgttgcaggattccaaggaggactacgaaagtgaaaagggggcctataaattggacaagatgttagaggaccatagaacgtcgttgtacccaggttgcgagcaggggcacaaaaagttggataccactctggagttcttgcaatggaaggcaaaaaatggtgttagtgacaaggcatttggcgatttattgaaactcgtcaagaacattcttccggaggaaaacaaattgcccgagacaacgtacgaggctaagaagatagtctgccctctaggactggaagttcagaagattcacgcatgtccgaatgattgtatcctatatcgcggtgaggagtacgagaacctagaagcatgccctatttgtaaagcactacgatacaacattagacgatatgatccaggtgaggttgacgggcagctaacgaagaagagaattcctgctaaggtgatgtggtatttccctataataacacggctaaggcgtttgttcaggaataaggggaatgctagaatgatgcgttggcacgctgaagaacgtcaacaggacgggatgctgagacaccccgccgatggttcgcagtggcgaaacatcgacagaaaatttaaagactttggaaaggacgcacgaaccatacggtttggtttaagtacggatggcatgaatccttttggagagatgagcagcggccatagcgcttggcccgttacgatgtgtatctacaacctcctcccttggctatgcatgaagaggaagtacataatgatgccgattattattcaaggccccaagcaacctggtaacgacatcaatgtgttcctacgaccactggtcgaagatcttaaactgttgtggaagaaggaaggtgtccccgtgtgggacgaggacaaacaggaggagtttaacctacgagcgctgctgttcataaccatcaacgattggcctgcacttagcaacctatccggacagtccaacaaggggtacaaggcttgcactcactgtatggatgaaacagaaagtacgtatcttaagcactgtaggaaggttgtgtacatgggttatcgtcgatttcttgctgcaaaccacccaatacggaagaaaggcaagcactttgaacataaggcggaccaccgtacaaagcctaaacatcgcagcgggaaaacaatgtttgctatggtgaaagatcttaaagtagtgtttggaaaggggcctggcagccagcctatagagagcgaagatggtgtatatggaaagtcgaaagatacactggaagcacgtaatgatctgaagcatatggaacaacgcggcgaccttcacccggaaccaaagaagaaaggcagccattacttgagtctagccagctacactcttagcaaggcagagaagaaaattatgtttcaatgcttggagagcatcaacataccatctggatactccacgaatataaagcgaataataagcacgaaggagaaaaagttcacaaacctaaagtctcataactgtcacgtgttgatgacacaactgctaccagttataataaggggtatcctcccagacaatgtccaggcaacaataacaaagctatgttctttcttgaatgcaatttcgcagaaggtcatcgatccggatagagatcggtattctgggcctgtgttcctacacaacatgtttcctttcgagaggtacatgggcgttctgaagaagtatgttcgtaaccgtgctcgtccagaggcaagcatcgcgaaggggtatggaacagaggaggtcattgaattcagcatagaatttattgaatatcttcacccaatcagggtacctgaatcacgccatgaagggagactacggggaaaggggactctcggaaggaaagcaataatgacggtagacaacaatttatttcgtaaagcccatttcacggttctgcaacaatcttcattggtggctccttacatcgaggagcacttggctctagttcacgccagaaacatcggtaagtccgatgcatggattacacggcatcacattgatactttccccgcgtggctgcgacaacatctcatgggtaacgagacgattaaccaacaactggccttcctggcgagggatccatctggttcgattgcgacattccagggatatgatatcaatggtgttgttcgtatcgatgccatgggacacgatggtaccactggtacgtattacggtgccatcgaggagatatgggaacttgactatggacctctcaaggtccctctgttccggtgccaatgggttaggttgactggtggaggcgtaatgattgatgacagtgggatgacaacggttgaccttaacaaggttggatactcagacgaaccttttgtccttgccaatgatgtaacgcaagttttttacgtgaaggacatgtctagcaaaggaaagaagggcaaagggcctgacgagccgaagcgccacgtggttctcccaggcaaaagaaaaatcgtcggagtagatgacaagactgacgaggattacgatcagtttgatgggcaatcccctttcacggtgacgattgactctagtatcctcctatcaaatgaagacaccccttacacatgtagcgatcacaaggaaggaacaatagtgaggagaaagtacatgcggacaaccgtcaccgccgatgtattgccgtaa

SEQ ID NO: 63918 - DNA, 394 bp, Oryza sativa
  Clone ID: PAT_MRT4530_65113C.1
ctgttttgcttcgcctgatggccaatccacccatctcttctctatgaggcacgggcactgcattgacaaggcggacgagcggatcagtgcgtacctgtgcctcgaggcgggcgcgcggcagggcgggcgcaggtggccggccggtacgtttcggcagggccttcctggcttcctccgcgccagagagcgacgcgacgcggcgtacgactggagaaccgcgcttgtccgcctcctcggcggcggcgtgctcacgcacgggcttctcgaagcgcccgcggacgtcggctcccgcaacgacgacccgcggcagcagcgccgctgcaacccgaagctgctaggcgtcgtcggcggcggcggccccgggagcaaggatgcgggacgcggcgctcggtga

SEQ ID NO: 63919 - DNA, 5514 bp, Oryza sativa
  Clone ID: PAT_MRT4530_65114C.1
atgagtgaccaagagtgcatggaggccaatcataggttagaggagaagattgatatgattttggagaagttgaatgaggtagaagctaataggagcaagttcttcaaggagatgagcgcctccatcaaggcaacagttgctgtcctcaaggatgcaccatatcctccaccccaggacccaccttcttcgatgctcaccacctattcgacgatgtgctccaacaacgatcaccctcgagcgacgtcgagctcaagccacattgacaaggagactgctccgacggttgtcctgggccttagggatggcgaggacaaggttcatgacccctgcatcgtcaccaaggactttcttgaggtcacgctcaccatgtgttcgatgaaatgctccagcccccacaccgtgcccgatctcaccatggttgcagtggttatgtgtgccaccactgccactacctctacggaactggtagtttttgaggacacaaccggcgtcgcctacatcaacacccctgactattctaagatggtgcacgccaagtgttcgacagccggcctcgacatcgatggtggcatggatcaggccgtggtcgtgttccagatcatgaagagtgtatccaaggtcgttccgatatctgtcgagccattgagcatcttctcactaagattgactgctaacctcaagcaggacagaccaacacccaccaagtgttcaatgaaaagtcctctgcacagaaacatggtattgttgattgtatatgatcttcatcatatcaccatggccaccaccaactcggataagttccttggcatcaacctggaaccttcggtgaatacaagtgcagaggctgcatatgctaactattggtctatcaacttgcttgagaatgtgacacacaagggaagtgcaagttatcaagccatctatgagatggatcggcaatggatgtacgctgaccggcggtccaaagagtttattgacggcgtgcactattttttgagagtggccgaagctaacaggcaaaggggttttatttgttgtccatgcaataagtgtaagaatcagaaggagtattctacatccaggactattcatttccacttgtttgagtcggggttcatgccaagctataattgttggacatcccacggagagcaaggtgttgaaatggaagaagatgaagtggaagacgacaatattccggactttgctcagtatgttggatttgaaggaaatcaaacgagcgaggaggaaatagctgctgatggtaacgacgttgcggatgatcttggtcagatgttgcaggacgccagggaggactgcgaaagtgaaaaggaggcccataaattggacaagatgttgaaggaccacagaacttcgttgtacccaggttgcgagcaggggcacaaaaagttggataccactctggagttgttgcaatggaaggcaaaaaatggtgttagtgacaaggcatttggcgatttattgaaactcgtcaagaacattcttccggggggaaacaaattgcccgagacaacgtacgaggctaagaagatagtctgcccgttaggactggaagttcataagattcacgcatgtccgaacgattgtatcctatatcgcggtgaggagtatgagaacctagaagcatgccctgtttgcaaagcactacgatacaagattagacgggacgatccaggagaagttgacgggcagctaacaaagaagagaattcttgctaaggtgatgtggtatttccctataataccacggctaaggcgtttgttcaggaacaaggggaatgctagaatgttgcgatggcacgctgaagagcgtcaacaggacaggatgctgagacaccccgccgatggttcgcagtggcgaaacatcgacagaaaatttaaagaatttggaaaggacgcacgaaacatacggtttggtttgagtacggatggcatgaatccttttggagagatgagcagcggccatagcacttggcccgttacgatgtgtatctacaacctccccccctggctatgcatgaagaggaagtacataatgatgccgattattattcaaggccccaagcaacctggtaacgacatcgacgtgtacctaagaccactggtcgaagatcttaaacagttgtggaagaaggaaggtgtccccgtgtgggacgaggacaaacaggaggagtttaacctacgagcgctgctgttcgtaaccatcaacgattggcctgcacttagcaacctatccggacagtccaacaaggggtacaaggcttgcactcactggatggatgaaacagaaagtacatatcttaagcactgtaggaaggttgtatacatgggtcatcgtcgattccttgcagcaaaccacccggtacggaagaaaggcaagcacttcgaacataaggccgaccaccgtacgaagcctaaacatcgcagcggaaaaacagtgtttgctatggttaaagatcttaaagtagtgttcggaaaggggcctggaagccagcatatagagagcgaagatggtgtatacggaaagtcgaaagatacactggaagcacgtaatgatctgaagcatatggaacaacgcggcgaccttcacccggaaccaaaggagaaaggaagccattacttgagtccagccagctacactcttagcaaggcagagaaggaaagtatgtttgaatgcttggagagcataaaggtaccgtctggatactccacgaatatcaagcgaataataagcacgaaggagaagaagttcacaaacctaaagtctcatgactgtcacgtgttgatgacacaactgctaccagttgtaataaggggtatccttccagacaatgtccgggcaacaataacaaagctatgtgcattcatgaacgcaatttcgcagaaggtcatcgatccggatagattagaagcccttcagaatgaagtggtgcaatgtctcaggtacatgggcgttctgaagaagtatgttcgtaaccatgctcgtccagaggcaagcatcgccaagggttatggaacagaggaggtcatcgaattttgcgtagaatttatcgaagaccttcgcccaatcggggtacctgaatcacgccatgaagggagactacggggaaagggaactctcggaaggaaagcaataacgacggtagacaacaatttattccgtaaagcccatttcactgttctgcaacactcttcattggtagctccttacatcgaggagcacttggctctagttcgcgccaggaacatcggtaagtccgatgcatggattacacggcatcacattgatactttccccgcgtggctacgacaacatctcatgggtaacgagtcgatcgaccaacaacttgccttcttggcgaggggaccgtctgggtcgatcgcgacattccagggatatgagatcaatgggtacacattctacacgagagcccaagacatgaagagcacgaaccaaaacagcgctgttcgtgtcgatgccatgggacacgatggaacaactgccacgtattacggtgccatcgaggacatatgggaacttgactatggtcctctcaaggttcctctgttccggtgccaatgggttaggttgactggtggaggcgtaatgattgatgacagtgggatgacaactgttgaccttaacaaggttggatactcggacgaacatcggtcccatgatctccagccgaccattcctcctgcaatggtgagcccgtcaggaaaccgtagcagctgcgcctcaacggggcaggtaggatcacagagcatggacgccatgcaaacacaggacgaatcgacatgtcccgttgatgacatcactcagcggataccatgtgagctgcatattcctttcaagaacttatcaataaaggtggcgtcgggcatggccatcccaacggacccttcaggtacttaccactgcaggccgattccagcaggatactccaaggtcgaagttgagttggtcgaaggcgcgtacgaggacctcgagctggattaccctggaggagacggtgagacgcatctacgagacacatgccatgctattattctatggcacaggcggtacatcatcctccctgggcgacaagcggcgtctcgtgcaccatctcctccggctccgccatctcctcctcaggatcctgcaccgtctcctcctcatgctccgccagcaccgtctccaccgcaggctccagcatcgactcctcctcaggatcctgcaccgactcctcgtgctcctacacctactcccccgcaagctcctcttccggcaccttcaaagtcaagggcccccccagctccaccgcttgcccacacaagggcaacaaagaaggcgaaagttgacgccgccaagaacaaggacccggggggtatgtctgcatctgtcaaggaggccatcaagctatcggactatgagcgaacgctgaagaaagcatcttctggaaagtccaaaccagtccctcagcttggagagcaaccaaaccaggagatcgagccgttggtgaccggtaaagaaatgacgatagaacaatttattactgacaccggtctaactacggatcaattgctaggagtcgcaccaatcgaaaaggcggaagtgaaatacatgtacgaactcggtaaaccgcttgtcaagcctgagctgctgcagtccctacccacacaaatgtacaagttccatcagctgtacatggagatgagcgccaccggtagagagatgatcggagcgaggatcagggacacggacttcttgcaaggagatgacattctctggatcaatttcaggggaatctacgaactataccagctggacgccctcgacgtctctattatgagttgctggattttaatggagattcaaagggcccgacggcggagggttttcgatactggattcatcgaccctcggaaagtaaacgtcgcaatgctcgaccaatatccacaagaaacagaggacaatctcgtccatctcctgaaggcgcagcattacaagacgttcatactgttgccatacaacacagaattccactgggtgcttttactcatcgacctggaggcctgcaccgtcaacgtatatgactcaatggataaaaaagagtctacgtttgacaaggttttcgaacttatagacagggcttggtatcggttccgtcatttggtccgcggcaaatggagagaaagacttaggcggaagttcaaatttccttgcgcaaagcaaaagcagggaactaacttgtgcggctattacgtgtgcgagtattgccactgccttgcagaccaaatcatcaccacaagagagctcgattttattcgcatgagggataacctgaccacacacaaggaatttatcgcggcggttcaagaacaactcatgggatttatcaacgaagaaatccttgatcccaagggtgaattctactacgacggaaacacaattcaccggtccttagcttctgagctagcagcgagtactactacgtcgaaatcgtag

SEQ ID NO: 63920 - DNA, 249 bp, Oryza sativa
  unsure (1)..(249): unsure at all n locations
  Clone ID: PAT_MRT4530_65115C.1
atgttggtcacagagcacacatctgtccgggtgaggcaaacccntggaacgcagacgccagacgagaaatcactcagcgtctatcggtctatgtggttcacgaacgcgagagcctgggaactacccgccttggccagacaccgacctaagcatgggaggtttcaggagaatgatttctacggtttcgaagaaacagtgtcgtgtgtattgggcaaggagaacaaggcccaggtgaagcgcaaaatctag

SEQ ID NO: 63921 - DNA, 2131 bp, Oryza sativa
  Clone ID: PAT_MRT4530_65116C.1
atggatcggcaatggatgtatgctgaccggcggtcaaaagagtttattgacggcgtgcattattttttgagagtggccgaagctaacaggcataagggttttatttgttgtccatgcaataagtgtaagaatcagaaggagtattctgcatccaggactattcatttccacttgtttgagtcggggttcatgccaagctataattgttggacatcccacggagagcaaggtgttgaaatggaagaagatgaagtggaagacgacaatattctggactttgctcagtacattggatttgaaggaaatcaaaccggtgaggaggaaagggatactgatgggcacaaaaagttggataccactctggagttcttgcaatggaaggaaaaaaatggtgttagtgacaaggcatttggcgatttattgaaactcgtcaagaacattcttccggagggaaacaaattgcccgagacaacatacgaggctaagaaaatagtctgccctctaggactggaagttcagaagattcacacatgtccgaatgattgtatcctatatcgcggtgaggagtacgagaacctagaagcatgccctgtttgcaaagcactacgatacaagattagacgagacgatccaggagaaagaagagaattcctgctaaggaacaaggggaatgctagaatgatacgatggcatgctgaagagcgtcaacaggacgggatgctgagacaccccgccgatgattcgcagtggcgaaacatcgacagaaaatttaaagactttggaaaggacgcacgaaacatacggtttggattaagcttcaagcaacctggtaacgacatcgatgtgtacctaagaccactggtcgaagatcttaaactattgtggaaaaagaaaggtgtccccatgtgggacgaggacaaacaagaggagtttaacctactagcgctgttgttcgtaaccatcaacgattggcctgcacttagcaacctttccggtcagtccaacaaggggtacaaggcttgcattcactgtatggatgaaacagaaagtacgtatcttaagcactgtaggaaggttgtgtacatgtgtcatcgtcgattccttgctgcaaaccacccggtacggaagaaaggcaagcactttgaacataaggcagaccaccgtacgaagcctaaacatcgcagcaggaaaacagtgtttgatatggttaaagatcttaaagtaatgttcgaaaaggggcctggaagccagcctatagagagcgaagatggtgtatatggaaagtcgaaagatacactggaagcacgtaatgatctgaagcatatggaacaacgcggcgaccttcacccggaaccaaaggagaaaggaagccattacttgagtccagccagctacactcttagcaaggcagagaaggaaagtatgtttgaatgcttggagagcataaaggtactgtctagatactccacgaatatcaagcgaataataagcacgaaggagaagaagttcacaaacctaaagtctcatgactgtcacgtgttgatgacacaactgctaccaattgtaataaggggtatccttccagacaatgtccgggcaacaataacaaagctatgtgcattcatgaacgcaatttcgcagaaggtcatcgatccggatagattagaagcccttcagaatgatgtgctgcaatgtcttgtcagttttgagttgatatttccaccttcatttttcaatataatgacgcatctgctttgtcaccttgtcaaagagatcagtattctcgggcctgtatacctacacaacatgtttcctttcgagaggtacatgggcgttatgaaaaagtatgttcgtaaccgttctcgtctagaggcaagcatcgccaaagggtatggaacagaggaggtcatcgaattttgcgtagaatttattgaagaccttcgcctaatcagggtacctgaatcacgccataaagggagactacggggaaagggaactctcggaaggaaagcaataatgacggtagacaacaatttattccgtaaagcccatttcgcggttctgcaacaatcttcattggtagctccttacatcgaggagaatttggctctagttcgcaccagaataatcg

SEQ ID NO: 63922 - DNA, 2027 bp, Oryza sativa
  Clone ID: PAT_MRT4530_65117C.1
gaagttgacgggcagctaacgaagaagagaattcctgctaaggtgatgtggtatttccctataataccacggctaaggcgtttgttcaagaacaaggggaatgttagaatgatgcgttggcacgctgaagagcgtcaacaagacgggatgttgagacaccctgccgatggttcgcagtggcgaaacatcgatagaaaatttaaatactttggaaaggacgcacgaaacgtacggtttcgtttaagtatggatggtatgaatccttttggagagatgagcagcggctatagcacttggcccgttacgatgtgtatctacaacctcccccctggctatacatgaagaggaagtacataatgatgccaattattattcaaggccccaagcaacctggtaatgacatcgatgtgtacctaagaccactggtcgaagatcttaaactgttgtagaagaaggaaggtgtccccgtgtgtaacgaggacaaacaggaggagtttaacgtacgagtgctactgttcgtaaccatgaacgattggcctgcacttagcaacctatccgggtagtccaacaaggggtacaaggcttgcactcactgtatggatgaaacagaaagtacgtatcttaagcactgtcggaaggttgtgtacatgggtcatcgtcgattccttgcagcaaaccacccagtacggaagaaaggcaagcactttgaacatacggtggaccaccgtacgaagccaaaacatcgcagcggtaaaacagtgtttgctatggtgaaagatcttaaagtagtgcttggaaaggggcctagcagccagcctatagagagcgaagatggtgtatatggaaagtcgaaagatacactggaagcacgtaatgatctgaaacatatggaacaacgcagcaaccttcacccggaaccaaaggagaaaggaagccattacttgagtccagccagctacactcttagcaaggcagagaaggacagtatgtttgaatgcttggagagcatcaaggtatcgtcaggatactccacgaatataaagcgaataataagcacgaaggagaagaagttcacaaacataaagtctcatgactatcacgtgttgatgacacagctgctaccagttgtaataaggggtatcctcccagacaatgtccgggcaacaataacaaagctatgtgctttcatgaacgcaatttcgcagaaggtcatcgatccggatagattagaagcccttcagaataatgtggtgcaatgtcttgtcagctttgagttgatatttccaccttcatttttcaatataatgacgcatctgctttgtcaccttgtcaaagagatcggtattctcgaccctgtgtacctacacaacatgtttcctttcgagtggtacatgggcgttctgaagaaatatattcgtaaccgtgctcgtccagagggatatgaaatcaatgggtacacattctacacgagagcccaagacatgaagagcacgaaccagaacagtgttgttcgtatcgatgccatgggacacgatggtacaactggcacgtattacggtgccatcgaggacatatgggaacttgactatggacctctcaaggtccctctgttccggtgcctatgggttaggttgactggtggaggcgtaacgaatgatgacagtgggatgacaacggttgaccttaacaaggttggatactcggacgaaccttttgtccttgccaatgatgtaacccaagttttttacgtcaaggacatgtctagcaaaggaaaaaaggctaaagggcttgacgagccgaagcgccacgtggttctcccaggaaaaagaaaaatcgtcggagtagaggacaagactgacgagaattacaatcagtttgatgggcaaccccctttcacggtgacgattgaccctagcatcctcctatcaaatgaagacaccccttactcacgtagccatcacaaggaaggaacaatagtgaggagaaagtacgtgcggtcaactgtcaccgctgatgtattgccgtaa

SEQ ID NO: 63923 - DNA, 6469 bp, Oryza sativa
  Clone ID: PAT_MRT4530_65118C.1
atgaatcggcaatggatgtacactgaccggcggtccaaagagtttattgacggcgtgtattattttttgagagtggccgaaactaacaggcataagggttttatttgttgtccatgcaataagtgcaagaatcagaaggagtattttgcatccaagactattcatttccacttgtttgagtcggggttcttgctaagctataattgttggacatcccacggagagcgaggtgttgaaatggaagaagatgaagtggaagacgacaatattccggacttacgttggatttgaaagaaatcaaacgggcgaggaggaaagggatgctgatggtaacgacgttgcggatgatcttggtcaaatattgtaggacgccaaggaggactgcgaaagtgaaaagggggcccataaattagacaagatgttagaggaccacagaacatcgttgtacccaggttgcgagcaggggcacaaaaagttggataccactctggagttcttacaatggaaggcaaaaaatggtattagtgacaaggcatttggcgatttattgaaactcgtcaagaacattcttccggagagaaacaaattgcccgagacaacttacgaggctaagaagatagtctgccctctaggactggaagttcaaaagattcacacatgtccgaatgattgtatcctatatggcggtgaggagtacgagaacttagaagcatgccctatttgcaaagcactacgatacaagattagacgagacgatccaggaaaagttgatgggcagttaacaaagaagagaattcctgctaaggtgatgtggtatttccttataataccacggctaaggcgtttgttcaggaacaaggggaatgctagaatgatgcgatggcacgctgaagagcgtcaacaggactggatgctgagacaccccgccaatggtttgtagtggcgaaacatcgacagaaaatttaaagactttggaaaggacgcacgaaacatacggtttgctttgagtacggatggcatgaatatccttttggagatatgagcagcggccatagcacttggtccgttacgatgtgtatctacaaccttccccctggctatgcatgaagaggaagtacataatgatgccgattattattcaaggccctaagcaacctggtaacgacatcgatgtgtacctaaaaccactggtcgaagatcttaaactgttgtggaagaaggaaggagtccccgtctgggacaaggacaaacatgaggagtttaacctacgagcgttgctgttcgtaaccatcaacgattggcctgcacttagcaacctatccggacagtccagcaaggggtacaaggcttgcactcactgtatggataaaacagaaagtacgtatcttaagcactataggaaggttgtgtacatgggtcatcgtcgattccttgcagcaaaccacccggtacggaagaaaggcaagcactttgaacataaggcggaccatcgtacgaagcctaaacatcgcagcgggaaaatagtgtttgctatggttaaagatcttaaagtagtgtttggaaaggggcctggaagccagcctatagagagcaaagatggtcacgcggcgatgtggaaaaagaactctatattttgggagtttccctattgggaattcttggacgtccgccacgcaattgacgtgacgcatctcactaagaacctttgcgtaaaccttcttggcttcctaggtgtatatggaaagtcgaaagatacactggaagcacgtaatgttctgaagcatatggaacaacgcggcgaccttcacccggaaccaaaggagaaaggaagccattacttgagtccagccagctacactcttagcaaggcatagaaggaaagtatgtttgaatgcttagagagtataaaggtatcgtctagatactccacgaatatcaagcgaataataagcacgaaggagaagaagttcacaaacctaaagtctcatgactgtcacgtgttgatgacacaactgctaccagttgtaataaggggtatccttctagacaatgtccgggcaacaataacaaaactatgtgcattcatgaatgcaatttcgcagaaggtcatcgatccggatatattagaagcccttcagaatgatgtggtgcaattccaccttcattttttaatataatgacgcatctgctttgtcaccttgtcaaagagatcagtattctcgggcctatgtacctacagaacatgttttctttcgagaggtacatgggtgttttgaagaagtatgttcgtagccgtgctcgtccagaggcaagcttcgctaaggggtatggaacagaggaggtcatcgaattttgcgtagaatttattgaagaccttcgtccaattggggtacctgaatcgcgccatgaagggagactacggggaaagggaactctcggaaggaaagcaataatgacggtagacaacaatttattccgtaaagcctatttcacagttctgcaacaatcttcattggtagctccttacatcgaggagcacttggctctagttcgggccagaaacatcggtcagtccgatgcatggattacacggcatcacattgatactttccccgcgttgctacgacaacatctcatgggtaacgagacgatcaaccaacaactggtcttcctggcaaggggaccatctgggtcgatcgcgacattccagggatatgagatcaatgggtacacattctacacgagagcccaagacatgaagagcacgaaccaaaacagcgctgttcgtatcgatgccatgggacacgatggaacaactggcatgtattacggtgccattgaggacatatgggagcttgagtatggtcctctcaaggtccctctgttccggtgccaatgggttaggttgactggtggaggcgtaatgattgatgacagtgggatgacaacggttgaccttaacaaggttggatactcggacgaaccttttgtccttgccaatgatgtaacgcaagtcttttacgtgaaggacatgtcaagcaaaggaaagaagggcagagggcctgacgagccgaagcgtcacgtggttctctcaacgcgccctcatcttctccaccaacacttagaagttttttccccgatcgatctctctcggcttctccttcgccgccactgcctagggcatccccgcaccgacgccgccgtcgtatctcgccgtcgtctcgtgcgcgtcgtcgtcgccacctccgtcgccgcctccccctctctctctctcaactatttcttgtatgaacagatggctgaccacgatgaggaatagatattgtacgatacaatcgcggagggaagcagctagtactggaacgaagaagaggggaacgaggatccaaaccagtacttgaacgaggaagggaacatggagagggatgcggaggggaaccaggaggggcacatggagagggatgtggaggggaaccaggaggaggaggctagtggaagtcaaccctccgctggatagaagaggacacgtgggcaacgaggtgccgtgaagaagcttgagggttggcacatcataacggaagtggacgaagacgaccgacctagtgtcccggcggaagcagccaagaactacgtacgtcacagcagttgggttatgcgggataacatgcctgtcagtacggtgtactggcgcagaacaaggacacgcagagatcatgagagctttgtcccagattcggagaaagagatgctatggaccacaatgctcgagacattcacccttcccatgggtacagaggacaaagtgaaaaggtggactctaaagaaaatgacagaacagtttcagagcttcaagggagatctataccagaaatacatcctgaaggggcagacaccgaacttcgacacattcccaaagctaagggatcactgggacgagttcgttgcatataagataggtcaacaagggcaggcgatcatggaaagaaacaaagaaaataccaccaagaagaagtaccatcaccacttggggtcaggcggctatagcgtcgcgatgccgaagtgggaggagatgaaggcaagcttgcttgagaggggtatcgaaccggctaccgctaattggccagatcgatcgaagttttggtactatgctcacggtggaacactcaacccagttgatggctccttggtcttcagcgatcagatacgcgaggctgcgcatcgactaacggacgcagtggaagcctcttctcagggcatgttccgacccgacagagagaaggacgagctgtcactcgccctgcagactccagagcatccaggacgaacacgagggaaaggggtgattccttggaagattgggttcaaggaggacatccacacgtacaggagtcagatgaggagcaagagagataccgaggcgaagattgcagatcttgagtacagggtatcgagctacgagctcagcatgcaagaggaggtggcaagtaaggttgatgaacgcatggccgcacatcggtcccatgatccccagccgaccattcctcctgcaatgatgagcccttcaggaaatcgtagcagctgcgcctcaacagggcaggtaggatcacaaagcatggacgccatgcaaacccaggacgaaaccacctgccccgttgatgacatcactcagcggacaccatgtgagctgcatattccctttaagaacttatcaataaaggtggcgtcgggcatggccatcccaacagacccttcaggtacttaccactgcaggccgattctagcaggatactccaaggtcgaagttgagttggtcgaaggtgcgtacgaggacctcgagttggattaccctagaggagacggcgagacgcatctacgagacacaagccacgccattatactatggcgcaagcggtacatcatcctccctaggcgacaagcggcgtctcgtgcaccatctcctccggctctgccatctcctcctcaggctcttgcaccgtctcctcctcatgctcctgcaccgtctccacctcaggctcctgcaccgactcctcctcaggttcctgcaccgactcctccttaagctcctacaccaactcctccgcatgctcctcgtccggcaccttccaagtcaagggccccccaagctccaccgcctgcccccacaagggcaacgaagaaggcgaaagttgacaccgccaagaacaaggacccggggtacgattgtacgcaagaggagcttgacgcttatgtggcattagaagtcaggagacaattgaagcctcgaagtccagaaaagaagattcctatagacccgagtgtcatgaacttcttcagggatatgtctgcacctgccaaggaggccataaagctatcggactatgagcgaacactcaagaaagcatcttctagaaagtccaaaccagtccctcagcttggagagcaaccaaatcaggagatcgagccgttggtgaccggtgaagattttggaatacaagaatttattaatgacactaggctaactacggatcaatttctacgaggcgcaccaatcgaaaaggcggaagtgaaatacatgtacgaactcggtaaattgcttatcaagcctgagcagctgcagtctctacccacacaaatgtacaagttccatcaactgtacatggagatgagcgccaccggtagagagatgatcggagcaaggatcagggacacggacttcaaacagcaatatattcttctataccttcatataatttgcataacacccttgtataagatatatagtatacactattattcagtgctatactgctaatctgctatgagctatcactccatcatcagtacatagttcatcaattattagtcatcacaaaacagcaacacacatcagtccattagtacagtacttagttcaatcacaaaatagctacttgcatttgatgattccatcataaatctgcagcacaaaagaaatcaaatcaatggtttaggctcgtcggctcgtcgctgggctgctggctgctgccgctgggctgttggctgctgccgctgggctgctggctgctgtcgagtcgcagaggcgaggcgtcgtcggctcgtcggtgtggctgtggcgtcgtcgtcagtggtggtagcggcggcgaaacggcgggacgtcgctgccgccgcgagacggcgccgcgaaacggcgggacagcgccgcaagatagtggcggaaggtgtgtggagtccacaggcatcatcgatgttgaacactgccgtcaacctacatcgccacctaagccatgcgtcccctccgtcgccactacaaccagcaccgataagcagcctctggcttggtggtccgcggctgccttcgactctcggccaaatccagctggccctccaactagaagtggccgcagccgcacctgtcatcaacacctatgacatggatctgaggacaagcatacttcgggactttcgctag

SEQ ID NO: 63924 - DNA, 959 bp, Oryza sativa
  Clone ID: PAT_MRT4530_65119C.1
gctcgtgggtttcttgtgcttttttgttctgttctgcgtgtgctgtagttgcctaggcagggcttttgaggcctccgccttctgacgtacagcagcatatagttaggcatcactgttctgttttccccttttgtaggactgcagcgctgggtaggtcctcggggcccagggttgccgtattgttcaattgttcttgataacttgatgagctctctccattagtaccactggttttggtatggcacaggtaatcttctcctccttctctggtatctggaaagctgatgcagggaaggttttcgtaatcccagcaatgctcttgcagatgagtttcccagtcttttgttcatcaagggcaatctcctctactggtacccacaccatgagctccctagtcttgatccctttgactttcttgatcctccccttctctgcaaaagcagtgatctcagtgccataagataccaaccttcctaagctttggaagacatggtctatcctcttcttttgcttgagccacacaaatccagtttcctcaacatagccacactccattatgtccttcaagggaagaaggccatttgggaggcctgcttccttgagcaagagccttgtgcattgttgacagatctcatcatcatagtagacctcggccttggccttgatttcatcagcaataacaagagccatcttctatgtatctcttctttttttcagctctgaggcagtttttggaggcttggctttgtatggtattatggctggcgttgttcatagtgaaacttggctacctttatataggaaatgccttgtcaaattgtgccttaacatgcataggattttccatcttgccattgtcaattaaggatggacaatatatcatgctcatataaaagctgtaggggcctctggctgagagtacttttgcaatgatgcaaaaatatcatcccataaactgt

SEQ ID NO: 63925 - DNA, 2589 bp, Oryza sativa
  Clone ID: PAT_MRT4530_6511C.1
attaagatggtggtgagtgcatccatgggggtgatgaacccgctgatggcaaagctcaccacgctcatgggcgacgagtacaagaagctcaaggggctcaggaagcaggtctccttcctcaaggatgagctcaccaccatgagcgctttcctcgagaagctcgcgctcatggatgatgatgatgatggtgagctcgatcctctggccaaggactggaggaaccacgtcagggagatggcctatgacatggaagactgcattgatgattacttcacaagtcatcttgatcatcgttactcttcctcagatgcagggttaatccgcaagatagctcgccgtctcagggcattgcgggtgcgtcatcgcatagccagccagatcaatgagctcaaggctcgtgtggtcgaggcaaatgagcgtcgcgtgagatacaggcttgatgactgtaacaacaaacatggtgtttctgccaatcctgctatagatccacggataacatcgctctaccaaaatgccgggagtcttgtgggtattgatggcccaagccaagaactaatccagctgttgtcgttagatcgtgataccgatcaacgacaactcaaagtggtgtccgtcgtgggatttggaggtctcggtaaaacaactcttgcaaaatatgtgtacgacaagatcgggcatcaattcgattgcacggcattcgtctcagtatcccacaaacctgacataacaaggatcctcagtagcatccaatccaagcttgacatagggggcacgtctcaagcttgcgacgacgtgcaacaactcatcgacgacatacgagcctatctggagcatgaaaggtatattattatagtcgatgacctgtggaaacaagaagcatgggttattattagttgtgcctttccaaacaatggcaaaggtagcagagtgatagtaaccacacgagtgaaagatgtggccaggttggcatgtggcaaggatggacaaatttacaaaatacagcctctgaacaataaggactcaagaaagttattcttcgatagagtatttaggcctgaagatagttgtgtcctgcagtatgaagaaatttcaactgaaatcttaaagaagtgtagtggcttgccacttgcaattgttactgtagggagcctcttagcctgtcgaccaagaacaatggaagaatggaagagcatacgggattctttgggtgccccgtttgacaaaaacaagagcttggaaggcatgaggaatattttaaacctgagttacaagaatcttcctcttcatctcaaaacatgcctcctatatattggtaaatatccagaggactatgagatcgggagggatgaactagttacggagtggatagctgaaggtattatgggtaaccctcatggggaaaacttggaggctactggtaatggctacttcagtgagcttatcaacaggggcttgattcaaccagagagcaccggctatgatggcggtcaagtcgacctcactgccattagccatgtgcttcaattgaggtatttgagagtggagacgcctggttgtgagatagatctccccagcaaaatatgtgggctcgtgcatttggagacattgtcaatattttcccataaagctgtaagtcggctcccttcagatattagcagtcttccccgcttgtcagtcctgtccctggtggttccatgggctacaaggctacccaacaagttaaacaagctaaaagggtcactacgcagtctcaccatactattcaatcccccggatgcgttaggcatggaggccattggtgagctgaaaaatctaagggacctaaacatctctgttaacaggtggcgggacgatgagatccttagcctttatgctctggggtcttccattggaaaactggatgaactcaggagtttgcaaattcatgtcccacctgctaccttaggtgatgttgacctgctgggctcattacccatttttcctcaaagtatcgagagactaatactacacggttggtgcttctccaaagtacctcgatggatcaacggtactctccgtaacctccaacatgtgttgctggaggtatcggagacatcgagtagcgaggttgaccttcttggtgaactaccctccctcgccgacctcgagctgagagtaggactcaagacaagagatgtcatcgcgttcggtggcactagagcatcattattccctgctctcctgaaactcaagctgcgtgtgggtgaacacgttgcctcaaggctgcagttccaggcaggggtgatgcccaagctccaaagcctccatctgtggttccggaattgtgagtcgggcattcacgtaacaccggagggtatgcagcacctcctgagcctccaaagcatctgcgtggagatatacctccgggatgaggagctgaaagcaacttatccatgggacgccatggagcgtgcgttcagggaaatcactggagcaaaccccaaccggccttccttcaaatttgagtagtcgtacgtaagcaattggtgggggaagcgaggcgagctggaggtagacgaagaagatgatgaaattggaattggaatttgg

SEQ ID NO: 63926 - DNA, 409 bp, Oryza sativa
  Clone ID: PAT_MRT4530_65120C.1
aatcggcacgaggagagagagagaactagtctcgagtttttttttttttttttgatgtaacccccccctgctttgtgtttcttctgtgtgtgcttgtcttagtttcaatagacacatcctttcttctggattgatgccattcaaggctttacaaatagagtttacacactgatggaacaaaaaaacaacagcaatcagttagcaaggctgggttatctatacaagtcattcatttgagcttgaacgggatgtgaagactgcaatatgttgattaaactaaattaattccgaatttgtttaatcttgatttcttcaagcctctgtggttgtaaagttgctatcgataggcatccctgcagtactaaccaaaatgtatccatactgcagttcctccctattcagcagcata

SEQ ID NO: 63927 - DNA, 396 bp, Oryza sativa
  Clone ID: PAT_MRT4530_65121C.1
aaggggggtgaactgcccaacaagatctttttcattggtctaaaaaaatataattatctcctacaattttattcggggggcatccatgggggtacatcactataaacctggaaacaacaaacaaatttggctaaataacaccgggtatggggcagtttatgccctaaaaacaaggtcaaaaacattggtattggtctttttggtggggggttttaacccctaaaaactttttggggttcccaaaaaaaaaatttttttgaagggtacaaaacctttttttggtgattcaaaacttgggtacagggggggaagtccatcacgatggcgggaatccctttgcagggctacatttattttatcggaagacatattttcctgggaaaaattgtaaatggg

SEQ ID NO: 63928 - DNA, 430 bp, Oryza sativa
  unsure (1)..(430): unsure at all n locations
  Clone ID: PAT_MRT4530_65122C.1
tttttatttcgtcaagcaaaatctgaataagcggggtaaatcctatgaaaagggggcaaaactcgcctctcagccatcagtccaactggtcaaggcccctcctcttctttcttctctcctctgcttcctcctgaagcggatgacgtcagcaatggcgatgagcttcctctccaccaccggccgctcctcctcccaggcacccctacccggccgccggctccctgngccgaatccctccctccccttccctctcagaccaccacaccgcctgtctcccttctccgctccccctcccgagccccatcgcctcacctaccgaacccactccacctcctcctgttccaggacacccacacgcgccggcctcctctctccggtcatctccacctggagaaccctcatcttcctccttggcgcctccctcctctcc

SEQ ID NO: 63929 - DNA, 2276 bp, Oryza sativa
  Clone ID: PAT_MRT4530_65123C.1
ccacgcgtccggaggaagcttcctcgtcgtcctttgttgggttgggttgggttgggttgggtccgtccgatgaatgtgaagaaatccaagactgacgagacgacagggccggtgcggtgcgacggcggtcggcttcggcttcttcgtttccatcgccggcggcggcgcctccttcccttcccttcccttctatgcgcggcctcctccgccgtgtctacctccgcctcccccctttccctcctgccacctctctttattattggtcaagaacaagacctgcagctgcagggcccaaccaccccatccctaggcgcatgtcgacgtcctctactgccgcggcggtcgttgccgagggctccgccgctcgccgcttctggatcgccgccgcctcgagggaggccgccttcgccgcctacacgcccttcctcgtctccctcgccgccggggccctccgcctggattccttccgccaatacatcgcccaggatgcctacttcctccacgccttcgcccgcgcctatgagatggccgaggagtgcgccgatgacgacgacgacaaggccaccatcgtcgtcctcaggaaggccatcctccgcgagctcaacctccacgcttccgtccttcaggaatggggagtcgatcccaacaaagaaatccctccaatcccagccacaactaagtacactgatttcttacttgcaacttccactggaaaggttgatggtgggaaaggttctgataaaatggtcacaccattcgagaagacgaaaattgctgcatacactgttggggctatgaccccatgcatgaggctttatgcgtatctgggcaaagaacttgcagttttcttgaaacaggatgaaaatcacccatacaagaaatggattgagacttatgcatccagtgattttgagaataacgcactccaaatagaagagttgcttgataaactaagtgtctctctaactggcgaggagcttgagattattgggaagctctaccagcaagctatgaggctggaagttgagttcttctctgctcagccagtagaccaacctgttgtagctccactctcaagatattgtggtccgaaagataagctcttgatattttgtgattttgatttgacatgcactgttgttgattcatctgccattttggcggagattgcaatcttgtcacaccaaaaggctagtcaaggtggggctgatagttcccttgatcgtacaaaatcagcggacttgagaaattcatggaacatgctctcaaatcaatacatggaagagtatgagcaatgcatagcaagcttgcttcctccagaagaagcaaggtcactagactatgatcaactgtataaaggtttggaggtgctatcgcagtttgagaaacttgcaaactctagggtggttgattctggtgtcctgaggggaatgaatttagatgacatccgaaaagctggagagaggcttattctgcaagatggatgcaaaattttttttcaaaagattggcaaaacaagggagaacctcaatttagatgtccatattctttcctattgctggtgcgcagatcttataaggtcagctttttcatcagttggttgtctagacgggctgaacatacattcaaatgagtttgcttttgagggatctgtttcaactggtcatattaacagacaaatggagtctcctctggacaaagctgaaaagttcaagagcatcaaaagcgacgtgggtagtacagggacattattgtcagtctatattggggactcggttggagatttgctttgcttgttggaggcagatattggtattgttgttggatcaagcacaaccttgcggagagtgggcaaacagtttggtgtttcatttgttcctctgttcactgggttggtagagaagcagaggcgaatagaaaaggaagaatcatccatcttcaaggcacggtctggaattctttatacggtttctagctggtcggaggtacaggctttcatcctgggaaatgatttcagctgattgctggtgcccttgtgaatcgttttccttggcaaacaagtgtacaagactggtgccaattgatggacttgatacgagtaaaactcgatgtgcccattttattaaagccgcatgcgtgccgactctcttcctgtacgaatgaattgaacaccttgtgttgtccaatggttttgtatgatcaatgtgtcattgattacacaatcgatggaccccttttcattcgggggtcatttcataaaaatatttttacttttc

SEQ ID NO: 63930 - DNA, 230 bp, Oryza sativa
  Clone ID: PAT_MRT4530_65124C.1
cgtgatgccgcgagtgccgctgcgccgccattcgccggatggtgaggagctactaggagagcatgccgatgcccctgaagcaaggctggtcgtcgtcgtcgccggagtactacagctgcgaggagtcttcttccgagcagtggtactactgcgaggggtcttctgaggagggctactactgaaagcagtactagcgatcatgtatgacccgcgtgaggctgaccacggtg

SEQ ID NO: 63931 - DNA, 773 bp, Oryza sativa
  unsure (1)..(773): unsure at all n locations
  Clone ID: PAT_MRT4530_65125C.1
gataggaatgctgtagtaatgtcttccccttactgctgtagtggtacaactcacttgggcatttcaactgagaagagcatgccgacaagaaaattcatatgctttgcattgctttctcttctgcgaattgatgcaaggttatacattaatcatgacactgaaagaggcaaatttgcacttgacattccagaaaacacccagtaaagcaaaatgctttgaattctcgatgtccaaaatgctagtacaaaaggaaaaactttcacctgaaaaataaacatgctacatgggaactgaagagaggatgcatgcctaaactgctgcaagcaaaccaaatttcatggcaaacttcttctgattacagtcaagcatctcactgaggctgcaccttgaattcatctgcttgagcaccttgtggcggtactccaggctcctcttgagaccaggcgaaagaactgggggtaatccaccacctcacccatgtcccgccccattcntcaacaaggaacttcatcctaggntccaggcaatgcttgacactcttgatgagaacaggagggtatccagccaccaatgccatgacctgatccttgctgaaaccgcagctctgtaagaacggncaaattggggccgcagaatcttatcgacatctcgcgacaaaatatccgggaaactccaggatcancccctgaagattgacccctcaagcccgaacgncggacttgaggaantcgggcagtaggacggaaggggctgtcaaacactgtaacccatga

SEQ ID NO: 63932 - DNA, 2192 bp, Oryza sativa
  Clone ID: PAT_MRT4530_65126C.1
gaaaaaaaatggaggaataaaaagggcaagacagagagagagaaaaaaaaaggcaggcaagagaggagagaatcccaattccccaagtacacgagaggggagaggagagcagagcgcactacaagagaggagagagagagagagggtgtgaggaggagagaggggcagccagcagcaggggcagaagcattagaagcgggcagcagtagatagagccatctatctgtacagatcacggcaaggagattagagagggagcgaaagatctttccttatttttttttgtatcaaaaatctcagaagagcaggaggaaagaggaataaatcgggagcgagggagaaggcatgatgctggaaggcaactcctgcctcatctcgcgctccctgccgagctcctgcgagccggagtcccagtgggcgtacctctcccacgaggtgctcaacggcaagcgcccggcgccggaggatgcggaagccgaggacatggacgaggttgacttcggcggcgggaagcgcagcaagccgccatcgccgcagccgcacacgccggacatatctgagggccatggctccagtcgccatgttgccgcctctggcggcggagaggagcatggcaacgggagcagcctcattggtgcgattggccgtgaccttaccatcaattgcctcctccggctgtcacggtcagactatggctcggtggcctccctgaacaaggacttccggtcgctcgtgcgcaacggggagatctaccgcctgcgtcgccagagtggggtggcagagcactgggtctacttctcctgtaacgtcctcgagtgggacgcttacgacccatatcgcgagcgctggatccaagtgcccaagatgccaccagatgaatgcttcatgtgttctgacaaggaatcacttgctgtgggcactgaacttcttgtgtttgcgatggcacacattgtgttcagatatagcattctaaccaattcatggacacgggctgatccgatgatctcaccacggtgcttgtttgggtcaacaagtgttggggcaaaggcatatgttgctgggggcactgattcttctggcaggatattgagctctgcagaaatgtacgactcggagacacattcttggacaccccttcccagcatgaatcgggcaaggaagatgtgctccggggtgttcatggatggcaagttctatgtggttggtggtgttgccagcaacaacaaggtgttgacatgcggtgaggaatatgacctgaagaggcgatcttggagggtgatcgaaaacatgtctgagggtctcaacggagtgactggtgctcctccacttattgctgttgttaacaatgagctttatgctgctgattatagtgaaaaggatgtgaagaagtatgacaagcaaaacaataaatggatcactcttggtaagttgcctgaacggtctgtgtcaatgaatgggtggggccttgctttccgagcatgtggtgatcggttgattgtcatcggcggcccaaggacttctattggtggtacgattgagcttaattcatggaccccggatgagcggccgcctgtgtggaatttgattgccaggcggccatctgggaacttcgtgtataattgtgctgtgatgggctgttgaatccactgaataaagattcaatatggtggattatttatgaaggatggtatgcacaaaggcagcctgttcaattgcttcagtcctgatgctccgtagcgatttctgccttctgtccagtttcagattcaactgggcatctgctgagtggcagcagtcatgtaaccccctgagttcttctaatacttctgttttcctcgctaatccatttcaacatttgcatttggatcaactgctcgtgatttgaaagatacgagactatgcaaaacagtgttatattaataatctaggaacagctttcagaaggcttttcactattgatgaacaacctgttaagcaatactcgattcatatgtggctgcaacaaagatattcatcaattatgaacaccatgccttatgtttgcatgtataattatctattatcaactttacttgcttcatgacttgcttgttgttcatgaagtgttttactagcaacaatcatatgtttcaccctagttgtgacttttgtttgtaaaaaaaaaaaaaaaaaaacgacgagaccgggtgcat

SEQ ID NO: 63933 - DNA, 573 bp, Oryza sativa
  Clone ID: PAT_MRT4530_65127C.1
gtgttacttaatccatgctttttcccgcatttgttgctgtctttttttttctgttatgggtttcattcgctaagcaaccccccaaaatcattaggctatttaccacgtgactacacatgctttcaaatgaatgcagagtcaatttttggtgcactagttcttgactcttggtttggcatatgaaacttctaaagcagacacttgcatcatgttactttatttagcaaacaattggttctgttactacttctgagtttcagtcatctgaatattggttgattactcaatcactgtgcagtaatacctatacattaaaaacacaaatactccagcagtatgtagattatttttgtgcactgaattctctggcatagtaggcaaagggaagagcaatagtcacttgtgttagtcatactgtttttaagtccttgtttaggtgttttagcatccgctcccctcctctcttttgctctattaacagaaagaaaggggaaaaagttccaggtctgagattttcagtacatctctgtactatcccaactctcttatgcctttggacagagcattttcatt

SEQ ID NO: 63934 - DNA, 109 bp, Oryza sativa
  Clone ID: PAT_MRT4530_65128C.1
atggcgttggaggatttcgtcagggagctcgccagtctccacaaccagggctttccttggaagccgttttttgttctcatatatagacgatctgacagctgggccattg

SEQ ID NO: 63935 - DNA, 125 bp, Oryza sativa
  Clone ID: PAT_MRT4530_65129C.1
acgtccacgcgtccggaggttctagtagcacgaaggagagagcttgcagagctgtagagatcgccccctacgtgatggcgtcgagggacaccaccgtctgtacattgcagggctcaagtccaccg

SEQ ID NO: 63936 - DNA, 439 bp, Oryza sativa
  Clone ID: PAT_MRT4530_6512C.1
ttcaatatccccaaaatccatcggtgcacgaggggaggttcacaaggcgagtcgggtggtaaggtttggtgcgctcccgattgatgcggccatgacgatacggaacctgccggatgcctccagtggatcgtacgacgcgcgaggaggactaccggcaggaggcgaggggccggggccatatcggacgcaggcgcgaggtggtcaccttcgcgcggattagggctaaacgctcgctccaaggcgcccgcgcgagggtgctgttttacccgactctgctctacaacgtcctacggaaccggtttgagtttgagttctcgttgtgggatcgcatcgaccactatgttttgctacggcgctgctcctgtctatattgatgtacagcatcttaagcaacttggagtaaggggcgttgtcacactgaatgaatagtatgaaaatc

SEQ ID NO: 63937 - DNA, 4312 bp, Oryza sativa
  Clone ID: PAT_MRT4530_65130C.1
tttttatttttggttttgctgttttatttcaactatatttttttattggataggaagtactgtacaattacatgtatatttacaaattgaaggtgctttacagatgccagctgatcaattacaccctcttctctgcatattcattgtcacaggttatggtcagttctgtacatcaaccaaaaaccttatgatcagctgaaagcctatgcagaggcttgcagtgtcctaaattaacagcctggcttcagagaatacatgagcgcctaaccatcacttctttttggagccagtgcgattgaaggtgtgggctctttcccattgcgcaacgtcttcaacccgcgacggtggtggtggtaggacgtcgcgctctaccatatcccagccttctaaaatgttgtctggaactccaccatgcttcgtcggtttaccgctatacaggaagctcgtgttggagttcaacaggaggttgtccagagaacattatagctgtgttcacactgtccatcaggctgctgttagatgagatagcggagctcgctttccatatagatctatttagttgctgtccttgcttctctgaccttgaagcaacgttcgattgaagagttgtgcgaaggacctttaatgatgatagcatatggagcaactttgcaaatgcttcaaaagtagaaagattggatggcacatccatacccaatgagttatagtaataggtagtaatggcagtaacacttgtctttagtaatgatattcctctttgcaaatcttggtgcctctccatggagtgagaagatgcaatagagaagttaaagctattgcttctcttggagtcaagaaccgatttgttgtctgaatcaacagattgaacaccaaagttacccgaaccactttccgtccatgaattatcctcaccaacagagcaattatttttcctaggtataaaaagtgggtagactttgctttgggactgtcgtgtgctccagtaggaactacgctgccatacacgtgaacacgaagccccaaagccagatatgtggagggcaggtgcggctaggataggaactacaatactgaggagctgtaacatgtaccccaaagaagctgataattcttcggatggaactgaatgtgggtcaagaccacgaggtagacgagcgttgcatattacatcatatggaccattgtagccatcattctgttcgccatccttaataactcgtcgcaatgggaacaatctgcaaagttgcttcatagcttttgactgcatttttaaatgctctgaggtagttgccataagacccatctgtgctgctttcatggcattggtgtgcatcaccgatgaatcatttcgcttctttttcagcgtgacaaaagccaaattcaacaatgccgttctctctctgagatcacgtgatgcctgctcagctttcttcttctcctccagtttctctgctcgtcccctttcctctataaacaagtcaaagatgcagtctttcaggataatggtcttggcatcgaggcgcgtggctatacgggcgttgagggagtcgcggagattcttcatcatccgcagcttcgcgtggtattccgccagcgctgccttcttccctttgccgcgtgctgcaagcttggcagataccacctcttctgaaacaggcatgtagtagatcctcggagaggcctgtgtcttcctaaagagatcatcaagagtcaccaccacaggtggttctgggttctttggagcgggcggaagcatctccctcgctggtgcgttgttgaaggttggaagcctagcaagtgctggtggtgtgggtaatagcccccttgatgtatcagcagcatgaggaggcatgatttggttggccttggattggtgggaaggtgctgtagctgctgtggggttgataggtgctggaggtgggggagggggttcaagtttggccttcacctcatgtggatcaacgaattcagcaactaaggaactgccattgtttggaggccattggagattgtaaacagcattcctggtagccagagcttcctccaccgaagagaatgtgacatagcaatgagtcttgataggatccatccaaaagctacaaacagatccagttttaccaagaagctcttgcacagctttcaaagtgaacgggcgcacaaatcgatcgattctcaaggaagttgttgcaggtttctgaggcggtggtaccatcctctccttcggagaatttccacgtgctgttgaatcagacctgccaaaagaacgtcttcgagcaggcgggtgtacaactttagaagcatcagaaccacttagtttggaagttgcttgctcaggtttgacatcatccacattccataggcgctgacgtttgattggctcattatttgcaacaacttcttgatcttcagctttcctcttttcagtcggcattactggcttctcttgacttatagcttccttttgatctacagatgaaccctcagtgacagtatcaaggaggatcacctcttttaccacatgctctaaggtgacatcattctttccttcgagataatcaggttttgtattggaatccacgtgcttagtttccatcacatcctcctccattgattcatctcctgaactcacatgttcaacttttgtattggaatccacgtgcttagtttccatcacatcctcctccattgattcatctcctgaactcacatgctctaaggtgacctcactctttccttcgagataatcaggtattgttttggaatccatgtgcttagtttccatcgcatcctcttccattggttcatcgcctggactcctatccaaatttagtttttcaggataaatactatcaggactgccttctttctttttcaagctcatatcagtatcttgcagagacatgtcgatcagagatatctctttgtcatcatctggtgtctgcaaatcatcaccaacggaggagggattgctggatgatggcttgacaatatcctgcttagactctagtcctaaatcaaaattgtcagcgttcatgttgccttctacattgtcgtttttattgactagtatatcatcaggagaaattgacacacacttaatttgagactctagatcttggttgacttcagatacctgatcctttggtccagactgctcgggtttgcagtcagtgcttatgtggtcagaatccttttggtccttctcatacattaaatcattctcattggaatctttcttaagaatcaggctctctgtaatcatttcctctgcacttgcaacagcgtcagcatgtgacaaaataacatcaagatgtgatgatttcgtttcctgttctagaatctcacagcctatactgacacatggttcacctttagcagatgattcctccaacttggtattagtactggtatcatcagatgatatgtcatcaacagtcattttcttgctgctgccattgtctggagtcttctctgcaatgacctcacaatgaatttcagcatgtgaacatacttccttcaccacattactgtcacttggaacagattctggatcaccttctttagttgcttctgcatcacctagagaattttcattagttccggccacatcaactagaggggcctcactgacctctgtaacagcaactagagcctccggactaacctctgcagcggcaacaactgcttcctgactaacttctgtagtagcaattgcactatctttactagcttctgtaacagagacaaggccttcattctttgcagcaacctcagaaggaccttcatcaacattttgttccgttgaagcctggataccagatgcatcagctaaaacaagagttccgtcctctgtactagcttctgtaacagaggcaaggccttcattctttgcagcaacctcagcaggaccttcatcaacattttgttccgttgaagcctggaaaccagatccatcatctaaaacaagagttccgccctctgtactagcttctataacagagacaaggccttcattctttgcagcaacctcagcagggccttcatcaacattttgttctgctgaagcctggaaaccagatgcatcatctaaaacaagagctccgtcttgtgtctgattctccacagggggagttccattgactgtttcttccccgccatcaataacctccccctgaagggcctcagcaagcctcttcacaagatcatccttcaaacctttaatagatagatccctcctacggagctcatccttcaattcagtaaccttccactcatcaattggtcggtcattcagcacaggacacgttgacat

SEQ ID NO: 63938 - DNA, 869 bp, Oryza sativa
  Clone ID: PAT_MRT4530_65131C.1
tagctggaatcagatgctatatatattaacagaaagctagcttgggttccagtagatagcacctggctgaactgaagaagtagtacgtagctagtgatagtgaagctagcttgggttccgtagatatccatatatatttaggcatgagcacggcatcggcaggcggcggagcgaaatcttcatcgagctggagtagtagtacatttttccggtggatcaaggcggcgaggtacgtagttgcggtggcggtgatcgtggcgatcgtggtgatgatagcgtacgccatcaagatggtcgggcgagagaggccgctggtggtgagtgtgaccggtcatacggtgaaggtgcagcggccgtcgaacatgtccgggaacctcaccttcgccttcaccgtcagggccgccaacaccggcggcttcggccaaatatactacaccaacatcaaggcgttattggccggcaggagcgcgtcgtcgccggcgtcgccgacatacttcgtcaaaacgggcctcttggacatggccgtgataccgcggctgacggccgtctcgcagtccttcgtgatgtccggcatcggtgccaacggggacgggacgatgagctccaaggatctcaggccctacttcatggacttgtacaagggcaacaccatgcgcgacgccgtgctccggcttaacggcacgctcatgaccgagatctactccggctacaacagcaccgcccgcaccgtcgtctactgctgcgagcccatcttcgtcggcgacgacgacgacgccccggacacgcctgagagaccctgcgtggagcagaacgaccattccatcgacatgacaaataaaaaaaacatgctaagctgcgagctcagctag

SEQ ID NO: 63939 - DNA, 212 bp, Oryza sativa
  unsure (1)..(212): unsure at all n locations
  Clone ID: PAT_MRT4530_65132C.1
cgctgcagcggagaagagtagtgtgtcaaccactctgtcgccacacgcgagtgtntggggagtgtcgctctggtgtgtgagtgtggtggcacagaacggagtgtctgattgtcactaagactgtggtgtctgtgtgtcaccacgctgtgtgtgtgtgtcgggtgtgtgagtgtgtgagaagtgtggctgtgtcacccctctgtcactacaat

SEQ ID NO: 63940 - DNA, 291 bp, Oryza sativa
  Clone ID: PAT_MRT4530_65133C.1
gaaaagggctaacacgctcactcgcatgggaaatatatatggagcgatcccgaaattcatggaggattttgcagaggctatctttacacgcttgagcgagtacacagtacagacaagcgtatacctgttgaggcttcaacaatgaagagagcctttgaccaacaagggggacatactacaactgcagccgagcacaccttcattcttaaacagcatggatgttgccagcatttgcctagggaggagtattactccatgtagctctatcgtactggcaatgggtagaacatg

SEQ ID NO: 63941 - DNA, 372 bp, Oryza sativa
  Clone ID: PAT_MRT4530_65134C.1
ggggaagccaaggccaaatcgcccgcgtaccaaaaaaggggggggggggaaaaaatataaccgcacccctttgacctggggcccaaaaacccgaaaggggggacctcccccaaaaacagggggcccccggtttaaaaaaaaagggccaggccccccggaatccgaaacccaaaaaaaaaccccccgggggggggcccaacccccaaattataggctgggccccccccccaaagggggggggccccccaaaaccacaaaaaatgccaaacataaagcccacattccccaagggaaaaggtggccaaaaacaaaaaaccccagggcgcttccccaaaaacacgggggttttggcccccgccaaagcagagggcc

SEQ ID NO: 63942 - DNA, 258 bp, Oryza sativa
  Clone ID: PAT_MRT4530_65135C.1
aattgacaacacaatatctcagtgatgaggttcataacgtgcacaacaccacacactacatgatcagatctcactatatctacaatactcaaccatacaacaacgaagtccataggaacacatacatccatccacaacacaccactgcatatactgggccccgtactcaaattgacactgaccaagatagacgcgcacgcccaggcacctatctagactagctcaacgcgatgcgtcgccatgttatcacaggggccc

SEQ ID NO: 63943 - DNA, 374 bp, Oryza sativa
  Clone ID: PAT_MRT4530_65136C.1
aggttcaggacaatacatttaaaacaatcaatgaaaaaaaaatatttcctgccctagggccttttggataaatgcgcatggcctttattatgacaatgcattggcttttttgggatccccatcaacaaggagacctatacgcacaaacatgcgtgctcctcgccctatcgccctttaaatttggatcgccaccggttccaaaaaggcttttaattaaaacaacttttttatttggaaaacctataggatcacattggccaaaacccggccggccacaaaacaaaattttttgagtaagtacctatggggaaaaaaaaaaataagctcacacaactacaaaataaaaatcatttccggctaaccggggtcggggg

SEQ ID NO: 63944 - DNA, 216 bp, Oryza sativa
  Clone ID: PAT_MRT4530_65137C.1
atggcgtataaatcgcaatggatggacgtggacgtgcagggccgtgctcgccggccgtgtgaagggatgaggatagggacgcgcggtcgcatggctgggatggctgcctgcgacaaggccggcggagaggggaaatgtgaggaggcgatgagaggagagcgaggcggcggcggagggggagactggagaagagaagggggagcagttcaggggtag

SEQ ID NO: 63945 - DNA, 483 bp, Oryza sativa
  Clone ID: PAT_MRT4530_65138C.1
cttataattgaaagagcggtatggtggtactatagtgggtcaattgcaccgccttggggcctcacttgattggtctcgtgaggcttttacaatggatgagcaaaggtcaaatgctgtaactgaagcttttgtaaggttacacaaggaaggcctgatatatagagataaccgccttgtgaattgggactgcacacttctgacttcaatttctgagatagaggttgatcatattgatcttaaagaagaaacaatgttaaagatccctggttatgctactcctgtacaatttggtgtgttgatatcttttgcctatcctcttgaagaagggctaggtgagattgttgttgcaacaactcgaattgaaacaatgcttggtgatacagcaatagctgttcatcctgaggataaaaagtatatgcatctgcatggacggtatgcagtccaccccttcaatggccgaaaactcaaaataatctgtgatgc

SEQ ID NO: 63946 - DNA, 381 bp, Oryza sativa
  unsure (1)..(381): unsure at all n locations
  Clone ID: PAT_MRT4530_65139C.1
aaaatgaacactagcaattctgtcattcatttccaatgttttacatagcaacatgccaacattcattagaatcgttctagtcatgaaaacttaatgattaaagcaaagttcaaaatgcataaccagacaattgacgcccccacggttcccttcatgtttccttcattgcgagaaaaaaanntgggtgaaaatgaaacaaatgtccggaacttcaaattgggcacatgnaaaattgtctgaaataaattnnnagctgcctttttctccttttaaagacccaaacgaagccaggattttgcattattgccaagccaaaatcaagatttgccattgcagtttaaattgttcaagtttaaaatgcatttgcatgccaatgcaacg

SEQ ID NO: 63947 - DNA, 150 bp, Oryza sativa
  Clone ID: PAT_MRT4530_6513C.1
atggcgtggcgaggtgagatccaagaaacagaagaagcttgcgaggcaggtggagagaagaagggagaccagccatggatggaagctggtaatctgcggggtgcagcagaggttgaagaatcctatggaagaaggcagatggaagcttga

SEQ ID NO: 63948 - DNA, 260 bp, Oryza sativa
  Clone ID: PAT_MRT4530_65140C.1
tgcttcttggtgctctcgctgctggctggctgcagctgcggcgccgtggtgaggtgtgaaggagacccatggatgtggtgccaaaaaaacccgaaaaggcccatgcatggtcatggatggtgctagagtagacggactggacggcaagagagagagagagcaagggaacaccaaccaaaccaaaccaaacaatctctcatgtgtttctctctctagacttgtagtagtagcggtggtagcggagagggagggagggtggg

SEQ ID NO: 63949 - DNA, 277 bp, Oryza sativa
  Clone ID: PAT_MRT4530_65141C.1
attagtcatttgctctctctctttgatttaatatgcttgtgcaagtagaaaaatattgctgacatggatgctgcttcgtagagagcctatagaataaccacttgtgggtgccctaagccaagatgttgcacccgcacagatggctctgctttggcatctgctcctttggcctaacacatgtgtttcactgtgccgcctgtggcttgctttactgctgtgtacgttatatccccctgaattctatccggttttttgtgagataaaaaaaaaaaaaaaa

SEQ ID NO: 63950 - DNA, 1743 bp, Oryza sativa
  Clone ID: PAT_MRT4530_65142C.1
atgggctccctcttcatcaggttccaagaggtacacacgctttctctcttcgccgtctacatccccccgcaaaccatcacctccggatcccgatctgctccttgcgcgagcgagagaagcgccgtggatccggctgtcaaaacactggctaagaatccgatgtttgctaacaatcgattgtttgctcgagatccaaggcatctccaattcgaagctgacgtaaatcgcctgtttctctacaccagctattaccgtttgggggctaatgctgaagagaaggacgcagaggagattattgacatggctagcaaagcttctgtttctgagcagcagaagcaagtacaggagaatgttcactatcaacttacaaatatgtgtcaagcaatggatagcattcttcttcctgatacaaaaaatggtgcttcagaagctaataattatcctcggcgtagtgggttgagtttcgctgttggcacaggagttgcatctgcaaacaagccagatgtcccttctactaggcctttaaatcgcgctgaattgtcaaataaatttagggatcactttcaatacacccttgacatcaggccgtcacaaatccctcacaaagatgcagggcaaggtctgttcttatctggagaaactaatgctggtgctgtcctagccatctaccctggagttgtatattcacctgcttattatcgatatatccctggatacccaaaaatcgacgcgtgcaacaactatctgatcacaaggtatgatggaacaataattgatgccaaaccatggcaattaggtggtgatagcagagaaatatgggatggctcagatttggtggattacaatgcagtgccatccaaaagccaagagagcaactctgatagggcatggaggatgctcagcaagcctctgaagaagggtcacactgaaaattttggggaagtgcttgaacgacgaaacccactcgcttttggtcactttgcaaaccatccaccaaaagggtcaactcccaatgtcatgatctgcccatatgattttccattgacagagaaggacatgagagtctacatccctaacattacttttggtggtgaagaagagcccgttacaatgaaacgatttggttcattctggttcaagtctggacgttctggtaatcaggaaggggagtctccagttctgaagactctagtgctggtgagtacaaggtccatatgtgatgaagagctcttcctgaactaccggtacagcaactcgaagaagcgaccagagtggtatatcccagttgatgaagaagaggataagagacgatggagctagttttgcacatcttagctgtgagcctgtaacaattcttcctgcattgctttctaacaattatttttgtcccggtgtcgatcggcaaattgcaactgggagtgatttagcttctgaagtgagatggcaattttattatgctcatctggagtccttgatcttaattaccattttggtagagtgcctgttctatactcttctcacaaggcttttgtaatgcataaaaaatatgagtaccaaactaccagttacatggtcattagtcctgggaactatgtgttcttaatcccaatattcttacggggaaataattcatcgatggttatggatatatcattacggttgctaaataagtactatcatatggttgtgcatagaaaaaaaaaaaaaaaaaaaaaaactgcagcccgggggatccactagttc

SEQ ID NO: 63951 - DNA, 463 bp, Oryza sativa
  Clone ID: PAT_MRT4530_65143C.1
cccacgcgttcggtggcgtcgggatgcattacgcccagatggctctgagcgcgagcgccaggccgtcgtactacgactactactacctggctatgaccgtcataacggggggcggcaagagcgtgcagctgccggagagggcgttcgtagacgggggcgccggtggaggcgccattttttactccggcgcgacgttcttctactattaccgcacggagttcgagccggcggcggtggcaggggtcgcggctcgcgaaggcaaggacaatcggtccaacgtgaaggaggacgtcctcttcctcaggccctgcttcacgatgccatcgtggacgaagacgatggaactaacgaagatgtcgctccactagaagagcgggtcccccatgaacctgcttgggacgaactacaccacggtgggcggaccggcttcgagcgtaggcgctgcgcctatggtcgaagccat

SEQ ID NO: 63952 - DNA, 255 bp, Oryza sativa
  Clone ID: PAT_MRT4530_65144C.1
atgacgctctctctcgtggcccgatcttctggtgaggggataactctcgctttgatcgagtgcaacatttgcgacgtggataccaaccagaacaagtccaggacgccgtgcaatcgctacaccacaaacgatgttgtaccaaccgtgacgcacgacccttttctcgtcgtcagcgatccaggcaccaaagtccaacgtcttggcgtcgtcaatgatattggtaatgccctcatccctttagcagccgagatatag

SEQ ID NO: 63953 - DNA, 300 bp, Oryza sativa
  Clone ID: PAT_MRT4530_65145C.1
atgggctcaattgaagcctgggtgcacatggatagccactcaaacaacaccactgccaagtggaggagcggctccaataggcaacggcggtggcccaccgatgaggaagggctgaagagggagctcgacgctggcggagaggaagccggttttcactatcgcattgcctacgcgggacctccaattctaaagacctccaattccaaagaacattgccaacaagcgaaggcaattgcagggatggcttttgttgatgcattgttgacattcagtgatagttgggacgatttcaagcagtaa

SEQ ID NO: 63954 - DNA, 1793 bp, Oryza sativa
  Clone ID: PAT_MRT4530_65146C.1
tccccccgctgccgccgtcccgcccggccgccgcggcctcgccatcgcccccggccaccacgcctctgcgacctggatattgtgtaggggcccgcgacccgacatgcctatgatggcgagagaggatgagaaggctgacgcaatggagattgatgggcagcatcagcaagtggccaacaccgccgtaccagatggcttcaatgctgattacctcaggatctactatggaaagctcttccctcatgttgatttcttcaagtggctttcatatggaaatgacgggaaacatccaggatgtgatcagtcgtatgtttgacgtcgagagttctcatttacactagagaatgacatctacggtcgtttccagtccattgatagcgtggctgaaatagagaacgctttcaaggaaaacgtgccctttcaagattgatattggacctgtatatagtgtagatcctgcaaagcggcatgcctatgctcaatcaggcaacaacgtctttgtgccagttgagagagaacttattttcgatatatttggtgatcctaaaatgctctggtactttcctgttaggctcaacaacgaacaaagggctgcaattgctgattattttcgcgtctacaaggtgggtggtgaaaatacgatgaagaaagtttcattgactggagctgttctccatcctttccttgcacggtcatacactgatgttctgaaaggcttctttgaagataagctactacttagccaacaactatttgcatctgaggagagatatcagaaaatacttgatcttatccctgatgaaaatgttgctagtgagctccatgataagtggcaaggaaacagacgatcttctatttcaaaggaagatgtaaatgctaccaggtgggagcaactaaagtcaaccttgcagtcaggaaaacacaaggggcttcgaagatgtatagaagagattgtcttctcatacacatatcctagacttgatatggaggtttctaagcacatgaatcatttgctgaaagcacccttttgcatacacccgaagacaggccgtgtttgtgttccaatcgatccaaataactgtgatgattttgatcctacgacagttccaactctgtcacaggtttttcagggcatcgtttctgcaaccattgctgaaagcctgcaaggaggaattagaaagctcatacaatgccaagctccagcagtccaagaataccttgacttggtaaaattcactcaacttccagctgatcttaccaacctagtgccccatgaaaagcttcttctccatgagacgaaccactgaacccggcattggctgtgttaactggttaaccacaacgctctatgaatgaggagcaaaatactctccgatgctgctgtcatgttagctttgctccaaggaagttgcaattgtagaatatccagtgaccgtcttagaggcagcttggtgctggcttgaaccttttgatctttcatgttgctgacttgatgttattaggataaattcctttaattgttgtgaaatgaattttataggattcctataagtcgctgaaaagaatgattgttaaatgcttcataccaagctagtagccgctataagatctagactagaattagtaaaattaaccatcaagattgcttagagcaatgctcggtttgtggttgatgactgttgagaatttctgtaagatgctgtaaaaataaaagtttcatcgtagtttattttaaaaaaaaaaaaaaaaaaggcaaaaaaaaaaaaaaaaaaaaaaaaaaaaaaaaaaaaaaa

SEQ ID NO: 63955 - DNA, 610 bp, Oryza sativa
  Clone ID: PAT_MRT4530_65147C.1
tacggcgccaaccaaactttcttaccgctcttacggagacggcttgcagccgcctgtgtacccgcctgctgccacgggggcagccgctcagacatgttcgagcgcacacaggccagcagacagcttgctatcaattcaggttcaggcagacagggcagcacatcagccagcacgggccaacactttcccagcttcgagtttcagccacagcaagcaagatgcaaggtcaggcagcacagtcaggcaggccagccaagggtgtacacacgccaacagtggctatcacaacagccaatgtacatgcatcacatccagcggcgagggcagccacagcagggcactctaccagcaggcacatcaggcacacacaagcttgcatcaagcttcatgcacacagccacagccaggcatcttccttcatgtgctacgaggcgccttcaagaaggtactcgtcgaggaggaggcaggcgccggagctggaggcggagtgccggaggagatcaaggagaaggttgcgtgaagtgtttgggctcaccggcgccggagaagatggtggctgattgtgcatgggtgtgatgatggaagcatgcaaaaaaaaaaaaaaaaaaaa

SEQ ID NO: 63956 - DNA, 846 bp, Oryza sativa
  Clone ID: PAT_MRT4530_65148C.1
gcacaacttaataataccccttgttagcaagacataaaaaggaatataggtacatatacatcacgctgcattacaattcacaactttctatcaaagcaatatcagaaaataagcattggaacaaaagagtaaatttcttaattgaattcccaggtttaaacactcttgacatgctttcaggttcagacaccaaacatactaaaaaaagctacacctgcccaacgcaaaagagaacagaatataaaagaaaaggaactgcgcaaaccaatgatccatcattgaaaaccaaaagtccaaaaaacctctactgctatccgcacatctcaccagacacaatcagctaaacttctagctctcctatgaaaccacctccaagtcctaaccaaaagcaacggagaaactcacaaggaaactcaaatggatcttgaattgccttgattgctgccttcccaacctatatagcccttcaccttacaccacccctcaatggctgaaatgatgagaaaaaacttaacagacgctcaaactggccaacttctcgtttgtcaactgaacatcttctggggtaacaccatttacagaaacggccaacacaccgttctctttcccatcaacttgtcctgctttaccatgaggctctttgtttaagacatcaatctctacctcagctgtttccttcttcagttgttgatgctttgccttcctctcttgcatcatcttctcacgattatcatagaaatcaaagtcatccagtaacgacgtcttgcagacatggtccttgaaaatcttaagcacttgaagccctggctcaagtttcacctcatgagtatctctgcagtttagaaa

SEQ ID NO: 63957 - DNA, 471 bp, Oryza sativa
  unsure (1)..(471): unsure at all n locations
  Clone ID: PAT_MRT4530_65149C.1
gctangatcaaacaataaaagcacatgggggatattaattcagcaggcctgcagacaaaaacatacacaaacagaggtagcagtacagttacaaaaaagcgtaccaaaaaatcacgcattgagacaaacaagccacacctcaaacaatcaatattctacagcataatacacacatgctaaagcgtatcggggagggataaatacagctacacacatgcgaccactaagcaaacacaattgccaaggagcctnctacaggtttacataaaggacacctgaggtgaacatatcatgctttataaccagctatacaaatgccatgaactggtgatgctcgttgtcaatcttaaatccggaaaaaaatctgagaagcttgattaggtttgggactaatatgttaacaacctcaagtggcttgtgtttatttgccgcaaataacttgaacacatgaaatgctttaatttgaaaatt

SEQ ID NO: 63958 - DNA, 164 bp, Oryza sativa
  Clone ID: PAT_MRT4530_6514C.1
aaataggcagtttggctcctttcaagtttgagtttttattttttggtatcacaaggttgtgcttttaatcgtaggatgaaacaaacaggctttaattttgccgacgattccagcaatgagaagttaattttgtttgtaataatatagggggattggatatcctt

SEQ ID NO: 63959 - DNA, 2440 bp, Oryza sativa
  Clone ID: PAT_MRT4530_65150C.1
gaaccccccccccctctcgttgctggtttttttttttttttttttttggaacaaaagagtaaatttcttaattgaattcccaggtttaaacactcttgacatgctttcaggttcagacaccaaacatactaaaaaaagctacacctgcccaacgcaaaagagaacagaatataaaagaaaaggaactgcgcaaaccaatgatccatcattgaaaaccaaaagtccaaaaaacctctactgctatccgcacatctcaccagacacaatcagctaaacttctagctctcctatgaaaccacctccaagtcctaaccaaaagcaacggagaaactcacaaggaaactcaaatggatcttgaattgccttgattgctgccttcccaacctatatagcccttcaccttacaccacccctcaatggctgaaatgatgagaaaaaacttaacagacgctcaaactggccaacttctcgtttgtcaactgaacatcttctggggtaacaccatttacagaaacggccaacacaccgttctctttcccatcaacttgtcctgctttaccatgaggctctttgtttaagacatcaatctctacctcagctgtttcctgcaatttggatttcacagttaacaagctgttctcagtgtccacagcattaagcagcttctcatcaacgaccttcttcagttgttgatgctttgccttcctctcttgcatcatcttctcacgattatcatagaaatcaaagtcatccagtaacgacgtcttgcagacatggtccttgaaaatcttaagcacttgaagccctggctcaagtttcacctcatgagtatctctgcaatttgtgactggtttgttctcattgttttcaagaatgatgtgtttcagtaagctgtttggaacatccttcacaatatgccactttacagggaaacagccagtccacttgtcctgttgccagtgttccaatgtcttgttaaaatcaacacggcccaccatctcagcaagaccaacaaactgaccacttgcattcacagagaaaagaaggaacacagaagaatcacttgatttttccttagcctcctgataagcagcatcaagctttttattaccattggatgtgctagcccaaacattgtacttaatgctcttgtgaacatcatcctcactgtatgatttgatgatgaagaatttagcatctgagtatgtttccacaaaatcagcccggttatactgatccttcatgacagaaagcgagctatcgctggctgaaagctcttgtcccttcacaggtgcaacagtagctccaactccctgttggttattgaaaagaccacttcttggccctcttcttagctcattaaacccatcctgatttccatggatataaccataggatccattacctcttcctctgggattgtatttgccatccgacagtgcattccatcccccgtacaatccagaaccatacaggtgtgatccataccataggccggacccatatgaactcccattgtatccatacattccactagccgagtaaattgatggtggtcccaacggagaagtaggtgtctgcagacccatgagatgaggatatgtgttctgattccttgactgtcccttgcttttagaattggaagttgtcagagaacgattgccagtgggaagtttttgctgcttgccattgaagatttgactactgtagcatggataagttgttcggttagtttggttctggtagttaccaaaacgcccactaggtcggccataggaaccgttggaacctggtgtattctggcttgccttcgggagcagattcgtctttttctgacctttcagactatcaacaccattagcagagcggaccccttggggcagtgcagccggattttcagtttttccattgttggaaggcttgccagtggtattctgttgtttgttgtatgtcggttggtactggtaatgctgagatccatacatctgactatcatgtcctgaagttgaataaccatatggagaatagccatagtacatatccccataagcaccagcagttggtgtctctgcaccatcatggctcaggtatgtggagtactccccccagccaccataggctccatagagataagccgggtacgttccatagtacatggcagcgtccttgtaatcctccacccgcggagtctctgtcgctgtctttgggttcccatcagccactgccacgctatttgccggagcctccatcaacgagagggacacgacgcgacgcgacgcgagctcgagggcgccgcgcgtcagccgaggtcgacgggggaggaggcgcgcggcggcggcggctgccggcgcaagatgcgtcgcggcggagtcgcagcaaaccttaccgaaatggcggagtggcggctagggttttgcctgcagcccggggatccactagt

SEQ ID NO: 63960 - DNA, 1548 bp, Oryza sativa
  Clone ID: PAT_MRT4530_65151C.1
taaaaagggggcatgttaatagatatagggggccctcaataaaacagtttatcttgcaaagccgccgcagagaaaattggattcttaaaaacggcccccccccaattctactagtatatattcgttatgaacaatctgttatatcttacatgttcaggttttttttttttgttattatcattttttttttgtggggaggatcaactttttttttttttttttttttattatgctcaacaccacaacattccttgccttccacagatgtcgggtaacaccacatatagcagcaatttttcacgtgttattggtcactcactcactaacaaataataggctctcgtaacgccagccaggtctatgagaaaaaacaacacagtggcatcttgcattattccctcgtgtgccaaaacaagcacggtgattgaacacgaagtatctctatcaagcaatatggtgtggtagccgtctcgctgcctctgggtcatttatttctacagaagggttacatcaggctgcaactttcttggaagtcaccgagttgataatagtggcaaaatccggacccttcaaagaggcaccaccaacaaggaagccgtcaatatcttctttctttgctagctcggcacaattggctgcatttacagaacctccatatataattcgaatgccggaagcaacctcaggtgacacgttggttttcaaccaatcacgaacagcagcatgaacttcctgagcttgctcaggagtagcaactttcccggttccaatagcccaaacaggctcatatgcaattactacatccgcccagtttgtaatactgtctgcaaaagccttcatctgcttaaaacagacgtcaaaagttttccctgcttctctctcttccaacagctcccctatgcaggcaataacctttacattttgactcaaggcatatgcagccttcttcccaataaactgatcatcttcaccaatgacatgtctacgctctgaatgcccaagaataacccattggcagccaatgtccaccaattgctccgcactgatctctccagtgtatgctcctccttttccaatccaaacattctgagcagatacctcaatacgatcagttagtgagttcttaacctgatcaatataaatgaatggtggtgcaaccacaacatcaacatcaggttcaagtgtagcagcattcaattcagtcacaagcttgctgacagagtccttcgttccattgcacttccagttgcctccaacgaagaacttgccggatccggccatggcgacgacgcgctgggcgcggcggcgggagcacccgaggcggagctgctgcggatgcgccggggcggcggcggcgacgcctgcgcggcggaggtcggcgaggcgggagaggtgggaggacgcgagggacgacggcgccgccattctctctctccaatccaacccaacccaatcctatccccttcgtcgcgcgctgcggttgctgggagcggagctcgcgagctgaggtgaggtgaggtggtgatgatgccctcgtgccgaattcct

SEQ ID NO: 63961 - DNA, 213 bp, Oryza sativa
  unsure (1)..(213): unsure at all n locations
  Clone ID: PAT_MRT4530_65152C.1
gtgatgatgcctcgtgcgttatttgcatgtgtgacctgaatacccgatggttataataaataatgcagctatgtgccttggctgcgatggtaaatgaaagtggtgcaccacgagcttggtgttccttcccttgtgcctgctgaagatgtttttgtccgaggaaccacccccnggttatgtataataattttcanatttctgtgaaaaaaaaaa

SEQ ID NO: 63962 - DNA, 1567 bp, Oryza sativa
  Clone ID: PAT_MRT4530_65153C.1
ccggccgggcacgccccttgctgcgccgcctccctcgtctcgtctcgttcctccctctccggcggccggatcggcgaaccccctcccgccgccgcacgcgcgcgcgctccccggcttcgccgccgagcagaggggtagcggaggctagggctcccttccgggaacttaacttccaacttcaagatgttccccccaggcaacaattctttggctctttcagccccaaggccaggaatggagctggctaacattcaacagcatcctaatcaagctcttgggcctggtgggaagcaacgtacatccagtctggaggccccaataatgctactcacaggccatcagagcgctgtgtactgtatgaagttcaaccctgcaggaactgtgatagcatcaggctcccatgacaaggatatcttcttgtggtatgtccatggtgactgtaagaactacatggtactgagagggcacaagaatgctgttcttgaccttcaatggactactgatgggactcagatcatctctgcaagccctgacaagactgtgagagtgtgggacgttgagactggcaagcaagtcaagaagatggccgagcactcatcttttgtcaactcatgttgcccggctcgaaagtggccacctctggttgtaagtggatcggatgatggaacagcaaagctgtgggatttgcgtcaaagaggtgctatacaaacacttcccgacaagtaccagattacagccgtcagcttctcagaggcggcagataaggttttcactggtggcctagacaatgatgtcaaatggtgggatctccgtaagaatgaagtgacagagtatctcaaaggacaccaggacatgataaccggaatgcagcttagtccagatgggtcttatctcctaaccaatgcaatggacaatgagctcaaaatctgggacttgcgcccttacgccccagagaaccggaacatcaagaccctcacaggacaccagcataactttgagaagaacctgttgaagtgcagctggtcccctgataatcgcaaggtcactgccgggagtgctgatcgcatggtctacatctgggacacaacatcaaggcggatcttgtacaagcttcctggccacaacggttctgtcaacgagaccgcattccatcccaccgagcctgtcattggatcttgcggcagtgacaagcagatttatcttggggagctttaagggtactaccatcacattttcatctagaagctattgtactatcttgttatgaaggcaaacagaaactaccatccttgcaatgtttcttcatctgaaaaattctaatgcacgattgactgaccagaatctcctttgtagattgtattgaggccagtgggtcttttcaaacttctccatgttctgtgccttcatcattcatgttatcctacctgtgactattctgccattccctgtcaatcactgattgcatgtttacctctctgaaacctgcttgcaatctgctgatttgaggcagtgtttaacaaacatttttttgttactggtggcgcgggagctttgctagtcgacataa

SEQ ID NO: 63963 - DNA, 566 bp, Oryza sativa
  Clone ID: PAT_MRT4530_65154C.1
gcacgaggagaagctatttgaagacggtgtgtcaagcgtgaagatttatttatcacatctaagctggtggtgtgattgtcatgccccagaggatgtgcctgagtcactagacaaaactctgagtgacttacagcttgagtacctggatctttaccttgtatttatcttattttcttaagaatttggatcaatacgtgacttgctagattctgtacgggccatcgtcaaagtcttgctttggaaccattggcatcaatctatacaactatctctacatgctgcagaataagcctcctgatcagtcgatgcacattgataaactgttacattatccagcaaaatttctgcgagcttttatggattagccctgagacatccaatcataatcatcatgtgctagactgtagtccattgcacgagaacttccttttatcattcattgggtctgtaggaagatattcctttagtcctgccacgcaaccacaataaataaattaatatagaattatgttgttcatatcagttcaccttctttccttgaattatggtggatttttttttcatcc

SEQ ID NO: 63964 - DNA, 712 bp, Oryza sativa
  Clone ID: PAT_MRT4530_65155C.1
cccgggtcgacccacgcgtccgacaggaacatgcactcgaacagtgagtattatgcgacatgctcactctgcaatggcattgataataatactacagatggagaagggcacatgaccactgcaccagaccacatcgacccaccctgcttgttgcgaaatatcagatgaccctttggggtgccgtgaatgggataataccaacaggattgaaacagtagatctgactcacgtgcctttggtggtagattattcaccagggcatcccagatgctatccggatcactttttgactatgagctaagcggcagatcgactatcatattactacattacgtgatttgggtcatagcatatatatgctcagtaaccatgacgttcattcgaattatggccggccgtttagcatatgcatctgctcaggtttattgactgattaactagaggctgaatgaggcttgttttgcttgtcacgtgtatacaaactggctatcgacatatggactcggactctatgatcagcctatattggtatatatgctcctggaggaagtgagagcagatcgccgagaaactgtactgtcagctgaagacactcacaaagcaactgcgctttacattaccattgacatatgcgtgacttgcctgtctacctctgatacagaagtgcgtgcacgaccggatctgactttctgccgagcagctgatctgttca

SEQ ID NO: 63965 - DNA, 125 bp, Oryza sativa
  Clone ID: PAT_MRT4530_65156C.1
cacatatgcatatgccaaaatgtcagagtaaggctccccgtgagtcaatatttagtagcaaaatgcttggacagccgctgcagcatacctctgacactttgtcatatgcatatgtgcggacgcgt

SEQ ID NO: 63966 - DNA, 382 bp, Oryza sativa
  Clone ID: PAT_MRT4530_65157C.1
ggtaaaggaaatgccggctttatacgcctccacattacccgggttaacgcgacgatttatccccccgaaaccaacttaaaccaaggtgataaaatgctgagacatcatccattaaccccccaccccatgctggactagatttcaattcggtataccccattccccactgaataaaatttattaaataagcaaaaggctaattccttaaaagcaacttaataatttgcccccctggtccaaaaacaatcaagaactgggaaaaggaaaagggtttaccctcaacggccgaaagggccctaatgctaaagggaagcctcggggtttgatccctataccaggccttacttacaaaacaggacctacccccctaacaaaaaaacca

SEQ ID NO: 63967 - DNA, 215 bp, Oryza sativa
  Clone ID: PAT_MRT4530_65158C.1
agcaaagcaaaccatgcgaccatgcttgcaaaacaattggagcacaaatttacatgttactcccacaccgtacacccatgcataataatacatcgtatatactgtacgtgcatacatacccgctttcgatcacatcgcaccattggatcgtacaaagcttgcgttcataacatacgttacacatcaatataccgcatacagcaacgtacataaca

SEQ ID NO: 63968 - DNA, 322 bp, Oryza sativa
  Clone ID: PAT_MRT4530_65159C.1
tcgttttagcataggtcaaaccatatcagttgcagttgttactcacacgatgcatgtgggagacaatgagccagagtgcaaccagtggatatcatgaggactcaacgaatatttcgcctgtgtagcacggactatggatgttagctcagagagtcttgcctatgaatcatgtgatcgtgagaggaagaactgcatggatcatctcgacctgagggaggatggtgggactatcggattgatcgagctgagtcacctttagttcttgcacgaggcaacgctaatagcggtggtggatgatctccccgggatcatttacttttac

SEQ ID NO: 63969 - DNA, 480 bp, Oryza sativa
  Clone ID: PAT_MRT4530_6515C.1
atgaagataatgcaggcccacaagattacttccaacaaagcctccccgcgggccggcgacgagcgacgcggtagcggtgatggcagcgacgctggagaagggaggaggctggcgggtcgggaggaatttagcggagcgaggcgggagaggagaaggtccggcggctggcttgcccgccgccgctctgctccactccacctgtcgccgcgcgctcgcgggcctgctccggccgctcgctcgccgctccgctccgctggccgcgcgctcacctgccgccgccggcgctccgctccgttgcccgcccgctcgctgcagcgctcgcccgctacgcgctcgtggccgctgacgctcccggcacaggcagagacggcgccgccgcggccggccgcggacgacgtcgttgccgccgccaccacggccgcttcgcccgtcgccggtcaccttccttcccgcccgctggccagcctgtcccctgcgtag

SEQ ID NO: 63970 - DNA, 1609 bp, Oryza sativa
  Clone ID: PAT_MRT4530_65160C.1
cccacgcgttttacctttcgttcgcccacgcggacgaccacgcgtccgggagcggagagccctccagattttgggtggtagaccccgattaaactcgtattctaggcgttactactagtagctcgtacggctccggcgagccgccgcgaacgaatgccggtgatgctctagcggctccctcgccgacgcgcgcggggcggcggaagcaggacggacatgaggaagcagccgcagccgcaggggaaccgccggctgaggtggctccgggcgctgctgctggcgctcccgctcctatcggtgcccgtcctctacgccgcgctcggggcggcgcgccccgcggcgccgccgcggcgcggggcggcgccgcaccagctgccgccgaggctggcgtacctcgtatccggcggcgccggggacggcccgcggatccggcggatgctgcgggcgctgtaccacccctggaacttctacctcgtcggggtcgccggggaggaggagcgcgcggatctcgaggcgttcgtgcgcggcgaggaggcgccccggcggtacggcaacgtgcgggtcgccgcggcgggggagtggggaccggtctcgcggcgcgggcccaccgagctcgccgcgacgctccacgccgccgccgtgatgctccgggagttcgatgggtggagctggttcatcaatctcagcgcctccgattacccgctcatgcctcaggatgacatccttcacatcttctcatatctcccaagagatctgaattttattgagcacacaagcaatattggttggagggagtaccaaagggcgagaccaattattgtagatccagcattgcagatctcaaataaaactgaggttgtgacaacaaaggagaaaaggagcttgccttcagctttcaaaatatttgtaggctcttcatgggtaatacttagccgatcattcctggaattttgcttattgggatgggacaaccttcctcgcactctactcatgtattttgccaacttcttggcatcctcggagggctacttccacacggtgatctgcaactcaaagtactatcagaacactaccgttaataatgatctccgattcatggcatgggacaaccctccacgaacattacctgttaacctgacaaccgagcattttgacgcaatcgcaagcagcggtgcaccatttgcacactcctttgccaatgacaatccagtcctggatatgatcgacaccaagctgttgaggagagcacctgaacgattcacacctggtggatggtgcttaggtagctcggtaaatgacaaagatccatgttccttcttcggaaggtcttttgttctgaggccgacgaaaagttcggcaaagttagagaaattgctgttgaaacttttggaacctgataatttcaggtctaaacagtgtatataacacattcttgttacatgtagccttgtagccagttgtagaattttgatagtgttcagaggcaagtgtgaccggaggtggagatggtttctcattgttgcggctgtaggcacacagtgacacagcgtgtcgttgtacatttgcaactggaaggtcaagtaaagtgactgcaatcaaacatttacac

SEQ ID NO: 63971 - DNA, 263 bp, Oryza sativa
  Clone ID: PAT_MRT4530_65161C.1
aagacttcagtccacaaaaccccaccccgggccatcgccatataaacgcacaagcgaaaagcagaccagcccgcgagcagactgacaacaggcagcccccatcaaagcacatacaacattaaccgacacccaaacggcaagcaagcgtcagcgaaacacccacaatttaataataaggatgacgcgcgagtcaagtgcacaccgggttatccgcgccagggcgggacccgaagaaatgcgcctctgagaggacaccggccccg

SEQ ID NO: 63972 - DNA, 984 bp, Oryza sativa
  unsure (1)..(984): unsure at all n locations
  Clone ID: PAT_MRT4530_65162C.1
caaatataccaaattgtacacatgtatcaatgaagtatatttcaatacagaatgctatcacatattacctatctcatcaagctactaaagctgaaactaattgaccataaaagaactcttgcaactgcagcccccaactgcactaggatttgttgataccacgaatgcggagcgtataagttcttcctcataatccacagtggcacctttcacaaagtcatatgagacatcgtccacaaccaatttaacaccttctttctcaaagatccgatcatctgagtttttcttgtcatcaagagagaaagaatattggaatccagaacatccaccagcttcaacacttaatcgcagcatcttaccttcagaaggtggttctttagcatgtaattcttttaatctctgtgaagcattaagtttccaaagaacacaaaaatgcggaactgttaggaaaactaaaattataagaaagtatgtaaaaggaggggggatacattctgaacaccaaaagcatatttgaagtcaacttggcacaaattgaattctcaaatgttcctactgcgttgaacaaaatgtgatagaagtagcatattcaaatgtaacagttgaaaatgaatcaaagacaaaaacaaaaaaaaagcaggaaatatttggttgtttccaaaaaaaaatatatcacctctgatgaaatttcaggaaatccctttagcaatgtccatatttcaaaattttcataantattttaaaggttttgcaaacataatgggtataaagtgtaagcatatgaaaccacttttactgtctagtattaacaacagaaaatgcattcatctagagaccctgaacacatgtaacaagaattgaaatcctgtcacagaaaccctgatatagcccaaaaagaatactccatttcaacagtgagaaatataggcaaggctaggtgaccaaacaaacttgtataatcaacacagcatttagctctggcgc

SEQ ID NO: 63973 - DNA, 571 bp, Oryza sativa
  Clone ID: PAT_MRT4530_65163C.1
gcacagttcaacagaaataaaataacttatcttcggatgtcaaaatttacaaccatatggaggaagggagtgctggataacaacgtacaaaaaactccaatccttttcccagattctgcccaccacaaaaagttcaatctaaaagtaccggctagtgctaggcaaaccatacttggagctaaaaccaccgaataagattatgtttcacacgttatctgataaaagatacatgatggcattgcacaggttccactagaacgagttcataaaagggcaacaaaaggcacaacataatttacacttgagaacatatggcaagggttttatgctgcgatagggactttgcaggttgccttgttgtgcccataacccttacacctgctgcagcgcaccgcccttttgattgcgattcgaggatcagctggcttttcctttggtcttccaacctgcctccgggttagaatcggtgattgatgtaatgcctcgccttgtgatgggtcagttgatggagcagccacaacaatgtcaggtattggattgattgacatggcataggtcaagcggtagcact

SEQ ID NO: 63974 - DNA, 349 bp, Oryza sativa
  Clone ID: PAT_MRT4530_65164C.1
aacgggcatcccttgacagaaaggtcatccccataaaaagggcttaactagcacaaaaaaaggtttaactgggaagaacaagcccctaaaaagggcttaactagcattacatcataccaatttgggggggcctaccaaaattggcagacaaaaaggggaaggtcatccatcacactacttgggaacctgggtcttcaaaacaaaaacctcgtcattcttgttgaaagggaaaatacaaacatcacccttattggaaactttgacattaaacaagtgattccatccgggggggggcaaaaaagccctattgttttgggactttttcaacccaaaatggaataaccgggtt

SEQ ID NO: 63975 - DNA, 390 bp, Oryza sativa
  unsure (1)..(390): unsure at all n locations
  Clone ID: PAT_MRT4530_65165C.1
accacacatccanatacgcatgagccaacgcttgcgctaaaatgtctgataattgctaatctacatataaaggtgccggaggtattctttaactcatactactactgtactactactacttaatgattacaacctcaaatctaatgttctcataccatatcgagaacttaagtacaaatttatttgagggcatcttaaatttctttaaatacttaatattcttatattaattacttaccctgcctaaataacacaatcacattaatactcttgataacctaacgaatcctgaaaatcacattgattgctataatatgattttatacagacttcagctttattattctataaaaaaacatgataaagcctttcaatctataggatctaaat

SEQ ID NO: 63976 - DNA, 180 bp, Oryza sativa
  Clone ID: PAT_MRT4530_65166C.1
gccgcgcggtcgcagtcgtcgccgtcgtcgtcgtcactagctttagctgcgcttgttggtctcgccaacctccaccggacagcgacctcgcttactaaatcaagcgagagggggatcgatcagccggagcagcaggtcacggtggtggtggtgggcgtccgtccgtccgtcgcgctcccg

SEQ ID NO: 63977 - DNA, 1743 bp, Oryza sativa
  Clone ID: PAT_MRT4530_65167C.1
atgacgggcacaaaccaacagaagaaagaacggggaactctagtttgctctccatatgccatgtatgaggtaatactccatctaagtccacgtcaaaaggaagctatcgagggttcaggtcttggcaacttgctaaagattgacaacatacatattgaccgaaacttgtacaatgagattgcaagaagctacgacaaggagaagaaagcattcaatattaatggtaccttcgtaacgatgacactcgatgatgttgattgtttgcttggactgccatcaaaaggagatgacatatttgaggcaccaaaaatcaataaaccagaattgttcaacctgtacaaaaaggaaggtcaaacaacaattactttacaagcattacgggaagcaataatcaactcctcaagctacgatgaccacttcattcgaagatttattcttttctcaattggatcattcatatgtcctacaactcaaagatatgtgcgctcagaatatctcaatctcgtcgacgacgttgacaaaatgagggaactaaactggtctagtctaacactgaatcagttactgaaaggcataataaaatttagagagaagacaacaaacattgaggggaacgtatgcctcttacagatttggtattgggaaaaagtgcgaatagataaattggctgcgacaatatatcattctagccgtcaaaggccactaattcagtactgggacaaaaaaaagaaaaaaagcgaatttcttacctttttggacaagggaaggttgtcgacgacattaggggaactatacattgcaatgaaatccccgatgaaaaagcgcacgacaatgactcagaaacacgtagcaatgaagattttcaaggcacttctgaagaggttgacgctattgcaagatgttgaacaagaacaaaatgatcccggggagcatgtatcaaatcataacgaagagtcctatataaaccaaaatgtaaacatgactagtgaaacgaaggacaatagtaaccagagcaatcaaagcaggaagaggcttacaggtcctacaggaagaacatacaaaccaactaatcggactgacttcatctacgaaacaaggggtaaaaagaaggacataataagaacccaagcacagacaaagaaaacgatagtgtacatcgagaaggaagatcttacccaacaaatcatagacaaaaacccaccaaagaacgccttaagaggtcaaaagaagacaaaaacgaatggccagacaccgttaaaaaattcagaagagttgactaaaaaagaataccctttcattacctacattaataacaccgaggataacaaagtgatggtgcatattgaagaagtggaggttaaacggaaaaaaatgaaagtactaacacaaccagctttcttgaatgatgatgtcatggatgcatacattcaatgcctccgctataaagagaaaggaatcaggggagatggcaaggccttcctagagatggccattacaacaggtctactaaatattttcctcccaattaatattaaagatacacactggtacctagccgttcttaacgccaagcgacgtgaggtgcaaatactagattcgctcgcaaagccaatcagtaaagatcgacccgatctaaggcgtgtgaaggaagtaaaaacatttcgacaggacttagccggaattttgatcaactccgaactgaacaacattaaagatcgtccactgctaccaaccacgacataa

SEQ ID NO: 63978 - DNA, 153 bp, Oryza sativa
  Clone ID: PAT_MRT4530_65168C.1
atggaagcacagagggacaagggagtggaggcagagggcggcggcccggcggttggcactcgtcagcggcagcgatggcggttggcggcagccgacagtggggaggcaaggacggcggccaacggtggagaagcaaagggaaagtggcagccg

SEQ ID NO: 63979 - DNA, 2118 bp, Oryza sativa
  Clone ID: PAT_MRT4530_65169C.1
tatcgtggttggtagcagtggacgatctttaatgttgttcagttcggagttgatcaaaattccggctaagtcctgtcgaaatgtttttacttccttctgtagttgaatttttaggagataagatccagtccaatgctccatgaacttaagggtgtacaggccgcatgagacgccgtctccttgctttggcaatttttggactttgttgtactcccattcggtaatattgaaatcaggccaatcgtgttttaactgtgggtgctgattctctgtcccgtataatcccctctcgatagctagcagcacacgccttagatcgggtcgatctttactgattggctttgcgagcgaatctagtatttgcacctcacgtcgcttggcgttaagaacggctaggtaccagtgtgtatctttaatattaattgggaggaaaatcatgtcaaatggtagatagtcgcatgccatatctctaatccatcgtttatctcgaggttcgcttgcttcgacatgcgctccctctacatttagtagacctgttttaatgcccatctctaggaaggccttgccatctcccctgattcctttctctttatagcggaggcattggatgtatgcatccatgacatcatcattcaagaaagctggttgtgttagtactttcatttttttccgtttaacctccacttcttcaatatgcaccatcactttgttatcgtcggtgttattaatgtaggtaatgaaagggtcttcttttttagtcaactcttctgaattttttaacggtgtctggccattcgtttttgtcttattttgacctcttaaggcgttcttcggtgggcctttgtctatgatttgttgggtaagatcttccttctcgatgtacactatcgttttctttgtctgtgcttgggttcttattatgtccttctttttaccccttgtttcgtagatgaagtcagtccaattagttggtttgtatgttcttcctgtaggacctgtaagcctcttcctgctttgattgctctggttactgttgtccttcgtttcacaagtcatgtttacattttggtttatataggactcttcgttatgatttgatacatgctccctgggatcattttgttcttgttcaacatcctcttcagaagtgccttgaaaatcttcattgctatgtgtttctgagtcattgtcgtgcgctttttcattggggatttcattgcaatgtatagttcccctaatatcgtcgacaaccttcccttgtccaaaaaggtaagaaattcgctttttttctttttttttatcccagtactgaattagtggcctttgacggctagaatgatatattgtcgcagccaatttatctattcgcactttttcccaataccaaatctgtaagaggcatacgttcccctcaatgtttgttgtcttctctctaaattttattatgcctttcagtaactgattcagtgttagactagaccagtttagttccctcattttgtcaacgtcgtcgacgagattgagatattctgagcgcacatatctttgagttgtaggacatatgaatgatccaattgagaaaagaataaatcttcgaatgaagtggtcatcgtagctcgaggagttgattattgcttcccgtaatgcttgtaaagtaattgttgtttggccttcctttttgtacaggttgaacaattctggtttattgatttttggtgcctcaaatatgtcatctccttttgatggcagtccaagcaaacaatcaacatcatcgagtgtcatcgttacgaaggtaccattaatattgaatgctttcttctccttgtcatagcttcttgcaatctcattgcacaagtttcggtcaatatgtatgttgtcaatctttagcaagttgccaagacctgaaccctcgatagcttccttttgacgtggacttagatggagtattacctcgtacatggcatgtggagagcaaactagagttcctatatctttcttagtggggatgggcgtgggggtggggtgggggtttggctcgacagggatttctgacccctttaaactgttgcctgtattatcccatgtagcaggcccgtattttttgggacatctagccat

SEQ ID NO: 63980 - DNA, 316 bp, Oryza sativa
  unsure (1)..(316): unsure at all n locations
  Clone ID: PAT_MRT4530_6516C.1
caaagtatncttggcaaaatagattgaagatttgttaattggttggattaccatagcactatctaacaagttggattaacatagaaaacagcttcttgttcagaagagaatagtagaatcctgagcatggcttagttttcccatgccatttcaatgtatagaaatcattgtacagcggcctacaggatcacaagtattcttttgttaatttgtagatggattgactactctaatggttcctaaaagaaatactcaatactaagtactgactgttcgagttcttcagttatttctttttttcaaaaaaaaaaaaaaa

SEQ ID NO: 63981 - DNA, 602 bp, Oryza sativa
  Clone ID: PAT_MRT4530_65170C.1
tgtacatcgagaaggaagatcttacccaacaaatcatagacaaaggcccaccaaagaacgccttaagaggtcaaaagaagacaaaaacgaatggccagacaccgttaaaaaattcagaagaagtggaggttaaacggaaaaaaatgaaagtactaacacaaccagctttcttgaatgatgatgtcatggatgcatacattcaatgcctccgctataaagagaaaggaatcaggggagatggcaaggccttcctagagatggccattaaaacaggtctactaaatgtagagggagcgcatgtcgaagcaagcgaatctcgagataaacgatggattagagatatggcacgcgactatctaccatttgacatgattttcctcccaattaatattaaagatacacactggtacctagccgttcttaacgccaagcgacgtgaggtgcaaatactagattcgctcgcaaagccaatcagtaaagatcgacccgatctaaggcgtgtgaaggaagtaaaaacatttcgacaggacttagccggaattttgatcaactccgaactgaacaacattaaagatcgtccactgctaccaaccacgacataa

SEQ ID NO: 63982 - DNA, 3348 bp, Oryza sativa
  Clone ID: PAT_MRT4530_65171C.1
atggataaagttaaagggcatggaaagaatgtgaggtctgacataatgtcttcgagctatgtgagcctagaggatcaggaagagtataaaataatgggtactgtggttttttcaagcgaggaggaaggttacaaattctatgtagactatgctaaggggaagggtttcagtgtgaggaaaaacaacttgaagcggaaggacggtgagattatatggaggcaattcgtatgctcatgtgaagggtacagggagttgaagcactttgagaggacagaccgaaaaagggagccacgggcactgacctgctgtggttgcttagctaagcttgagattgagcggaacgaggagaagggagttcatcgtgtgatgagtgattctaagaaagcccaagcggtcgagcttcgcatgagtggccttagggcctttcaaatcatggaggttatggagaataactacgatgagttggacgaggttggttttgtgaggaaggacctttataatttctttactcgcacttaccgtgtgaacaagtacaatcttcctttcattcctttcataggagttaatcaccatagaagtacaacaatttttgggtgcggaattctatccaatgagtctgtcaactcttactgttggctccttgagacttttttggaggcaatgcgtcaagtgcatccaaaatcattaatttccgatggcgacctagcaatggcgaaggctatcagtaagagtatggatgaggaggagttcgagagacgttgggctgattttaaggagaatggaggcacggggaatggtcaatggatcgccctgatcgatgtaccgactaagggagaagtgggcagctgcctatacagatgggaaatacttgttggaatagacgccgacccattggagaaagacgctgtccgtatatacacagcagtcgtgttcaagaaagttcgtgcacagatacggctaattgctggacttgaagtcatcagtgggactaatcaagatggttcgtcactgtatgtttttggtttgaaggatgataatgaggtgtgggatgaagtgagggttacttttagaggccagtctttggaagaagtgtctacactgaagagaaagggaatcatcaggttttggcagcaacgaaaggatttcaaagaaatatccaaagatgaatattttgcaaagaacaacgagttcgcaacctggtcgaaggaagaaaaaggcaaatttttctctgatctttctttggagtctgctcgtgatctgtttgagaagtttgtgaaaacttggaacaaaggaaagcttccatcccaatattatgaggggatcactcgtggtccacgatgggtactccagatcgctggagaagaagcatcaatgaaggataggtttgtgtcgccgcacagacagacggcgaatcgatctcacgcgatcaaaaacacagtgggacatcacgattgtgagcatgcagagatccagcctagtactggaactctagtttgctctccacatgccatgtccgaggtaatactacatctaagtccacctcaaaagaaagctatcgaggtttcaggacttggcaacttgctaaagattaacaaaatacatatttaccgggacttgtgcaatgagattgcaagaagctacgacaaggagaagaaagcattcaatattaatggtacgttcgtaacgatgacactcgatgatgtcgattgtttgcttggactgccatcgaaaggagatgagatatttgaggcaccaaaaatcaataaacctgaattgttcaacctgtacaaaaaagaaggacaaacaacaattactttagaagcattacgggtagcaataatcaactcctcgagctacgatgaccacttcattcgaagatttattcttttctcaattggatccttcatatgtcttacaactcaaagatatgtgcgctcaggatatctcaatctcgtcgacgacgttgacaaaatgagggaactaaactggtctagtctaaccctgaatcagttactgaaaggcatattaaaatttagagagaaggaaacaaacattgaggggaatgtatgcctcttacagatttggtattgggaaaaactgcgaatagataaattggctgtgacaatatatcattctggccgcgaaaggcaactaattcagtactgggacaaaataaaagaaaaaaaacgacttttttacctttttggaaaagggcaggttgtcgacgacattaggggaactatagattgcaaagaaatccccaatgaaaatgcgcacgacaatgactcagaaacacgtaccaatgaagattttgtatgcacttctgaagaggtacactctataatatccacagaacaatcagccgatatcactttacaagaaaggatacaagaaagcatccaaactttacaagataatttcaacgatttcacaaaggatttttggccacgtatgcgagcattgatactagattgcatggaaaatgattcaaaatgccctgaacgaaaagatactacgcatgtgtttgaggatgttgaacaagaacaaattgatcctagggagcatgtatcaaatcataacgaagagtactatataaaccaaaatgaaaacatgacttgtgaaacgaaggacaacagtaaccagagcaatcaaagcaggaagagacttacaggtcctactggaagaacatacaaaccgactaatcggactgacttcatctacgaaactaggggtaaaaagaaggacataatcagaacccaagcacagacaaagaaaacaatagtgtacatcgagaaggaagatcttacccaacaaatcatagacaatggcccaccaaagaacgccttaagagagttgactaaaaaagaagaccctttcattacctacattaataacacagaggataacaaagtgatggtgcatattgaacaagtggaggttaaatggataagaatgaaagtactaacacaaccagaattcttgaatgatgatgtcatggatgcatacatccaatgcctccgctataaagtgaaaggaatcaggggagatggcaaggccttcctagagatggccattaaaataagtctactaaatgtagagggagtgcatgtcgaagcaagcaaacctcgaaataaacgatggattagagatatggcacgcggctatctagcatttgacatgattttcctcccaattaatattaaagatacacactggtacctagccgttattaacgccaagcgacgtgagaaggaagtgaaaacatttcgacaggacttagccggaattttgatcaactccgaactgaacaacattaaagatcgtccactgctaccaaccacgacataa

SEQ ID NO: 63983 - DNA, 462 bp, Oryza sativa
  unsure (1)..(462): unsure at all n locations
  Clone ID: PAT_MRT4530_65172C.1
ctatcanaaggaaattgcttggctctgagtgttttgcttcaaactacaaaagtcgacagttaacctgaaaagattttctttctcccagcaccagcactagcatcatcaccacagggcgaaggcatgaacaacgtacgtccttccatggtctcgttccaggacagcctcttcctctgtgacatgttgtactgctaaatgtccacggcgccgcacagaggcaggtcgtttcgcctggtttcaggattgagcaggagctgcatgcgcttgtattgcttgatccatgattgatagtccattacagtgcatcctcgttggtgtcgtttctagaacaggacatgcgaatgtgagttcgctatgctgtgtggttgcatgtctggaactgaggcggtgaggccccctttaattccaaggaaaatcatagtaattttggtggatttcatttcaaaaaaaaaaaaaaaaaaa

SEQ ID NO: 63984 - DNA, 728 bp, Oryza sativa
  Clone ID: PAT_MRT4530_65173C.1
atcaggccaaattacgagcccccgatgaggagcaaacgaaatattctcttttcggttaatcagggaactctagtttgctccccacatgccatgtacgaggtaatactccatctaagtccacatcaaaaggaagctatcgaggattcaggtcttggcaacttgctaaagattaacaaaatacatattgaccgaaacttgtgcaatgagattacaagaagctacgacaaggagaagaaagccttcaatattaatggtaccttcgtaacaatgacactcgatgatatcgattgtttgcttggactgccatcaaaaggagatgagatatttgaggcaccaaaaatcaataatcatgaattgttcaacctgtacaaaaaggaaggacaaacaataattactttacaagcattatgggaagcaataatcaactcctcgagctacgatgaccacttcattcgaagatttattattttctcaattggatccttcatatgtcctacaactcaaagatatgtgcgctcggaatatctcaatcttgtcgacgacattgacaaaatgagggaactaaactggtctagtctaaccctgaatcagttactgaaatgcatattaaaatttagagagaagaaagaaaaagtgcgaatagataaattggctacgacaatatattattcttgctgtcaaaggccactaactcagtattgggacaaaaaaaatgtcggaactcgaaa

SEQ ID NO: 63985 - DNA, 151 bp, Oryza sativa
  Clone ID: PAT_MRT4530_65174C.1
agtactagatcgatagcgaccttcttcgtaatcctgggatggcgaaaaattcggaggttggagacgttttgcgataatgttctcactattagacttacaacattcgctactgatgtaaatgaccaaactcatgctgcacaacacagcatgc

SEQ ID NO: 63986 - DNA, 358 bp, Oryza sativa
  Clone ID: PAT_MRT4530_65175C.1
gactaaatatacacaatccatttttatgccatctttgttcacaagctcgacactcacaaaaatctccattataccacattcatacctaacgctttctatctggcaaaccaaattatttaactctatacaaattcacatagatatttaacttccttgtctagctcttattcatcaagcacattatgagtcacccttcacgtgttctaattttatactatctaccttactccactgaaccaacttatccattttatcatttttaagagcattcataccttaaatccttttatagttagatatgcatcctgctttaaataacaacatctttttatttatctatttaatccaccatcttcta

SEQ ID NO: 63987 - DNA, 1086 bp, Oryza sativa
  Clone ID: PAT_MRT4530_65176C.1
atggagcagttccacgacagggaccacgtgcggctgcggagccgcgtgcacggcacgtacctccacgccgatgaggacgggaggggcgtctccctgcagccgaccggggcatcgctcaccgcggtttggacggtgcacctggagggcggtagcccccagcgccgcctcctgctccacagcgccgcctacggccgataccttgcggccacaggcaagccggggccgagcggcctccgtggccaccgtgtcgcgcttatcaacctcgaccggctggacgacgagtccgtgtcgtgggaggcggttcggacggcgaaaggagatgacgtgctgctccggcacgccacggggcgcaacctacgcgccaaccatggcgctggcgccaccgttgacgatagatacagcaggatgctgctctgggtggaccaggtggttgaggccatcccctcggcagattccgtacccaggcctccaccgatctcaaggcgccaggacgggcctgagataagaaccatccggtttgtgccagcagctcctaatgggaccattgccgaggattggagaacctttcaatttactggaagatcagttcagcggttaaaggaagagattacaagccgtgctggggaggcaacccagtactgtgttcaagcaggccggtacggacgtcttatccctttgacacatgagcttcctcacaacactgagaccattgatatcatcattatgatgactggtactacagatccccacatggataatagcccaagaacacaactttctgctcctgagtccttgggagaacatcgtgttgctgacattcagacatcatactcgcaccgtctgcatacaaacaatgtacttgagagtcagcaacggaaaacaggtataacacgagctgaacttgaattgaaaactaggaatatccactggggagatttgaatttggaggaaaagaagaggacaagaaaggagttgaaagcagaatacaatgaactcttagctgcagaaaattgcatcagtaaatcgcaggaagatgatgtaattacaaacgaaaattatgaaagagcgtcactccgggatccatga

SEQ ID NO: 63988 - DNA, 430 bp, Oryza sativa
  unsure (1)..(430): unsure at all n locations
  Clone ID: PAT_MRT4530_65177C.1
ttggaaaatcctctagnnagcggccccgcccnttttttttnnttttttnntttttttaaagtccctgaagcccacacagnnatcgtgaaagtgtggtcacaatactagataggtacgagcagctatctagtgcattcacaaaccaatgnntttaccanngattganntatattannagccctcccnnccaagtgtatcnnagtaatacttgtaccatcgacctnntgacacctcttttncaaattactatngnnaaactctcaagaaagggtaattttaactactaagntnccaaacttatttgtcatgcnnatgganntggatnnggattacngtaccaatnnntaattgnncaaacatttcaagaatgattnnntcttctcttcaattttntnntcttttcgaaattttgcttccattgaaatagtat

SEQ ID NO: 63989 - DNA, 634 bp, Oryza sativa
  Clone ID: PAT_MRT4530_65178C.1
cacatgtggaacactcacgaaggccatgcctaattctcattgtttaagtcaggtaacaggctcagcaaattcaaaggtgcatttcaaatggactggtatttatttatagaactctccaccttaattctctacagaccataactaattttattgtttgttgtcatttttttttgttatatctacacagaaccatggtgctccatgttcaatttctgaaaatataaacacctatgattaggaatggcacagctgacaaagtggccagttaacgcttctggaacaagaactatgcagcacaacatataaagccttagagcaaaaacatcactactataaataagcactgttatttctaccacctctgctgctacctgctatctaagatattaatggaactgccaccacttgcatctgcatggaacctaatatacttatgctgcatattttgctggatgctttggctcagatgcattattgcactgcaataaaccttgaaccattccagcgctaaattccattgtgcactttgaatgctcccagtcataggttctttctttatactatactaaaaacagaatatgcttatgagaactcgcattaatttttctcttagggtagctggcttcaaagttta

SEQ ID NO: 63990 - DNA, 722 bp, Oryza sativa
  unsure (1)..(722): unsure at all n locations
  Clone ID: PAT_MRT4530_65179C.1
cttttggctgcangatgcccgctttagtaaccctctccctcctcntnccgcagcggcaaaacgcagacttgcggcggcagacggcgcggcgcgcggcccctcccctccctccctttgcatccngcgccggtggaggggaagcatgggggcggtggcggcggcggacggcgggcgtangcggcggcggcggacatcgcggcgcgcggcccctccccttgcatccgtcacaggcggaggggangcatggtggcgacgggcgcangcggcgcgcggcccctcccttcccccctcggctccccttgcagatccagcananggccggtgatgcatgggggcggcgggcgcangctgttttattactggacccgcgcagctcctcctctcccctctcctccccggcagcgacnggagctcgcgggcagcggattcngcgtcngtgaangtancggacgcggatccgtcccngcaaccacgggggcnacgcggccgcctcngctaaggtggccgtgcctgcgctgcngctggattaggttaaggtttgttttttctntttttttgtttcnatttttattttcccgtgcgggcggcttaagcccccgcacgccaaaatccattttcgcctttcgggttccttcactcgcacaaaaaaatcntncatttttcccanannatttcttccaaacggtccaatcttccncccccaaaaatccaatttcntcctn

SEQ ID NO: 63991 - DNA, 366 bp, Oryza sativa
  Clone ID: PAT_MRT4530_6517C.1
atgtcatcgtccgagcccaaacctctccactgcctccttcgccgtgggtcaaagctgccggagccggagccattgctcaacctcccgctcctccgtgagtccatctccatccctgccgacgagccggacaccaccaagcacaagcgagcatcggggcactgcccccgcagctctagaagcccaaacaacatcggcagtggccgccgccacggccacaacgatggcagtgtagaggagaggtggtggcatggcccaagcggtgacgacgccgggcggggctccactggcagcctcctcgagctcacgctgtggcggcggcgacctccccgagcccacacgtcggatctggccgaagaggcggtctag

SEQ ID NO: 63992 - DNA, 858 bp, Oryza sativa
  Clone ID: PAT_MRT4530_65180C.1
ttattgaaacagcggaaggatgatgatgatgatgatgtcagcagcatcatcccccagctgcctcctcctcctcccccgcccgaccaaaccaacaccaccgctgctcccctccacctcctcctgccgccggccgcctcgctgccggatcagatcccttaggccggagaacccggcgccgcccgccgcaggagtagcgagagcggtcgcctcctcgtcgtctcccatggagatggaggcggcgcagacccaggcgtgcggtggcggggaggggcagcaggaggccatgaggctgctgttcgtggagatgggcgtcgggtacgaccagcacgggcaggacgtcaccgccgccgccgtgcgcgcctgcagggacgccatcacctccaactccatcccggccttccgcagcggatccattcctggggtgaacacggagcagatgaagctgcagatcaagctcggggtgccgaggccaacgcagcacttgctggacgttgagagagtcaaggccgtcttcccctatggtaaaattatcagctttgaggttgtggacggtgggatgatctgttcaagtgggtgagcactctttctgtgttctcttcgtgcttattagtaaaattgggatcttcttgttggaacgctgaatcagaaatggatgcaatgagtacccctacaagtttattgagcatgttttggtcggttgtgtaccatactagctcgcattatagtagtaagtttgaaccttggtatgattggcaatatctaggttaggtaactcatggacatggtgaacaaatgtggtgtagaggaacatgagctatcatgtttatttgttcagtacaattgttccttgtgattatg

SEQ ID NO: 63993 - DNA, 236 bp, Oryza sativa
  Clone ID: PAT_MRT4530_65181C.1
cctcctcttcgcctaaggttcgtgtcgcgcggcgccaccccacaaccccctccagcgccgccgccgccgccgacggcggcgacatgatgccggagtcgctgacagggatggcccacacgacgacggccccgatagttgctactcgacgggggacacttgttaggggtactgcgactgttgctactggggggcataagactttggggtggtttaccacctgcaggagcagctgacta

SEQ ID NO: 63994 - DNA, 357 bp, Oryza sativa
  Clone ID: PAT_MRT4530_65182C.1
tctttttcttcccaaccgagcaagggggcgaaaggacgatctattgaccgaaccatgtatgaaggcaaagctcgttctttcctgcgctggacatcctcggtttgaattccatgaatctacgaaaatagattatgccatcagtttttgcacacgagcatcaaatttgacgtaggacaggcaccatggagaaagtcacagccaatgggaacttcattgatacgggcaattggaagctgaatggagcactatggaaccaacttgacagagcaggtattgaagcaatggatgacattcttgcacttgaagctaccactgctggaaacagtgctaaactagttgcattgagtgccttgcgca

SEQ ID NO: 63995 - DNA, 1296 bp, Oryza sativa
  Clone ID: PAT_MRT4530_65183C.1
atggaggaagaaaccgccgttgcagactggtcggcgctgccggaggacatcatcatcaccgtaatggggtgtttgtccgtcctcggcgacctcgtccgctccggcgccgtctgctccacctggcgcgacgcgtacgccacgttccggcgactccacctgccgtccacgacggcgcagccgccgtggttgctctacgcctgtgacgcccacggccccgccgccgccgcgctctactgccctgccaccggcaagtccctccgtgtcccgctcccggccgccctgctcgatggccggcccgtgatcggcgcgtcgcaggggtggctggtcaccgtcgacgaggcgcccaacctccatctcgttctcgtcaaccccatcaccggcgccacggcggcgctcccgcccatcaccaccctccacaacgtcgagaggttcacgagcaaaaagggcaagacaagatacagggtgtacgacgacatgggatacagcgaggcgtcccttgagtactcgccggcgcaggcgagggaatgggtgtaccaccaggtggtcctctcgcgcagccccgccgaggggagcgcctgcgtcgcgctcctcctgcaccggccggacggctatgtctcgttcgcgcggctcggcgacgagcggtggacgccagtcgcgtacccgggacaggactgctccaccggctgtcgccacgccatctacgatgacgccgatggcctcttctacacgttgcggtacgacggctccgtctacgcgatcgacgtccctcgcgccgcggccgcgtcgtcgccgccggcgacgagagaggtcatgcggagtgtgacgaacgcggacaacggcagcaagtacctcgtcagggtgccatgttccggcgatctcctgcaggtctggaggttcgtcgactacgacgacggcgacgaagtcgaagaggatgaagacgctgaagatttaccactcggcaccaagcacctgcagatcttcaaggtcgacggcggcgagcagaagctcgtggaggcgtcggcggcgagcttggaggatcatgtcctcttcctcggtcacgggttctcggcgtgcttcccggccgagcacttcccggcgttgaagcccggctgcgcctacctcgccgatgaccacgaactcgtcagcgtgagtaagcattgccggcgagacattggcagatgggacatgaagagaggtcagatggaaaggctctccggcgaagatgacgtggcggcgccgtctcagccttggctcaactggccatctcctgtctggatcacgccaacattctactag

SEQ ID NO: 63996 - DNA, 1170 bp, Oryza sativa
  Clone ID: PAT_MRT4530_65184C.1
atggaggaagaaaccgccgtcgcagactggtcggcgctgccggacgacgtcgtcatcaccgtaatggggtatttggccgaccccgacgacctcgtccgctccggcgccgtctgctccacctggcgcgccgcgtacgccacgttccggcgactccgcctgccgtccacgacggcacggccgccgtggttgctctactcctgcgacgcctacggccccgccgccgccgcgctctactgccccgccaccggcaagtccctccgtgtcccgctcccggccgccctgctcgatggacggcccgtgttcggcgcgtcgcaggggtggctggtcaccgtcgacgaggcgcccaacctccatctcgttctcgtcaaccctctcaccggcgccatggcgaccctcccgccgatcaccagcctccacaacgtcgagaggttcacgagcagaaagggcaagacgaggtacagggtgtacgacgacatggcatacaacgaggcgtcccttgtgtactcgccggcgcaggcgagggaatgggcgtaccaccaggtggtcctctcgtgcagccccgccgaggggagcgcctgcgtcgcgctcctcctgcaccggcccgacggcgatgagcggtggacgcccgtcgcgtacccgggacaggcgtgctccaccgcctgtcgccacgccatctacgacgacgccgacggcctcttctacacgttgcggttcgatggctccatctacgctatcgacgtcccacgcgccgcatccgcgtcgtcgtcgccgccgccgccgccggcgacgagagaggtttggaggttcgactacgccgacggcgacgacgtcgaagacgacgaagccggactcttcaccagacaactgcagatcctcaaggtcgacggcggtgagcagaagctcgtggaggcgtcggcggcgagcttggaggatcatgtcctcttcctcggctacgagttctcggcgtgcttcccggctgagcacttcccggcgttgaagcccggatgcgcttacctcgccgacgaccacgaactcgtcagcatgagaaagcattgccggcgagacattggcagatgggacatgaagagaggtcagatggaaaggctctccggcgaagatgacgtggcggcgccgtcgcagccttggctcaactggccaactcctgtctag

SEQ ID NO: 63997 - DNA, 430 bp, Oryza sativa
  Clone ID: PAT_MRT4530_65185C.1
atggttgcgatatatagagagctcactgaaaattatccatttttttgaagcgaccattcaaagtaatccttttgatataccctctatccttggatatacgttgtataccgatacggtatacctacgcgtatacggatgtttcctgtatgcattaaggaaatttatcacgaagtagaaacggagtccacagacagaagggaacctactcggacaggactgggtcgttactatatcgtgaggggtctgatatctccgagtcctacttggagatcaactgacccgcgatataaaagggaccccccgggaggacctaaggcatcgaatctcatagccaagataaccgccacagcttacgaagtcggagcctacaggagccaagtcgccgggtgatctagtcgaaccaactcgactacggtctcctcggtattat

SEQ ID NO: 63998 - DNA, 117 bp, Oryza sativa
  Clone ID: PAT_MRT4530_65186C.1
ggactctccctgtatcttcacatttatcgctgcggttgtggtgattactctcagctttgccacttcactttccatcgtctttacgcactttcttttcgctttcttacattcttttct

SEQ ID NO: 63999 - DNA, 1215 bp, Oryza sativa
  Clone ID: PAT_MRT4530_65187C.1
atgggctcgtcggctactccgtcgacggcggcgagcgcgccgggccggcgcaaggtggcgctctacctcgcgctccttaccctgcagtacggcgcccagcccctcatctccaagcgcttcgtcaggcaagaagttatagtgactacattggttctttcaatcgaagtagcaaaggtctggttatatgtgcagtcattttattggtggcagaagaatagcttactgcagatatcatacaagaatttggattcattgaccttctcaatccttaaccagaccaagctattattcacagcattcttcacttatcttattttgggatttacaatgtttgaatcaaatacatgggaatcttgcaaaagtcaattggcaacaattaaacacaagggtgatgatggtgtggtgcttttgagaatccggaaaacggcagaagaaaggaagatgattgtggatctgagcagtagctcaagaattgcagccatgccttatccatgtgttgaccagcaggacgtccatattgaccatgtgtggcaaaagcaatcacccaagcaaatttttgcattaaccctcttaatcgctgctgcggtccttttgagcattggggagagcagcagcaaaggttctggtggtggcaattcagactatatcttgctctatggaatcattcctgttacagttgcatctgtattgtctggtttggcctcgtctttgtgccagtgggcatctcaggttgtacttgtcattgtactttccatgaagcatcccattgccattgttgaccctttcaataaaacgcaggttaaaaagcatacctcctacatgatgactatagagatgtcgtttattgggagcatgtgcttgctagcaagtacttctcaatcaccagatggggaagccatcagaaagcatggttttttccatgaatggactttgttgacagtggtgccagtattaatgaatgctgttggtggaattcttgttggtctggccatcagattatttctaccatcatggtactgctattatttcctgaatccacttccataccagaccatcagattatttctaccatcatggcactgctattatttcctgaatccacttccataccaggccatcagattatttctaccatcatggcactgctattatttcctgaatccacttccatgccaggaagcttcatcacttgattcatgcacaccaaggctatag

SEQ ID NO: 64000 - DNA, 300 bp, Oryza sativa
  Clone ID: PAT_MRT4530_65188C.1
atggagacgtggacggaggaggtggtggtggccgtggtgtatgagatccgcggggagacaatgccgttggactcagagaggccgacaccggccaaggcccgcgcgcctctcaaatataccatcgatcttgcacaaccgttgagcgaaaataacgcaagggtgagcgatatcgtgcggagaaagcgcgagacggcgcagtcttgcgcagcgacggtcgcacgatcggcaactgacgactgcgactgcctcctcttcttcttcttcgccagcaccatcgcttccaacctccgcatatattaa

SEQ ID NO: 64001 - DNA, 669 bp, Oryza sativa
  Clone ID: PAT_MRT4530_65189C.1
ccggccggggctagtcccactcccaccacggcgtggcgcgtgggacggtaggcggccccgttaccgacaagcgaagcaaagagaggcgaggcgaccagcttgacggaacacgagccgagcggccgaattccggtggcttcgacttcgatcgggagcgggagggcggcgcgacgcggcggcgagaggccgaatgggctcgtcggctactccgtcgacggcggcgagcgcgccgggccggcgcaaggtggcgctctacctcgcgctccttaccctgcagtacggcgcccagcccctcatctccaagcgcttcgtcaggcaagaagttatagtgactacattggttccttcaatcgaagtagcaaaggttatatgtgcagtcattttattggtggcagaaggtagtctgaagaagcaattcaataattggagtatcaccagatcacttactgcatcaggacttcccgctgctatatatgcattgcagaatagcttactgcagatatcatacaagaatttggattcattgaccttctcaatccttaaccagaccaagctattattcacagcattcttcacttatcttattttggggcaacagcaatcacccaagcaaatttttgcattaaccctcttatgcgctgctgcggtccttttgagcattggggagag

SEQ ID NO: 64002 - DNA, 1080 bp, Oryza sativa
  Clone ID: PAT_MRT4530_6518C.1
atggcttcttgcgggtttgagggcttcgagaagcggctggagctggtgttcgagctcccggcgagcggcggcgaggtggcgcggcatgggctccggttgctgccggcggaggcgctgcgggaggtgctcgacgcggcgcagtgcgccgtggtgtcggcagcggggaacgcggcggcggacgcgtacgtgctgtccgagtcgagcatgttcgtgtacccggggcgggtggtgctcaagacgtgcggcaccacgccgctgctccgcgccgtgcccgtgctgctccgcgccgccgccgcgctccggctccggctccggtcgtgcaggtactcccgcggcgagtacctgttcccggaggcgcagccgttcccgcacgcccactttgccgacgaggtggcgtacctcgacgccgccctcccccgtgagctcctccgcttccgccgctccgccgtgatgccgtcgtcgtcgtcgtcgtcgcccggcgcctcgcacaggtggcacgtctactcggcgtcgtcgtcggcgtcgtcatccgacgcggatggcgcggcgcggctcacggcggaggtgtgcatgacggagctggaccgcggcatggccgcgcggttctaccagcgccccggcgacggccggaccagccacgccatcggcgacgagatgacggcggcgtcggggatcggcggcgtggtggacgagaatgacccgcgctccctggtgtgcgcctacgcgttcgcgccgtgcggctactccatgaacgcgctcgacggcgcgcgctacgccaccgtgcacgtcacgccggaggacggccactgctacgccagcttcgagtgcgccaccgacgacgccgccgccgcgctcgccgccatccgccgcgccgtcgccgcgttccgcccggccaccgtctcggtctccatctcccacacctccagcgccgcgtcgtcgctctgcacgccggtggccgaagccctggagccgcttggcctggcgtgccattgccgcgccgccgaggtcttccccggcgccggcaccgtgacctaccagacgttcacggcgccggcgaccaagcatgagcatgacaactag

SEQ ID NO: 64003 - DNA, 462 bp, Oryza sativa
  Clone ID: PAT_MRT4530_65190C.1
gcacgaggggaaggggaggtcaggcgagtctgcagccagcacctgtcctgaacgtgtactggtccgaagtcggacgatcacgctgtctcgatcactcgatcactcgatcacacttggcgttacaggagttatcttttgctgtaaactgccacattgcggaaagtattagtagttccgttcttttttttttcttttgttgggtgcactagtgctaggtggtgcagggattgttaattttgcatggtcactcgcatccgcagtgtgtgaggcttcctatttgtctgattggattggattggactggattgcagaagagagggtggtcagtgtcttttttctttttacttcaggttttatcggaagctagctcaacttaattttttaatttgtttgggacaaataagacattcatggcgtgctacggatgtactatgctgcacttcttttaatatatcgacgtgt

SEQ ID NO: 64004 - DNA, 368 bp, Oryza sativa
  unsure (1)..(368): unsure at all n locations
  Clone ID: PAT_MRT4530_65191C.1
cagttaanaagttagtngncgcncatcgngctctggtgctnanncangacatcaggancantnnagntgttgcntntctaacacacagtcntattcagaanttntaggctcttgncctataggaactaacaagcngtngtnntcnangtttccaatgnnngggnttannagngaggacntcanctactnanacatgnnctttaacncnttctacnaggatctcagctttgggagttagttcatgnnaangnaacctgcaaggctatctagcagcantcaacaagcagctgcnctggatgnagtagcccggcaaaantcaagctgtaatcggtggannagntcntattggtgacaancatgttaactgg

SEQ ID NO: 64005 - DNA, 200 bp, Oryza sativa
  unsure (1)..(200): unsure at all n locations
  Clone ID: PAT_MRT4530_65192C.1
tgagccgcccggataatgancttgttcgaagtcgaagtaccactgaaggtggacttgagccggaggtacttggtgacgtatttggcccccgtcggcgttgttgcccacgccacggtcctcccagcgccagccaggtcgaaccccgtgctccccangccctgtacgcgtgccccgcgtagctcggcccgatttggctatnt

SEQ ID NO: 64006 - DNA, 389 bp, Oryza sativa
  Clone ID: PAT_MRT4530_65193C.1
atagcactgtacagtgtttatgaaattgctggttacgggttaggtataccctttaccctttgatatacgtcacatatcgatatggcatgtccacgtgtttatgaacgatcctctacctacatggaggaaatccttcatggagtttacagatggaaagaatcctactcggacaagactgggtcatcaatgtatcgtgtagggtccgatgtctccgagttctatttggaaaccgcctgacctgcgatataaaagggcccccctgagaggacctaaggcatcgaatctcatagccaacacaaccaccacaacctacgaagtcagagcctgtaggagccaaattgccgggagatctagtcgaaccaactcgattacgatctcgtcggtttcat

SEQ ID NO: 64007 - DNA, 987 bp, Oryza sativa
  Clone ID: PAT_MRT4530_65194C.1
atggccgccggcggcggcggcggcgacgacgaccaacgtttcgatctccccgacgaccctcctcctgcgcatcctccggctcgtcccatccaaggaggccgcgtcgaccggcgcgctctcgcggcggcggggctcgctctggcggcgccgtcaacctcgccgcgcgcgtctacttcgacggcggggtcagccgcagcgtcagcctcgacgaacgggaggaggccttctcctcccgccgcgacgccttcgtccgcgcctcgccaggcggcgttcgcggcggccgccccgccggaggcaacggcggctgccgcggcgtcaccaggctcaccctcgacgtgcaggcgaactgccctgcaactccttgatctccaagttcctgaacaatggcggcgagacgacggcgaggtggacgtggttgacctcgtggtctcccaccctgcggcgcgccgcgtcgaggatctccgcgtccgcgttgtcccctgcaggctcccccccccctccgccgccgccgccgcgttcccgccccgctgcgtcgtgcggctctggcatctgcagcgcctcatcgacgccgcgccggggctcaccacagtgcacctagagtccgtgtccgtctacttcgacttcggctgttcggcaaccacccctactagtactactacgatgacgacgaacaagactccgactccgatgagtcggaggaagaagagtcgtttgccggagacgacaccggaccgggtggagagtccgcccccgagagcgacacggcggaagacagcgcgcctcctccctcgctgcccggcggccaccacacccgtgctggcactgtgcaattcaagcacttacgacaacgccaacggcggcgcctgcatcgcgatcgacgcgccgcaaggtacgctccttgcacaacctcgagtcctcgtcgccggcaagtcgagacgagagccgagcacctccgcactttccccgacctcgagcgcctcaagctag

SEQ ID NO: 64008 - DNA, 159 bp, Oryza sativa
  Clone ID: PAT_MRT4530_65195C.1
atgagccacatcaccgggagaaatttactaatcgtgctcgaatgggacgcggacttcgtgcgtgccctcagcgaacgacaagcgagcgagcggcagaagcagacagccggcggccgtaacatgtactgcaagcctagcgagcaaaacccaaatatctaa

SEQ ID NO: 64009 - DNA, 226 bp, Oryza sativa
  Clone ID: PAT_MRT4530_65196C.1
tacttgcttggctactactacttcaccacgcacagctggttggttggttggattagctagctactaggatcagtgcttcgcttctctctctctttgcgttgccgtcgtcgtcgccgctggtggtggtggtggccgatgaccaggctgagtgagcggcggatggagggccaccaggcagttgttggagcctggcgcccctttcggcaggtgggtggtggagagcctt

SEQ ID NO: 64010 - DNA, 264 bp, Oryza sativa
  Clone ID: PAT_MRT4530_65197C.1
atgactggtgatgaaattggtggtgcgcagcgaagcaaaaacgtccagaatccagagggatttagggtggattcaggtgtgggctccgatatcaccatcagccaagcgcaccgggaggggtcctcccctacccggcggcagcatgattgcgcagggcgaagtggccggcagggcagggcaggagagggggagaaaaccgatgacttcctcgacgagccatatgccgccgacgcccacaccttcagcaagcttacttcatattag

SEQ ID NO: 64011 - DNA, 606 bp, Oryza sativa
  unsure (1)..(606): unsure at all n locations
  Clone ID: PAT_MRT4530_65198C.1
cggtntccatggntcagcaaaaaggcggtnccganaaggtcgtctnttgntgcnncagcaaggagnttaagaactccaagtntggngccnagatccccatngacgttntcagcggcgagncaagaacatcccgatcaacatcctcaccatcaaccagctcatccccatcaacaacttctgctcggacaccgtttcgtgctgctccggcgagcagattggtctggtcaacatccagtgcactcctatcctgagctaaatggcttaatgtctttaccgacatctagctattttctcacatcagggatgcatgcgatcacgaggggatgatggtggtggaggacgtttggagtttctgtgagggagccggagtccggcgatcagcgttgagtgaaagccggtcctggctgctgggggccctggtttcgtcctaagcacctggcggccgtggaatggctaggcacacaatccgccggatcctgtctcgcctgagggattgatgtcaagttttggaagcatctggaaggatgcccgctagagaagtctcttctcgttccactcatttaataaaaccccttccagccctaaaaaaaaaaaaaaaaaaaaaaa

SEQ ID NO: 64012 - DNA, 242 bp, Oryza sativa
  Clone ID: PAT_MRT4530_65199C.1
atgaccacgacgtcgccaccaatgccgccgatgctgccttcgtcctcgtcctcgctccgcgacctgctcgagcaggagcgctgcgagtcccacgcgctcgccgcggcgccgcggcgggcgcggtcgggcaggcacgcgtcgccgccgccgcaacgcgtggcgccggaagaggaggacgatgggggaggaggcgcggcggcggtgggcgcggtggtggcgatgctgtcggggtacgtggggag

SEQ ID NO: 64013 - DNA, 810 bp, Oryza sativa
  Clone ID: PAT_MRT4530_6519C.1
atttgccttcgcagttaatcaggtttagggagggtttcctcctccccttccgcctccgccccagcgccgccgtcgtccccctcctctccggcgaagagccgccgtcgccgccatcaccggagcgagccacggtagcaaccgcaaccaccacaaccatcaccatcctcgtgagccgtcaagttttcgattgaagggcagtagggcacgttatacttatggactcaactcaggaacaacaacaggattttggtgtgctactgaagcagggggcggagggaagggtatttgtttcaacatttgtgggacggaagtgtgtaatcaaagagcggttttcaaagaagtaccgacacccattgttggactcaaagttgactcttaaacgcttaaatgctgaagctcgatgcatgacaaaagcaagaaagcttggtgttcccactccagttctttatgccgtggacccacttctgcatacattaacctttgagtatgtggatggcttatctgtggatggtgttctcctaatatggtaaactgcaatatttagctaaaaaaggttgcacacaactacttatgttgactgaaattcgtgttggcttgattctctcttcaatatgtaggaagctcgatgcatgacaaaagcaagaaagcttggtgttcccactccagttctttatgccgtggacccacttctgcatacattaacctttgagtatgtggatggcttatctgtgaaagatatactccttggatttgggtcaaacgggatccatgaagaacaactcattgacatcgccacacaaataggaaatg

SEQ ID NO: 64014 - DNA, 1022 bp, Oryza sativa
  Clone ID: PAT_MRT4530_651C.1
atggccgagcaccacctcccgccggagccagccgacgagccccaccaccacaaccatggcgggaaggcggccgtccacgccgacgacctcaagcccggaggccgccgccgccggtacggatactactatggcgacgggtacggctctgccgaccccgcccgcacgctctgcttcgtcgtcctcgtcgtcatcctcctcgccggcatcaccgcgctcgtgctctacctcgtctaccgcccctcccgcccggccttcgccgtcacctccgtcgccgtctactccctcagcctcaacggcaccggcaccggcaccggcgccgtcgccggcgggccggccacgctggccgcgtcgttccagctcaccctcgtcatccgcaacccgaacgagcggtcggcggcgcggtacgacccggctggcggcgtacgtggcgtacccgcgggggagcccatccacggcgcccgcacccgaagccgccgctggtgcaggacgcggacagcgcggtggcggtggcgcccgtgctcggcgccggcgccgcggcgccgcccgtcccggtgtcccccgacaccgcggcggcgctcgccacggacgtgtcgtacggcgtggtggcgctcagggtggtggtgctcggccgcgtccggttcgtgtccggcccgttccggagcgggtggcactccatgtacgcccgctgcgacctcctcgtcggcgtccgcaagagcggcggcggcggcgcgggtggcggtccggaggcgccgctgctcggcaaccctacctgcgccgtcgacatgtgatgccaggcagctggatagcttcgtcacacctcgcctgtgtacgcgtagaaaatttacctatacagctagacgacgacgtacgtgtatctgtgggtgaccacgtgtccgtatgtatacgtatattggcaagcatacgtgtctccgcttctggatacctttgcaaaatatacgtgtaaaatatcgaaaaataatgataccatatcacatatgctaatgttcgacagaattttcatc

SEQ ID NO: 64015 - DNA, 1593 bp, Oryza sativa
  Clone ID: PAT_MRT4530_65200C.1
ggagagaactagtctcgagtttttttttttttttttttttcgtttttctttcttctcaaatgtcatgtcatgttgatagaaccatacaacaaggcatgtaactagtcgatccctgagactaccttaagagcctaaggtcttgaacttgtaacaacatttcctaatgataaatacatatgactgctctacgaagtgaccaacaaaaataccagtcactgaaaaaaaatgccaatcatttcctctttcttgtttcacatatgtaaaatggcaatagcagattaatcagaacatcaccaagttggttgaagagccaacgacgaacggctccatcagcaaccgagtcaagaagtagaatgtgacacccagcaagatggagatcgggagtgcaggcaatgcatgcttgcatattgacagcaagataagggtgcagccaagcccagcaatgatggcaaggtagcacgcatacaccgtcatcagatcatacatcgcagccctccccacaagcacgctgtagaagataaaatcaccaagtcccagcttgatgcccctggtggactcgaacatctcgaactccataccagagtctgaagaagagttttctctgtgctcctcattaggggctgcattgttggcagatgccgctgataccaatggcactgtctctccttcctcgtgctgctcaatctgaatcacagcatgctgtgaactcccaccctgattcgatgaatgccctgataccgataccgccatcggcgcctccctttcgaggttcctctcacgaatgcttgatcggctaccaccaacatccctcatttccaccacggcgcggctcgaatcatcctcctgctctactctgtcatactgatttccacccgatcgaccgggatcggccaccggctgcatctcaactgatcccatggctgaagcgtaggaggaagaaccggaggccggcccaaccgtcggtctcgactcgtagacgagcgcagggagctcatcgtccctggatgaggcgagctccacaagcatcctgagaggaccccgcggcgcgagcacggcgacgaggtcatacagggcgagcgcgatgagcatgacccaggtggtccactcgggcagcctggagagccaggcggcgacgatgacggcgagggcgaccatgtagccctggcgcacgacgatggggaccgcggaggcgaagacggagaggacgccgacggcggaggcgttgaagaggagcacgagcgcggtggcggcgtcgagcggggcgccgaggcggcggaggacggcggcggcgatggcgccgcccatggagaagaggacgaagaaggcggagaagcgcatgtagttcttgaggaagcccgtgcagcggtagtagtagagcgcgacgaggacgaaggtgacgacggcgacgagggcgacgaagacggcggcgtcgaggagcgcgccgacgagcttctgccccggggtgtcggtggggctctcgaggtagacgagcgtcgcggcggtgaccggcggcggcggctgcgcggcggccgcggcggaccccggagcggagggcggcgcgaggagggagatgaggagcacgaccagcgccat

SEQ ID NO: 64016 - DNA, 2698 bp, Oryza sativa
  Clone ID: PAT_MRT4530_65201C.1
atgcagctcaacccgaaagcaagaactcgtcgaaacaaagcgaaagtaaaagggactcaatctatgcatggcaatcctcatcaagtgcattaactcaacccgacaacgtgtaccgcatcacattgtcggactcggctcaatcggcaaaccttgtccacctcggattccgccgatcctggtcacagccgattcggactttagccgatcctttctctgtttccgaaatgatttccatcttggattctgcgtcagttttatctccatctccgatactgaaattaccaaatttgccaactttgtcttctctctccacggcgatcccctcggcgcactaggcgatcccacggagatttcctctccggccaaatttccgcccgcggcgatgtcgagttccgccagcccgtctgccacgccatcggccgagtatgcagaggtaagtacccatcggctagatactcttttttaccctatagattgatctcttcttgttgtcatcttttttttcttcttctctatccttattgacatcactatgattactggattagatgtaacttcatcggctaaccctatgagcttgaacaccaagaactagtttgattttaggaccaagagcataggtggttggtctggctatgtggccgcatatatgggcaagggatctgtcacccctcgagagcatactgccttccttttgatgtggcttgagaagttcctattttgcagatcaagctacggtcctaccaccaactggcaattcttagccaaagcccttgaaaccaagaggcagtttcccctgggcaaaatccttctcggctatctataccaaacgttgagcaatgcatcggctaagatagccacaggatcagtagtgggtgcaggtgttccatgcatgaaggttgtgaatcggccacctctgacagaagctgaattcccaaggttggagcccactactaatgatgatggggaagaagttacccatcgccgatgcctatcatatggtgaagctgcatcgacaccagccgattcaggagcaaagctatcggctgaactgctcaaggactggttctgcagtttttatgaaggcttccaaagagatgctcaagtctggtttccatatgaggattcagtgaatttcgaccttccatcggacttcagattcgaagacatcaactctaagaaattttactagtccaaagaagtcttctcggctgccattagtccatgcatcctttctgttgacatccaccaagggagaaacatacaggtgtcttatgagttctaccatccaataagctcagctaggcagtttggaatgggacagctaccaatcggcttgttctttgccgataagatccagtgcagaggagaaatctcatcaatgttgatgattgatcggctgatcaacatcccaggacctcctttaggcagtatatagaacatagagctggcaaggttcaggagtaagaaccttgacagatggtggggtgaatggaagcaacatatattccatcagccagcctctatgtacatgacagatctatatccggatgttgtccctcagacagcagaatcctcccctcctcgcaaaagcaaccgtggcagggacatagaatatgctccaagccttctaccaaatggaggtggactagctccccctgtcatcggctaccatgcccccaggacgtcaagtctacttcaagggcaaatgagagaaccagccgatgtgggtaggaagaggaaaaccaaaacatcggctattgatccatcggctttagctcccaagaaaaaaaccaagaaggataagcccaaaccagccgatgacttgcctgccttagatccatctatcgagcaagccttggatgaagaagaaatcggggaagatgtcgattaggcggtagccgagttgagtgaaggagaaaaaacaccattggcttcacgcaagcaaactgctccaactcccgctgctccagctcacttctcaaggcctcctcctcctccttcacctcatgtacaacaaatgtcaagtgaccggactccatcggctacaggaagtcaccatgttgaggaagaagaacaaccagccgctcctgccatcccagtcctagccgatctgttctcttttgatatccaagattactttgatgagacagaggaagaaaccacaagtaaggctctagcccctctggatgaaactgtcaagaaaacacttgaagatatatcccttcggctagagtcatcattagacaacttggtggccggttgtggttcaatccgggcacaatttgctaaaatccaagccttaattccggatgatctggcgaacaccattactccagctgtatacctcgagcaacatcaattgaagccactatccaagccaatcggcaagttgtgcatgaagaaaaagccaagcttgatcaactctctgttgggccaatccaatcgaactgatctcatagctcaacttgaagaatgtagtgccaagctagatcttgaaatgcaaaagctagccaatcttccaagtgctgttgaagaacataaatctagattgagatcggctataaaaaatgtggctgacatgaccaagtccctcaaagtcatctctggaaccgacgcccaagatatccaagccatcgaagaagtagatcaaattagacaacgagctatgtcggctatccagcgttacttgtctgga

SEQ ID NO: 64017 - DNA, 2764 bp, Oryza sativa
  Clone ID: PAT_MRT4530_65202C.1
gggcatggccaccacttgcctctcgcctttcttcctcctcccaccaatggccaactaagcgcacgctctcccttgattcgccattgctgaacggagctgcaagctttcgattgctgagttaatcgccgacgtcgcggcggaaatggcttcccgttcgtcgcgcggcgagcgcgtcggtgtggtgttcgtcctcgtcgtcgtcgtcctctgcgtcgacgtctccacgctggtggccgcgcagccgctggtgtcgtcgcaggcgaagacgctgctctgggtgcgccgcctgctgggtttccccccggcgctcgacgcgctggcgggggcacccgacgcgtgcgcgctgccgccaacgccgtcgctcaccgtggcgtgcgcgggcgggcaggtcaccgagctctccgtgctcggcggccgcgcgcccggcgccgcgctgccggccaacttctccgccgacgcgctcttcaccacgctcacccggctcccggcgctgtcgcgcctcacgctcgcgtcgctcggcgtctggggcgagctcccgggcgccaagctccaccgcctccaggcgctgcgggtgctcaacctcaccggcaactgcctctacggcgccgtccccgagcacttctcgcggatgtactcgctgcagagcctcgtgctgtcgcggaacaggctcaatggcgccgtgcccaacctctccgggctcgcgttcctcgacgagctcgacctcggacacaacaggctcggcccggcgttcccggaggtggggaacgcggtggtgcggctggtcctcgccgacaacaacttcaccggcaggattccggcggcgatgagctcgctgggccagctccagttcttggacgtgtccggcaaccgcctgcaggggtggatcccttcctccatcttcgcgctcccggcgctgcggcacatcgacctgtcgcgcaaccagctcgccgggcagctgccggcgagcacggcgtgcgccgacgcgctggcgttcgtcgacgtctcggacaacctgctcgccggggcgcgcccggcgtgcatgcgcggcaactcgtcggcgcgcacggtgctcgacgcgggcaactgcttccgcgacgccaggtcgcagcggccgagcacgtactgcaaccccggcgcgctggccgccgtgctgccgccggcgcaggggaccggcggcgagcaggggtcgggcgggaagggcggccaggtggggatggcccttggcatcgtcggcggcgtcgtggccggcgcggcgctgatcgcgctggtgatgatggccgtgctgaggagggcgaggaggcagaatccggaggtgagcgtcttgcccaagtcgccgctggcgtcgacgccggcggcgaagaagaaggcggcggcggacggcggcaaggcgccggccaaggtgacacagaggattgttactcctgctgaaaagaggcatgcatcacaagctgcaagggtgaatacactagaagtaccagcctaccgtgtgtatacacttgaggagctccaagaagcaaccaacaactttggttcatccaacttgatcaagagttctcctgttgttaagcattacaacggtcagcttcaagatggttctagagtgtcactgagatgcctgaagctgaaacccaagtattcccctcagagcctgacccaatacatggaaattatttctaaacttcgacaccgccatttggttagcatcatcggtcactgcattgttgaagatcaagagaatcctaatattgctagttcattatgcctcctttctgaatgcgtaacaaatggatccctaagaagtcatctaaccgagtggaggaagcgtgagatgctaaaatggccccaacgtgtttctgctgccattggtgtcgccagagggatccagtttttgcatgatgtgactgctccgggcattgtacacaatgatctaagcatcgaaaatattcttctggacaagacactcacttccaaaatcagcaactttaacctcccgttgatatcaactagcaagaatggcaagatattctcagaatccccctttgccacatctgaagacaatgatctcggcagcgtgccaagcacagaacaaggggacaaggatgacatttaccagttcggcctaattcttctggaagtaatcacaggcaagccaacagagtccccaaaagacctggactccctgaaaactcagataagtgaagctatagctgaagacccagatttattgaaagacatggcggacccgacgatccgcggaacgttcgccgtcgagtcgctgagcacggtggccgagatagcactcaattgcattgccagtgacacaagcagccggccctccattgaggacgtcctctggaacctgcagtactccatgcaggtgcaggacggttgggcaagcagcgagagcctgagcctgagcaccagatcacagggatgagtaagcacaaaaaagaggggcaatttcacttctccgggtcaagcaaaaagatgcaatttcactttcagattggttgcgattttgctgtaaaagggtgagtttgttgtgctgtttcgttccttttcctgcgattttgctgtgggagaggtgtgtgtgtgttcgtccttttccttgtgtatagaagttctcttgtttttttcctcttgttgctcaaagttgtaacattccagctagagcaattaagaccaaaattattggaccaatattacttatggtgatctggggacagcatttacatctcccccaaacgaaaaaaaaaaaaaaaaa

SEQ ID NO: 64018 - DNA, 1938 bp, Oryza sativa
  Clone ID: PAT_MRT4530_65203C.1
gttgttacttacgcatattttgccgttagttaattattatccggtaaagaagattagtagtaatccaaaattttcccaaccccaacctcggaacaaaaaccgcgtagtatttgtcgtaaccaggagcatccgagtcattaatttacacccaaacacaaaaaattagcagcacgcagccgccttcccaatcctctcctcttctccaagcggcaattcgcgcgaggttttctccgatcaaaccctcgaatccccccctcgcgaatccatcggagggtagccccgcgatccgcgtcggcgagagcggattccgattccgcgatggagcgggtgttctccgtggaggagatctccgacccattctgggtcccgcctccgccgccgcagtcggcggcggcggcccagcagcagggcggcggcggcgtggcttcgggaggtggtggtggtgtagcggggggcggcggcggcgggaacgcgatgaaccggtgcccgtcggagtggtacttccagaagtttctggaggaggcggtgctcgatagccccgtcccgaaccctagcccgagggccgaagcgggagggatcaggggcgcaggaggggtggtgccggtcgatgttaagcagccgcagctctcggcggcggcggcggcggcggcgacgacgagcgcggtggtggaccccgtggagtacaacgcgatgctgaagcagaagctggagaaggacctcgccgcggtcgccatgtggagggcctctggcacagttccacctgagcgtcctggagctggttcatccttgctgaatgcagatgtttcacacataggcgctcctaattccatcggaggcaatgctactccagttcaaaacatgctaagtggcccaagtgggggatcgggctcacagttggtacagaatgttgatgtccttgtaaagcagcccaccagctcttcatcaagggagcagtcagatgatgatgacatggagggagaagctgagaccactggaactgcaagacctgctgatcaaagattacaacgaaggaagcaatccaatcgggagtcagccaggcgctcaagaagcagaaaggcagctcacttgaatgagctggaggcacaggtatcgcaattaagagtcgagaactcctcgctgttaaggcgtcttgctgatgttaaccagaagtacaatgatgctgctgttgacaatagagtgctaaaagcagatgttgagaccttgagagcaaaggtgaagatggcagaggactcggtgaagcgggtgacaggcatgaacgcgttgtttcccgccgcttctgatatgtcatccctcagcatgccattcaacagctccccatctgaagcaacgtcagacgctgctgttcccatccaagatgacccgaacaattacttcgctactaacaacgacatcggaggtaacaacaactacatgcccgacataccttcttcggctcaggaggacgaggacttcgtcaatggcgctctggctgccggcaagattggccggacagcctcgctgcagcgggtggcgagcctggagcatctccagaagaggatgtgcggtgggccggcttcgtctgggtcgacgtcctgagaccgaaacccagagctgcttcggttctgaaagacactgcgagcaggaaatgatgattggacaggcgtagacattgctaatgctgtgaggttgatgattgttggtcgtcgtcgtcgtcattgtgcattctttgtaagggacacctcttagtaccctcttcttctaagggacttagtaccccttgtggatctcatcgtcctaaatactatacacattagccaaatgttcattggtgtgatggcgtcgtccctaatttgaacgactgatttcaggcagctgctatgctatcattcaataatactttgatcgatgcttcctttaacaaaaaaaaaaaaaaaaaaa

SEQ ID NO: 64019 - DNA, 248 bp, Oryza sativa
  Clone ID: PAT_MRT4530_65204C.1
aattctatccatttttcatattttcattcgcgtttacactcacaaagtggaataccaacaactaacttatctataaacaaacataaacaataatttatcatattgggtgttcttatattacaaatcaccaccattcaaatcaccattaaccaccaacccatcttttctaatttaagttttaataaacaaaaatattacctatcctatctacataccctaccacatcattcataattacaaaactaaac

SEQ ID NO: 64020 - DNA, 568 bp, Oryza sativa
  Clone ID: PAT_MRT4530_65205C.1
attgactattttatatgtgctaatgcagagcctgcgggcatgtgcgtgtcatagctgaagaagccccgaccacatgacatccacagaataggtcgatacaccggcacagaaatattgaaacaaaaagttcagcgactctcacctgcctacacctacacatacatgactctgtacttacgcttgaagatccagtatatcgccggcttcccgaccgagcgcgacgcggcctgatcgacggcactgaccacggcgaataggatgttcccctcctccatccacttatagtggttctccctgaactcgaggtgccactcctccgccagcttcatgacctacctgtggtgtagggcaccgactcttctaccatggtacagcaagacccagatgaaccttatgctcatgatctgttcgcaagaggcaaacaatctgaatcagcggacgctccggatacttggccggtttggcaacgccaatgctcgcagacaacgcaggaagaagaacaccagccggccacccatgaccatgcatgcctccatgcaagcgcacgacgtcgaggacgcactccgcg

SEQ ID NO: 64021 - DNA, 561 bp, Oryza sativa
  Clone ID: PAT_MRT4530_65206C.1
atggggatatccaaggtgattggcatcgctggaacatctcttctggtcacgtctgttggtctgtggaagattggcttaagaattgtcgcggttcctttcctagccaccagtacaattgcctatatcatcgctgttgcatcccacaattccatcaacataccttggatgttgggaaagaattcaaaggggaggtttccaatttggtcaagtgtactttttggtcctttcttgatacttgcccgggtatatgcaactatgaagagacatatgaggaagaaggaggctgtgtataacatgatcactgaaggcgtttatctaggaggatggccgtttatgttgaagcatttgcccccaggagacccctctgttattgattgcacttgtcatggaagaagcgcttgtgttgtgtgtgcagttctagtagcattgggcattgctgaaaactggaaggatgcagaaaacatcatccgagaaaaaagaaagataaaaatgaatgctgttcaccggaaaaccttagacgattggtcaaaatatagagcttctcagaagaaggataaataa

SEQ ID NO: 64022 - DNA, 1748 bp, Oryza sativa
  Clone ID: PAT_MRT4530_65207C.1
tcagctgacaaagacaaataaatcagcaggcagccagttatcaattcccttctgggagtactctgctcccctctgttggtttccatcagaaagaaggaaacaagtttctctgcgtctccgatctgcagtgcgagccacgaaggttggcgtcgtctcctcctccctctcctcctcgcgcgcggctgccgtcgagaagacgctcggcctcccttgtgcggcctcacctcctcgcgctgaatcccctactccccgtgttagatttgaccttcataatccaaaagaaggggttttagttcaagcgaacgataatggggatatccaaggtgattggcatcgctggaacaactcttctagtcacgtctgttggtctgtggaagatcggcttaagaattgtcgcggttccttttctagcaaccagtactattgcctatatcatcgctgttgcatcccacaattccatcaacataccttggatcttgggaaagaattcaaaggggaggtttccaatttggtcaagtgtactttttggtcctttcttgatacttgcccgggtatatgcaactgtgaagagacatatgaggaagaaggaggctgtgtataacatgatcactgaaggtgtttatctgggaggatggccgtttatgttgaagcatttgcccccaggagacccgtctgttattgattgcacttgcgagttgccaagaagtgattttgtcccaacaaatgagtatctttgtgttcctacttgggatacaagagccccgacgatatcccaaattgaatttgcggcatgctgggcatgtgaaaagagagccaaaggaaaaccagtttatgtacattgtgcatttggtcatggaagaagcgcttgtgtcgtgtgtgcagttctagtagcattgggcattgctgaaaactggaaggatgcagaaaacatcatccgagaaaaaagaaagataaaaatgaatgctgttcaccggaaaaccttagacgattggtcaaaatatagagcttctcagaagaaggataaataactgacattaaatcatttgacatctcaggcaaattaccatgtgagttctatgcaatctgggttctgagaaatcttcctagttctggagcttgcattgtttcccagctcatatcagtgtttcccacacgtgtcagattacttccaaaatttgttcccagttttgcttacttctgctcctatctgaaggttagtcttcaaagtccttgtaaatcagaaagctgaaaattggctttcagatggttgtgctgctatgcttagctctccacagttgccttcatctgccaccaatatcctacaggcaaataaggctccagctataaatatatgatggatgcgtccagataaatagcactacagctgctgtcctattattcttttagacttttatagaatttagttagttggctgaaagcctgaaatagttgaaacatgcatagaaagggacaaaatccatatctagcccttattttgtacaccttcacatcattgtattttatcataatcttttttaggataagggactaccactagtttattggtgtaatgaccttcaaaattatgataaaataaagtgcatgcagtatgcatgatgtgcaaaaaaaagtttgctagcttttgactacctccagtaggaggctggtccattccatgctgatttaatagggtgcattccttatattttttttgtctagtaaataatggttcagttatatgtacttcg

SEQ ID NO: 64023 - DNA, 366 bp, Oryza sativa
  Clone ID: PAT_MRT4530_65208C.1
atggccgagtgccgacaaggccaggctcaacgtcggcacttagtgccacctgaggaaggccatcgccaacgtcacgccttcgccatggacatcatccgtgcccggcgccagagcgcgtccgtgcaagatagagacgacgtcctgtcgaggtcgtcggggttgagctggttcttctggctcttgtcgtcccagccggacgtcatggcacgcatcgccgacgtggtccatgtggtgaggaaggcgaccggcgcgtgcccgagcgagctgttcgggttcgacgcgctccgggagatgcactacctccacgccgtgctcatggagtcgatgcggctgtacccgccggcgtcaggcgtgcgcggcggatga

SEQ ID NO: 64024 - DNA, 2022 bp, Oryza sativa
  Clone ID: PAT_MRT4530_65209C.1
atgttagaggaccacagaacttcgttgtacccaggttgcgagcaggggcacaaaaagttggataccactctagagttcttgcaatggaaggcaaaaaatagtgttagtaacaaggtatttggcgatttattgaaactcgtcaagaacattctttcggagggaaacaaatttcccgagacaacgtacgaggctaagaagatagtctgccctctaggactggaagttcagaagattcacgcatgtctgaatgattgtatcctatatcgcggtgaggagtacgagaagctagaagcatgccctgtttgtaaagcactacgatacaagattagacgagatgatccaggtgaagttgacgggcagccaatgaagaagaaaattcttgctaagaggaagtacataatgatgccgattattattcaaggcgccaagcaacatggtaacgacatcaatgtgtacctaagaccactgttcaaagatcttaaactgttgtggaagaaggaaggtgtctccgtgtgggacgaggacaaacatgaggagtttaacctacgagccctgctgttcgtaaccatcaacgattggcctacacttagcaacctatccggacagtctaacaaggggtacaaggcttgcactcactgtatggatgaaacagaaagtacgtatcttaagcactgtaggaaggttgtgtacataggtcatcgtcgattccttgctgcaaaccacccagtacggaagaaaggcaagcactttgaacataaggcggaccaccatcttaaagtagtgtttggaaaggggcctggcagccagcctatagagagcgaagatagtcacgcggcgatgtggaaaaagaactctatattttgggagttaccctattgggaattcttagacgtccgccatgcaatcgacgtgatgcacctcactaagaacctttgcgtaaacctgcttggcttcctagctgtatatggaaagtcgaaagatacactggaagcacgtaaagatctgaagcatatagaacaacgcggcgaccttcacccggaaccaaaggagaaaggaagccattacttgagtccagccagctacactcttagcaaggcagagaaggaaaagattggtattctcgggcctgtgtacctacacaacatgtttcctttcaagaggtacatgagcgttctgaagaattatgttcgtaaccgtgctcgtctagaggcaagcatcgccaaggggtatggagcagaggaggtcattgaattctgcgtagaatttattgaagaccttcgcccaatcggggtgcctgaatcacgccataaagggagactacagggaaaggggactctcggaaggaaagcaataatgacggtagacaacaatttattccgtaaagcccatttcacggttctgcagcaatcttcattggtggctccttacatcgaggagcacttggctctagttcgcgccagaaacatcgcccaagacatgaaatccacgaaccagaacagtgctattcatatcgatgccatgggacacgatggtacaactggcacgtattacggtgccatcgaggacatatgggaacttgactatggacctctcaaggtccctctgttctggtgccaatgggttaggttgaccggtggaggcgtaacgattgatgacagtgggatgtcaacggttgaccttaacaaggttggatactcggacgaaccttttattctcgccaataatgtaacgcaagtattttacgtgaaggacatgtctagcaaaggaaagaagggaaaagggcctgacgagccgaagcgccacgtggttctcccaggcaaaaggaaaattgtcggagtagaggacaagattgacgaggattatgatcagtttgatgggcaaccctctttcacggtgaggattgacgctagcatcctcctatcaaatgaagacaccctttactcacgtagcgatcacaaggaaggaacaatagtgaggagaaagtacgtgtggtcaaccgtcaccgtcgatgtattgccgtaa

SEQ ID NO: 64025 - DNA, 2580 bp, Oryza sativa
  Clone ID: PAT_MRT4530_6520C.1
tcaagccgtccacgcccgcgcgccgccaacgaaccctcgacccaaaacgctcaggaggacgccaccgccattgatggtccgagctctgatctgcttcatctcaccacatctgatcatctccatcggaggcacgaagtatggtccagtggttctttcttggaagtcctgggagagtgggcgctgcttgcctgcttccattgacttcctcttcagccgcagccgcctacggtgatttaagtttcctctcatctggtctcccttggcctgcccaggcagcagacgggctgcggggcggacggtgggctctgcggccatgaccaccgcagttcctgcggcagcggcaaccatggcctctccgaatccctcctccgccgtgaccacggcagttcctgcgtccgacgacaatgggccgcgctcgcccgtcgccgctccgcccgccgtcgcgccgcccgtcgtcgctccgcacgccgtcgcgccgcccgtcgtcgctccgcacgccgccacgctcgcccgtcgccgctccgcacgccgcgctcgcccgtcgccgctccgcccgccgtcgcgccgcccgtcgtcgctccgcacgccgccgcgctcgcccgtcgccgcttcgcccgccatcgcaccacccgggctcatgagtgtgcgtcgtcgcctcgtcgggtgcagcagagctcggccctcttcctcctctcccgccgtgcggccaccccctatcccgcaggcgcgggcagtcccgactcggcgcggatggtgacagagcgcggaggaggcgacgagccgacgacggtcgacggcttgggccagcgaggatgtgatgccgaataggggcggtgaggaggcggcattggcagctggggcggcgaggaagcggcctcggctagggcacgacggccttgggcgcctcgtcagggactgccggcgggaggagttcgtcaatccggtcttgtggttggagagctcgatcgggatggtcatgccgtggagcacctcgacgacggtggaggagggatccggagaagccatggtttccgccgcctcacgaattgccgcggtcgcggccgcagaccccaccgtccccaatttagcgccgcaggaaccaccgctctgcccgaagcccgccgccgcgcgctccgcccgccgacgctccgctgccgtgcgggcccgctgccgtgctcgcccatcgcagctccgctcgctggccgccggcctcccggtgttgatctctcggtcggaccgccctggaatcgcctgtcgcccctgttgccaccgccggtctaaccgccttgcgcccgccggcctaacggccgcgatgccgccggtctgaccgccggtgtgtcgcttaaccaaaccggtcatgtgccgcgaacaaccgaaatccacgatccacatgttctccttccgcgccatcaaagcctcattgtcttcacactctgaatatgattcaccacgtgccatgaagcaaacaacggagatgttctttcccttatcttcatctccactatcaccatctacgtcgcttagtggctcaaacgcggcgtagacttgatcaaaagccttcttgagattctccttgatcttccttcctttgaatgtacccttcggcttgttgttgttgttggtcttctcaccatctttgtcttctttttgcctctcccaagcctcgaaatcgacggaagtcggcctgaccgaagttgttctgccggtctgaccgagtggatgccaccggtctgaccggtgttgaatctccggtctgaccgccgagatcgcctgctgcgcctgtcgccgccgccagtctgaccgccgtgctcccgccggtctgaccgccgcaatgccgccggtctgaccgccggtgagttgccagttagaccgccgaaacccggtgaaacacaaatcgaagaactcgcgggctggccggtccgaccgctcgatcaccaccggtctgaccggcacacactgcccggtaatggatccgaagttgccgctcctctcctccaacttttctgcaaccaccgcgagggcttggggacgccaccgcctagaccgcctcttcggccagatccgacgtgtgggctcggggaggtcgccgccgccacagcgtgagctcgaggaggctgccactgcgtggcagcagcaatgaggaagatagaaggtggaagaaggagtcgacgaagagagagaggccgcgccgccgaggtcgattcggagccgacaagggaggcgacggagagggagaagagcctcccgagatccgtaactcggcggcgccgtcgtccgcatcttttgcctgcccgacgtggagccccgcccggcgtcgtcaccgcttgggccatgccaccacctctcctctacactgccatcgttgtggccgtggcggcggccactgccgatgttgtttgggcttctagagctgcgggggcagtgccccgatgctcgcttgtgcttggtggtgtccggctcgtcggcagggatggagatggactcacggaggagcgggaggttgagcaatggctccggctccggcagctttgacccacggcgaaggaggcagtggagaggtttgggctcggacgatgacat

SEQ ID NO: 64026 - DNA, 254 bp, Oryza sativa
  Clone ID: PAT_MRT4530_65210C.1
atgatcgtcactgatctttgtggacttgggaggcataggaaattcaggactaacatgtttagtctcttcagcatgaacaagaggatgaaacgctgcatcttcgacgagcttcaaattccatccccaaatcttgcaaatttcgggactccggatgagcttcgagattcgtgctccaggttctcttccaactccgatgacctcctcttctttttcggcgccggcgacaccctagactttggcgaaggatcctacga

SEQ ID NO: 64027 - DNA, 557 bp, Oryza sativa
  Clone ID: PAT_MRT4530_65211C.1
aagccatctggccagaatattggtaatgtgtattactgtcccttttttttagatgtattactgtcctttgttgttactgttatatgttgcaatatcaccagtggacctgctgataaacttcagtgctattactcccacttatgattccccaatagatttttttttaaaaaaaatatagttgaaccatgaagaacagggtaaccagtttaactttcaagggataatcaccagtttattatctgaaagggtcttaaacacatttttagttatccttgggcgccataatgatctgttaaccacaccttttctattcatgacactggtactccactccagtctgttgtaagtcaaaaacgatggtgagaggaatattggctgttttaaaacagaataacagtacaaaaggttagaaaaagtacttggtcaaaacttcatgttaaaagaatttggaaatcattgtctaagtggagggtgtggatcaaattaccaagataggatcacaagtagaatttctacagaagctaaaatgactacccttttcaagcaagatacaattt

SEQ ID NO: 64028 - DNA, 2849 bp, Oryza sativa
  Clone ID: PAT_MRT4530_65212C.1
ccgggctgctcgtttccccgcggccatccccgtcgccccaccgccgccgcaggagcccgccgagacgatctcctccgccgagcagcgccgatctcccctcccgcgagcagcggcggccggcgacctgctgcttctgccgaattctctccggtgagcatccccatttgcaggccaaaggcctgatacaattaccaaacagaggctgttttgaagacactatagttaggggcttagagtaacctggttacagataatgtctgagttcctggatctcgagctgcaggatgggataaggatgccttggaatgttataccaggaactaagcaggatgctgcaaactgtgttgttcccgtttccgccatatatactcctctcagaccaaatcctgccattcctgttcttccttacggcccccttcgttgccgcatgtgccgttctattctcaaccctttctgcgttgttgactatgttgccaagatttgggtttgtccgttctgctttcagcgcaaccacttcccccagcactactcctctatttcagaaagcaatctccctgcagaactgtttcctcaatatactacagttgagttcatgtccactgccgaaactggtcctgtagtaccaccagtcttcctctttgttgttgatacttgcatgattgaggaggaaattgattatttgaagtctgctctagcgcaagcgattgagctcttgccagaccaatctcttgttggattcattacatttgggacatacgtgcaggtgcatgaattgggttttggtttgttgccgaaatcatatgtcttcaaggggacgaaggaggttacaaaggatcaaattcttgaacaaatgtgcttctttgcagggaaaacaaaacctacaacaggtgttatcgcgggctcaagggatggcctttcagcagagagcatttctaggttcctgttgcctgcttctgagtgcgagtttgtgttgaattcaattatagaagaactgcagaaggatccttggccagtttcagctgatcagcgtgcatcaagatgtactggaactgcattaagtgttgcagccagtctattgggggtctgtgtcccaggatcaggtgctagaattatggcattcatagggggtccatctacagaggggcctggttctatcgtatccaagtccttgtcagaaccaattcgttcacataaagaccttgataaaggttctgctccactttataccaaagctgttaaattctatgaggagatctcaaagcagcttgtacatcaaggccatgtgcttgatttttttgcatgtgcacttgaccaggttggtgttgctgagatgaaggttgcagtggagaggactgggggaatagttgtgcttgcagaaagttttggccattctgtttttaaagagtcactccaacgcatttttcagtccagcgacaatgatcttggcttatcattcaatggtatatttgaaattaactgctcaaaggatgtcaaaattcaaggcattattggaccttgtacttccctggagaagaaaagtcctctatcctcagatacagttgtaggccagggaagcactagcgcctggaagatgtgtggtctagacaggaaaacatcaatatgtttagtgtttgatattgcaaaaaaagatgggcccgatgcaattagtcaatcaacaagcaatcagttctacttccaattcttaacatattatcagcatcatgagggtcagatgagattacgagctactacactttccagaagatgggttgctggttctggtggtgtgcaggatctaatagatggttttgatcaagaggcagctgctgcagtcatggcacgcttggtctcatttaagatggaagctgaggctgattttgacccaataagatggcttgatcgagcattaattagtatgtgctcaaaatttggagactatcagaaggaaacaccctcatctttcagtttatctccacgtctatcaatatttccacaatttatgtttaatttaaggcgttctcagtttgttcaggtgtttaataatagtccagatgaaactgcatattttaggatgatgttaaacagagagaatgtagcgaatgcagttgtgatgatccagccttcacttatatcatattcatttcaatcaggcccagagcctgttctgttggatgtaactgcaattgctgctgacaggatccttttgttggattcttattttactatcgtcatattccatgggataaccattgcgcagtggcgaaaggctggctaccaagatcagcaagggcatgaggcatttgctcagttgttgaaagctccacgtgaggaaactgattcgataatcaaggagcgctttcctgttcctcgtttggtcgtgtgtgatcaatatggttctcaggctcggtttttactagcaaagcttaatccgtctgtcacatataactctgacaatcctccaccacctggaggagatgtcatattcacggatgatgtgagcttcgaagtcttcatggatcacctgcagcggctggcagttcagtagaacacggtcatgaagcaattttgtatgaatcttcaatagtctcgtccagtgtacagcaaagaacgacttctccgtgtaatttatgcaggttaccacattgtagtctcggatatgccattgttggctctacatctgtatatttccatggttataggctgcaaggattctgcctccactataaattcaagaaggaacattcatgattgtgtaaaatacgtttcataaaaaaaaaaaaaaaaaaaaaaaaaaaaaaaagaggggggctgcagcccggctcgagactagttctctctctccctcgtgc

SEQ ID NO: 64029 - DNA, 411 bp, Oryza sativa
  unsure (1)..(411): unsure at all n locations
  Clone ID: PAT_MRT4530_65213C.1
tatgaaacttgagtgcaaaagctgagaaaactgttgattaagaaatatgaggacacaaacacaatgtgtgatgaatgatggaaatggaaacaggaaaaagtattgactgttgctcagctggagttggttggacaagaatgccccacttgtgtggatttgtgcaagcttggaccatggcaagccaaagatccaagagccccagaagaggcggagaagtgactaacacagttggaccaaaatgctggctcttgggcagatgtgcctcacccaagttaggttaggatcggcataatgcccatatgggtttcggtgtttttaattttgttcatanggaaccgccaatgtaccctccatgttgatatggtatcanccaagcacttacgtatgattcaaaaaaaaaaaaaaaaaaaa

SEQ ID NO: 64030 - DNA, 177 bp, Oryza sativa
  Clone ID: PAT_MRT4530_65214C.1
atgcggcccaagacgggttcgggtttaatacctcctgtctccctctacatggtcccgcgaccagggagggcaccgtcgtcctgcaacttcttcatggacgcggtggttgaggtggacttgtcaagatccatcgccgccggaggatcgccggagaacaagagggaagaagcaagctag

SEQ ID NO: 64031 - DNA, 207 bp, Oryza sativa
  Clone ID: PAT_MRT4530_65215C.1
atggcccaagaagcagctgccaaacgggacactcacatgtgggttcatttgcctccgcataattctgtcaagcccatttcgtataaatgcacgccatccacagtgttcctgacacctgccagctacagagcaactaccagtggcgactggcgctgcgccgtcctgtccagctcttcccctgccatcaccttggaccgcagtaaatag

SEQ ID NO: 64032 - DNA, 611 bp, Oryza sativa
  unsure (1)..(611): unsure at all n locations
  Clone ID: PAT_MRT4530_65216C.1
caagaagtactcgagcaaagaaggagagagcttggtgagctgcagagatggccccctccgtgatggcgtcgtcggccaccaccgtcgctcccttccaggggctcaagtccacngccggcatgcccgtcgcccgcngntccggcaactccagcttcggcaacntcagnaatggcggnaggatcagttgcatgcaggtntngccnattgagggnatnaagangttcnngaccnntntnntnnntttnactnntnatnnanngtancttnnttnngnannttttntaacttnttggnttntangtgnannncctttgntttngttnnntaannanttnnnntnnnnttnntntannnntngnnngnagnggntntgnntttntttnttnngtttnntanantatttgnttttnntnnttgnttttnttnggntntnnttngnnttgtngttnntntttnnntnttnntagtgntttnngnntntntatttntnntantnttatgagtnnttannnntntttttgtngtaatnantgtnnnggnnntntttntntngntttgntgtttttntttnantgtncnttnnnnttnnnttnnttttgattttangnntt

SEQ ID NO: 64033 - DNA, 1689 bp, Oryza sativa
  unsure (1)..(1689): unsure at all n locations
  Clone ID: PAT_MRT4530_65217C.1
atactgcaacttgacacatgtttttttttccttttggcatataagtatacaacatagaatatttgtacctcttagtctagtctcccaatatccgctgcataaatgttttatgcagagcaacaagggtaacaaactaaataacagaaggactcactccacaaatattaatgcggaaattgtcatcaacacaattcaggcatacaggtcctgtttatgaaaagaaaatgtgtaaccttgcttgtctcatcatgttacatacactcaaggctaaaatgcaaattgatctggacaagtagtcacaatggcatggtgccgatcagctgatgaactttgtggccaaagaggcagatgaatccatcgaacagcaggcagaggcacagataacttgagaagttcagagtaaaccccgtcttcttttgtagtcactgacggtcagagttagagcatgcctccttccatcattgtcagggaccttgtaacccatggttgcttcaatcttctgcttcctcgccatgtaaccatcgaagagacccttgggaccgccgaattcttccaggccggccaatgatataccgagctcaaaattatgcagcaaattcgattccgttcccagatctacaggtgcattggtatcaaccagcttaccggcatcagcagctgccactagagccgctgcagtggctgctgaaccacctcgcggcccgttcttcgtatcttcatcgccagctactgcgctgccatcgttcccgttggggacttcagcgctctctccttcaggctttgctgcgtagtaatttcttgatcttgtccatctccttgaaaagggatcataaccagcctctccaaccttcaaactcgtgttaacgggcttcatttctgatgcgttcttgaagttctcagcacggttcttcttgttcatcgcctccaacttggcagccttctcattatttgatattggcttcgacatcttctgcagctgattgagctttgaacggatcctttctgcttcagcttcatccctcctggcaatggccatatccaactcattcctcaaccgatccttctcagcagcaacattgataggacgtctgatagctgatttcttctcttttagcatcttctgtacagtatgtgctgaatacacaaagttgtaggcctgttgaatggcttctttcttctccaatacatcctgccgagtcggtactcgcacaccattcttctcagccacttgtagccacttcttgaactcctcttcactgggaaaggagtctgatacttgagtcatctgccaccgagcagcattagcctcattgtcccacacaacattgaggtacttgcacgtcgtgtagccctccaacttgtacttccggtcagggtcattcgcatccacgtttctaactatgcatagcctgtaatcaggggtccctgattttgacttgccaatcccaagccgcacaaagcacccagacacaaggtcctcaaagaacggctccatgaaccatttcacaagctttgatctcctgagggttatactcttcacatcgtcaaacttcagagggtcaagcctgcttggcgattcatcaaactcatcatcccgggtttcatcggtgatcctccccctgttatcaccatcattactaccgtcgctgggcgggcttnccggccctgcgccctncggcggagagccgc

SEQ ID NO: 64034 - DNA, 259 bp, Oryza sativa
  unsure (1)..(259): unsure at all n locations
  Clone ID: PAT_MRT4530_65218C.1
gaattcccgggtcgacccacgcgtccgtccgcatatgagagaaacatnaatgtctgtaatnaaaatgggatgataggatacacatatggtagaatttacaataatttaaatgtaagttgagtttgtgcaccngtgtaatatactataataatatagggtaattattctatgcatntcaatgtaaaatgtatggtgtggcttatattattacagtaattaattacttcctnttgttttttaaaaaaaaaaaaaaaaaaaa

SEQ ID NO: 64035 - DNA, 376 bp, Oryza sativa
  unsure (1)..(376): unsure at all n locations
  Clone ID: PAT_MRT4530_65219C.1
gctatcgctataacagcttaggctttagctcgcctcgcctccaagcaaaatccccatttccttctcctctccaaaccctagcaaaggctatctctctcttcgccgccatggaggatgacgacgcggggggcggaggcggaggcggcgaggcgtccccgccgcacgcgggctccgccgcggcgatggcgggggcggggagggacatcgcggcgtcgcgacgagctcgcggtcggtgacgcagacggtgaacggttcgcacaggttcgtaatccaggggtactcgctngcgaaggggatnggggttgggaagcacatcgcgaagcaaaacgttcacggttgggagggtaccaattgggcgattttantttttaacccc

SEQ ID NO: 64036 - DNA, 528 bp, Oryza sativa
  Clone ID: PAT_MRT4530_6521C.1
atggatgttgaggacgacgatgtggaggcggccgagagggaaaagcgaggcatgcctacatcattccaaggagccgtgcgtgtgcttccgattgttccgggaggagggaaggttcatgctgatggaggtggggatccccgggaaggagaagaagaagaggagaaggaggaggggaagaggataactttgggcgaccagagcagagcccctcgcgtcgtccccaacgttgaggtagaagttcttcctgaggagcttgaggcggtcagggagggcagtgagcaggacgtggactccaaaaagggtagcaacgcagccagcaaggccgcaacctactcccagctcgagcgcccgcgcgtctcggagagcaaggcgtaccgacttgacggcacgctcaaggaacttggcgaggacgacggcgctgtcctagacaacggcaccggtgacgccgggcgtggccatggaggacgggaaaccgttgcgtctgttaggccgatgagtacgtcggctgtaccggccttgtctttttag

SEQ ID NO: 64037 - DNA, 1675 bp, Oryza sativa
  Clone ID: PAT_MRT4530_65220C.1
cccacgttccttctcctctccaaaccctagcaaaggctatctctctcttcgccgccatggaggatgacgacgcggggggcggaggcggaggcggcgaggcgtccccgccgcacgcgggctccgccgcggcgatggcgggggcggggagggacatcgcggcgtcgccgacgagctcgcggtcggtgacgcagacggtgaacgggtcgcacaggttcgtgatccagggctactcgctggcgaaggggatggggtgtgcgggaagcacatcgcgagcgagacgttcacggtgggagggtaccagtgggcgatctacttctaccccgacgggaagaaccccgaggacaactccgcctacgtctccgtcttcatcgcgctcgcctccgagggcaccgacgtccgcgccctcttcgagctcaccctcctcgaccagagcggcaaggccaagcacaaggtgcactcccacttcgaccgctccctcgagtccggcccctacaccctcaagtatcgcggctccatgtggggttataaaaggttctttcggcggactgctcttgagacatcggattttcttaaagacgattgcttaaagataaattgtactgtgggtgttgtggtatctactatggattactcaaagccacattcgatacatgttccagaatctgacataggctaccattttgggacactgttggacaatcaggagggtgtggatgttatatgtaatgtggcaggagaaaagtttcatgcccatcagttggtcttggctgcccgatcttctgttttcagatctgaactttttgagcatgaatcagatgaagagaagaatgaagttgatactagcaatgaaatcaaagagattgtcattgatgacatggagccaaaagtgttcaaggctgtgcttcattttatgtacagggacaatcttgttggtgatgatgagttgtctgcatcaagctcggactgctctatctttgatactttagctgggaaattattggctgctgctgacagatatgagttgccaagactacggttattgtgtgaatcttacttgtgcaagcatatttctgtaaactctgtggcaactaccctagcattggctgaccgacatcatgctatggagcttaaatctgtttgcctaaaatttgctgctgaaaatctttcagctgtaatccggaccgacgggtttgattacctcaaagacaactgccccgcgctgcaatcggagatactgaggacggtcgccgggtgtgaggaggaatgcagcagcggagggaagagccagagcgtgtgggggcagctctcggatggcggcgataccagcgggcgcagggtgaggccaagggtctgaacacccagccactgctatgccaaaagcggcttgttttaaagtgtaactgtgtaagcgaattgctgctgtacaaatgggacggctaattggtttgtggcgacatttaaaataatagcatcagtctgttatactacccctacattcgttcaaatttcaatagctggtttgggcagtagctccgcagatggaagggattatgtttagtgatctgagacagtgatgtgtagtcagtagtcagctattctagtttcgatttgcaatttataaacttcagtttttagcctgctcgtgtcttggcccccccttaaaaaaaaaaaaaaa

SEQ ID NO: 64038 - DNA, 584 bp, Oryza sativa
  Clone ID: PAT_MRT4530_65221C.1
caaaagggacaagccctgcggccgctcagatacggatccccgactactatttctggattttttgtttttagggagaaaaaactgctcataaaacaaaagttacaattgcagggccttttaaagacgtgccttacattggattggacgacccttaaacaaaaaaacttgattcaaccaaaagccattccttgctaaagtaaaggtgccacaagaatactcgaatacatgatatgggcggcttaaataaagtccccaataaccttgaagtatgaagcccaatagacccacaacttcagtttcccatagggagtttaaaaaaaaaatgttcccttgcccttcttgccttcaccaatttacaaatgcttgcccctcttgatggggggcggggagaaatgcttgcacttttggcattgcagcttcagcacaatcttcttgggggggtttgccttctgggggaaaacaggcttggtctgaccaccatatgccgactgcttacgggcataacggggctttccctgggcaaacaggctggccttacccttcttgatctgagtgaccttgggaagggggagcttcctgcactc

SEQ ID NO: 64039 - DNA, 1899 bp, Oryza sativa
  Clone ID: PAT_MRT4530_65222C.1
tttttttttttttttctccaataattgcatcagattgcattgcacagtcaaacatgttgcaggatgcagctccagcaccacaaaaatgaagtgcagaggaatagatcacctcgccacgtggcgcggccctggctcggcttctttcttttctttcgttttcctgcctccggtccgctgcgttttttttttttttttttgagagaaacacctgcatcaatggcatcacaactatgttcaatggcaacaatcgctgcttggtacagtttaagcttatgtttccaaatagtttctgcccattgcaacaaatgagataggataaagcacaacccttaatcaaacctagggctgccagctagaaaaccctaaattccgacaacagaagcagcatcatttagttccttggaaacaatagcatctgattcatcgttttctctcggagcaaataattccaactaattttgagatatacacaaacaacgaggaagataacctttacaagaatggcggcatcctctgaggatgcatggaatgatatccactatctgggtggctctgcggcattcgctccccggtgggtcttcgagtaaagcctccatgtgtatggttctgcatgggattgaaggtgccccaccagtgagattcaccgtcagctgggatccagggaaatggggtaaagccctcctggccccacccatatggccgatcaacaggtctagaaacagcctcaccatccgaggaattgctcctgttcacaggaggagcaaagccatggtgtcctccaatctcagctgaggatgatgctgcgatgaaagatgtaattgttaaagccctaggcctaacccttctagatgtaggggggaatgggctgctctgcaatgagtgcattgactgttgatacatgtgtcccctcgcaccatgaccatggcctctagtctcagccataacagctggcacagaccctaatggtgtaaccatattgcttccgttgcgaggtgtgggcctgtgaactaggggacggtgatgtgcatatggccttgttctctgttggctgctgctgtcatatctcggcaatcctataccaaatggagctacagaatgatcaggaatgcctgacacaggaagattgctcatatagcggtggtcattgtcatgatttcttgactctgttgcatggaaaacttgtgtattgctcaaatcgtgggctgcatggccttccaagctagttggatgccgatgaaatgaactgttttcggcaccagaactagaactagaagggacatgcacaggatggagaaaaccacgcagtgcaaggtaagggcaaacaagagaactgctagcagcatttgaatgatctccaactgtatgataagaagtttgttcagcttcaccctcctcaaatacagatgctagctgggtgaatccactaaaggggcaccattgaaaaccaaatggaatatctgaggtgatgtcataggtttcaccagtcacccagccacctatatcaatatcaggagatggatggtgcccacttgcgtaaagccagcggcctttctcaatcttccgacaattagggcattgcatggccccttttgcattaaatgccgatccaatgcagtctaggtggaactcgtgcccgcattgcagcctggcgacggacctgcccccggccaccaccggatccaggcagatggagcacgacgcgcctcctcctcctcctcctcctcctccctcgggcggcggcggcggcggcgacctctccagatccatcaccgcctgcctctctctcgctcgctcgcgggagaggagaggagaggagaggagaggtgagctcgtggaagaggagagagagggcggaagctggggaggtgtgtccaaaggaaggaaggaagggagatgaag

SEQ ID NO: 64040 - DNA, 454 bp, Oryza sativa
  Clone ID: PAT_MRT4530_65223C.1
cggacgcgtgggtccggaagcaaacgccacacgcgccttttcggcatgctttcttctaggggtggcccgggccgcggccgcggcgggcctacctaatcttgccggccggggcctgaaccccggtttccgttgggtggctggggcgggggggggccgaccccgggccaggggccagggccgccggaaagggaagggaggggctaagcgggggggccttccagccttccagggagctaagggggaagctctccttcgtccccaaggccaaggaccagtctctcgctaggcaaaagtccgtcgccaagggcaaggccgccatcaccgagcaaataaagggggagtccatggcatggaacgcgaacaactccctttccgcctacttggatcgggacaccgtggctctaaagggattcgccaaatccttcaaagaatccagcgatgaggagagggatca

SEQ ID NO: 64041 - DNA, 534 bp, Oryza sativa
  Clone ID: PAT_MRT4530_65224C.1
atggcattgccatcctctgcacaagccgccgggtccaccctctcctggagctccccatggccaagacaagatctggccataggagaggaggggctccacgaagagtggtttgctcagctagctgggaagacgggacaccaccaccgccaaccgcttccccgcgcacaccaccaggccagagagaggcagctcctcccccatgcgcccttgacgcacgccgctgagctaggggtgacaactcctcccctcgccgccgcggtccccgctgctcgatcctcgggccaccgcctccacgtggccctcacgccgcggcagccgccgccacctccgcgcggcccttgcgccgcggccactgcctctgagcggccctctcaccgccgcctccgccaccgcgccgcgccactaccgacccgcgcggctcagcccagatccagccaagggggaccgaattcgaactcgacagcgtcggatctagccatcgtcaccagggccgcgctctcgtcctccggtctcgtcggcgccccaaccggttga

SEQ ID NO: 64042 - DNA, 3066 bp, Oryza sativa
  Clone ID: PAT_MRT4530_65225C.1
atggaggacagaacaggagcctggttctgtcctccgtctggttcatggcggcggcgtctccggcttgagggaatacgtctgacgtcggggtcgaatttacttgggtggaatgtaaggggcctcaataatgctgacaagagagcccttgtgcgggagtctgtgatgtcgagtggggtgtcggttgtatgtttccaagaatctaagcttgaggtggtggattcggcggtggtgtttgactcctgtggcttagattttgatggcttcgctgcgttgccggcggagcagactcgcgggggggtaattatagcatggaagggggcggctttccaggggaatgtagtgcatataggacagtggtcaatcacggtgcaacttcgttggatcctgggcgagcgttcctggttcctaacgtcagtctatggaccacaaggggatgcagacaagctgctgtttctggaggaattgtcgatggtgaggaacagttgtcagggagaatggatgatcactggtgattttaacctcattgcggctgcgatggacaagagcaatagcagaattaacagaaggttgatgaatgccttcaggaacaagctgaacgagctcgaattgagggacatgtatcttttcgggaggcgatacacatggagggaaagaaccagacgattcaggtttgaatcctactggacgaagttggatggtttcttagaagcggtcatggagagctggcagcaggaagttcagtctgatgacccttactcgattttgcatgtcaagttggcgcggctgtgcaagaaactcaccaagtgggggcaaagaagaatcagtaagttcaggcttcaaatccaaattgcgaacgaagtgattttgcgtctggatgtggcgcaggaatctcgcttgctatcggacttggagcgccgccttaggggctggctgcaaggggagatgtttggagttggcatcattggaaagaattcggctgagacaaagggctcggatatgcaagctttggcccgagaatacttcgagatggtgatgagctcaggggagagtgacaaaagggagattctttttcagcatactcagttgaggagaggagatatgattgagctagacaatcctttcactgaagatgaggtttgggcagctatccggagtatgccgaatgagaaatctcctgggccggatggttttacggggcttttctaccagacttgctgggacgtgatcaaaccagagctgatgcaagcacttgacaaattctgctcagggtttagtgcaacagtttcacaaacggaaggaggagatgattctcttgaagctcgacatttccaaggccttcgacacggtatcttggtgcttcctactgtccatgttgaaatttcggggttttgggccgagctggaggcggtggctttctatgatcttcgttacagagaagacgagcatcctgatcaacggagtagcatcgaaccccttcaaaccggctcgggggctgaggcaaggcgatccattatcgccgttgctatttgtactggtaatggattcccttcaagctttggtggatcaagcaagaaccatgcatcttctttccccctctcagcaagacagaatttaccttctatctcagtctatgctgacgatgccgtgttgttttttcggcctacggccagagaggctctagtgatcaaggcaatcttgggcctattcggtgatgcaacaggcctcaagaccaatttctccaagagtgcgaacacaccgatccactgctctgccgatcagctgagcttgattgaagagacgctctcatgtcgagtggagaacttcccgattacctatctcggtctaccccttggtaccaggaaacccacgaaggctgagctgcagcctatcctcgacaagcttgccaaaaaggtcgcggggtggaaaccgaagatgttatccattgatggaaggttgtgcttgatcaaatcggtacttatggcgctgccagtgcactttctgtctgtgctacaactcccacgatgggcaataaaagacattgagcgcaagtgccgaggtttcttatggaaaggacaagaagaagtcagtggaggtcactgcctggtctcttggagaaaaatttgcttgccaattaataaaggagggttgggggtgaaagacttggacctttttggccaggccttgcggcttagatggcgcgcgaggcagctggagcagaaggacaggccctgggcttcggccggtttccttccggggagtgacgtggatgctatcttcaattcggtggcaggctccttgtcgactgaagcccttggggagttctttcagctttgggatgaaatgcgggaggtaactctggacaacagtgctgactccattcgatggaagatggctgctgatggtctttattcagcctcttcagcatacaatcttttctttttagccaaggaggactgtccttttggtgaactgctgtggcaatctaggactccgtcgagagtccgtttcttcatgtggttggcactcaaaggtaaatgcttgacagcggataatctcgccaagcgaaactggcctcacgaggatctttgtcagttatgtcgacaaaacagcgaggacggccatcatttactggtggattgtgctttcacgacggaggtatggcggcgaatcagggggtggcttggtgtggatttccccctgccagcggagatggcgacgccactgtcagattggtggctgacggtcagatcacgctgtcggttgagctacaggagcgattttgattgcttgttcatgctgatttgttggattgtgtggaaggagaggaacgcaaggattttccaaaatgtgtccagaacagcacagcagcttgtgcaggacatcagggaggaaattgaagtttggaaagcagccgggatcttttccctcattagatttgaggcgagcaaccaaacaggcccaaacagatctgaaagatttcgacggggacgtgatattaagccattaagctcaaagcctcataacatcaagatggggaacaggttctcaagcatcaagtacacctga

SEQ ID NO: 64043 - DNA, 1469 bp, Oryza sativa
  Clone ID: PAT_MRT4530_65226C.1
tttttgtatttttaaaactattttcccgatcgaatacacatacaaccttattttgatcgttaagatggtgcatatgctctctctagctatatatctactcctcgtctccctcttacatgtcgctatatagccttagctactttttgcatgtgtgcgtgtgtggctaataacctaagctaagccgattcaattgatttctagccggcggccgggtgcggccgggtggtggtccagaacaaggcgagcgcgcggaggcggccgaagtagtcgtcgacggcgacgaagcagcgcgccgcctgcctcaccgtcagcatccgccgcagcgcgtgcagcgtccgcatcctctcctcatccgcctgtcgtaggaagatggcgaggttggcgagcttgtccatggcgagctgcaggttgctgtagctgccgtactgccccatgaagctcgccgcagccatggcggcggcggcggaggggtggtacatcaccggcggcgtctgctgcgacgacgacggcgcgtccgaggaggagacgacgtcggagagcgaccggagcagcgcctgcaggccgccgtcgagcgcgtcctcctcctgcctcgccgcctgctgcgcgctgtagacggcggcgagctgctgctccgtcaggggctccacatgccggaccacaaccttgataagctccgaggggcggaagccgcctatccagaggaagcattgctctacggcgcccttccacaggccggagaggaggtggagggggtcagcaccaaccagcctagccttgtgagccatcagcaccccatagtgtgacatggcttcatcgacatggggctgcagctcgccatccggtcggtgctcctccacagcggcccggagccggctgatcacttggtggtgtgcctcctgccaccgctcatactccaagttgaacaatgcagcgtctgggcttagaattccagcaccgcagaatgcaccctgagctcttgtgaattgtatctcctgttcaagatgcgccagcctgatcctgcctgtctctagctgctgaatgtaagccttcttccttagcctgctctttcttgcggcctctctattctgcgccagccttctcagcgttttggggtccggcgtcttgggccccttgagctctgaacttgctgacgctgccatggcgccgccgctgccactgccaccttctttctttggtgttggagttggctctccatccattggctgggaggggaagatgttgagagtctcttttacaaaattaagtggtttgtggggttcttcttgagtagatggcttatcttgttcctggccatcaaagtagaggaggagagcttgatccaaatcagatggcatgtcatatccttcagggttccttcttctgtggagtttcagccacattgtatcatcaaccgtgtgaagcactgaagctttcaggctgaccaacctttctgaacatttcagctgcat

SEQ ID NO: 64044 - DNA, 344 bp, Oryza sativa
  Clone ID: PAT_MRT4530_65227C.1
aaacaaacattaaatattatcagggccgagccagatgaaacattgctatctgacaaaggagggcactgatgattaaaatccccggcgtgcccgtgcgccaggtagctatcaacgcttagtgcccagacatcggggtctaaggacaaccgagactgcatcggacacatgactgtcaattgaggatcgtctaatatgaatacgcatgcagcatgctcacattacgcttcaagttcgctatgcagtatgaaatgaacacattggtcatggcacgtctaatatctgtggagcagagttttctgtcgatgcattcaaatatgcacatgaacgccgagcacctggaacat

SEQ ID NO: 64045 - DNA, 207 bp, Oryza sativa
  Clone ID: PAT_MRT4530_65228C.1
cccactcgttctctcgtttcatctttgctatcatcttcctcatcttcttgctatattagttgttgtattatgatatcggagacgaggtcgatggcgtacaacttcgtgtacacctacgtcgacacgagcaggttccagggccagtacaacagccacaacacgacgaacggcactgcgacgtgctccgcgaggtcgatgccccggacc

SEQ ID NO: 64046 - DNA, 299 bp, Oryza sativa
  Clone ID: PAT_MRT4530_65229C.1
ccgacgtctgcctgctcctcctgtccgccggtcatctgatggcctccgccgccgccgcgcgcccggacaccgacgacgacgcggcggcgctgctgcgcctcaaggaccgcatcgagctgcaagaggaggaggccctggccctcgccgaggagctagaccttctagacaacggagactgcgaccgcgatacagccatttggtctgaacaacacaaactgcaatacgagcattgacaacagcgggatcaagtgtatactcgaaggaagcaaaggatttcgcacccgcttctgtaggctgcg

SEQ ID NO: 64047 - DNA, 339 bp, Oryza sativa
  Clone ID: PAT_MRT4530_6522C.1
atggtacggaagcacaggagatcgatgcgcctcttgcgagtgcggctgtcacggaaagcggccataaacggccctcagaataaattaatcttgtataagacgttgcaggggctgcgaggaggccagttgatgagctcccgaaaaagccgcatccctccattcctgtcgatacaaaggaggcagccagcgaacatccatcaccgccttgatcgccgctgcctggaaggcatcagagcggtcggggatgcggatttaggaggtgccgaagaagaggagatcggtaacggtggggttgaaaccaagataacgagtgggtgcaagccgactataaggaactga

SEQ ID NO: 64048 - DNA, 406 bp, Oryza sativa
  Clone ID: PAT_MRT4530_65230C.1
gcgcctccccaagacgagtcgcggctgaacagaagagggggagtaggcggcgatctccatctggcgactcgcgagcagagcaggggaggggatcctggtggagagactgagctgagctatggacaacttgtggcatctcggggatgagttccgtgggcagtcgaaggtagtggaggaccgtcagtggtctctcatgacatcgaagttggctgagatcaacaagtccaaggcggagaggacgaatgagcttgactatgcgcggatgaacaccatccctgatgtcaagcaatgggataaggtatcctaccaccaagatgagagcaagatggaccacctcaatcttggccttatgaatctagatcttaagatgaacgacatcaggatgaatgacgcaactatgaagaat

SEQ ID NO: 64049 - DNA, 1675 bp, Oryza sativa
  Clone ID: PAT_MRT4530_65231C.1
tttttttttttttttttttttttttttttttttttttttttttgcttttttttttttttttttttttttgaagtgcaaagcagcattaaggcaaatgcaaggtttttaagatacaacacgaatacactctgaacatcaactgcccttatttagggcattatgatgcattacagtatccccccattttggggttcccttctgggtgtactctaccaaaatacataaatagcaaaacatacacattttcaagattacggacggcacaatacagacaggcacacgtattagaggccttcaagtaccaggtccttgcagggggcaaccaacagcttgcgcttaacgaacatgagaacatagtgaaccaccttccacaacatacaagagcgatatgtactaaagcctcaaagcaaccacctcttcaacagttcagacgccttctttctcacaaaggtctagcagtgataaggtctcagctatggagagctcaagacgaaactttggaccatcgtaatggtgcagcactggtctgaaagcatcctcttccaaaggcttgcagagctttctaatgcggatcctcacctgcgctgggaatctagattcacctttacacttcttatcttcccatgcagtgggatcaatattagatcctccaaaactagaagcctcaaataccccatgaagctgatgggtcgtgtagttatagaggaaaagaggtagaccaggaataattgctcggactgaatcacgatatcttgctggcaacccaaaaagctgcctcttgagatcctcctgcatggtgtcattgttgcaaacaaagatatatccaccgagcacttcattccttggtagcatctcacttgttggcaatgttttgaatcgtttgtcaacagcagagttgctgctgttgttcccgctgctgttacttccattgctgttggcaccactgtttttgccattgacatctttgccatttggactatgcaaatatttgttgaccccaacattcatcttgaacgagttaacattgccattgcctcccttggggtacagctgattcatgttgtaggccatgccgcggaaaggattcttcatagctgcgtcattcatcctgatgtcgttcatcttaagatctagattcataaggccaagattgaggtggtccatcttgctctcatcttggtggtaggataccttatcccattgcttgacatcagggatggtgttcatccgcgcatagtcaagctcattcgtcctctccgccttggacttgttgatctcagccaacttcgatgtcatgagagaccactgacggtcctccactaccttcgactgcccacggaactcatccccgagatgccacaagttgtccatagctcagctcagtctctccaccttcagcaagaaagaaattacccagggccggatccaacttgggaacaaacaaactcaaactggtacttgtattaaggttaaggcgctgaaattaagaggagagcttcttccagatcaggatcccctcccctgctctgctcgcgagtcgccagatggagatcgccgcctactccccctcttctgttcagccgcgactcgtcttggggaggcgcaaggagcggaggagacgacgagacggggggagatttctcttttatccgacgcgtgggtcctgcagcccggg

SEQ ID NO: 64050 - DNA, 408 bp, Oryza sativa
  Clone ID: PAT_MRT4530_65232C.1
atgaaggggtcgtcgtggaagaactccggccacgggaacgggctgctcgcgccgccgccgccgccgcagctggacgccgacgccgtcgcgctgcaccagtccaacgggttcgtcatcgtcgtcgtcgtcacgtcggagagatcggcgagcggcggcagagagccaccgtggcacgtgaacgcgtcggcgccgccggcgccgcagccgaggagcctcaggttggcctcgacgtcgtcgctcgtgatcaccggagcctcggaaaacgcgcacggtgtcgtctgggtctggccgccgccggaatggcctacggccgtcggcgtgatcgggacagagctgcctgcaggggacgacaagcaggtggctggggcggcgcctcttttggtccctcttcttcgtggtgtcctccgg

SEQ ID NO: 64051 - DNA, 389 bp, Oryza sativa
  unsure (1)..(389): unsure at all n locations
  Clone ID: PAT_MRT4530_65233C.1
gacggactcccctacctcctcctccgacgagaaatttcccatcggaggccgtcgtctccgtctccccgtttgctactccggcgccggcgaggccacctcggtcgtttccctccctcctccacccactcgccttcccggccgccgcggantctgcccccccccactctccctacgtctagctgcgctacttgttgtctcccccacctctcttcctctgccgccgcacagcttgccttcctcgtcgtctcgtctccttcagcgccggcgagaagccccccggccgccgagcttgccccgtctccggcggctaggcgctgcngctcctgaacangcgggttttctgcccttgccgctgacccaccacggcgggcttnctaaggcttattgga

SEQ ID NO: 64052 - DNA, 959 bp, Oryza sativa
  Clone ID: PAT_MRT4530_65234C.1
tggatcgatgttgttccaggttgtctaaaatatctgtaaggatccttgcatatcttgatgtagctgctcagtcagtagtaaagcttagaagcataactttaatactgatatacatacacccagccctacaggccaaagatacaagacttcaattactgagatacatacacaaaggcctagggcaaaaatatcggtcttgagtaccgccactcatgagccgaagcttaagaaaccaacttccacgaacaaaatccccctgcaaaaatcatgcagacaaaatctctcccatctacctcctctcaatttgcgaattttgatttccaaaatccccctaccacccccacttaatcagccactaaatctcccatctcatccattctctgtcatcacatctgtacgaacacaagcttcggcccctacctccaccccacaagactacatcccctttgccccatcagcaaagaacagccaggagcccatcccaacccctctccccatccccttagcccctatcagcaagatgcaaaagaagaagaagaggaaacattaggagaggggaagaggaaggaggggaggggcaagacgacctcgtactgttgcttccttgaggctgtaccgcttgtgactgccgttgcagctgccgcagagcacgtagcgctcgccaccgcaccggctgcaggcggcgagggcggttgcgccggcgccggctacaacgcgtcggagctcgccggactcgtggaggtggcggacctcctcggcgccgccgaggtggcggccgccgacgaacacctgagggagggtgacaccgcgcgcgcgggggaggagcgcgccgagctcctggaggtagcgggggtccatggcgaggaggggtcgacggctgtcaacggagaggagaggagacgccagccccggcggcccggggttcctcggtcaaagtgaaagtgaaaatcctcgtgccg

SEQ ID NO: 64053 - DNA, 249 bp, Oryza sativa
  Clone ID: PAT_MRT4530_65235C.1
atggcccgcggcgtcgtgcagctgcagcagctagtggtagtggtcggcggcgttgcactgaatgcgagaatgcttcttcctcgtcggttattcagcattcgcatattcagatattctgatattcccctggtcgaccacaaaaggtacttactcattactgttgtattgcgcgccagcgaattccgcaagggtaccaaactaccaatgactcccacaccaactaataaagtactgagaatgtacacctag

SEQ ID NO: 64054 - DNA, 446 bp, Oryza sativa
  unsure (1)..(446): unsure at all n locations
  Clone ID: PAT_MRT4530_65236C.1
aaagacaataattagcagatttattttctttgcttcactccaaagtatgactgaataccacaacatttgtacgccgtggtacttagatttgtagcaggagcaggggaccgaacccaccaccgtaccatctggtaggttcttagtacttcttaaccctctcccgtgtggcagttgcatgtacacggtaccaagtgtccgtcttagtgtaatcttgtttctgttttccatggcgaattggcgataatctggtctcagcccatcaaaccaacaaagcataacaagaaaacacccgtcgaccaaaccgtctncgacgtgtccacgtttgggccacagcaactgttcacctaagcgatgccgcctaattctaaagctttctctgtgatagtttccaattgttttcatccccggcaccggaagcgtccatgtatgtgtcacttcagcagttg

SEQ ID NO: 64055 - DNA, 265 bp, Oryza sativa
  Clone ID: PAT_MRT4530_65237C.1
actgccacgagtgatgagctgcctttgtcaggaggcttggctaccagattgttggaggatgaaatttcctgggggctccctccacagatgcttggtgtcccggttggatttgtgagatgaatgatgctgcgcccagcccgtgcttgctggaatgctgtgctgtaaagtgagtgggcccctcggtgagaaaatgtgtgtgccctgaggccagttgagacattgccatgagttaaggaggcatacatcataccaatataccgagatc

SEQ ID NO: 64056 - DNA, 400 bp, Oryza sativa
  Clone ID: PAT_MRT4530_65238C.1
ttttttttttttttttttttgctttttttttgctaaaatggttctttattggatatatgaactactacaatgtagagttcaaatatttggtatatacaatgaagagtttgcatgcagggttgcacaactcgcagaaaccaaagcactgagacctccttcctggcaatgccattgaaaaaaccaagcagaccaggggttgatgctacagaatcgatggcatgatcaaacccaaaacctagattacatgtagctaatcaaggagagcatcactctctgagttgtgaaaatgttcaggacaccaagagctggataaaggaacagggagaggaagaagattcagccactgcatcaggaaaggatcgcgtcccagtcgatctccagcgacgggtacttgtgcagc

SEQ ID NO: 64057 - DNA, 449 bp, Oryza sativa
  Clone ID: PAT_MRT4530_65239C.1
ggggggggggttttattgattatgatatacctttttactatttaaaccatactaattcactatttattaattttatttataatattacgggggggggacattacacaaattaatacctttttacaaacataaaaacccaaacaaccacctttttaattaatccataacaaaatggtttaattcatcaataataaaaaaacacacaaactacactcatatgggtggctaatattccggactaattaataaaagtgaatcccccggtgtaatatttcaaatatttcgaaacttcaattaccacacttttttgggggtcattatctggtgaaaaaaaaactggaggaccccttcttccttaataatgggacttctttaaaatttatttttctagttttaaatattaacaaaaaaaaatttgttcctttttttaaaaaaatttgtttttttta

SEQ ID NO: 64058 - DNA, 619 bp, Oryza sativa
  Clone ID: PAT_MRT4530_6523C.1
cgtcatgattcatgaggtgcaggaataactcagaggtttttctatacataaatcttagtcgttactctttgcccctattgttgcttgtagaattttgcaaggttctgttttagcaccaatgttttttaattaatactgtcaaacaactcccaaatatgtcatgtagaaaatcttctctcaatcaagttttatttgtagaagaacttgcattagtggtgtcgcatttggtagcccgtgtcgatccggaagtttcacagggatcgtcgacgttccatatttcgagaatctgctagctgggccgatgggcaatccctggtctcggtccgtgctgccggagtgtgccttttcctcctatcttgttcctgggcctgtttctgtagctggatttcctgtcccttattgtccgcgccgtctgcctggacccccttgtgttcctggctcatcctcgctttcttttttgtgctccgcggggctttcctctcttgtttacaccctgcagctaatttttgtgtctattcttatcatgtgaaagaattagatttttttcttaaactagagaggttagcctctcccatttctgttaaatatgcgcttatttcctgcagcccgggggatccac

SEQ ID NO: 64059 - DNA, 1020 bp, Oryza sativa
  Clone ID: PAT_MRT4530_65240C.1
ccgccggcccgggcgggcagccggcggcggagagagagagagatagagagagagagagagagagaatcgccatggcgtcgcgactcgtggcccggtcgaggagaggcctagcgctcgccctctcccgcgccggcgccggcgccccgtcgcggccctcccctcctggcctcggcaagactctggggtatgagccaacatcacatctccatggtgctcagtttttaccttgttggttttcaactattgcatctaatggatctcacatgcaaaaggcacaggagacatgtaagccagttgctggaatggaacactctgatgcactgaaagtaatggaaggaacctctcctaaagttgtggcattcagcccactagaagcagctatcactaaacctagaagcagtcccttgacaattgaaagttctaaagtaaagcgatcagagattgcaacgctagtcacattttacatgatcccttctctgcttgtttcctcaaaaaatgggcttgctacctctattttggttggcgcagtattccatcaaatatacatgtttcacaaggagatatttctggactatgtgcaccatgatatcaccaggaagtgggctttgatatacttcaagctgcttttgttgatcatggcgaaggaaaccattgtgtatttcaactttatctgagttttatctcttgcagagggacaatctatgtactcatccatacaccagaaaaaatgacggtggtggataaaattctggcgccttgttctcttcatggacattttcaacatttttccttctcaacttcatttgtatatgcacttgaaaaaggatgattagtgatcaatgaagcaattagttcgacttcattcttgtttataataatagcaactgatatgaactgtttggtatttgctagcccgatgcagccatatggattttgttttccatgtatgaattatcatcttatgtgcatatatttctccttttggaggcttgagctgcccaaaaaaaaaaaaaaaaaaaa

SEQ ID NO: 64060 - DNA, 200 bp, Oryza sativa
  unsure (1)..(200): unsure at all n locations
  Clone ID: PAT_MRT4530_65241C.1
ccgccgccgccggaaaaccatgggtatcgacctcgtgtcngcggtcggaacaagaagaccaagcgcacggngtccaggtccgaggatgtctacctcaagctcatcgtcaagctctaccgtttnctngtgcggnggnccaagagccacttnaacgtcgtgattnctnaagcnggttttttnatggngcaagntcaaccgtt

SEQ ID NO: 64061 - DNA, 569 bp, Oryza sativa
  Clone ID: PAT_MRT4530_65242C.1
aagcgaacaaaactttcaaacccttttttttccccctggtttctatttcatttcattcccaaagatagccacaagcgggtcaaaccccctaaccaaagggaacccaatttatgggaaccccccgggcgaaaaacccccaaccccggagggggggaaaaagggcttctccacccgaaaaagcccctggaccccaaaaccacccgacccgaagaaaaaaagattctgacccggatagctaagggtaactggccccgaggggcccccccaaacaattcccccagttccccccggagtcccccccgtaaccccccccccgggtgccaccgtaacccccccccccccccccacgggcgccgccgtaacccccgcccccaccgtagccccccccacggggcccgtagccgccgccgccaccttcttcggaggcggcggctccacgaccggcggggtaagcgccacccccgccgccggagcccccccctccccccccggagcggggggactgggccccattgacggggatgttggggccctaaagccccttgccggttatgcccccgatggggttc

SEQ ID NO: 64062 - DNA, 1301 bp, Oryza sativa
  unsure (1)..(1301): unsure at all n locations
  Clone ID: PAT_MRT4530_65243C.1
atggctctcatcgccggctcctacgagcgcttcatctggggcttctccctcaaaaccctaacctcctcctccgcctccgcgtcgtcgtcggaaaccctagccctcgcgccgctcttctcctacccggcccacgcggggcccatccgctgcgccgccgcggcggcgcgcgcggggctcgcggcgtcgggcggctccgacgacaccgtccgcctctacgacctccccgccgccgccgacctcggcccgctcctcgaccccgccgcgccggtctccgccctcgccatccactccctcggccccgtcccgcgcaacctcctcgccgcctccgacgacggcctcctccacctctacgacgccggcgaggggttcccgctcctcgcctcgctccgcgtcttcccgcgccaccgcgagcccgccgacgccctcgccgtgcaccccacggggcgtgtcgcgctcgccgtcggccgctcggggggcctcgccatgctcaacctcctccgcggccgccgcagcttctcctgccgcctcgagcacccggccacggcgatcgcctacgccgaggatggcgccggtggggaccgcttcgtgatggccgccgaggagaaggtgaccgtgcacgactccgaggatgctaggatcatccatgagatcgactgcggcaaaagggtgctcgcctttgcgcctgcaaagaagggaatactttacactggaggagaggaacgcggtattactgcttgggatctttccagtggcaaggttacatcacgcattgaggatgctcattcaactcgtgtgaaagggattgttgtcttcgacgacaagaacgatggatctgaactgtgcaacctaattgcttcggcctcatcagatggtataataaggatctgggatgctcggatgattgcaaaagagaagactactccattagcagaggctaacacaaaagcaaggctgacttgtcttgcgggatcatcattgaattgagctaaggaaagcagaaatgaagcggacgtggagctaaattgttgaattgaggccgtggtaccaattttgtactctttagtttttagtctagtctctataacatatttgtgttggagaaacaaaccgaggagctcgatgtatgggacatgtatgatagccataagttatgcatcaccatagtctggcttgagggcctaaactgcttaatgtttatgcaagcgcatggttctattgtaaaaaaaaaaaaaaaaaaaaaaaaaaaaaaaaaaaaaaaaaaaaaaaaaaaaaaaaaaaaaaaaaaaaaaaaaaaanaaaaa

SEQ ID NO: 64063 - DNA, 777 bp, Oryza sativa
  Clone ID: PAT_MRT4530_65244C.1
atggagggagaggatgaagagaggcagcattctgcggggattcgcggctgcgcaggtgtggcagcagcgggcgggcttgagcgagacgagggaaagcggggaggtggggggggggcaccgtcggatgggaagatcgagaagctgagcgcggaggagcgagtcgccgcagtccttcaccacctggtcggcgccgtcgatggacaggtggacattcactgcttcccgatggggtacctaccaacccgtctcgagctatcatttggagctccctgctttattagatggccagcatgctcatgttgggttcccccctggacaacagctgcaatagttatcaatgctgcagaagttatatccagcgcattcccaaattggtgcattactcgtaaggatgctgctgaatccaaagaaaggagcgaagcattgtctgctgcagctaagaagtttaagctcccttcctctgaaaatcttggagagattgctgaacattgcaacgaaagaaagtgcgccggccattgtgcagaagaagctggtcagaagctctacatgtggacacttataaagaggaaagagctccttgttgccgatgctatagttctggggctcagaacaaagttcatgtacgtttatgtgcccaaactaacgatggaacggaggatacattatgatgaagttgagagcctatctattgagtgcttggaagccactggaatgttggtgcttgaagcatgcaggaacaggcctcctcaaaggaggggaaatcaagtgaactggtga

SEQ ID NO: 64064 - DNA, 833 bp, Oryza sativa
  Clone ID: PAT_MRT4530_65245C.1
ccggccgggatcaatcacccagctttactcctcttctccccccgccccgcttcaccaatcaatccaaaccctagagcaaatcccctccctcccttgccggaatcgctcgcaagctccaggcagcccccacaccagtccgcggcggatcagggggcggggcgatctctagcgccctccgggatttgaagggttccgagcgtcggcgatgtcgtcgtgggccgggcccgacgagatcttcctctccacgtccctggccggcttcttggacaagaaacttattgtcctactacgagatggacggaagctgcttggcacactctgctcatttgatcagtttgcaaatgttgttcttcagggtgcttgtgaacgagtaattgtaggtgaactatattgtgatgttcctcttggtctatatgtgatccggggagagaatgtcgtattaatcggagaattggatcgtgagaaggatgaactccctgctcacatgacttgtgtttcagaggctgaaataagaaaggccgagaaagcagaaagggaagcgagagatctgaaaggttcaatgaggaagaggatggagttcttagactttgattagaatggatttgaccatcttgatagttgctgctcccactatggccgcgagtttttaatggcagcctctgctacatatgtgggctaatgaaagccagatttcgttgtatctcatgctgcttgttcagccagaattcttcaggttggagatttcagtaaacatactcttttacagcggtaatgtacctgtgttcttaaaatttcttcaaaaaaaaaaaaaaaaaaaaaaaaaaaaaaaaaaa

SEQ ID NO: 64065 - DNA, 510 bp, Oryza sativa
  Clone ID: PAT_MRT4530_65246C.1
atgtcgtcgtgggccgggcccgacgagatcttcctctccacgtccctggccggcttcttggacagtgaggctctttctctagcgggggctttggtttgttttgggtttgattttcgtttcccggatgatatgctggatgcggttcgtggattgcgtggttctttggatccggttgtggggagaaacttattgtcctactacgagatggacggaagctgcttggcacactctgctcatttgatcagtttgggtgcttgtgaacgagtaattgtaggtgaactatattgtgatgttcctcttggtctatatgtgatccggggagagaatgtcgtattaatcggagaattggtctggttttggattgagcaggatcgtgagaaggatgaactccctgctcacatgacttgtgtttcagaggctgaaataagaaaggccgagaaagcagaaagggaagcgagagatctgaaaggttcaatgaggaagaggatggagttcttagactttgattag

SEQ ID NO: 64066 - DNA, 1152 bp, Oryza sativa
  Clone ID: PAT_MRT4530_65247C.1
atgccagaaaagcctggcaaccacctcgccttcgccgcaagctgttggaacattgtcgtcaccatcaacccaaagctctctaccgcaagaagttcactgctggtctcctcccttcaccacccatgttggcgacaagggtttattgcttcgtgcacaaggttcctgtctgcggcgaatgcatctgcttcccggagcatcagttatgcgtgtttcagctgccttgtcaggttaaaaattatgctgaatgggttgttaatcctgattatgactggccacaacactgttcatcttgcaattctgttctggaagctggaagcgaagaaactacacgattgggttgcttgcatatggcctccttcaactattaaagatactggctcgcgccttcactctaaactaaaggaagcaatagcccagatctcaattaatgtcaagactggattggagaagaacgtatttggaaatcattttgtgacaatgcctaaagctgatactcgcacccctcctgcttttgcttcagatcctcttaaacgtgtatccatttctggtgatagagaatcaaatggtgcaaacataatcaattctgctatagatgcaaatgtgcaatctggtggaatgtattcttctgctactgtgggatctgggacacctagtcacgttgaaccagaaatagttgaaatagatggtccaagtccaataacaactcagttccctgaacaggagtccaacttcatcagaagtcctagcccacatgggccgagtgccatgacaagaaaaggtgctaactatgttgagagacaaaattcagagatttcttattatgctgatgatgaggacgcaaaccgcaagaagtataccaaaaggggtacattccgtcacaaatttctaaggatgctgctacctttctggtccagtgcattgccaacactgccagttacagcacctcctagaaaagagagtgatgctccagagggccgttcacgacatcaaaaatcatcaagaatggatcctacaaagatcttacttgcattggcgatcatagaagcttctgtggcatttgatatgatgatggctttcgagagagatgctaccattgccagtgttcctttttccgtagaatgctgcgccttttgtgtttactataaggggtag

SEQ ID NO: 64067 - DNA, 285 bp, Oryza sativa
  Clone ID: PAT_MRT4530_65248C.1
ggcggcgcgcgaggtgtaggacataaataccggcacgagacggggttagcgtcgcgagaccgagacgacgattgctactaccgtgcgcgcgaggaaagcggagttggggcggtcgatcgatcgatcgatccgcgggcgatgcgatgcgacgcggcgacgcccgcgggcggcagatgggagagggcacggggcatcgtcgccgccgtacgacgtgtttacggcgacacacgatcgcggggcaggcagcaggtggcgtctctacacgaggtgcccgtagcactgtag

SEQ ID NO: 64068 - DNA, 290 bp, Oryza sativa
  Clone ID: PAT_MRT4530_65249C.1
cagggccggtgtcctgctgctgggggctcagtcctgcctagaccacggtagaccgagtacacagagatggtccacgggtcgactgaagcggatcccgtgtgtcaacccgaggcaagtggtcgacaaacggactccactagacaccacacgggctgcacacgttggaaccacgatgctaccgagccggcacacttacacggtcaccacacgcacaagcgaacgactaccgacaccagtacacgggtactggggtcgacaaccgcacaacgggcacgggcgataccaaaagg

SEQ ID NO: 64069 - DNA, 105 bp, Oryza sativa
  Clone ID: PAT_MRT4530_6524C.1
atgaatgacagaaacttcttaatcggggatatgagcctgacaggttacaaagatgtcagtccaagcagagctccttcaaaagaggcaattgatccttcagcctga

SEQ ID NO: 64070 - DNA, 216 bp, Oryza sativa
  Clone ID: PAT_MRT4530_65250C.1
atggtaaggattagcaagctgcctgatgttaaaattgttgtgttcgacagccgcaacacggctccgccgcagtacggcggccatctcgcgttggcggcgtcggtggtggtggtggttgtgattgtgtggaggggccagctgcggaaggcgcggcgagccgccgccaccatcctaccggccaacaacgatcgcgccgtcatccgagatcagatctag

SEQ ID NO: 64071 - DNA, 688 bp, Oryza sativa
  Clone ID: PAT_MRT4530_65251C.1
ccggccgagcccctttctcgtttcgttggaagaagaagaagaagaagaagaaggtggtttcgctggaagaagaagaaggtgaaaccctagatctgatctcggatgacggcgcgatcgttgttggccggtaggatggtggcggcggctcgccgcgccttccgcagctggcccctccacacaatcacaaccaccaccaccaccgacgccgccactgccatcgccaccaaggaacagcacaaggtggtcagtcgtcttgatgtgatggaggatataagctttccctacatgacacgcgagatggccgccgtactgcggcggagccgtgttgcggctgtcgaacacaacaattttaacatcaggcagcttgctaatccttaccatgggccggctgatggagatatcctgtatgacagggcatggattaacaatcttgctctgctttttactctctccacgttatttggggcgtttagtactctagccaagctaaagcagacacggacagtggaccaatgtgtccagacccaaactagttaaagcaaccactgaggttgtatggattccagtcccaaacttgttaaatcaaccgctgacgttgtattggatatcatactctgtatgtcgtaatacttaatttcatatgctattaacataacttgagaattaaaaaaaaaaaaaaaaagcggcc

SEQ ID NO: 64072 - DNA, 767 bp, Oryza sativa
  Clone ID: PAT_MRT4530_65252C.1
aaacaaggtgattcccatttttggtcagggctcatgaaagtcaaaagtactttttagatctgggttcttggatcgtgaatgatagggaacaaataagattttgggaagataaatggctaggtaacttggctttcaaggataaatatccatctttatatgctatagtttgaaggaaatcatcctctattgtcattgttataggatctgttccacttaatttttcttttagaaaaggtttagttggtcagaatcttgtatactggtatgaattgtgtgcttctatggtacatattcaattgaatctttcttctgactattttagatggaacttccattagaatggtaggctctcagtaaggtcaatgtatctagctttaattaacaatggttatgttgagaggaacaagtatatttggaaacttaagatgccgcttaagattaagatctttatgtggtacttgcttatgggggttatgttaaccaaggataatttgacgagacggaattgtaatggtagcttaaggtgttgcttttgtatgaaaaatgagtctattcaacatctcttcataaggtgtgaggatgatggggaattccttatggttgcatgtcgcaagttggagtcgacggttatgcaactatttgctaattatggatggagattcacaaacagacttcaataaatgcgttctccttattctgtttttgtttggtgtgttctatttatcggaactacactcttttctggaacaccgcccgaactcattttt

SEQ ID NO: 64073 - DNA, 255 bp, Oryza sativa
  Clone ID: PAT_MRT4530_65253C.1
cccacatgaggaaccctattattacaaacatacccactgaacgcacaaaaccgggttctaaaagagcccacaaatttactgcaacaccaaatgataccacacaccctaagttgacctcctaggactcagcctttaaaagaacacattccacaacaacgttaagaatggcctgatctggagtaacaagaacttttatgatgagacattttacaacaccagcctgaccgacgatcttctgtactcgctcagaaagct

SEQ ID NO: 64074 - DNA, 170 bp, Oryza sativa
  Clone ID: PAT_MRT4530_65254C.1
gtgtgcgggggcagattatttgagacgagtatgcaccgtccatcacctttcctctcccattcctccacccactatgtatcaccccgaacaaagatgtcctacccccccgagccacggaagttaccccgcccccgctcctcataggacacgaccctgatccccccccatga

SEQ ID NO: 64075 - DNA, 1407 bp, Oryza sativa
  Clone ID: PAT_MRT4530_65255C.1
tctattttttttcaataatcttggttaaacttaaaacagtttgactttgtccaaagtcaaaaatattttataatctgaaacagaggaagtataaaacagataaagtaccacttattattaacaagttgacatcgacctcatgcaggcacatgcatgcatacctacggccagttggttaatttcttccattgtactgtatatatgaaaaacccacgcgtccgcccacatctcctgttcgcctgttcgtcctcctctcttcctccacttcatctcggtggaccttttttttttgctgcgagaaacgtagatccagcttgtttcgatgtcgaaatgcacagcaaatattgggcatgaaacctacaggatcttcatcgtcgataacggaggcaagaactacctcgccgtggacacgtccggcaacgtcgtccttgtggaagatccggagagaacgcaaccctccagcaactcctatggccgacagctgatatggtacaaggtcgtcgacgaggccaccggcggcggcggcagcacaactaaccagaacttcgtcctgaaaaacaacagcaagcccctcgtcgtcaagagtagtcgtggcgacgggcggcagcggctggatgttgttcttggccagggaagagatgttggagaacgctggacgttggaggagatacacaagggcgtatgctacatcaagagtgggagctactccaaccacatcttcactggcgtctcgaccaagaggaccgtccacctgcaggagaagcgcttggccaatgccctctccctctggacgttcgtcccggccgaggacgccgatccaaggcatacccccgatgggggtgcatcgctaactctatcaagaacagctccccacggtgttccacaagtattagagccgtctggcaagatgcatacttttacaggagatgctggcacatcattaggtagtgcacaatctaatcagagaaagcctgttaaaggtggtcgtgacggcgggcgcagaagaaacccataagtaaccatgaatggacggcttctctgtgttgcgtacaagcattgtgggctccagtcaaagtacaagacatatatacggtggatatatatatatactcctactcctactcctacataggagtccttctgaatctatttgtgatggattgtgtgactgtaatcatattgtaaacggtttgtcgcgcaacttcttatatgtgtatgctatatatatgaggtgtgtaagacgattattattattattaatgttgttgttgttgttgttatatacatttccacccagtcgacacaatccatcacaaatagattcagaaggactcctatgtaggagtaggagtaggagtatatatatatatccaccggtatatatgtcttgatacgtatgggacctgg

SEQ ID NO: 64076 - DNA, 321 bp, Oryza sativa
  Clone ID: PAT_MRT4530_65256C.1
atggccaaggcggccatagcggtgacggctccgcagcagctaagacggccaaggcgcgcgggcggcgacgacgctgcggcggtgaggcagtgggcagccgatccggctgctaagttcaaggcttctagtggccgacttccgagcataatccctctgcctcctgaagctgtcaccgccgcctgcttcctcgacatccctgccaaatcggagcccggttgcctcctcactaaagcgctgagcttccaccgtccgccgaagccgtgcactcccgcttggagctcacaactgcaagtcaaagtcacctccgcaaaatcaggttag

SEQ ID NO: 64077 - DNA, 306 bp, Oryza sativa
  Clone ID: PAT_MRT4530_65257C.1
atgagcctagagcacactagtagagaaatgatttttctggacaccggccccgcggtgacggcggacggtcgtggtggaggccgagagcggcggtggcgcgacgacggcgaccacgagcagcggcagtgcggcaacggtgacaacgacaggagcagcggcagcgcaacgacggtggccatgagcggcggtggggagcggcggctgcacgacgacgggagcggtagcggtgcaatgacggcgacgacgaggacgatggcgaccatgagcggcggctgcgcgaccacgacgacgacgggatttttttga

SEQ ID NO: 64078 - DNA, 479 bp, Oryza sativa
  Clone ID: PAT_MRT4530_65258C.1
atggagagaggtgtggctggcgaatgccccgattgccgcgcgcgggggatcggctcccgcgcgggttactttcagcccgcgaaagggttaggcggcccagaggaacagcagcgcacgcggcgggggatgggatggaagacttggcctggtcgcggtggcgacgcggtcaaaaacggggccccgcgcgtggcctcagttcccgagttgggtcgggcgagtcacatcgcgtcgcatcaaaagacggtgcgcttctcgggcggcgcgagcgacaccaccacggcaccacgcgtcgacgtccctctggccgcgcgccccgcgcagccgcgtgggttggcgggcgggcgaccacccgctgcgctcccgccactggcttgtggggtcgaggtcgacccagccagccacaggatggacgagtcctgggcaggaggcagcgccgcagcgagcggctgattgctgcgagctgtgtgacctgtcagtag

SEQ ID NO: 64079 - DNA, 843 bp, Oryza sativa
  unsure (1)..(843): unsure at all n locations
  Clone ID: PAT_MRT4530_65259C.1
atggccttggtgccgatgttcttatctgagccggatcacaccagctcacagcctatttcatctcctttgttcttcttcctctgtgactgtgagccgaggaagaggaggacatggaggagacgtgctggttgcaacctgcaagaggccaagaagcggccgaggcaggcagcaatgagcgggaggtcgaggccgtggccaggggacccgtcgccggcgcctccgcagccgccggtcgtcgccgcagcggcggacgcgggcggcgaggcgtcgacgtcgctcagggccttcggcacgtcgatggacgccatctcgttcgggttcgcggccaccgccatcctcgtctccatgttcctcctcatggccatcttcgagcacctcatcaagccccacgtcttcccgcccctcgccagcgcggcgctccgccccgcgcgccgccgccacggcgtctctcccgccggcaagctccggagccctcccatggtggagacggtgctgcaggcggcggacctgtcggtgttgatgccggggcaacggtacccgacgtacctggcgcagccggcgccgcttccgccggcgccgtgcccgagggaaggggtgcactggccgccgcacgaccacgacgtccaccactcctacatgccgccatgatcgagatctcgcgtacaatgttgcagtggaacaacatgttagagacacacgctgtcaaaccaaccaaccgaccgatcgatcgatggatggatcgaatcctgttgctgattgaattgctgtatagcggagacgctgtaaataataaacgcaggggagagtgacaagagttgttggatatnaaaaaaaaaaaaaaaa

SEQ ID NO: 64080 - DNA, 276 bp, Oryza sativa
  Clone ID: PAT_MRT4530_6525C.1
atggctaatcgaatccaggtggccctgcatctccatcatcagcttctccatcccctggcgctgccccacgtggctggcaacgaggtccttgaatttctacaagtcctcctgagcctccgtgggcatgttctccagctgtgcaacactcccatccgaggacgaaacgattttctcagttcgtttgatctcggcgagcatgtcgcatgtgctggcttcgagcaggcgacgcgcctcccctactatattagcgccggggcgggacgtggcggtgtataa

SEQ ID NO: 64081 - DNA, 1468 bp, Oryza sativa
  Clone ID: PAT_MRT4530_65260C.1
atggagaggattggggtcaccaagcttcatcatcatcttcttcttcttgttcttcttctcgtcgtcgccgccgccggcggcggcagcgtacaggcggcggaggaggatgagatgagcggccggaggaggagaagcaggcggcggcgtgcggcggacgtgatggtgcccatcaccatcctcaactccgccgtcgacaagggagccgtgtgcatggacgggacgccgccggcgtaccacctggacccgggctccggcggcggcaaccggagctgggtggtcaacctggagggcggcgggtggtgcaacaacgcccgcacgtgccgcttccgcaccgccagccgccacggctcctccgaccacatggagcgccgcatcgccttcaccggcatcatgagctccgccgccgccgacaaccccgatttccacagctggaaccgcgtcaagatccgctactgcgacagcgggtccttcgccggcgacgccttcaacgagggattgaagctgcaattccgggggcagcgcatctggggggcggtgatccagcacctgctcgacgtcggcatggcctccgccgagcatgtgctgctcaccggctgctccgccggcggcctcgccgcgatcctccactgcgaccagctccgcgccctcctccccgccgccgccaccgtcaagtgcctctccgacggcggcctcttcctcgacgccgtggacgtcgccggcggcaggagcctgaggtcatactacggcgacgtcgtcggcctgcaggcggtggcgcccaaccttcccgagacctgcaccgaccatctcgacgccacctcgtgcttcttccctcagaacataatcgacggcataaagacacccatcttcctgctgaatgcggcgtacgacgtctggcagatcgagcagagcctggcccctaacgcagctgacaccagcggcacctggcgagtctgcaagttcaaccgcgcagcctgcaacgcgtctcagctgcagttcctgcaaggtttcagagatcagatggtggcagcggtgagagtcttctccgagtcgaggagcaacgggctgttcatcaactcgtgcttcgctcactgccagtccgagctgacggccacctggaatggtggctctcctgctctccagaacaagggaattgcaaagtctgttggtgactggtactttggtcgagctgaggtgaaggccatcgattgcccctacccctgtgacaaaacatgccacaacatcatatgatagctatatacatgtagaactatcgagttcagagccaaaacatacaaacagagaacctcacacaacagatacaaaggaagcaaaacaaagttaacaaagcaaataggaagggggagaggggccagggcacattaatatcgggaagcagtgtggtggagtcatgggtgtataatttcacctattaagaataaattacagtattcacaaaaaaaaaaaaaaa

SEQ ID NO: 64082 - DNA, 502 bp, Oryza sativa
  unsure (1)..(502): unsure at all n locations
  Clone ID: PAT_MRT4530_65261C.1
aaacttacaatcagcatatggagcatctagccggctttgcaaaacaatgtgatcttgctggctgtttctgccagtatttacagcccacctgtggtcaccagcaggcacacccaacattgccagcattttgccaacatcatggcacatcactggtcaccagtcatgtctggcccaggcagcatgttacaaccatcggttctgcacacatcatcaaccagtttgcatgcaaaacacaggttccctcagtcaggcagcagcaggctggggcagtttccctttccccatcataacacaagcaacacacaacacacacnggcacaccaccattcagttccatgggctcccacacaccacacacacgtagcaaggcctatctgcaccagtccactattctagcaaagtcaccaaacacattggcctctccccatccaaatcgcccccataagcaggggcgcacacaccaaagtccaacaatcatcatcatcatcatcatcatcatcat

SEQ ID NO: 64083 - DNA, 1559 bp, Oryza sativa
  Clone ID: PAT_MRT4530_65262C.1
ccggccgggataaccgccctttttcatttcatatctatccccagtgccccatttcagatttggcgagaccagccatggcgatggcgatgacgaacacagcattggctttcttcctcctcgtcgccgccgcatccctcctctcgctgccgccgccgtcgctcgccgtcacgtcgccgtacgtgcgccccaagccgagggccacgctgtctctgctcaaggacgacgacgacggccggaagccggagcaggtgcacatatcagcagtaggctctgacaagatgagagtgacatggatcaccggcggcgacgcgccggccaccgtggagtacggcacgacctccggccagtacccgttctcggcgaccggaagcaccaacacctactcctacgtcctctaccactccggcaacatccacgacgtcgtcatcggcccactgcaacccagcaccacctacttctaccgctgcagcaacgacacctcccgcgagctctccttccgtacgccgccggcgagcctccccttcaagttcgtcgtcgccggtgatcttgggcagacgggatggacggagtcgacgctcgggcacatcggcggcgacgactacgacatgctgctgctccccggcgacctgtcgtacgccgacctgtaccagccgagctgggacacgtacggccgcctcgtcaccgggctggcgacgggcgcgtggacgcggggtgacgccgagaggtacttccactgctcgtcgcccccgcatgcggtggtgcgcgtgctcggcgtctgcggcgcggtggcgctcttcgtcttcggcaagtccctcgccgccggggtccaacctctcatactccttacgacgtcgccggcggcgccgtgcacgtcatcatgctgggctcctacgccgactacgccgccggctcggcgcagcaccggtggctgcgccgcgacctcgccgccgtcgaccgcgccagggcggcgttcgtggtggcgctggtgcacgcgccgtggtacaacagcaacgaagcgcaccggggcgagggcgacgccatgcgcgccgccatggaggagctcctccgcggcgcgcgcgtggacgcggtgttcgccgggcacgtccacgcgtacgagaggttcgcgcgggtgtacggcgggaaggaggacccgtgcggcgcggtgcacgtgacgatcggcgacggagggaaccgggaggggctcgccgggagctacgtcgacccgcagccggcggcgtcggcgttccgggaggcgagcttcgggcacgggaggctggaggtggtgaacgcgacgcacgcgctgtggacgtggcaccggaacgacgacgacgaggcggtggtcgccgaccaggcctggatcaccagcctcgcctccaacccggcttgcaacaagtgaccccatcaatccatcagaaattcagaatgtagcagaaacagatttatgaattatataattatataagttaatttattgcattgatatcgataattagaaatttagcattagtacttctacagttctatgtatgttagaagatactctatctgtcacataactt

SEQ ID NO: 64084 - DNA, 114 bp, Oryza sativa
  Clone ID: PAT_MRT4530_65263C.1
ggcctccgcatagcatatcattactcgagagtgatacagcagtgggattacagaatattcctttatttggcacaagaccagagaggttgttcaaggaaaggtttaaatgcttaa

SEQ ID NO: 64085 - DNA, 259 bp, Oryza sativa
  Clone ID: PAT_MRT4530_65264C.1
ctcgcggaggcaattgcagagtccacaggcgctgacacaaccgctgctattgcccggtattatgaccagcatatcgttaagcaaattattgacagagaagatcaaactattgatcactctcttggagactacaatggttacctcgaaaggtaccttgaaaggaatcagagggccctagcgcgggaacttgcacgtgaggaagaagtccacgagaaagccgccaaagcaaaagtcacataagcagtgacaattgccagaa

SEQ ID NO: 64086 - DNA, 342 bp, Oryza sativa
  unsure (1)..(342): unsure at all n locations
  Clone ID: PAT_MRT4530_65265C.1
caagcccaagtcgcgtcgcaccgaagcagagtagagaaggagaggagcggangacgatcagccgtccgatcgagtgatccgatggctctcgctctctccacctctgctgctgctgccgctgcngccgcggcgcggcgctcgcggcgagggtgacgacgacgaggggttacgccgcgtcgggggtacngtnggcgatnagnngggnngcgncggcggtggaagggaaggnngctgnggggatgacgnancgaaggacggntcgtcgtngtcgncggcnaaanangtntcgtnaggtgcccgacccagtnacgggccactancgngccttcaacttagcaggtg

SEQ ID NO: 64087 - DNA, 2889 bp, Oryza sativa
  Clone ID: PAT_MRT4530_65266C.1
gcacgaggcgtacttctcgagtgggtatagacctagcggagtaaatagccgagcggaggcagtatccctgcatagtggttttcttgatgtgtgtgaggcagggcctacggtggggcagccattggtaggaccgcgaggcgggtgtctacagtggtgtcgccatcggtaggactaccatgtgtaaacctaaacttaactataacttaatgcatgtgtgagtcttcccttcccgggagagccagaactcctctcactgctagaaacttatgacgcctagagtgcatgaggatgtaaagttcatggagcgggtactgccaatgtgaggttattgaaaggctttgccgtgacgcgtctcatgtgttgggacgaggctcatgtgttgggcagtcgcggagtacgggtaaagtgtacatccactgcagtgtgagtaaaccaaatctattcgaatacccgtgctcgcggttattgagcaccgggaccatgtattacacttggctagactctaaattcttaaaatgatgagtgagatatgcataatgatttttagactggtggatcaacttctcgagaggcgagaaggggtagaccccagaaaactatgacaactagtggcgggaagctatccttgggaacacaatggatggtggacagaaccgtcgctgtataatgaactacggagataaaatttgatcagttatgctaggtcttaggcttgtgaaaagaattgcaaaattggctttatgcaaataaaccattagcctttcattgaatatcctctatcatatgcatcgttgttgtggtggcttgctgagtacggttggtactcactcttgctatttacaaattccatcagaagccggtgatgaagtctcggatgacccatatgcttactaccaggagggtgaagaagatggtggcgcttagtaggtcttagttacggtcgtcgcctgtggcaatggcgtcgccgctgccttgattccgctgcttatctatttctgcttttgggatgtattccggaccgtttggtcctatgttctagactatgcctgcgggcctatgatgtaataattcgcgctagacaatctatgtatgcgcacttgatatttcagcaatgtaatcgtgagtaccagactacttgatccagggaaatggtactattaacacgagtgattcctgttataaaaatgggggtctacatcagacctcaggtcctgagtagaatggttagtgctaagtagtaatgggatcgtgcttcgtgcttcttctagcgtaaaacggcctgaaagtgctcacaagaccgatgactgtgaagacgttcagcatgaagaataccaggtggtcgcctgggagaaatgaagctgtctgacgcctttgagcccatgcaaatatagctcctgcaattgctggagcaatagctttaaagatggacatcagagttacagcaacaccgttggctgaagctctaacgtcctgagccacagcatcattcattaagatgttgaatacagtgatggtagtaactgcaaaagcattcttcagaaaagatgcacagttaactatcaattgaagaatggaccctgacaatccggccataaatggatagctagaaagaagtggtatagtcaatattgccactatacggacaagcgtgatgggctctactgattttgccactgacgggtaaaccaaaatttggaataccaggaggaagagacctgagaatgcaaggacactacccacatcttgggaagaaaagcttaatccaccatacttcctgtcgctgacagcccatagagaaaatacctcagcataagccacatcctgaagagagaatatgcagtatgcaatgatagcagacatcagtggccagtttgtgaataaatttagacatccagcactattttcttcagcagttggaccagaaagaccttcttctacagaaattgaatcctctaaaaccatatcctgagtgtgcttatgcaaagtttccgggagccagaaggaagcaagtagagcaacaatggcaaggagggatatacataagcaggggagaaaatacggaaacctcccaaatatagacttctcagagaatatgcttggatatttatctgcaggctgtgcaagataaccaccaatagctggtcccacaataaggcctatgccacgtgaggaagaaacaagggatagtccaaggtgaccgtgttcttttcggcacacttctgtagcataggcctggaacacagaaattagaaaataatgcttaattgggccaagtataccacacatcagaccaagcaaacctcttgaggttaatgccatccaataacttgagctgagtccaaagagtgtattgaaaataattattgaaataagggtaattataataatcggcttcctcccgtacttatcagccacgatgccccatatcacagaggagagtgctcttccaaacatatatgaagcgccgacaaaaccagcataaaatccaatatcttcttcttgtttagcaatatgcaggtcccttattacagatccagcacagctgttaagtccaaatgtaaaatcgatagtgacgctagtaactcttctcttctcatgaaacaaaatgtcatcatattgcaccataaaatacaagaagggaaacagggattgtatcggcagggccgcgagagcaccgagcaaatctactgcgttgagcatgatcgtggcatgccaaagctcggggcaacgagatgctctggaggagacggtgacgagccagatgagggagagctccgtgtaggggatcccctccctctcctccttcctcctgtccaccctgcatccggggcactcggggtggtacccccacgccctcctcagcggctcgcccgccccgccgccaaccat

SEQ ID NO: 64088 - DNA, 327 bp, Oryza sativa
  Clone ID: PAT_MRT4530_65267C.1
atgtggatctccggcgccgtcgcgcgggagggaccccgctgccggcggagaaaggggcaggcgagcaccattgtcatcaccgcaagaccttgccgtaccagaggatccgccagcgcacctaaggccgccagcggtggatccacccttcctgggactggggttgttggacccgccaccgtcattgtcatcgttggatttgtgagaaaggccggcggtggcggaggatctgccccttccaaggcccttgttgccggatccatgagggagaaagccagtgttgctcggcagggccggttcaacaatttcgagggccctagacgaacttga

SEQ ID NO: 64089 - DNA, 459 bp, Oryza sativa
  Clone ID: PAT_MRT4530_65268C.1
atggcaacggtttcccgccaaaatgctcaggttgtgtcggcctgggagccacagacggtgttggcccaatgggctgtgatcctcaaggcgacgcacccgcgcgtgcaggcgcttaagccacccgcacgggaaaatgaaaaatcgaaaaaaaaaccaaagcctaaccctaatccagccgccgccaccgccaccctagctgaggtccgccgctgtcgccgctgcaagcgctggcgacggatccgccgcccgctcccatcgccgccggggaagggaggggaggagccgcgggctgccgtcgttgtcgtcgccgccaccccctcccccatgcctcccctccgccggatctgcaaggggaggggccacgcgccaccgtccgccgccaccgctgtcgccaccgcctacgcccgtcgccaggaggagatcgaggagagaggagggtgagagagagagggaggatag

SEQ ID NO: 64090 - DNA, 388 bp, Oryza sativa
  unsure (1)..(388): unsure at all n locations
  Clone ID: PAT_MRT4530_65269C.1
cggacggtggncgggaacgcgtgggggctgatttgtgatttttgtatctccaaatgggttgcaaatttgaagaagatcacaatatggcttttgatcctcaatagttgaagtttacttacaaatttactcagaattttagctggtcatttggatgccttttcaacctcattttcagtctccaaaaatctgaaaaagtctgaaattttgagttggctgaaagcttgtgagatttgtttcttcaattcggttgagatctgggaaaggaccccaaaatgaaatttttgtatttttacatgaactatctccaggatttatggcatatttttccgagcttagttacacaggtttctattgctaaaagacgtcgccattgctatgtgccttttca

SEQ ID NO: 64091 - DNA, 2113 bp, Oryza sativa
  Clone ID: PAT_MRT4530_6526C.1
ttttttttttttttttgttctgatgattgatttctgtataatatttgcacccagaaaggggaaccatcacacacaaacaggacgacaggatccaatatgtcacgatcctaacaatactactagttgtactactaagctatcaacacctgtgtgttctgtgctttttggagaagaaaattcttgcgaaatgttttgaaccaaaatctgtatacaaactgcaatctttttggtaaaaaagtattcctaattattcctaaaaaaatctctgttacttggagatttcgaaacctttgtgctacatacaactttgcgtgtcaaccccctcctcctgacctttaatttccgcccccaaaatttctacacccaaatttgccccaaatttggccacacctaaacccgaattcgatcaaaatgaggaccttcaaattggtggatcctctcgtggccggcgccggcgccggcgccggcttacacctcggcgcaccgccgcggcgcaaagccgaggcggttgttctgcaggtcgtagaggacgtggaagttctgctgctggaagttgccgatgatggacatggcggagcgcggcgtgccgaggacggcgaggcacatgatgccgtcggggtcgaggcggacgaagtagttctccgccgggaagtcccagacggcgccgtcggcgaacaggagggagaactccggcacctccaccctctccacgccggacacgttgtagcacgggctcagcaccgggaagtcggcgacgagagggtacgccttgtccattcgctccacgaacgcccgccggatcacctcgtacgccggctccgcgaagtagctcagcgtcgtgccggagtcgatgatcgtgccgccggacccgtccttgccgacgtcccacgtggacggcgagatgttgagcttctcgccgccgacgaggacgcccttgagctggacgtagtagaatgtgtccgccgccgccgccgcggacggcgcgaacgccgtgtagttgagccgcgggtggccgagcagcgcgtcgtcgtcgccgaacacgatcttgctcccgacgctgctgccgtggtcgacgaggcagtaggagaaggcgtggccgtacacggcgcggagctgggacgcgaaggagagggcgccgcggccgaggccgagcagccccgcggccccgtggaagaggccgcggttcgagtggccgcagccgaacaccacgtcgtcgacgcgccgggacgcgccgggggcggtgaggttgacggtgaaggcctcgagggcgaggtcgccggtggtgttcgactggtcgccgtaccagtagtagtacgggcacgggtcggagtgcgggcggcggcacgccctgggcgccgtcggcggcgcgacgaggccgcagcgggggtcgccgcaggtgacgttgcggtaggaaagggaggccgccgggtcgaacaccgggccgcgctgctcgaagcaatcgaggcagggcgcgcactgcagccagttgaggtcgctgccggtgtccatgatcatctggaaccgccgcggcggcgtaccgacgtagagatccaccaagtactccccggacccgaccgcgacgccggactccaccgtcgccacaatccgctctgccagcgcgcgccgcggcgtcgaattcgtcgctgccctacctccgcctgctccggccaccctcctgagcatcgtgtggatccgggcaacgtccttccccgcggaatccaagaacgactccttcctcgtcctgcccgccgcggcggcctcggcggcggaccggtgggtcatatgcagcttcagcgaaggggaccggctcacctcctccatcccctgcaccatcagcttcccgtcgcatccgccatccgcgacgccggcgttgaacggcgggaactcgatcccgtacagcggcgacgacgacgacgacgcgttgagcttggcgccaccaccaccagcaacaagaaacggcgaggccacagtcaagaacaagaccaccagagagcgcacggcgagccgcgtcatggctaagcccacatgagacaggcggcgccgatgtggtggtggaagaagaggaagaagaagagggcggtggccgcgcgctgggagagagaggcctcgtgcc

SEQ ID NO: 64092 - DNA, 879 bp, Oryza sativa
  Clone ID: PAT_MRT4530_65270C.1
atgacgaggaaatcgctgctgttcctgcagctggggctgctggtggcggcgtcgctgccgccggcgtcgaagcagatggaggtgtcgctgaagaagtggctggccgacaaccagctgctctacaccaccccggacgcggaggacacggcgatggacgccggcgtcgtcgccgccagcaaggcccaggtccacgtgggcgtcgaccccgccggcagcggcagcggcggaggcaagcgccgcaccatcgccgccgcgctcgccggcgtcccagacagcggcggcggcgagcccaagagctacgagctgagcctgaagccggggcaggtgttccgcgagaaggtggtggtcggcaagggcaaggcgtacgtcaccctcaagtccgacccggccaaccccgccgtcatcgtgtggaacgacaccgccgccaccctcggcaaggacggcgagcccctcggccacgtccgcagcgccaccctcaccgtcgaagccgacaacttcgtcgcctccggtgtcgtcatcaagaatgatgcgccttcggggttggaaggaggaaagacagttgcactgcgtgtggcaggaacaaaagcatccttcttcaaatgcacgatcgaggccggcgggcaaggcgcggcgcaggcgcagagggcgcccaagtatgacgggctcgacgggaccaccaaccccgctttcctcggcttctcgttccacaactgcaccatcgaggccggcgccggcgactcgggcggcgccgacgacaaggtctacctcggcagggcatgggatgattcgtccttcgtcgtcttctccaataccatgatggcgaggttgtgcctattggcttccaaggccaaaaaatcgaaaagccagcagaagggttag

SEQ ID NO: 64093 - DNA, 278 bp, Oryza sativa
  Clone ID: PAT_MRT4530_65271C.1
ctgcgccccactcatgctccttctcgcgtggcactctgctagcaccttcgatgtgtcgctgaggaccagcggtcccttcggcaccatgacgaacccctgcgagcagtcccacgccttcaacgctggcctcgacatgaacgtcaggcttctcgaccctatcaaggaccaacttcccatactttcctacgccgacttgtaccagcttgctggctttgtgaacgtcgaggtcaccgtcggacctgaggtccccttccatccggccaggcaggacaagcctg

SEQ ID NO: 64094 - DNA, 2265 bp, Oryza sativa
  Clone ID: PAT_MRT4530_65272C.1
atgagtctaccgcttacaagaaaagatctcatgatagtcaatatgggccctcagcacccatcaatgcatggtgttcttcgactgatcgttactctcgatggtgaagatgttattgattgtgaatccatattaggctatttacacagaggaatggaaaaaatcgcggaaaaccgaactattatacaatacttaccttatgtaacacgttgggattatttagctactatgtttacagaagcaataacggtaaatgcaccagaattcttggagaatattcaaataccccaaagagccagctatattaggataattatgttagaattgagccgtatagcttctcacttgttatggcttggaccttttatgcagatctcggtgcgcagactccttttttatatatttttagagagagagaattaatatatgatctatttgaagctgctacaagtatgcgaatgatgcataattactttcgcatcggaggagttgctgccgatctgccttatggatggatcgataaatgttagatttctgtgattattttttacgagttattgaatatcaacaacttattacacagaatcccatttttttggaacgagttgagggagttggttttattagcggagaagaagctgtaaattggggcttatcgggccccatgttacgagcttctggaatacaatgggatcttcgtaaagttgatctttacgagtcttacaatcaattcgattggaaagtccaatggcaaaaagaaggggattcattagcacgctatttagtacgaatcgatgaaatgagggaatcaatcaaaattattcaacaggctgtagaaaaaattcctgggggcccttatgagaatttagaagtccgacgctttaagaaagcaaagaattccgaatggaatgattttgaatatcgatttcttggtaaaaaaccttcacccaattttgaattgtcaaaacaagagctttatgcaagagtggaagccccaaaaggtgaattaggaatttatctggtaggagatgatagtcttttcccctggagatggaaaattcgtccacccggttttattaatttgcaaattcttcctcagctagtcaaaaaaatgaaattggctgatatcatgacgatattaggtagtatagatatcattatgggagaagttgatcgttgaaatgataatagacagggtacaggtagaagctatcaattctttttcgaacttggaattattaaaagaagtctatggactgatatggattctacccattttgaccctcttactgggaatcacaatagaagtactcgtaattgtgtggttagaaagagaaatatccgcatcgatacaacaacgtattggtcctgaatatgctagccccctgggactgcttcaagctatagcagatggaactaagctactttttaaagaggatatcttgccatcccgaggggatattcccttatttagcattggaccgtctatagcagtcatatcaattttattaagttttttagttattcctttgggatatcgctttgttttagcggatcttagtattggtgtttttttatggattgccatttcaagtattgctcctattggtcttcttatggcaggatatagctcaaataataaatattctttttcaggtggtctacgagctgccgctcaatctattagttatgaaatcccattaactttttgtgtactagcaatatctctactatccaacaattcaagtatagttgatatagttgaagcacagtcaaaatatggttttttttggatggaatctttggcgtcagcctataggttttctggtttttctaatttcttctttggcggaatgtgaaagattaccctttgatttaccagaagcggaggaagaattagtagcaggttataaaaccgaatattctggtatcaaatatggtttattttatcttgtttcgtacctaaatttattagtttcctctttatttgtaacagttctctacttaggcgggtggaatttgtctattccctatatatccttttttggatttttccaaatgaataaaatggttggaattttagaaatgacaatgagtatctttattacattaactaaagcttatttatttctcttcatttctatcacaataagatggactttacccaggatgagaatggatcagttattaaatcttggatggaaatttcttttacctatttccctgggcaatctcttattaacaacttcttcccaacttgtttcacta

SEQ ID NO: 64095 - DNA, 237 bp, Oryza sativa
  Clone ID: PAT_MRT4530_65273C.1
atgggcagcctcctccgcgtggatgccgtggtgcgcggagaggagacggcgtgcggaaggtatggcgcgcctccaccattggtggtggcgggcggtggctcgctgccgtggcgcgggcggagccttaggttgtgccgctatgcggcggccctagcggctggcaacggcgcactgtggaacagcggaaggggatcgaggattcgccagagacagagaaagatgcggtgcgccggatga

SEQ ID NO: 64096 - DNA, 536 bp, Oryza sativa
  unsure (1)..(536): unsure at all n locations
  Clone ID: PAT_MRT4530_65274C.1
agtgggacgcaggtttccatcangacgttgtaaaangacgggccagtgaatgtaatacgantcactataggggganttggtacccaggacatgaaaacaagtttctgcccctcaaatatattattataagcccaagtttaaattccaacttttttcttcaaacttccaacttttccatcacatcggactttactacacacaaacttctaaattttccgtcatatcgttccaatttcttcaaacttccaattttagcgtggaactaaacacagcctatggagcacaaccaacagctagcaatgcgtagttctggatttggaagctttacatcatgttttacacaaagaaacggtttcataaccaggttcctttctcccaaaggctctgatgtgacagttaaaatattgggctcacaaggttgtttttcatgtactggactcttcatatgttccactttggacattcaaaagttcaaaggaagtattttaaccgatgtttctttccaagccttcctcaccggacaaattcattacatt

SEQ ID NO: 64097 - DNA, 436 bp, Oryza sativa
  Clone ID: PAT_MRT4530_65275C.1
tggcgatgggcagcctcctccgcgtggatgccgtggtgcgcggagaggagacggcgtgcggaaggtatggcgcgcctccaccattggtggtggcgggcggtggctcgctgccgtggcgcgggcggagccttaggttgtgccgctatgcgggtacgaaggcggggtgaggaggaagatgcgaacggagagggaggagttgggatcaatgtggaggtccttggaggtgacatcgtccgccacggagaaggcctggttcaacggtgccgtggcctcgttcgcgcgataagagaccccgaacgccgcacgtcgtcttcctcgcgcggtggctggcggcggctggtggaagtgcagcggccctagcggctggcaacggcgcactgtggaacagcggaaggggatcgaggattcgccagagacagagaaagatgcggtgcgc

SEQ ID NO: 64098 - DNA, 1145 bp, Oryza sativa
  Clone ID: PAT_MRT4530_65276C.1
atggtgctgcttaatcgctccgtgctcttggtcaacgaggtaacagatgtaatgaaggaaaaaggctggtctcttgagctcgacgagaaggcaatttcagacgcatgcgacggtatcacggattggcaggagaaagagaaggcaaggcaaaaggccatacgagcagagatcaagaggtttcgagccaaccaagatgcggcggaggccattttgcgcaagcgcaaggcctccatgccccccagcacggtgaccaagttttgtactgacaccgacctccgtaaggttttggatggcatcgaactagatcctcaagtccatgatataccaggtttgtccttctttcgcctccggctgtcgtctgcacgacatcctcctgatttgcagggcacctccgtcgccggtgcggaccacaacatcctcgtcttctatgtcggcccctaccggcccggtttccctgcaccgggattttatctggtttacgacgcatgggccaactcactgtccgccatccaccagttgccatatttaggcggcggcagtattggctctgaggttgccgtgctgcgccatgctccggccagcgactatatcctcgccgagctcctcctcactggcgaactccccaaggcaagtctctggacgtggtgttcgtctggtccgtccgctcgccaatggatccacaagacagtcatcctccctcctgaagtgtgcacgcccacctacatctttcatgccgataccactttctctcttgggaagtttgcgctctgttgggtagacctcctcgttggcatcttgatgacctgcgatacccttgccccagaacctgttttccagttcatcccgttgccggaggggtgctatatggagccgcccgaccctcaagatggacgccaggtaccacaggaataccggtctatgtgttgcggcaatgacggtatcatcagattcatctccatcgacggctatcatcaagacctctctatcaacgatatgaggaatatgttcctcaggacatggtctcttactcttaaccccaaggagtggaagcaagaagcggcactatgcattggagacctctgatctgacacaacccaccagaagctgccagcactaatgccgacctggcctgtccatagcattct

SEQ ID NO: 64099 - DNA, 402 bp, Oryza sativa
  unsure (1)..(402): unsure at all n locations
  Clone ID: PAT_MRT4530_65277C.1
atgtatttggaaatatgccattataatttcacacatattcaaaagataccactacttaccccttggatgcatttccagataaaaatggaccaaactacccattttcccctcgtcttacttcttcccctttctccttcctcctctcttccttctcaggggcgacgcggcgcgtcaacggtagtagcggcagcaacgcagcacggtgcgtcggcggcggcgcggcggcacagcagcaacaacggcgcgacacggctcggcagcgacagcgagacgcggctcggcggcggcagcagcagcggcgcggcggtggagcaagctgcagcgcgcgcagcgggatggcggcggagcgagcggcgtantgagaagagagagacggtagaagatggggaagagagagagagg

SEQ ID NO: 64100 - DNA, 438 bp, Oryza sativa
  Clone ID: PAT_MRT4530_65278C.1
tcgtttcaccggagtgggtggagacgagacgcgagcaaacccaaaaccctcgcggcgacgccatggccgccgcgctccgcgccgccctccgccgccgccacgccgcctcttcgccggtggcccgcctcctgccgtactcgtcccctggaccctgcgccaagggcggtggcgccgccttcaccctccacgccgccacgcgcggcgcgcccgctccgtcgatccaggcgccctccgttgttcgtcgctactgctccgccgggggaggatacgccggcgcgcgccctgctcgcggtgcctccccgctccaggcaccctttatggtccgccgctccgggtccacccacgggagccactgctcccgtcacccctgccgctggcgtcacttgcctttcaccgggaatctccacttccctttttggtgccccgccgacctcccga

SEQ ID NO: 64101 - DNA, 406 bp, Oryza sativa
  unsure (1)..(406): unsure at all n locations
  Clone ID: PAT_MRT4530_65279C.1
ggcacgagcgtaancctctacaacaacaggggatantatggagggtgctctgcccctggatanggagtttcagtatanccaagaaaaatcagattcaccttcaagctgttagagaggttgaatatgagccaaagatgcttcccaagcaagtagtagttcctgagcagattcggccaaagcacaagaaaagaggatttttcaagaagttgtttggtntaaaagcttanataaacttgaagttgatataagaacaacatgtacaatagatgtctctttaaaaccgtcttaattgaattgattttcaggtgtcttccttagtaagacactagctacctttaaaccttatataattgcaataaattatctattgagctgtatacatgtaaattatgtttaatgttattan

SEQ ID NO: 64102 - DNA, 672 bp, Oryza sativa
  Clone ID: PAT_MRT4530_6527C.1
tagttcattcctgcctccgtctccagtagcttgctttgctcgcagattgttccttttttctttttctccggcgactcgagatcgtggctagctagagcctagatggcctcttccatggcgggcgcggcgggggaggagaaggcggcggcgggggcggggcggcgggggatgatcgtgatcgaccggcaggccgtcgaccgggggatcgcctacgcgctcatggtcgtcgcgctcgtcgccacctacgcgctccactagctcgatcaatcggctcagggaggaggaggaggagaagaagaagtcgttccccttcccctaccaacctgcacttcgatcgatcgatgccaaaagtctataactatagaacctgattctttcttattcaattcttctttttagagaaggttaattaattgtgtgtgtgtgtgtgtgagagagagagagagagagagagatcgatggataatttggatatgtacactataccaagtgggttaattaactggatgtactcttctgcatattttggtgttcattggtaacagtttggcattggaatgtctggtaaatcgatgatttacccctttcgtctccaaaaaaaaaaaaaaaaaaaaaaaaaaaaaaaaaaaagaggggggccgcgtgcttttcgggagcaaaaaaaaaaaaaaa

SEQ ID NO: 64103 - DNA, 371 bp, Oryza sativa
  Clone ID: PAT_MRT4530_65280C.1
aattatatgcactcctaccaaggagcaatatcatatgcttatattacagtgacaccaaacatagattacgtactaattaaatgcactgtgcacgtcacacacagcactgacgctatatcactttgctcacgagtcgcgcatgcatgcacccggccattaaatcacatacataatacacgtacaatacacacataaaaatatacatacgtgtgtcgatcggtgtgcatgtagatataatatatatgtaaaaaccgatcggaaaaaggaaaaaattagaactcaataagagtatatatcagcagccagcagaaattaatatgcagtgacgatggccgggcgccgggggagctggatgggggatcacgaggaag

SEQ ID NO: 64104 - DNA, 1491 bp, Oryza sativa
  Clone ID: PAT_MRT4530_65281C.1
atgggagcgaattttccaggatttaacggcgttgtgctttcagtggtaggcgacgtacccgtcgacatcgaggcgcctgtggtgacttcgtcaatctctccagaattcgccggcccagtcttcgaagatgctcataggggtagggcatacttctccggtggttcgagttgggttgtggacattggttgcactaatcatatgactggaaagaggagtatgtttacaagtcttgacgaggagggaggaactcgtgagaatattgtttttggagatgatggtaaaggaaagggaaagttgaagggtgatctctatcttgtcgatttcaatgtggatagagtgaatccggaagcttgtttgattgctaaatcctccataggttggctatggcatcgtagactagcccatgttggagtgcggaatttgtcaactcttctaaatggggaacacatcctcgcgctcactaatgttacatttgagaaagatcgtgtgtgtagtgcattcaaagctgggaagcaagttgggagtctgcatccaatcaagaacatcatgactacaacatgcctacttgagcttcttcatatagatctatttggacccgtggcctacataagtattggaggtaataagtatggctttgtcgttgttgatgacttttcctgcttcacttgggtgtattttctccatgacaagagtgaagcacaagatgtcttcaagcgtttcgtagagcaacctcaaaacctctattatctcacaatcaagagggtgcaaagcgacaatggtggagaattcaagaacattcaagtggaggaatttcttgatgaagagggtatcaagcacgagttctccgcgccatatgatcctcctcaaaatggcattattgagaggaagaaccaaaccctcattgaagccgcaaggacaatgcttgatgactacaagacttcagatatcttttgggcggaggccgtgagcaccgcatgccatgccatcaaccgcctctacctccacaagcttctaaagaaaacttgtcacgcccagaaattcactagtaatttccgaacttatttgtgcataaaatcctcgtccaggaatcagccgagaggcatggactccccattgacccccacggacttctcgccacttcttagtctggcaccccgtaatgaaccatgctatacaaaagatgatgcggatcctagcaaagcaattggtactaaggctattggagatatacgaccagtcgagacacaggatgaccaagaagatagggatcaacctccgtcatcgacacccaatagccctacatcaagtccactgtcagcagacccggaagttccggggactgaggaccggaacatccgggcctctccatgccaagaagtttcgaaaccatcagcccggaagttccggactgatgatagtcaaggcgtgcctacggcacaagtgaatgggattgatgccgagggcactgtagagcatcttaatcagggttag

SEQ ID NO: 64105 - DNA, 2988 bp, Oryza sativa
  Clone ID: PAT_MRT4530_65282C.1
atgcctaggttcctcgccatcctctccgccatcgccgtggttgctatctccggccatgctccacccgctgcttccaccgccgccaccgaccgcgcggcgctcctctccttcagctccggcgtccatggcaacctctccgactggggctccccggctgctgccatgtgcaactggacgggcgtcagatgtgacaatcgctccgggcgcgtgaccgggctgctcctgtcgaactccaacctcgccggcgtcatctctccggcgatcgccaacctctccatgctcgagaggctgtatctcgacgggaaccacctcgccggcggcgtcccgccggagctcggcgcgctgccgcggctgagggagctgagcctccactacaacctcctcggcggccagatcccggaggcgctcggccgcctgacgagcgtcacctacctcaccctcgacggcaacggcctcgccggcggcatcccggaggccgtcttctgcaactgctccggcctgaccttcatcggcatgagcggcaactccctcaccggcgacatccccctccggccgcggtgccgcggcctcccggcgctgaggcagctcagcctcttcggcaacgcgctctccggcgtgatcccgccggcgctgtccaactgcacggatctccggtggctgctcctccaggacaactccctctccggcgagcttccgccggagatgttcggcagcatgccgagcctcgtcttcctctacctctcgcacaaccatttctccagcagcgatggcaacaccaacctcgtgccgttcttctcctccctggtgaactgcaccggcttgctggagctcggcgtcgcgtcggccggcgtcggcggagagatcccggcgatcatcggcaacgtgtcgtcggccaacctctcctcgcttttcctgagtggcaacgagttcgtcggtaaaattcctccggccatcggaaaccttgtcaacctgacagaattgtgcttgtttggcaacatgctggaagggccgatcccgccggagatactccggccgccgcggctcgcgctactagacctgtcgaacaatcagatcgtcggcgaaataccgagatccgtcggcgaaagccagcgtttagagaccattaacctgtctcagaataagctccaaggcacactaccagagtcattatccaacctaactcaattggatcaccttgttcttcaccacaacatgctgtcaggaaccataccacctggcctcaattgcagcctgatattggatctttcttacaataagctgacaggccagattccttcagaaattacagtgctaggaaacttccatgtgtatctcaacctctctaacaatctcttggatggccatgtgccactgcaaattggcaacatggaaatgaccgaagctcttgatctctccatgaacaacctctccggcgcgatcccggcgacgatcgccggctgcgtcgcgctggagtacatcaatctgtcgggaaattcgcttcagggtagcttgccaacctccattggcaagctaccaaacctccatgtccttgatgtctcctccaatggcctcaccggcgttcttccaccgtctctgcaagcgtcgccggcgctccggtacgccaacttctcctacaacaagttctccggcgaggtgtccggtgaaggcgccttcgcgaacctcaccgatgactccttcgtcggtaaccccggcctatgcgggtctatcgccggaatggctcgatgcgaccggaggaggcatgtccaccggcgcctcctctgcatagtcgccgtcgccgtcgctgtcgttgccggtgtttctgccatggcgttgacatggttgaagaagttgacgacaacctcagtcagtccacatctaagcagcggcggcgtcatggatgagagaaacagcgagcatccgaggatctcacaccgcgagctcgtcgacgcgaccggcggcttctcggaggcgaacctgatcgggaaaggggggtacggccatgtctacaggggcgttctccacggcggcacggtggtcgccgtgaaggtgcttcgcgccggcgatgatgtcgtcgtcgccggcagcttcgagagggagtgccgggtgttgcggagcatccggcaccggaacctcatccgcgtgatcacggcgtgcagctcgccggagttcaaggcggtcgtgctcccgttcatggcgaacggcagcctcgacggcctcatccacccgccgccgccgccgcctcccggcggcaagccggcggccaaggcccaccggcggctggacctggagctgctgctgagcatcgcaggcaacgtcgccgacgggatggcgtacctgcaccaccacgcgccgttcggggtcgtccactgcgacctcaagcccagcaacgtcctcctcgacgacgacatgacggccatcgtctccgacttcggcgtgtcgaagctggtggcgcagcaggaggatgccaaagatccagacgccattgacgacgacgacgacgacgcatcatccactccttatccacgcagctccatcactcgattgctccaaggctccgtcggctacatcgctcccgagtatggattggggtgcaacccgtcgacgcaaggcgacgtgtacagcttcggggtgctgctaatggagatgatcaccgggaagcggccgacggaggtgatcgccgaggaggggcacagcctgcacgagtgggtcaagaggcgcttgtcgtcggacgacgatgtggtcgccgccgtcgagctctcggcggcgacgtcgccgcgacatgagacgcatgtcgtggtggagctgcttgagctcggcgtcgcgtgctctcggatcgtgccggcgatgaggcccaccatggatgacgtggcgcaggagatcgctcgcctcaaggacggtgcttggaggaagtgttgctgcgaggatgacaacgaccactgcatacgctcggatccaagagacaatagtgtgcttggagagggattctaa

SEQ ID NO: 64106 - DNA, 663 bp, Oryza sativa
  Clone ID: PAT_MRT4530_65283C.1
atgggacccacttgtcagccgcacaactatccccttcctcttgctctccgatttgcccgttggctgccggcgctgctcctctctttcacggtagtagcggtggctcgctggcacgcggttgcagaagagggggagccgctgcgcaaccgctgcaaccacgggattcgccaggagtgtggcgagctcaaaactgggaggatggagtcgtcgtctgcaagggacgggtcggccagattagcgaagccgtccacatctcggcacgccatcggcgccgccgagatggtttgccgccgggaaagagagcagcgctcggctcctcctcgaccccagccgcgagccggcgcgccgccgccgccgggaaagagaggaacagcgctagcactagcaaccgacgggcagaccggagagagaggggaaggggatagttgtgcagctgacaagcgcgttaagattgacttgataatcaaccatgtcacatatggtatttctaagtggtttgtgacactgatttacaatggtcttacagtattgaacaattataccgcttgtctttcacatcgggtcagttcggctgcttggcgctgcaaccaagcaccaacagtgtttcgggcagccgaggaagcagctggctactgcggctacgtggccgccgaacagacccaa

SEQ ID NO: 64107 - DNA, 432 bp, Oryza sativa
  Clone ID: PAT_MRT4530_65284C.1
atggaggaagtagctgataagagcgaaaagatgaggccattcaatgtggacagggggctatgccccgatgcctacagctacgccaaggacgaccagaccagcaccttcacctgccccaccagcaccaactaccgcgtggacttctgcccgccgatgagcggcgtgacggccggcgacgacgacggtgtgcatggccacggcctcccgcggctgagctgccggatttgtgcatccgcggccatggtcatggtcttcctcccgccgccggccgcggcctcccacggtggagaccgccatgagctgccgaattttcgtggctttggcgtcggtcttcctcccgccgccgagctcgcctgctccgccgcccacctgcccatccgctcccgggaaggagagagaggggagagggaagagggaagaagagaggagtga

SEQ ID NO: 64108 - DNA, 581 bp, Oryza sativa
  Clone ID: PAT_MRT4530_65285C.1
aagaagaaagcacggtcctttttcattgtaagtggatttttgaactattcattttagtctcaagagagacactccgaggggttgttgtgtgtaatcacctaaaccctcttgaagcaaaaaaaaaaaaacagagaagagattatacatatatcacaattttcaaagaatagtaaaaaaaatgtacattatgatgatatcgcccatgggagattaatcaatcccttggaaagaaaaccaaaattttttccttctttgcagctagtaggaaatcagcagcttcaagttgtaaccatgcatgtacaatgtacaccctcctctcctccggctcgtccagtctcttctacagctcatcgttctatcacctcttgttctgaggagacggttgcgaagaaggtagcggcgtcgtgttgacatgccataccataacctctgaacagtctgaaggaattcctctcactttgctataatcttcaaggaccacttgctgtacgaacttcaccgagtcctgggacttgtcgggctcggaggtcgggtaccggccccaccgctcggggtcccagagcaccgagctgttgaacgcg

SEQ ID NO: 64109 - DNA, 1764 bp, Oryza sativa
  Clone ID: PAT_MRT4530_65286C.1
ccacgcgtccggcttagctcagctcgaatgcggctgaagtgaggagacgagaagagcggtcgccatgggcgaggcggtgctggtgtccaatcatgggtgcagcggaggcggaggaagagttggagtcggagtcaggggagcgggaggaggaggacccggcgaggggaaggcggaggggcagcaggggcaggtgctcgccctgctactcgccgcgctacgcaggtcggtggtgctcccgtgccagatggccgacgctgacgacccggcagcagtcgcgtgggggatggagatcgggtggcccaccgacgtccggcacgtcgctcacgtcaccttcgaccgcctcaacggcttcctcgggcttcccggcgagttcgagctcgagatcccgggccacgtccccagcgccagtgcgagcgttttcggcgtgtcacctgagtcgatgcagtgctgcttcgacgacaacgggaactcggtgcccaagattctgttactcatgcaggagaggctgtacgcgcaggatggcctcaaggttgcagaagggatcttccgtatcacccctgagaacagccaggaggagaatgtcagggagcagcttaacaggggccttgtgcccgacgacatcgatgtgcattgcttggcaagtttgattaaggcctggttcagagaactccctgagggtgtactggatagcctctcacctgagcaagttcttcactgcaacacagaggaggaatgtgttgagctcgtacggcttcttcctccgacacaggctgcacttcttaactgggttgtagaattcatggctgatgttgtcgaggaagaggagtcaaacaagatgaatgcccgaaatgtcgctatggtctttgcacccaatatgacgcagatgtcagatcctcttactgctctgatgcatgctgttcaagtgatgaatcttctcaagacattgattctcaagacgcttagagaacgtgagcatgatgaaagcgaatactcagcaatttcatctcagtcatcttcatctgatgaacttgatgagatgcatcatcatgttgaacaaggtggtgacagtggtagtgacactgacaattttggagatgatggttctcaaagccaaaaagatgttgccaaggtccttcaacaaaatgttgtcaatgaacagccgattggtgcatccaggaggcacacgtcaattgatttccggttgccttacattagctacggcagcgacgatgatgtgtcgcccaatgatattgaagaatgtttcttaaggaggttagaatggaatgcagtgagcaaagatgcttctgagattggcagcatcactgttcggtccaaccaagaggcagggcaactaagcttctccgaagaaaatgatgggtattacagtacagattatcaatctaggaacatactcctaaaagattctgttggtatccaaagcactctaccgagggaaaccgaaagcagggctgaaattacaaatgacgaggtacaagacggcgctgaagtggaggtaactctcgagcaataatcagaccttcaaaggatggaggtcttacgtttcgttatcatcgtccatgtgttttaatatgatcttgtactatgattcaagccggtcaacacagggttgatgaaccttatcctagtagtaatattcttcggatgctctatagttctctgcctttgagctgtttactgtatttgtgtgatttcaaaaaaaaaaaaaaaaaaaaaaaactcgagaccctcgtgccgaattcctgc

SEQ ID NO: 64110 - DNA, 234 bp, Oryza sativa
  Clone ID: PAT_MRT4530_65287C.1
ctccaggaggggtggagctggagctggagctgtgctaaacaggccctaactacccgggctcaagctctgagatcgtcacgccgttcgctgacacagctggcggctgccctcctcgcgcgggtgacggccgtcgatcgttgtagtgatatcaccgccagaacggaggcgtcgtccaccgagcgtggtctcacttacgatagcaggagcagtacgccggccgggatcgagggataa

SEQ ID NO: 64111 - DNA, 374 bp, Oryza sativa
  Clone ID: PAT_MRT4530_65288C.1
atgaaaccgacgagatcgtatcgagttaatccaactagacctctcggcaatctggcttccgcaggctccgacttcgtaggctgtggtggtgatgttggctatcagattccccctttaggtcctcccagggggtcccttttatatcgtaggtcacgcggtttccaagtagaattcggagacatcggaccctgcacgatgcactgacgacccagtcttgtccgagtaggactctttcgatctgtgaactccatgatggattcctttaatgtatgcagagagcgtccgtatacgcgcaggtataccataccgatacacggcatgtatcgaaggataaagggtatacctcggcagccgccggagagcatcctccccac

SEQ ID NO: 64112 - DNA, 2813 bp, Oryza sativa
  Clone ID: PAT_MRT4530_65289C.1
ctttttttttttctatgaacataatcaaacttggataagattaagttcaaaggcagaagaacgcatgggatgcccttaggagtgataggcataccgacatagagcttttgtccttgctatccaagttaacaggttttacccaacactgcctttacattacatgctactacgaaatacatacctgaataaagaaggcataccgaaattgcatcagaaggggggatgtccgaatttacccaaatactatacagttgccaattggtaccacttgctcacttgcttcacacatggagggcagttggctacagcgacatgctgtgctgctggagccactcctgaatagcagaacgcagtgcgcgattcggaatgagctcctcatgttcaagtagcaagttggtcattggagacgtgtcatggccattgcagagccaactcctgattgcctcagcttcataggtgaatccatctgctgcaatgtgaggatcatccatgatatcctgagatataggacagatgaaatatgacggtggactgttttgatcctgtgctgatctagaggatgaaggtgaagataatgcagcatcccttatagcctcaactattgcccacacctcacctgaaagatcagggcggcacctcctgcttaactcagtgcatctgagagcaaggtatgccagctgctcgatgtgcagatgaggccactctcccactgaggtatcaattactgagttcaagtcacctttctccattgcatcctccacgatattctttataccaacaggaggctttcctgttaaaagacgcaagactacaataccaaatgaataaacatcagactgaggtgtcaactctccagtggaaagaaattctgggtccatgtacagaggggtgcccacaggatgcatggtgcggtacagggtggtgttattggtgctggactggattaggaggcgagaaataccaaagtcactaagcttactgactaagttaacaccaaggagaatgttagcaggcttgagatctccatgaacaactgggtgaggtttattcttatgcagaaagattagtgctgaacatatctcagcaataattcgaatccgagcctgccacgtcagagtttgcctcttatctgaacacataagaaaatcttctaggcttccatttggcaggaactcgtatacgagtgttgaagactctgagcaagctcctaagagagtcacaaggtgagggtgtctcactctactgaggatagaaacctcttgttcgaactgtgattgtccctgtaaactatcaggtctcagcacctttattgcaactgtcatgttccggaggatacctttgtatacgcagccaaacccaccttctccaatcttcaatgaattactaaaattttctgttgcagattccacttcagatgatgaaaattcacagtgcatcgctgtaaccaaaactgaaagcatctgtcctcttttctgacgtagttcttcaacctctcgaactgcattatctcgttcacgtagcaattggtcatgctcagatagaagccattcaaaatgctctctggagtctgagagttgacctagtagattctcattctgctcattgactctctgaagttccacggtgacctcatcttgctgtattttaagttgttcaaactcttgttgtacccttgaaagagattcctctgtttctttcctttgttggacctggcttaaatacaaatcttccaatgtcctggccaatcgttcagattcaatccgctttaagcgctcgtcggatgcttccttcttcaacaccgcagcttcatccatgcttttttgaagtttattacacagatcatcattcaaatgcaaatctcccagtatctctctcaagtcctctgctctagaatcaccgccattagctcttttaatgcatgctgcacatctccttaagccatcaagaacttcgaggttgtttgggtcacacttcaaaccctctacataagttgccagagcaatttcataattgcccataagtaactgaactttagctttacgcagatagcctttcagaaaagtaggatccaacgctatgcatttatctgcatcttcaagaccttcaggcaatgctcctaggtagatgtggcattgggctctgttgctaaaaaccctgggatcttttgggttctttttcatggcttcagtatagtgcattgctgcttcctggtaccttttctgcttgaagaaatcgttgcctctgtctcggtggtgatcggcagcttcctgatcaagccgctcccgctcctcaatctccttcctggcttcctccgcctcgcccagcttggcgagcgtctcctcgctgtagtgctcggccagcgactgctgcagcgccctgatcgccgggtcgtagtccgcggcgcaggcggcgagcttgagcagcgccgacgccttcctcgccagcgcccgcgcgaccagcttgttgtcggcgcgtagctcccgccccttctccaccgcctcgtcgcaatccctcacgcactccttgtactgcaacggagaaaccaatcgccatcgccgcgaggttaaacaatcggagagagaggaggggtttgggggcatggctgagactgagagcctgaccttggacatgaggaggtaggcggcggcgcggttggtgaggaaggagatgtcgcgggggtcgaggagggcgccgcgggtgtagtggcgcacggccgtctcgaggtagagcttgcggtaggcggcgttgccggcctccttctcccgccgcgcctccgcctccgcctcggctcgctcgtcgtcctccgcctccat

SEQ ID NO: 64113 - DNA, 527 bp, Oryza sativa
  Clone ID: PAT_MRT4530_6528C.1
tcaaaaaggaagcgatacatcttacctaactcaagaataatgatccatcaacctttgggtggagcccaatgacatgagattgatctttatatccatgcctatgatattctttactacaaggctatctcgtatggattcctatcattccacactgtgcatcccttatttatagatcaactgttttactgtccgtcattacttcttgatcgcgtatgtggtatatgagtatggtcttattgactgtgctactatgaattctctcatatcctctcaactcgtttcttcttttattcatctattgtatgttcaattttttaccgatcacattttcgtttatttttttacatttcttattctcaattcatttttctccatatttcccttcttcattaattcctcttttcattctccttattccctcttcttcttttacttcctctttttccttgttttgcccttttttttaagttcttaattttttcctttcccttcccttattcttactacttcaatttcttctttttatt

SEQ ID NO: 64114 - DNA, 107 bp, Oryza sativa
  Clone ID: PAT_MRT4530_65290C.1
atggcggatgcccgtttcggatggtcagaggctggcttggcaatactacatgaggatacccataagagaacaatcatgatggactgggttcaacaacaagaagcaac

SEQ ID NO: 64115 - DNA, 978 bp, Oryza sativa
  Clone ID: PAT_MRT4530_65291C.1
atggagatcggtggcgtgctcgtgtcgctgctcttcgccgccttctccctcccctgcctcctcctcctcctcgtcctcgccgaggccggcctccgcctcgcctccctcgcgctccgcggcggccgctacgcctggcccacccgctccgacttcctcggctaccgcatcgcccgccgccgccgcgccgccgtctccggcggcgccggcggggcggacggcgaggaggaggcgcagccgacggcggagtgctgcgaccgccttgccgtggcgatgtaccggcgcgggcgcgacgcggctcccgtggactgcgtgttctgcctgtcgcgggtggacgacggcgaggaggtccgcgagctccggtgccgccacgtcttccaccgcgcctgcctcgacgcctggctcgtcctcccgcgcgccacctgcccgctctgccgcgactgcctcctcccgccgccgtgcgagccgccgcgcagcttcccgctcgactactacgacgacgacgacgacgtccagttcggcttcaacgacttctccatcacctcctccaccaccaccaccacctccgccgccgccgccgtcgcctacccacacggcgtcgcgctctggcccatgtaataaatgtaataatcgccatttgctgccgctgcccgctgccgccatgcgagaagccgaggagcagagtgttctctctgtttttcttcttctttttttttggtttctttttgcatagttttttttagtaattagttgctaattaatttgggactgattgcttgattaatctaatgtaatctaagatgatctggctaggtggcccatgtaaagtaatgtaataatctccaattctccattgttgctgccacacgagagaagccgagaaacacacagggatcttttggctagctttacgaggtgataggctagacgatttgaatttgaagcctcgttctttctagctaaaaaaaaaaaaaaaaaaaa

SEQ ID NO: 64116 - DNA, 333 bp, Oryza sativa
  Clone ID: PAT_MRT4530_65292C.1
atggggcaagaccgagcttgccggccgagcaacgcgagcgcccccatggccgtcttcatgggcgctgggacaccgccgcgccgtgtggagcaccgcctccttgcgcgccgcctctgcctccgtgaccacccagcacctccacctctgcctcctctaaccggtgccgccccggcacctcctcgccgcaccggccttctctccccatccacccgacgccgcctggccgcccttaggccgccgccgcgctgggccaaccgccatcgccttggtcgggtcgtcggccgtgccgccgcacccagcctcgccactgcaccagctgcgcctcctcgctag

SEQ ID NO: 64117 - DNA, 295 bp, Oryza sativa
  Clone ID: PAT_MRT4530_65293C.1
ccgtcaacactggcattgacgtcgggtaggggtgaaaccggagcgaatagttatcgtccgcttcggagaaaaatgaatacgaatacctttcggatgggataagtttcggatagttcgaatatggatattttctcccagatacgaatacgaatatgaagttgagttgtttttcgtgttccaagaaaaagatgtttccttattcatgtccgatcattttttattcttatttgtattcgagataatctgtacttgtttcaatattcaggctattcgaataactgtctttctttctcgt

SEQ ID NO: 64118 - DNA, 328 bp, Oryza sativa
  Clone ID: PAT_MRT4530_65294C.1
ttttgatataaaatcaaacaaaaagaaaaaataggcccgatctgttaaattcgcaaaaccctaccgcggcggaaatgtcgaacacgagggtgttcttcgacatgaccgagggcggagctcccacggggcggatcctgatggacctttacttgaaggacgtgccgcggacggtggacaactttcgcgcgctctgcaccggcgagaagggcgtgggcaagagcggtaagccgctgctactacaaggggagcacctttcaccgcgggatcccctgagtcatgtgccagggcggtgacttcaccccttggcaacggcacgggagggggagtt

SEQ ID NO: 64119 - DNA, 966 bp, Oryza sativa
  Clone ID: PAT_MRT4530_65295C.1
acaggattgaagactcaggcaagaaaaactactccaataaatcgacaatattcaaaaagagatgatggaggtcgcaggctcgtagccgaacaggtgcaaagaaggcgagatgctgcacggcacactggcggaaggggatcaggtgcactcgtattaacaaagagaaagaaacggctgagcccctgctggaggaagatgatccgtcggcggcgctgcttcatattctcgtgagtcagtgtctgttggggttcaggggcagcggtcgcctgattttgacagtttctaatgtaaatgcatctctgctggcggttgaggatgagggaggggccatttgatttcaccatggatggcgtcagggctcccgacgtttctccccatcggcgcatcgctacatggatcgctcccgacgtttctcccgcgacccaggcgaacggatgccgcaccacacctcgccgtgcgctgtccctaccaactccgaaccctaaatcactcattgggccgcgggctgcgggctgcgatacactgatatgggcctccttcgctgcctcacgcccatgtgaagtccctcgcttcctcacgtctgcgaagtcagccttttcatccaaacggctgagatgcgatgtaatcatccgatccaacggttttttctaattgtgaaatacttcgttgacaatgcaggcctgctccaacatcacaagggccgaatttgatcccacgggccaaaatcctcctcttccgccggcccacttcacccgcaaaacgacacgggcaccaccacagcaatgcgtcttttacacagctacccatacgaaaaaggcagcgcaaaatttgaaaccaggggcataacggacaattcccacggcacgaatggcgcggcactggacgggtaaacggagtggctggtacaaaaggtcgattcggttcgggacaaggcggtgcgtcacgagtggggcccgcgcttggcat

SEQ ID NO: 64120 - DNA, 291 bp, Oryza sativa
  Clone ID: PAT_MRT4530_65296C.1
atgaaggggaaccgatttcactcggtttgggcgcaagggcgcgggtggaagggccccgaattcggcggaacgtgggcggcaacggccggccatgggcggcttcggcctgggaagccgaaggtagtaggaggacctgacaagtggggtcgccgggcccacctgtcggggagggagagaaggaggagaccgagggggttattcagactttgtgcgaggggaagtcgatcgcgccgagaagggtggggtcggcccgagagggaggagggaaggagagaggggcgagcaggctaa

SEQ ID NO: 64121 - DNA, 2544 bp, Oryza sativa
  Clone ID: PAT_MRT4530_65297C.1
atggttcgaagctgcggtgggactctccaagctgaagactttgcatacttccattgtactcggcactacaccaaacagaactcgaagtttgggtgtgtaaactttgctcctcatccgaagcgcggaagtccatggccagctgtgtctgctattcgagaaaaatgggggaacaagtggcagtcgaagtggttttatcatcaaatccctgttagcctgctgaatgataaggattgtcctttttcgttctctgggaagaaaccgaaagctgtctccgagccatcagtctctttgtcgccggagttcactgccatacaacctcgaatcgaagaacttgttttgaactttagctgccgagacctggtggaagagtttgttcttctcaaaattagacctctttcgagcggctgggatatcactcttggagaaatcccagaagattgcccttccagtcttcctccatttgtggtttcgtctgatcttgtgattccagaggatatggtccgcccagttcggaaatttcttggcccttataccaaggatgagcatttgaaatttttgacacttcaaaacgggaaaaggcaaaatcgggtcttcgcctctctaggctccgatatccctgtccgggttcatcctgaaattgtccccaaactaaagaaaaagaaatctgtgaagccttcttcttcttcttctgatgatgatgttgaagtggaagatgttgacgaagaaattggtgaagaaaatgctgaagaagaagaaggcgaggaaggagctgatgaagaagagaacgactcgagtgatgatagcgactcgagtaacagttcgagcgacaactcgatcgactctgatgaagagttggatgaagatgatatccgtattgatctttctgccatccatgtcaccctaattcgagctgatgctagttttgccctttcggcaaaagaagtagcttcactgtatgttgttgccccagccaacacggttgtcgatgaagattgttcgacccaagtgggtgatactgttgagacaacaaaccctcttcgagctgatagagatttggttgcaaaaaaggcaaaaacgcccgtcaatgcggccgaaaagtccgaagcagggaagagtgctgctgatggaggtgttcgaactacaggtagttcgaaccccactccacctccgtcaccgccgttcatcgcaaccccttccccagagctgatacaaaacgttcttggtggttttagcgaacgatgtgcaaaagatggacattggcttatgggtcttcctaatttcaatgaactcggggaaagtagccatcatggcccaaacttgtgtttgaatgacctaaagtatcgccaccccctgagttcgattggtgatgaactcgagaaagttctgattactcctgatcttgaaaaggagtttttggaagaaaatgatcttatgtcctcttgggcagcacttgatgtatctgctgcacagactgcgagccttgctcgtcttcaacgtggtgttgctcggaaagctcttcgagctatttgtacgcgacggaagaaatcacttgatcgcatcgctaaactcgaaaaggatcgggattatcttcgctgcaaacttgatcgaatggccgacgagaagaaaatcaccaccgatctcgtgcgcaagttaagcggcgaaaagaaagagctttccgaagaaaagaagttgcttactgaggaaaagaagaaattactcgctcgtgaaaaagcattcgagcgaaaaatcatcgagtatcaagacgtcgctcgacaacgcgctgaatcagaagacaagatgaaggaacaagttgaggtcttggagaagaagaataaagaactcaaactcgcctgcaaaaatcaaagcgagaagatatctgctttagagctcgagaacgaaagttgccgccaacttcttctgaaaagttgcgagaccgttcgaatcgcgttgcgaagtctaggggctgacatcagcttgctatcggaagaaaatactttagcagctgtgggaaaatggttcgaggaattttccattgggctaaaagatagcgttactccctttgcatctcgctgctcgaaaactgctgtggagagcctttcggcctgtctgctttcaaatgggtgtgaacactttaccacccttaaagctgatatacaaggtatgcttaatgatgaggccaaatttgcacagcttcgagatgcagctcaacccgtcgtaaaggctttccaagtgctttactggaagaagaaaggatatgaagataccctgaggtctctccgagcatctcttgcctcaagattaaagtcacagccggccagttcgagccaacaagataaagacagtagtactccgagctcgagcgcacaggttaactcgaatcgaaaacttgtgattcgacgcaacaacactttgcctactcgaaatgtgaagcacttagcatttcgagaccctgcaaagctttcttctaccaggaccgccatctccgatgacgaactcgaagcctattatgataatacttgtatatttgcttttaagtttttctga

SEQ ID NO: 64122 - DNA, 969 bp, Oryza sativa
  Clone ID: PAT_MRT4530_65298C.1
cccacgcgtgcgcccacgcgtccgaccaaattcttgcacacgcgcagctcgagccattgtcttagtgagcaccagcgtcgtcggcctcaagcccgccgcggcggtgccgtaggcgggcgtctctctcttctagaagcgcgtgcacgtcgatggcgcctcagcgtcggctcggcgcgcgcgcggtcgacgcggtgccttgcggctccggggggtggcgggctggcgccggagatgagggcgacgctggacaaggtggtggggtcgcacaaggtggtgctgttcatgaaggggaccaaggacttcccgcagtgcggattctcccacacggtggtgcagatactccggtcgctggacgtgcccttcgagacgctcgacgtgcttgccaacgaggcgctccgccaggggttcaaggagtactccagctggcccaccttcccgcagctctacatcgacggcgagttcttcggaggatgcgacatcaccgttgatgcatacaaaagtggagagctgcaggaaacactagagaaagcaatgttatcttagtataaacgtcgaaacacaccatagagtacatataaatggtatatggtcctttacgatgtactcttcagccatgacaaagaactggtgatgctaagattgtcaacagttcaattcatcaagcagtgaggtccaactcgaacgtgcaattgtactcatgactaataaattttaatattgatgacaaatacttcctgttgcaacactcggatgtcacagctctaaatgtctggatctctaaatgtctggatggtattctcttatagagctgaggcgatgatcttgtacctaaaaagatccaaaacttggagcgaaatcttttgcccaagtagtccaatctatttgtttttcatcgctcttaaatgtactactccttaactgatactccctccagtttgatattaagtgacgttttggacaggattgcat

SEQ ID NO: 64123 - DNA, 2802 bp, Oryza sativa
  Clone ID: PAT_MRT4530_65299C.1
atggggaaaaacaagaaaactgcggaaaagtcgaagtccaagaaatcaaaaaaccacgaaaatacttcttgtggtattggtgcctcttcgattaaggacaaaaacttaaacgatcttgttgatgttgtgggagaatcaaggccttctcccaagctgggatacactcttgtgtttgaggatttcttctacgccgggtttaaattcccgtgcagcacttttttggtcgaggtcctgaaattgttcaaacttgagtttcctcaattgactccgaatgctttagttcgaattgggcttttcgaatggatggttcgaagctgcggtgagaccccccaagctgaagactttgcatacttccattgtactcggcactacaccaaacagaactcgaagtttgggtgtgtaaactttgctcctcatccgaagcgcggaagtccatggccagctatgtctgctattcgagcaaaatgggggaacaagtggcagtcgaagtggttttatcatcaaatccctgttagcctgctgaatgataaggattgtcctttttcgttctctgggaagaaaccaaaagctgtctccgagccatcagtctctttgtcgccggagttcactgccatacaacctcgaatcgaagaacttgtttcgaactttagctgccgagacctggtggaagagtttgttcttctcaaaattagacctctttcgagcggctgggatatcactcttggagaaatcccagaagattgcccttccagtcttcctccatttgtggtttcgtctgatcttgtgattccagaggatatggtccgcccagttcggaaatttcttggcccttataccaaggatgagcatttgaaatttttgacacttcaaaacgggaaaaggcaaaatcgggtctttgcctctctaggctccgatatccctgtccgggtttatcctgaaattgtccccaaactaaagaaaaagaaatctgtgaagccttcttcttctgatgatgatgatgatgttgaagtggaagatgttgacgaagaaattggtgaagaaaatgctgaagaagaagaagaagaggaaggagctgatgaagaagagaacgactcgagtgatgatagcgactcgagtaacagttcgagcgacaactcgagcgactcgtctgaatctgatgatagcaaaacagttcctcctcctactgttttagctgatttgaaaaggaagaaaactgccagcagtcctccgcctgaaccgagttctaaacgagtgcagtttgttattgacagtgatgaagagttggatgaagatgatatccgtattgatctttctgccatccatgtcaccccaattcaagctgatgctagttttgccctttcggcaaaagaagtagcttcactgtatgttgttgccccagccaacacggttgtcgatgaagattgttcgacccaagtgggtgatactgttgagacaacaaactctcttcgagctgatagagacttggttgcaaaaaaggcaaaaacgcccgtcaatgcggccgaaaagtccgaagcagggaagagtgctgctgatggaggtgttcgaactacaggtagttcgaacccaactccacctccgtcaccgccgttcatcgcaaccccttccccagagctgatacaaaacgttcttggtggttttagcgaacgatgtgcaaaagatggacattggcttatgggtcttcctaatttcaatgaactcggggaaagtagccatcatggcccaaacttgtgtttgaatgacctaaagtatcgccaccccctgagttcgattggtgatgaactcgagaatgttctgattactcctgatcttgaaaaggagtttttggaagaaaatgatcttatgtcctcttgggcagcacttgatgtatctgctgcacagactgcgagccttgctcgtcttcaacgtggtgttgctcggaaagctcttcgagctatttgcacgcgacggaagaaatcacttgatcgcatcgctaaactcgaaaaggatcgggattatcttcgctgcaaacttgatcgaatggccgacgagaagaaaattaccaccgatctcgtgcgcaagttaagcggcgaaaagaaagagctttccgaggaaaagaagttgcttactgaggaaaagaagaaattactcgctcgtgaaaaagcattcgagcgaaaaatcatcgagtatcaagacgtcgcacgacaacgcgctgaatcagaagacaagatgaaggagcaagttgaggtcttggagaagaagaataaagaactcgaactcgcctgcaaaaatcaaagcgagaagatatctgctttagagctcgagaacgaaagttgccgccaacttcttctgaaaagttgcgagaccgttcgaatcgcgttgcgaagtctaggggctgacatcagcttgctatcggaagaaaatactttagcagctgtgggaaaatggttcgaggaattttccattgggctaaaagatagcgttactccctttgcatctcgctgctcgaaaactgctgtggagagcctttcggcctgtctgctttcaaatgggtgtgaacactttaccacccttaaagctgatatacaaggtatgcttaatgatgaggccaaatttgcacagcttcgagatgcagctcaacccgtcgtaaaggctttccaagtgctttactggaagaagaaaggatatgaagataccctgaggtctctccgagcatctcttgcctcaagatcaaagtcacagccggccagttcgagccaacaagataaagacagtagtactccgaggtcgagcgcacaggtgtga

SEQ ID NO: 64124 - DNA, 330 bp, Oryza sativa
  Clone ID: PAT_MRT4530_6529C.1
atgcgggcattacccgaccaccccgtcaacaaccacacaccaagctcgtcagcgccgacgccggcgctgtcgacgagctcctcctcctccgccgccactgccgcctcacgctattgggaggaggagaagcttgaagtggagcttgccaaggtgcacggcctcatcgctgccgagatggcggccgggtggagcgtgcgccacgtcggcaatgcgcggcgacacgtcggcggcgagcttgccgccgccttgctggagtccctgacggaggaggtcacggcggcgctgatgatgacgtggagcaacgaactgggcaccttgccaaacggctaa

SEQ ID NO: 64125 - DNA, 720 bp, Oryza sativa
  Clone ID: PAT_MRT4530_652C.1
atgccatctcctaacgtgctgctcgagctgtgcctcgagagtagtctagcaatttgcatagaacaccctaaaaatcagagaaaaaaaaatctactccctaacctcttccccgccacccacccgtcactttcatgttcccctcgcttcaccggctttaccactcacatcgtcggtgatgagctcctcagtggcgccatttctcccctctctcttcccggtgccacctctatccggacggccgtcgagtatattgaaacagcaaaaaggccgaaggcaactccgacggcgcgtcaaggaagccacgaatgggtcaaggcggccgccaatgccgtctcgtcgagctccgccttccgtcctctctttcttctccgcagaggactccaaggcaagttaatggctgacggctccgtggagtggccctctacagcggaggaccccgaggtgggccttggcggtggacctcgacggcagaggactccaatgcaggctgacggctccgtggtgcggtggagtggccttggcgggggctgcagatctggccgtagcgatgaggttccgcaacggctcgccgtcggccagtctgccgccaccaggttcttcctttctccagtcctcatctcctccccagctcgctggcgatttatggcgatcacggaagccacttaaggcgaggctacagttgtaatctccacaatgcgggtcgcgcccatctatcctcat

SEQ ID NO: 64126 - DNA, 2676 bp, Oryza sativa
  Clone ID: PAT_MRT4530_65300C.1
atggggaaaaacaagaaaactgcggaaaagtcgaagtccaagaaatcaaaaaaccacgaaaatacttcttgtggtattggtgcctctttgattaaggacaaaaacttaaacgatcttgttgatgttggttggatatctggtcgaaatgttgtaattcgaccagtgggagaatcaaggccttctcccaagctgggatacactcttgtgtttgaggatttcttctacgccgggtttaaattcccgtgcagcacttttttggtcgagatggttcgaagctgcggtgggactctccaagctgaagactttgcatacttccattgtactcggcactacaccaaacagaactcgaagtttgggtgtgtaaactttgctcctcatccgaagcgcggaagtccatggccagctgtgtctgctattcgagcaaaatgggggaacaagtggcagtcgaagtggttttatcatcaaatccctgttagcctgctgaatgataaggattgtcctttttcgttctctgggaagaaaccgaaagctgtctccgagccatcagtctctttgtcgccggagttcactgccatacaacctcgaatcgaagaacttgtttcgaactttagctgccgagacctggtggaagagtttgttcttctcaaaattaggcctctttcgagcggctgggatatcactcttggagaaatcccagaagattgcccttccagtcttcctccatttgtggtttcgtctgatcttgtgattccagaggatatggtccgcccagttcggaaatttcttggcccttataccaaggatgagcatttgaaatttttgacacttcaaaacgggaaaaggcaaaatcgggtcttcgcctctctaggctccgatatccctgtccgggttcatcctgaaattgtccccaaactaaagaaaaagaaatctgtgaagccttcttctgatgatgatgatgatgatgttgaattggaagatgttgacgaagaaattggtgaagaaaatgctgaagaagaagaaggcgaggaaggagctgatgaagaagagaacgactcgagtgatgatagcgactcgagtaacagttcgagcgacaactcgagcgactcgtctgaatctgatgatagcaaaacgcttgttattgacagtgatgaagagttggatgaagatgatatccgtattgatctttctgccatccatgtcaccccaattcgagctgatgctagttttgccctttcgacaaaagaagtagcttcactgtatgttgttgccccagccaacacggttgtcgatgaagattgttcgacccaagtgggtgatactgttgagacaacaaaccctcttcgagctgatagagatttggttgcaaaaaaggcaaaaacgcccgtcaatgcggccgaaaagtccgaagcagggaagagtgctgctgatggaggtgttcgaattacaggtagttcgaaccccactccacctccgtcactgccgttcatcgcaaccccttccccagagctgatacaaaacgttcttggtggttttagcgaacgatgtgcaaaagatggacattggcttatgggtcttcctaatttcaatgaactcggggaaagtagccatcatggcccaaacttgtgtttgaatgacctaaagtatcgccaccccctgagttcgattggtgatgaactcgagaaagttctgattactcctgatcttgaaaaggagtttttggaagaaaatgatcttatgtcctcttgggcagcacttgatgtatctgctgcacagactgcgagccttgctcgtcttcaacgtggtgttgctcggaaagctcttcgagctatttgcacgcgatggaagaaatcacttgatcgcatcgctaaactcgaaaaggatcgggattatcttcgctgcaaacttgatcgaatggccgacgagaagaaaatcaccaccgatctcgtgcgcaagttaagcggcgaaaagaaagagctttccgaagaaaagaagttgcttactgaggaaaagaagaaattactcgctcgtgaaaaagcattcgagcgaaaaatcatcgagtatcaagacgtcgctcgacaacgcgctgaatcagaagacaagatgaaggaacaagttgaggtcttggagaagaagaataaagaactcgaactcgcctgcaaaaatcaaagcgagaagatatctgctttagagctcgagaacgaaagttgccgccaacttcttctgaaaagttgcgagaccgttcgaatcgcgttgcgaagtctaggggctgacatcagcttgctatcggaagaaaatactttagcagctgtgggaaaatggttcgaggaattttccattgggctaaaagatagcgttactccctttgcatctcgctgctcgaaaactgctgtggagagcctttcggcctgtctgcgttcaaatgggtgtgaacactttaccacccttaaagctgatatacaaggtatgcttaatgatgaggccaaatttgcacagcttcgagatgcagctcaacccatcgtaaaggctttccaagtgctttactggaagaagaaaggatatgaagataccctgaggtctctccgagcatctcttgcctcaagattaaagtcacagccggccagttcgagccaacaagataaagacagtagtactccgagctcgagcgcacaggtgtga

SEQ ID NO: 64127 - DNA, 3369 bp, Oryza sativa
  Clone ID: PAT_MRT4530_65301C.1
atggggaaaaacaagaaaactgcggaaaagtcgaagtccaagaaatcaaaaggccacgaagatacttcttgtggtattggtgcctcttcgattaaggaaaaaaacttaaacgatcttgttgatgttggttggatatctggtcgaaacgttgtaattcgaccagtgggagaatcaaggccttctcctaagctgggatacactcttgtgtttgaggatttcttctacgccgggtttaaattcccatgcagcacttttttggttgaggtcctgaaattgttcaaacttgagtttcctcaattgactccgaatgctttagttcgaattgggcttttcgaatggatgattcgaagctgcggtgggacccctcgagctgaagactttgcatacttccattgtactcggcactacaccaaacagaactcgaagtttgggtgtgtaaactttgctcctcatcccaagcgcggaagtccatggccagctgtgtctgctattcgagcaaaatgggggaacaagtggcaatcgaagtggttttatcatcaaatccctcttagcctgctgaatgataaggattgtcctttttcgttctctgggaagaaaccgaaaactgtctccgagccatcagtctctttgtcgccggagttcgctgccatacaacctcgaatcgaagaacttgtttcgaaatttagctgccgagacctggtggaagagtttgttcttctcaaaattagacctctttcgagcggctgggatatcactctcggagaaatccccgaaagttgcccttccagtcttcctccatttgtggtttcgtctgatcttgtgattccagaggatatggtccgcccagttcggaaatttcttggcccttataccaaggatgagcatttgaaatttttgacacttcaaaacgggaaaaggcaaaatcgggtcttcgcttctctaggctctgatatccctgttcgcgttcatcctgaaattgtccccaaactaaagaaaaagaaatctgtgaagccctcttcctctgatgatgatgatgatgttgaagtggaagatattgacgaagaaattggggaagaaaatgctgaagaagaagaaggcgaggaaggagctgatgaagaagagaacgactcgggtgatgatagcgactcgagtagcagttcgagcgacaactcgagcgactcgtctgaatctgatgatagcaaaacagttcctcctcctactgttttagctgatttgaaaaggaagaaaactgtcagcagtcctctttcgagcggctgggatatcactctcggagaaatccccgaaaattgcccttccagtcttcctccatttgtggtttcgtctgatcttgtgattccagaggatatggtccgcccagttcgaaaatttcttggcccttataccaaggatgagcatttgaaatttttgacacttcaaaatgagaaaaggcaaaatcgggtcttcgcctctctaggctccgatatccctgtccgcgttcatcctgaaattgtccccaaactaaagaaaaagaaatctgtgaagccctcttcctctgatgatgatgatgatgttgaagtggaagatattgacgaagaaattggggaagaaaatgctgaagaagaagaaggcgaggaaggagctgatgaagaagagaacgactcgggtgatgatagcgactcgagtagcagttcgagcgacaactcgagcgacttgtctgaatctggtgatagcaaaacagttcctcctcctactgttttagctgatttgaaaaggaagaaaactgccagcagtcctcctcctgaaccgagttctaaacgagtgcaacttgttattgacagtgatgaagagttggatgaagatgatatccgtattgatctttctgctatccatgtcaccccaattcgagctgatgctagttttgccctttcggcaaaagaagtagcttcactgtatgttgttgccccaaccaccacggttgtcgagaaagattgctcgacccaagtgggtgatactgttgagacaacaaaccctcttcgagctgatcgagacttggttgcaaaaaaggcaaaaacgcccgtcagtgcagccgaaaagtccgaagcagggaagagtgctgctgatggaggtgttcgaactacaggtagttcgaacccaactccacctccgtcaccgccgttcatcgcaaccccttccccagagctgatacaaaacgttcttggtggttttagcgaacgatgcgcaaaagatggacattggcttatgggtcttcctaatttcaacgaactcggggaaagtagccatcatggcccaaacctgtgtttgaatgacctaaagtatcgccaccccctgagttcgattggtgatgaactcgagaaagttctgattactcctgatcttgaaaaggagtttttggaagaaaatgatcttatgtcctcttggacagcacttgatgtatctgctgcacagactgcgagccttgctcgtcttcaacgtggtgttgctcggaaagctcttcgagctctttgcacgcaacggaagaaatcacttgatcgcatcgctaaactcgaaaaggatcgggattatcttcgctgcaaacttgatcgaatggccgacgagaagaaaatcaccaccgatctcgtgcgcaagttaagcggcgaaaagaaagagctttccgaagaaaagaagttgcttactgaggaaaagaagaaattactcgctcatgtaaaagcattcgagcgaaaaatcatcgagtatcaagacgtcgcacgacaacgcgctgaatcagaagacaagatgaaggagcaagttgaggtcttggagaagaagaataaagaactcgaactcgcctgcaaaaatcaaagcgagaagatatctgctttagagctcgagagcgaaagttgccgccaacttcttctgaaaagttgcgagaccgttcgaatcacgttgcgaagtctaggggctgacatcagcttgctatcggaagaaaataccttagcagctgtgggaaaatggttcgaggaattttccattgggctaaaagatagcgttactccctttgcatctcgctgctcgaagactgctgtggagagcctttcggcctgtctgctttcaaatgggtgtgaacactttaccacccttaaaactgatatacaaggtatacttaatgatgaggccaaatttgcacagcttcgagatgcagctcaacccgtcgtaaaggctttccaagtgctttactggaagaagaaaggatatgaagataccctgaggtctctccgagcatctcttgcctcgagatcaaagtcacaaccggccagttcgagccaacaagataaagacagtagtactccgagctcgagcgcacaggtgtga

SEQ ID NO: 64128 - DNA, 216 bp, Oryza sativa
  Clone ID: PAT_MRT4530_65302C.1
atgggagtagaagagtactttgctgggaaacagggacgaggtggagaaggtgatgaaggacaaggaagaggatgcggtggtgccgcaaaggggaggagggaagcgcagatccgtggtaggatggaagtgccgccacctaggtttccagggcgaacttatccccctcctctccccctctcctctggttatgcccacaaggaggcggcttatcgctga

SEQ ID NO: 64129 - DNA, 642 bp, Oryza sativa
  Clone ID: PAT_MRT4530_65303C.1
cagggaaaagatacaatttcttatttgatgatgaacttcctgcagagaaagagaaactacaaaaatcgattaagaaatcaaaggaccctaatgccattgaagaaatgaagagtcgcatcacttggattgataaacaattgaggtctcatcctaagaagaacgttgagtcagagattctgcgtgaacatattaagaaagagagggaagcaacaaagactggaaagcgaccatattatctgaagaaatctgaaattcgtgaaaggaagttgatgaacaagtacaatgagctcaaggaggcaggaaagcttgatgccttcatggagaagcggcggaggaagaacgcctccaaagatcatcgctacatgccatatcgaaggaatggagatggtgcataatgatgtctctcaagctgcctttagcttgattctttcatgatccactggtccagcgtcctgtacaacctagagcgaaagctatccatggacgtttgatttgtagctgaaatttgattactgataaccacaagctgttgtaaacttaaatcatggataaaatattgttttgtttgctgctttaatttatcattttctggaatcaaaaaaaaaaaaaaaaaaaaaaaaaaaaaaaaaaaaaaaaaaaaaa

SEQ ID NO: 64130 - DNA, 111 bp, Oryza sativa
  Clone ID: PAT_MRT4530_65304C.1
ttttgccccaaggtgctaggagacagcagagggagagttgcagagcagacgcgttccccatataccgaaccttaggtcgggcaatgtctctccttgtatttgttactttca

SEQ ID NO: 64131 - DNA, 264 bp, Oryza sativa
  Clone ID: PAT_MRT4530_65305C.1
atgcacggccaatacccaccaccatcaccacatggcaatggccatggatgctccaacgcgaaattcaccccacttgtgctgctatctctgtgcgtcgcgctccgggttttcgcgatcactcggagtcgctaagtgcaagagaagaaagaaccccacgtaagcagaaacagcaacaagactgcacgagggacccacgtgtcagtgagccacaacgagcgttgcggtgggtcccacctgcagggtgaccgggacagcacgcgttaa

SEQ ID NO: 64132 - DNA, 213 bp, Oryza sativa
  Clone ID: PAT_MRT4530_65306C.1
gactgtacacgacgaaataccaacaggcgaatcgtgggtattgaaaaacggggtgtactacacctgacaagattaccctttcctttaatatcatgtgctgagggcgacaacatgagtaagaagtctcaccaaccttgactcgggcaaagtacccacatagatcgaggctgttgaccacatcaacgagcccaagatggcatcagacaagcccct

SEQ ID NO: 64133 - DNA, 294 bp, Oryza sativa
  Clone ID: PAT_MRT4530_65307C.1
atggccggtgctccagacgaaggtgaagaagcccgcattgcaaggaagctgaagaggatcgtcaacgcaaggaggaggaacgtgcacgggctgaggaagagcacaaacgcaaataagaggaagaccgcacgacctaattcgaagtggactggatacatgactccaacgctgaacgaagtcaaaaccatgattgtcgcgacggccacacaacatgacaaggaactaggggttatcgctgagcagaggaatctttcactgagacacctaggacagctgtcgccagccatctgctga

SEQ ID NO: 64134 - DNA, 369 bp, Oryza sativa
  Clone ID: PAT_MRT4530_65308C.1
tttttttttttttttttttttcttttttctttttttttttttttaaaaacactagatgctggcaaatctgatcctgctttgaagggggagtctcctcttcaagtgaaacctttaagacgtgaactttccaagatctaccatttgcaccattttgttgcgtggagtacactataaattatttccatgtgttctttgccagcaatatttgcttggtttttccaagcagaataatgttttaccgagcactacaaagaatgtgtttaaactgagtgcttgccacagggaaatgagggatatttgatactggggacatcattttctttttctctgcattaaactatggcgacaaaaagcaaacgtttttcggtt

SEQ ID NO: 64135 - DNA, 2043 bp, Oryza sativa
  Clone ID: PAT_MRT4530_65309C.1
atggacatcgaggacggctggcgccggctagcggccgggttccagaaactgttgcgcattctcgacggggaggaaaggctatccttctcgggtgccgagtacagtgagcttctccagtatggaacgctgttcttctcgacttccttttgcttttttctgttctctttggggtttaatctaacacacattgacatggggcgtcttccgcggcgtaggatcacatataaactgtgttacgagagtcctgccggtcacgccgcggagatgtatgatcggtgggataagacaatcaggcatcacatcgtttatcaggtgctaccgtccctccaggatatgcagggagagccccttttaaagaacttcgttcatcactgggaaaaccacaaggtgttgatgaaatggctcaaatccgtctgcatgtacttgcgattggcattcactaatcagaggtcacttccacctataatggatattgctctgaatttgttcaagaacgtggtgataaaatctatacaagaggaagaggaaaggatccagaattatttgaagccatggactgaggcaagactgtcaaagacagtactcctggaattagtatccaggcaagctgaatggctacttgatgatgataaatcaggttttagaggtatccttgcggcagaaaatgatctgctagatgatggaaagagttttctccaggatttctggtggtttattgtcatggccatagccttccagcaacatattagggacatcctgcaacaggcagttggtgctgcacacatggaaaagggtaaggaaccatcaaattcaattgtagaggtatttgtattgagaatcatgaaggttcttcaaaaatacgaagcgcatgtgatcaataattttgacaatcacattttgtttcgcaaggccctggatgagaactttaggatgatctgcaacagaaacattgctgattttagtgatggggaatttttcataatattccttgagagactcattgaacaacgtacatgtggcaagctagacgatgactctgttgaagatacccttgcaaaggtcgttaagcttctaccgtacctgcacagtaaggattaccttgttgagctgtacaggaacaggctcttaggaagactatccattggttgcaacattgaggtcgagacaagctttatcacaaagctaaaactagtcttggacgtctcaatcctggaagatatgctagaagattattcaatttcaaaagaactacaaaaattcttcaaagactatatgagcatgaacccagaatcaaatactctggtggacatggacacaatggttctgaaacagggtcattttccttctcaacaaaaacagcatttatcgctcccccctgatatgctcaattgtgctgaagctttcgagaagttctatcaagagtttcatggacaagcgacaggaaataggaggggtagaacgcttacctggatctattcccttggaaattgcaatattgttggaaactttgaaggcaaatcagttgagatgattgtctcaccaatgcaggctgcattgctgctgctattcaatgaagatgatcgattaagttataatgacattgtggctaagttggaaatcatggacaatgatgcaaaagtaatgctgtattctttatcatgtggaaagtacagcatcctaaaaaaggagccgagcaacaaaacaattgctccagacgacatatttgagttcaacaataacttcagtgttaaaacgggaaagataaaggtaccgcttcatcatgttgacaggggtgatttccgtgccagtgagaccatggaagatgtcaggaggtaccggaagcaaaatgtcgattgcgcaattgtgcgtataatgaaggataggaagacattggatcatgagaaactcgtggaggaatgcaagaagttgtgtgatccttatttcaaggtcgatgacgacctcatacaaatgaggatcgatcatcttgtagccgaaaattatcttgctcgcaaggagggttgtacgtacgaatacttgccgtag

SEQ ID NO: 64136 - DNA, 514 bp, Oryza sativa
  Clone ID: PAT_MRT4530_6530C.1
cccgggctgcaggaattcggcacgagggcgtaatcaactagacggccacatcacttcaaatgctaaaaccaagtaggaggagttgtaatttttatagctagctctctatcggacgccattctaatcggactaaattatctgttctgcatacaagcaccaaatcttgtctaagtaatattcttacttcttatttgcttgagtaactgttaagcaagggactaaatctgatgttttcttgttggtgaattgaaatatagcaaacatttatttatatatatcttcttgagttgagtatactcctacctgcctccatggctgaatttagaatattaattttctgaataaagactaattagcactccatcagagtagtacaaggctcattaatatttaccagaacaattagatactaaagaatattctgatctgttggagatatagtggctggtcagaggccgctaagtggctttaccaataccatggtcaggctaacgccgtcctctctaaggactgt

SEQ ID NO: 64137 - DNA, 572 bp, Oryza sativa
  Clone ID: PAT_MRT4530_65310C.1
ttcacttttgcagggatggatcgaggttggatgtatggaacaattgtgcgacatcatagcaaagagtatagaaatggcgtattaaattttataaacaccatgtaagaggataggaaaagaagaaacaacgattacatgtgttgtccatgtgcagattgtaaaaatgagattatgtttgatagcagagtggacgtacacgctgatatgataaaacgaggattcatgaagggcaacacatgttgagtgaagctagagagcaagagtcagtcggtgatgttgcagctgtagacagaagtggtggcacacaaaatcaggaagatgaagatgggtatgatatatttgtaccatctccattgggcagtgaaatggttgatgtggatcacgatctgctgcccagacatgttgcgtgatgctgaggacctagcttacaatgagagagattccatgaagtttagtaggatggtctgtgactaaaagatgcctctatacgctggttgcaaggcaaaacacaccaaattgtcagctaccttggacctagtgaagctgaaagcaagtagtggatgcacagacaa

SEQ ID NO: 64138 - DNA, 2457 bp, Oryza sativa
  Clone ID: PAT_MRT4530_65311C.1
gcacgaggctctctctctctctctagactccacttcccccaatccgcgcgagctcaacctcctcctcgggcatgtccggcctcctccggtggaggcgcctcgccgccgtggccacgcgggcggcgtccaccctgaccgcgccggagtgctgctccccggcggtggtggcgccgccgcaccggcgcgtgcaggaacggcgcaagtgggagggccccacctcctcctcgtcgtcgtcgtccgacgagcacgagccgcggcgcatccgcgcggaggcgcactgcccgcgctgctccaagcacatggacatcctcttctcccaccgcgcgccgccgtcctcctccgccgccgcgggcgcgggcgcgggcggcggtgggtaccaggcgctcaacctctgccccaactgccgcagcgcctacttcttccgcccccacctcctcgcgccgctccagggcaccttcgtcgagatcggccgcgtccgcgccgacctgctcccccacgacgccgtcagggccaggggcgcttccttctgggaggccatccgtgggagctcgtcgtcgcgggacgacggggacggcggcggcgtggccgtgcacgtgccgcccggcccgccgttccaccccaacctcaacgtcgtccgcgtcgccggaggcggtggcggtggcggcggcggaggaggaggaggagcaggtggtggcggtggtggtgaggagggtgcggggaaggacgggtggggcgggtcgaacctcgggaaggatttgcctacgcccaaggagatatgtcaggggctcgataagtatgtgattgggcaggacagagccaagaaggtgctatctgttgcagtgtacaatcattataaacgaatataccataaatcattacaaaaagggtctggagcagatttgggtggttttgatggagaagctgatgatgacgatggtgttgaactagagaaaagcaatgttctattaatggggcctactggctcaggtaagcatttgcccccaaattcaaagttgaatgttgatgtaatgggaactgtcaattatttcttctacaacactagatcaactataacagagagggcactcagcactgtttttttggatactttgtttgtttcacaggtggcagattttaacgtgcaagcagcacaacaagggatggtgtacatcgatgaagttgataagatcacaaagaaggctgagagccttaacattagtagagatgtctccggtgaaggtgtccagcaggctttgttgaaaatgctggaaggcacaattgtcaatgtccctgagaaaggagcaaggaagcatcctcgcggtgataatatacagatagatacaaaggacattctttttatttgtggtggtgcttttattgacttggagaaaactatatcagagaggcggcaagattcttctattggctttggggcacctgtccgtgctaacatgagggcaggtggcatctcaagtgctcaagtgacatcatccttgttggaatcagttgagagtggcgacctaatagcatatggacttattccggaatttattggacggtttcctatccttgttagcttggcagctctaaacgaggaccagcttgttcaggttctcatggagccaaaaaatgctctgggtaaacaattcaagaaattattcagcatgaataatgtcaagcttcattttacagatgctgcacttagaataattgccaagaaggcaatgtccaaaaatacgggtgcacgtggtttaaggactatccttgagaatattctcatggatgctatgtacgagattccagatgcaaaatctggtgagaagcgaatcgatgcggtggttgtagatgaagacgcagtcggagcagtggaccaacctggctgcggagctaagatcctttatggcgatggtgcttttgaacgttatctctcccagataaaggtagcaggggatgcagcgggaagcgaagcggatggagaagccgagctttcctcttcaagagccatggggatgtgatttattggttctcacatctcctgtataaccctgtaaaatctaatcccagatgtaataatgtaagtattagccttgtaaaggaatattgtgtgtagtgtctattgctagttaaaaaggctccagcgcaatgttcagcacccccacgctctttacttaatttgcagcagggtttggaaagagtatatagctcaggggatatttatgggtgtcgtacagacaaccctggttgtcatgaaaatgtaatgtccaagaattgtgatgactgctgatggatgtaaaaaaaaaacttagaaacaatgaaacgcattgaaagggggaaggaaatgccaataatgctgttgtcaaatgttggtgttgttcagtgtttacgtgatagtggagcccattttggaaaggcagaggaaaatctggaattttacaggactgaaaaaaaaaaaaaaaa

SEQ ID NO: 64139 - DNA, 207 bp, Oryza sativa
  Clone ID: PAT_MRT4530_65312C.1
atgactggagaaaggggaggggagaggcctgtggaggtggcggtgctcgttgccaaggtgggaagaggagagaggccacagcagtggcaaagcagcatctcagtggtggggaaggataggttggaggtaccagctggcacctatggtgacgcgctaggcgggcgagaatcggagctcgaatgcttgagacgatataatcttacataa

SEQ ID NO: 64140 - DNA, 529 bp, Oryza sativa
  Clone ID: PAT_MRT4530_65313C.1
aaagggtctggagcagatttgggtggttttgatggagaagctgatgatgacgatggtgttgaactagagaaaagcaatgttctattaatggggcctactggctcaggtaaaactctacttgctaagacattagctcgctttgtgaatgtgccatttgtaattgctgatgcaacaacattggcacaggcagggtatgtaggagaagatgtagaatctatactatacaagttactggcggtggcagattttaacgtgcaagcagcacaacaagggatggtgtacatcgatgaagttgataagatcacaaagaaggctgagagccttaacattagtagagatgtctccggtgaaggtgtccagcaggctttgttgaaaatgctggaaggcacaattgtcaatgtccctgagaaaggagcaaggaagcatcctcgcggtgataatatacagatagatacaaaggacattctttttatttgtggtgggcttttattgacttggagaaaactatatcagagaggcggcaagattc

SEQ ID NO: 64141 - DNA, 357 bp, Oryza sativa
  Clone ID: PAT_MRT4530_65314C.1
gccatctttctcagctctcacagctcactgcatcaatggccgcggccaccatggcgctctcctccccggtgatggcccgcgcggcgccgtcgacctcctccgcgctcttcggcgaggcgcggatcaccatgcgcaagaccgtcgcgaagcccaagccggcggcgtggtcggggagcccgtggtacggcgccgaccgcgtgctctacctcggaccgctctccggggagccgccgagctacctaaccggcgagtctccggtcgactacaggttggacagacgggggctttccttcacccacagatacgggagcaggaacccagcgaagttgacaacaacgagcacaagtttatgctgaa

SEQ ID NO: 64142 - DNA, 213 bp, Oryza sativa
  Clone ID: PAT_MRT4530_65315C.1
atggaggttgcggtgcgagagattgctacgtactggtttgaggaccagcgaacgtgtagaatgatctctcgaacaccaatgaaggttgcggtgcgagagattgctacataccggttcgaggaccagcgagcgtgtagagttctctcgaacactaatggaggttgcggtgtgagagattgctacgtgctggttggagaaccagcgagcgagtag

SEQ ID NO: 64143 - DNA, 343 bp, Oryza sativa
  Clone ID: PAT_MRT4530_65316C.1
tcttagccaaaatgccaattattcggccaattcttccaaagaaggaaaggagggcttccaggagggccttccaagccaattaaccaggaagggagaattgagtttccgggtggcaatttccaccttcccccgcccaattaccagaggccttaccccaagaaccgtttttattgattgttggccgggaatcccttccttaagttggccaattccagataaagaataactaaataaataaataaataaattccaaccattgcgttctgctatgtactgtaaaagtttcttataatatcagttctgaatgctaaggacatccctccaaaaaaaaaaaaaaaaaaaa

SEQ ID NO: 64144 - DNA, 518 bp, Oryza sativa
  Clone ID: PAT_MRT4530_65317C.1
ttcatgttcagggtgtggaaggtgtcgcccaggaacggtctgcacaagcgcgtcggcagcctgccccggctgcgcgacttcctccgcggctggctcaacccgtccaactacgtcgaggtccgcaagaaccggacggcgctctggatccgccacagcgacgccgtgtcgtgcctgagcccgacggactcggcgcagggcctgctctactccggctcgtgggaccggaccttcaaggtgtggtggatcaacgactccaagtgcctcgagtccgtggtggcgcacgacgacaacgtgaacgccatcgtggcagcgttcgacgggctggtgttcaccgggtcggcggacgggactgtgacagtgtggaagagggagctgcatgggaaagggaccaagcacgctccggtgcagacgctgctgaagcaggagcacgcggtgaacgcgctcgccgtgagcgccgtcgcgcccgagctctactgcggctcctccgacgggctcgtcaacttctgggaaggggagcg

SEQ ID NO: 64145 - DNA, 654 bp, Oryza sativa
  Clone ID: PAT_MRT4530_65318C.1
atggttattctcctccaagctttcaagctactcaacgtcaaggaaattggatacaagctaactcaccaaatcaagtgtttggagctgcaagcaacagagtactctttgcaccacatcaaagtcacctcagttgaagttgctgccaacacttcttcccatgggtcggagtcatccattccttgccctacaactacaagacagcaagagaagcagccacttaacatcgaagagttgagtgatagcagcgaagagggagtgaggagagcgccacgcaccaattggaaggaagaagaaaacttgcggtttgttagcgcttggttgaacaactcagttgattctgtagatggaaatgataagaagtcagagtattactggaaggatgtagctgatgagttcaacagcaatatgcctagaaatgcacatacaaggacagtcaagcaaatgaagacacactgggataatgtcaagagggatattgcaaagttctgtggggcttatgctcaagtcagaaatacatgtactagtgagtactttgaagacatgattatggagaaagcccatacatggtacaagaatcaagcacagcagaaatctttcaccttagagtacatgtggagagaacaaaaggatcaaccaaaaggcccacccatatag

SEQ ID NO: 64146 - DNA, 385 bp, Oryza sativa
  Clone ID: PAT_MRT4530_65319C.1
gggggtaaaatttttttttttttttttttttaaaaagggcccaaaaaactaaaaaaaaaaccccccaaaaatttcaaaaacttggggcataatttttttgaaccccccataccatttcattaggccaacaccttaaggccccggtcccccaccaaattaaaaaacccggggaggcttgttgttaaacacaccccggggcccccccggaaaatccggaccgggccccggaggggtaccaactttccctaaaaggaggggaataaaaactgggcggaaaaaggggaaaagctgttccctggggaaaaaggttatcccctaacaattccacaaaaaaaacaagccggaagaaaaaaaggaaaaacccggggggccaaaaaagggaaca

SEQ ID NO: 64147 - DNA, 339 bp, Oryza sativa
  Clone ID: PAT_MRT4530_6531C.1
ctagtcgaggagacgctcgaaggcatagcccatgaggaagtccgacatggtctccgggagcgggcggaggccggagcccgcgccgtcgtcgtcgccagcagctacggcagcgggggagcggtgaggcacgatgacggggttgaatggcgagcggtcgctagccgccgccatctcctcgaggatgacgccgccgtagtccgggcaggcgacgatggagtcttcgtgaggggcagcgtgcacgaaggggtcacagctgtagcaccagtagtaggaggacgccggcgcggcactggtggcggaaggggaggaggaggaggaaaaggaaggggaagaagccat

SEQ ID NO: 64148 - DNA, 246 bp, Oryza sativa
  Clone ID: PAT_MRT4530_65320C.1
atggtgcccgggcaccatggtttcaaatgcacaaaattactcaaatttttcaaaatttttaaattagttatattaaaaacaactagtacgataacaataaaaatattgtcggactttggacttggcaaggctagtgtcagacactcagacttggatcttcgatttacagccatcggataccatgtgtccatcttgagaaccgggacaatcttttttaattctgctgcatctgaagatcatcagttc

SEQ ID NO: 64149 - DNA, 1406 bp, Oryza sativa
  Clone ID: PAT_MRT4530_65321C.1
catgaaagagacagttctgttatgtattgacttatcgagcgataaaaaattgtgaaataaattcaggcacaaagctctgatgacaatattttcagggattaagggttggaaattggaacaggtgaacagtcattagaaaggaataatggcaaatagtcatcagaaatgaatagtggcaaatagagcaagcgctcatcatgacaatggagctatcgttgttagccatgctggtgttacaatggattctgaatttctgatcgtcagaaacttatgatattcctcctccagattctgttctttagggctccaaatggaccacgtgtttgaagaacgcatagaatgggatggccgacgtggacaaacaggacccgagagtcctaaccacatttgccacactctgctccccatttatgagaagtggagattacaaccctgcaatacaagcagacaattgctactgtaactatccagcagtacttcaaaaatctttctgtaggacaaaattcaattgatgaaattggagagccaagatgaaccttcttgctcaagtgcaaaacttccatctttttaacatccacaacgcagaaatcactatcatggcttcctaatgcgagatactttccatccaagcttactgaaagtgtggagatatgcttttccaaaagcctcttgtacccgatcctcttccaattacttatgtccaaaaccacagtcacaacgttatgacctttcacaagtgtgcagaacaggaaaggtttatttccatccctagaaaagcagcagcactcaatcttctcatccgaagatctactcaaattgacaagcggcgctccctcatctatattccatattcttgcagaaccatcagtggatgttgagactaacaactcggagtctaagctaatgtccatgtctctgaaagatttatgagcttttggttcacccagaagcaaattcagatctggccaatgaaatattctaagatgcccatcctcaccaccaacagcaaacttcgcaccatctgtactgaatgacagacatttctgaggtccaattgattgcagagttggagcatcctttgaaataaggtgaacactggattcttcagtcaccagcttgaataacctgcaccctttcgcggtggcgcagacgaactcgtcgccgctcgggtgcacggcgatcgcgcgcggggcgtcgtcttcctcgtgtcccatcacgaagctcaccagggggtcggcggcgacggcggaggcgccggcgtcgaacgcgtggaggtcgatgcgcggcggggacgatgccgtggaggcgcggccgtacacgacgaggaggcgtgccgggccgcccccgccccgccgccgcgcccacgccgcgcaggtcgcccttccaatcccgacctccgccgccat

SEQ ID NO: 64150 - DNA, 2099 bp, Oryza sativa
  Clone ID: PAT_MRT4530_65322C.1
atgcatgaagcaagtgaagtgaaaatcccggctaggcctaggagtaatactatatgcaatccgaggctcgacgtgatcgtggcggccaaccacagcgtcttcatcaagggagtactttcgctagctatatgcatgcaggtgtccactgccgttggcagttgcgactacgcctcaaccgtgccggccgctatagtgtctagtggtagtggagtagtaaatcacactagttactgtacatgcagatccatagacatcatgctgcaactgccgctgccatggccactagctctgcacctgaactgcacaaatggagtggagtagtagtactctgctccagcaacatccaaagcataaggaagcaacaagctaagaagcagcatcattcactccacgagctagcaaaaaggatagcaatggtggaaccggggagagcgcgggagacgaaggtcaccgcctcagcctcaagctctgcaggctcagacgccgctgtcatgaagaagaagaagaagaagaagaagaagctggtggtagcaagcaggaaggtggatgagaaagacaagaagcaggtggattacaagtgcagtagaagcagcggcagagacgagtgctgcaaggtggagagccgtcatcagcagtgcacagagccggagagcccttcctacagaaacagcagcagcagcagccacgccggccaccaccaccaccgcgccgccgacggcaagaagctcggctgcaattccgcctccatctgcaaggtcaagcaagacaacccgatgcagcagcacatgcgcagggcggaggatgagctcaaggtgaaggacaagccgccggtcgccgagccgtactgcaagcgcagagcttcggtgagcgcgtgcaacatcagcagcgagcggtcggtgaagaagtcagtgaagcagcagcagcaggaggcgagcagcagcttgcagtcgtcggcgtcgatatcggcgtcgtcgtgttcgtcgacggcgggtggtggggggtcgttccgggggatgcagcagttgagcctgaggcggctgtcggggtgctacgagtgccacatggtggtggatcccatcagcggcgtcttccgggacagctcctccatgagggccaccatctgctcctgccccgactgcggcgagatcttcgtcaggcccgactccctccacctccaccagtccatcaggcatgcagtgtcggagctgggggcggaggacacgagcaggaacataatatcgataatattccagtcgagctggctgaagaagcagagccccgtgtgcgccatcgaccgcatcctcaaggtccacaacgccgcccgcaccctcgcccgcttcgacgactaccgcgccgccgtcaaggccaaagcaatggcccaccgccaccctcgctgcaccgccgacggcaacgagctcctccgcttccactgcgccaccctctcctgcgacctcggcctccacggcgccacccacctctgcgaccacctctcctgcgccgcctgcgccatcatccgccacggcttcaggccgcccgcgccgggggccggcatccgcaccatggccaccagcggccgcgcccacgacgccgtcgtctcgtccgggtcggagggcgaccgccgggcgatgctggtgtgccgggtgatcgccggccgggtgaggagggaggaggcggcggcggcggcggcggaggaagaggaggaggagtacgactcggtggccgggacgacgccggggctgtactccaacctggacgagctggacgtcttcaaccccacagccattctcccttgctttgtcgtcgtctacagggcctgatcgattagtgatcattaaccaataataataatcttagctagcatcatttccttcactcttcgttaattgcatgtaatcaatcgatcgatcgatgatgatgatgatcccatttataattaattaattcatcgttaatgtctgattattgtactatctgatcgatcgatcggtattgactagtgatcagcgtatcaatcaatttgtacaatcagatagatgtttgttagtttcttctactgaaggaggagtacattattgcatactagagctaaaaaaaaaaaa

SEQ ID NO: 64151 - DNA, 613 bp, Oryza sativa
  Clone ID: PAT_MRT4530_65323C.1
cacggacgcgtgggcggacgcgtgggcgagctagcaaaaaggatagcaatggtggaaccggggagagcgcgggagacgaaggtcaccgcctcagcctcaagctctgcaggctcagacgccgctgtcatgaagaagaagaagaagaagaagaagaagctggtggtagcaagcaggaaggtggatgagaaagacaagaagcaggtggattacaagtgcagtagaagcagcggcagagacgagtgctgcaaggtggagagccgtcatcagcagtgcacagagccggagagcccttcctacaggttagctctcaggagcctcttctcgtgcagaaacagcagcagcagcagccacgccggccaccaccaccaccgcgccgccgacggcaagaagctcggctgcaattccgcctccatctgcaaggtcaagcaagacaacccgatgcagcagcacatgcgcagggcggaggatgagctcaaggtgaaggacaagccgccggtcgccgagccgtactgcaagcgcagagcttcggtgagcgcgtgcacatcagcagcgagcggtcgtgaagaagtcagtgaagcagcagcagcaggaggcgagcagcagcttgcagtcg

SEQ ID NO: 64152 - DNA, 477 bp, Oryza sativa
  Clone ID: PAT_MRT4530_65324C.1
atggcgcaaggatttggccagcggagctccggtgagggagatcggccggtggcgaggtggtggccggcatggcaggaaagagagaaagagagtttagagagctcggctgtggagggggaaagggcgaccgcggaggtcggttcggagaggagaagggatacttggttatggtggcggcagcgtggggaagtggacgacggcgccggcttcgttcttccattggccgaaaagggcggcgcgcacacgcggcggccgtggcagcgttgggcggtggaggtggaggagtacggcacgacgctccagctaggcaaaacagctgcagcggcggcaggaccgtggcgacggcgcgatgccgtgggcggcggcgtgcccatggcgccagtggcggcgcccacaggggaggaagagagaggcggctggttgggccggctcggctgggcttcggctcagttgggccggcagcccaagaaggagtga

SEQ ID NO: 64153 - DNA, 501 bp, Oryza sativa
  unsure (1)..(501): unsure at all n locations
  Clone ID: PAT_MRT4530_65325C.1
cccataaaaagaatatcaggggcaataatttattcaccaaaaaaatgctcccaaacaaagaggagaaaccctaattttttaagaaaccaccccaaaaacatccacagtgggctacaggggcctagctaggacccaaatttccccagccagaaaaaaacaccccctcccccgggggggaggcccactttgaaaaaccccgggggggtcgcccccgcgccctcaaagtcccctttcggggaggcggggaacacctcgaacagggggggcccaaaatggggggccccaagctccctgaaaaggccccccagaaggggggggatggcctaaaacctgaaccaattgtggtaaagggggggaagttgccggaaaaaattttnccggacctgttgggggggggggggggggccagggccaaccaattggtgtttaacaaacgcccggaaacgggggagcgggaacatgggggagccaattcttgggtaaaaaaacggccccgggggg

SEQ ID NO: 64154 - DNA, 394 bp, Oryza sativa
  unsure (1)..(394): unsure at all n locations
  Clone ID: PAT_MRT4530_65326C.1
aaaaaaaatttttttttttttttttttttttttttttttttttgaaaaaaaaaannnnnnnnnnnnnnnnnnnnnnnnnnnnnnnnntttttttttttttttnnncccgggggggccccccttaaatttcagaccaggccctgaaagagaaccccttttccctttatggggcccatttaaaacggggggaaaataggggcaaattccccccccgggaaaaaatggatcccccccaaaattccccaaaaatcttcgaccgggaagaataaaggtaaaaaccgggggggcccaacaaggaacctcaccacattaatgggcgggcccccactgcccctttttaaaaagaaaaaaccgcggggccaagcgttttaaaaaatagccccccccgcggggg

SEQ ID NO: 64155 - DNA, 1874 bp, Oryza sativa
  Clone ID: PAT_MRT4530_65327C.1
gattattccagcaacgtcctttgcaaagactccgggggagttgatattacctgtggtggaagcaatgccaagtgaacttcatgtcacagttccatatcttctcagttttgtcatgggtatacctctttttagcttgcgatcctcttaaaatggctatggtcagcgttgagaacaacctttctcctccaaaaactctgcagaagttgtcagatagtctcacttccatgctgcctttgctttcagaattggcagatatcataccaagggatactcttttctggaaactcaagctgctgaagtcaggagcagcctacgctaactctcgtcttcatgctgtacaagctgaagttctacttcttgctagtggcaatgataatcttctgccaagtggagaagaggcagatagactcttcaaatcactgaaaaactgcagagttcggtacttcaaagacaatggccatacactactgttgatccttaggaaacagaatctacaaaaataccaaaggaatctcctcatgcaagcactacctaactattttggacaggaggacggtgttaatcttttatcagtcataaaaggagtaaatatgtaccgccgtggcagacaacgggatcctgtgacggattacattcccccgccctcgagtccgttcaagaaaacattcgatgaagatcacaaattgtttcaccttgcattgagcccagtcatgctgtctaccctgaagaatgggaagattgttcgtggccttactggtgttcctgaccaaggtcctgtcttgtttgtgggttatcatgcactgatggggatcgagttgagtccattgtacgaggagttcttgagagagaagagaacaagtttccgtggtatggctcacccaattttatttggaggaaaacatgagagttcgcgacaggagctgtctcggttcgatacaatttctatgtacggtggattaccagtcactgcgatcaatatgtataggttgtttgagagaaatcaatttgttttgctctatccaggcggtgtgcgggaagctcttcacaggaagggtgaagcatacaagttgttttggccagaccaaccagaatttgtaagaatggcagcacgttttggtgttactatcataccatttggttttgtaggagaagatgatgttttagagttggtcgccgactacaatgatcaaaagaacattccctaccttcgggaatggattgagtcgattaaccgagaagcccaaagagtaagggatagcgtcaaaggagaggatggaaatcaagacgttcacatacctgctttgctccccaaagtgccaggccggttctactacctatttggcaaaccaatcgaaatgaaaggtatggataatgtcgtcagagataggaaaagtgcaaacgaagtgtatttgcatatcaaatccgaagtagagagcttaatgtcatatctgaagaggaagagggaggaagatccttacagaagcatagcgcagcgtgcagtgtaccaggcatcttggggtgcttctgcagaggtcccaacatttgaaccatgaaaggttgggtgatctcgtggtactgtgattgaatgagcatcgcatcttgtgttccgaacaaacatggaaagggggtattatctgttggaagtaaatagcattttcagtaggctggctgcaagcctgcaactcttgaatcagttacacacttttgatggaacatacccccaataggccacttataccaagtgtatagtaaagtagaacagatatatctgaacgttttttttttgttatatattttaaccatgtatagtgattgatatacagactagttactgatgaatggaattcttgctcataaaaaaaaaaaaaaaaaaa

SEQ ID NO: 64156 - DNA, 411 bp, Oryza sativa
  Clone ID: PAT_MRT4530_65328C.1
atgcgcaagcagcgacgcgccctggctccctggccagccctccttcctcgcctcctccacattggtggagccaagttctcaaccctgtgtatgttgcaaaaacatgtggggtcagctgaccctacagttttaacgtggctccaccactactcctccacttccgcagttagctccttatatcctctttcaggggagccggcattggaggtggatccaaggtggcctggaggaggcaagggcggcatcgaccggcgtggtgaagcggtgcggacgagtcggggtggagaaaaccggcatgccgagcaggaagccgatggggtggacgatggggtccacgaggaagctaggaatgagtcggccaatggcacagttgcaggagaggacgctggccagaatcggaatcagaattga

SEQ ID NO: 64157 - DNA, 663 bp, Oryza sativa
  Clone ID: PAT_MRT4530_65329C.1
atcccactcccgtcactttttccatcctcccatcaatctttccgtcttccccatcctctccccgttctcctcctctccaccgccccggatgacgcccgctgacgacgccgtgctcgcccacctcgccgaccacgggtacagccgcaacctgcacctcgtcgccgagctccgcatcgagcgcgcggactccgcggtcgccttctccacgccctgcgccgcagccggcggcggcaagaagcggcagtgcctcctcctgccctcgtccaccggccaccgctctaccattgctttcctcgcattcgacgttgattctgtagacgagcaggcggcgtcactcgcggcagctggcgcggtaggccatggcgatgtgcgcggcggtgagcgcgagcgacatgaggaacatggcctccacggcgacgagctggcccttgccctgcagccccagcccggccccgtcgggcaccgggcggagcggtggccatgggagagcgtcccctcgccgtcgccgccgccgttcgccgctggccgcgaccccatgttcgtcaccgcctacacatgcacccgtacagccgcggcagcgacttcctcgactccctccttgagctcatggccgccggcaagatggagacccacatggtgaacatgccggagagatgatgggga

SEQ ID NO: 64158 - DNA, 141 bp, Oryza sativa
  Clone ID: PAT_MRT4530_6532C.1
atggtggtggctgatcagctcagcggcgcgctaggagcaatgccaagggtggtggcagagctctccagcgagataagctactgcagctcgacggaggttgtggtttgtggtgatgacagcgtggatgcgatgattctctag

SEQ ID NO: 64159 - DNA, 1446 bp, Oryza sativa
  Clone ID: PAT_MRT4530_65330C.1
atgccccgttctcgccgcggccctcccaagggcgccaactcgtcggtcgccggcgctgcgccgcgcgggggacgcgtgagtggcctcaatcaagcgtacaaccggatggcgaaggccagccgggtgcccaacccgctggccacgcccacgactcaccagggggagctcccgggaagacgtgtcgaagtgaaagaactgaagttctaccgtggatcctattctctgcattcttctgaggtgcagcagcccgcggagcagctgggccaccaggtcgccggcgacggggtggacctgcccgtggcggcccaggagcaggcgccagtcatgggccaggagggccatgtgccggcggcgcccgtgcacgcgccggagtccgatcctccggcagccgccagatctaacggcgtcttcctagggaagagcaagagcaccggcagatgcctcgtggtcagctatatcggccgtctgcggcggcctcggggcccaccagatctggcggtgggcggcgacatcgagctgaacgacctccatcggcgccaagcagaccctgccgtatcgtcggcgtcgagcagcttcgccaacgacctccacttctgcgacctcggcggcggctgctcgttcatcccctgcgtcattgttggatccgtggccagcagcagcggcgcccgtctgctggtcacctcctccaccttcatccccagcaatgttgactccagcctcgtcagctatggcttcgcctcctcgaagttcgtcaccgtcttcaggaggaggagcgttgaggtgttctgtgaggcgaggcgtcccgtgccgtgccgcgtcgccggagtgcgcaccgaggaggctgcgaggcgaggcgttctgcgccgcgtcgctggagtgcgcgtcgaggagtgtgcagtgccggccatcggagtgcgtgccggggagcttggtgccgaggaggtgtccagcggtgacgaacatggggtcgcggccagcggcgaacggcggcggcgacggcgaggggacgctctcccatggccaccgctccgcccggtgtgttacgtcgtcgccaaggcggccgtggtgtttggcgcggcgcccgacggggccgggctggggctgcagggcaagggccagctcgtcgccgtggaggccatgttcctcatgtcgctcgcgctcaccgccgcgcacatcgccatggcctaccgcgccagctgccgcgagaggaggcactgccgcttcttgccgccgccggctgcggcgcagggcgtggagaaggcgaccgcggagtccgcgcgctcgatgcggagctcggcgacgaggtgcaggttgcggctgtacccgtggtcggcgaggtgggcgagcacggcgtcgtcagcgggcgtcatccggggcggtggagaggaggagaacggggagaggatggggaagacggaaagattgatgggaggatggaaaaagtga

SEQ ID NO: 64160 - DNA, 844 bp, Oryza sativa
  Clone ID: PAT_MRT4530_65331C.1
gaagagagagcgcgaggggcgacatcgccggcggcgagaggcggcggggatgagccggaaggaggtggtggtggcggcggctggagggggcgcgggtgcggaatcgggagcggagggatcttcatctgcgggaagcagcggcggcggcggggagctcgcggaggcgctggcgcggcggcggctgtaccgggaggtgacgctggcgctgcgcacggggctgcgcgacgccaaggccgacttctccttcctccgcgcgcgggggctccgcagcctcctcggcttcctccgctccaccgcctccgccaccgacgactcgcagctgctcctcttccggcattcccagtctatccccgatctccaagttattcctgttctctttcagaactcattgcatcaaccaaaggaagatcctgttgtgaccttggatcatatatttggagtagaaccaatgaagattacaagccccccaacagataatgaaattgctctcgctcttagagtcttggaaggatgttgccttttgtatagccgatgcactgctctggcacacaagtacaaggctgtgaaggatttcgaggaattcagtggacttgagaaggttgcagagcttttaaaggatgtgcaagtagaagagcacataaggcacattgaaatgtggggagttcctactattgctaattgggcatgtttatgcgaaagaaaactctcccatacacgaacaaatgagaattttgttcggcgagcagtgcgcatcactgatatgggcagcaagtcggtttggctccactctcgacgtggagcagaggcagatggccttgcaaatacaagcaaggagagttgttga

SEQ ID NO: 64161 - DNA, 2417 bp, Oryza sativa
  Clone ID: PAT_MRT4530_65332C.1
caccgcgcgacggttgtgccgcggccccttcctctcctgtgttcagcgggctcgctcctcccctcgcggccgcggggcgcctcggctccgcggcgcctcgtgctcctccctcccctgggcgcgcccggcgccccgccactggttggaagccctacaggattattgaagatgccattctctggagggaagcatcacgtggaaccaacacaaagtggcagacctgatagtcagcttgtcaaaccatacggcaatctgccttatcctaaagaagaaactctatccagacattcggtactggggcctaatgggcttcatggcaaatggacggcacctgttactggtatcaggatccaatatccaagtaatgctgaactaaccaaaagtgatgtctctagtttagtaccatcaatcttgaaccaagacctcttatatggtcctagtagatcacaagattttatgtccatgccatcatctcgccaagctatgggagaaatcaacatcgaggcgatggcacgcccagtctccgtcgaccaccgcatcagcatcgcctactatttccgcatcgccgacaacctcctccgccaggccaacatatatagggaggagaagaatctcgtagacctttacatcatccttctgagatactcgagtttgctgtgtgagactatcccaaaacatcgtgattatcatgcattcaagctacgagaaaaggaattcttgaagaaaggcccacacaattctgataaactcttgaatgttgttaatgagcttgagactctgaagccagttgtgctacggcaaattgctgaccttaatagaggggtcacacaagaacctaatagtcaaagtggaacctctgctgcaattagtcagatggatcatcttacccaaagttcatgtttcacacagccattggttggaagccctacaggattattgaagatgccattctctggagggaagcatcaagtggaaccaacacaaagtggcagacctgatagtcagcttgtcaaatcactgcatatcgaagcccataggttcaaggtctcaagtgctggttggaacgttggatatggcaatctgccttatcctaaagaagaaactctatccagacattcggtactggggcctaatgggcttcatggcaaatggacggcacctgttactggtatcaggatccaatatccaagtaatgctgaactaaccaaaagtgatgtctctagtttagtaccatcaatcttgaaccaagacctcttatatggtcctagtagatcacaagattttccaacaaataaaaatgaggatatgcaatctgttttgtccctagacgatggccaattgtctttaccagtagaggaggcaacctctgtgtctcctggttttgaagaagaattttcccagttgaatatcaggcaaccttctcccccacctgtcatggcacaagtacatccacagcatagggcaatttctacatcaacagttgctgatctggggccaggaattgctagttctagcactggacgctatcagaatttgcatgtgccggtgacattaatggagtgttttctgagggttgctgaggcaaacactgcaaataatctggaaacatgtggtattcttgctggtactctgaaaaagagaactttttatgtgacaacactgataattcctaagcagagatcaacatctgattcacacagtactcaaaagtgtcaagctacaaatgaagaagaaatatttgaagttcaggacaaaggctcacttttcactcttggttggattcatacacatccaacacagacctgcttcctatcttccattgatcttcataatcactattcataccaggtcatgcttcctgaagcaattgcaatagttatggcacctactgatacaacaagaaagcatggtatatttcatctgacggatccaggtggtatgggtgtgatacatgattgtcaagagagtggatttcatcctcatgaggagcctctcgacggtacctctatctatgagcattgctcccatgtgtacatgaacccaaacgtgaaatttgatatggtggatctccgtgaactgtgaagcttgattccgtttggggaagttgttcacttttgacctttttctgacaaatacatgccgctgagcttatttatttgctacgttggaaggcctgttaatttgatgtaagcgtttgtaaatagctaggccattcaatttccgtgcatagggatcttgttttggaccaatgctagttctggttatggagagtggcatcacgaatgtaatatcatacatttaactggccctttttataccctacagcagaataagtatcctacagcaattcaagttctaaaaaaacctgcagcccggggatccaaaaaaaaaaaaaaaaaaaaaaaaaaaaaaaaaaa

SEQ ID NO: 64162 - DNA, 1244 bp, Oryza sativa
  Clone ID: PAT_MRT4530_65333C.1
catgataaatttctccatggtaaacaacgactataaaaaaatgtgtacatgaactcatcttaagtctgggatctggtgttgttagctattttatactaatggagatttctttcttaaggtaaacggagaccatggagggcttttcttttgtatggtccaccaggaacaggaaagtcttatttggctaaagctgttgcaactgaggctgattctacatttttcagtatatcttcatcagaccttgtttcaaaatggatgggagagagtgaaaaacttgttgcaaaccttttccaaatggctcgagaaaacgctccttccattatcttcattgatgaaattgattcattgtgtggtcaacgaggagaaggaaatgagagtgaagcttctaggagaatcaaaactgaacttcttgtgcaaatgcagggtgttggccataatgatgacaaagtactggttcttgctgctacaaacacgccatatgctctagaccaggctgtgcgccggcgctttgataaacgtatttacattccactacccgacctgaaagcaaggcaacatatgtttaaggtccatctcggggatacaccacacaacttaaatgaaagtgattttgagaacttggctcgtcgaacagacgggttttctggttcggatattgctgtttgtgtaaaggatgtgttatttgaacctgtccgcaaaacacaggatgccatgttcttctttaaggctgatggtgatatgtggatgccttgtggaccaaagcaatctggtgccgtacaaacaaccatgcaggagctcgcatccaagggccttgcagcaaagatccttccaccaccaatctcaaggacagatttcgagaaagtcctcgccaggcagagaccgacagtgagcaagaaagacttggaggtgcacgaaaggtttacaaaagaatttggcgaggagggttgacaagattatgcgcactcacttatgcatagctgctccacagaaatgtatattttatgacttcgattgttctggttggaagttggattcacagatttgtacaattgatagcctaactatgattaattacaacctgtttattgcgttaggctatcattgctcctctgtcgtcaacttatttcatttttactgtcacttatacttgaaattttccacaagtgtattaattaaggaataatacttaacgtggagcccttgtggtgcagcttgtatagtttgttctcctctggtttccgatt

SEQ ID NO: 64163 - DNA, 1591 bp, Oryza sativa
  Clone ID: PAT_MRT4530_65334C.1
gcacgaggcccccgcgagcccaacacgcagacggagctgcctcctcctccacacccccttatcctctcgctcgctccgggcgagcaatcctcgacgaacgatggcgtcgctcaccaccaccaccgccgccgcgtcctccccggccgcgctgccggcggcctcgaccaccgccccggcgtcgtccgtgtcgccggccgccgcggccgccaagcggcctcacctcgccggggacgacgcgccgtggcgggccgcggcgaccggcgccgcggggatccgccccgtcccgcgcatccaccacgcccccgtcctccgcgtcgcgcaggacgattattccgcctacgccctcgccgtcatgaagcatccggatccgataggggaggggttggccatggaggctatggtggaggcggccgggccggagtgcatcgtgcccgggcagcaggcgccgctgcggctgctgggcctcaaggtttggccccttgatatagagatgaagttcctggagccatttggacgggaactacattccatgaaaaagttgaagtataagtcatgcagcgttatggactcatctatgtcaaataagtaggcgcatggctgattagttccctccattactagccaatgttgtatccacggctcttgctgaagttacaggaccagaaaggtacaaaacttgaagagcccatggagagaaaccacattcttgcttatcttgagtcgcatcacttgatggaacaagatatagcgcggagaacacaatgacgattaggtagtactactatgtatggatccagggctgcctccaccgagttagtctaagtgttatgcgtttattgtattcatgtaacggttgtgacttgagaatataatacatatatgttcacttctttctttctttctttctttcagtagtggtctgttgtcatttcctacaaactaaatggtggtctcctgaaccataattgccagagcagatacataacatttttgtacaactatctgctagtcgaaatgcaaatgtaaaatatggttttgtctcctaagatctgtttaggactacattggcattagtttataattaccttctactgctccattagaatgataacttatcacgcctagtttgtttagaacagacatgatttttatggtgtagttactatatcgtacattccttgtgcagttcatggacaagtcatgcagcgttatggactcatctatgtcaaataagtaggcgcatggctgattagttccctccattactagccaatgctgtatccacggctcttgctgaagttacaggaccagaaaggtacaaaacttgaagagcccatggagagaaaccacattcttgcttatcttgagtcgcatcacttgatggaacaagatatagcgccgagaacacagtaacgattagctagtactactatgtatggatccagggctgcctccaccgagttagtctacgtgttatgcgtttattgtattcatgtaacggttgtgacttgagaatataatgctgagttgcaaggaaaacgaagaaaaaaaatcatacaaaataccaaaaaaaaaaaaaaaaaaaaaaaaa

SEQ ID NO: 64164 - DNA, 606 bp, Oryza sativa
  Clone ID: PAT_MRT4530_65335C.1
atgatggttgacaatattgctcgccgggaagcggaggccgacggcggtgcttccaagatcgcggcggcgctggggctgttcggcgtcgccacggcctctctgatcatcaacctggtcgccgcgttcgacccaccgcagggcttcgctgaaagcgcctgctacgacctcgctcttgtggggtccttcctcgccggaatgggccaggttggcgcggccatctgggtcgccgacgacccacgcggccaccgtgccgccgtcggcaagaagatcatgatcgcctccatcgcgccgctcgtcgtcgccatcggcctcaccggagaggcactgctctggagcggcggccatggcgccttcgcctgtcccgcccactccatgtctctgtctcgctgctgcggcgccttttctacaccagcttgcccccacctctccgtctcaattcgcgcgtgcggcggtgacacggcgcgcgagatttcgctccggctcggccacgatctgacctcgtcggcgccggcggaatcctccgtcttccgcggccaccccctcgccgcgaacctgcgccgggaggacctggttggcatcgccgttggccgtcgcacttcagactag

SEQ ID NO: 64165 - DNA, 1911 bp, Oryza sativa
  Clone ID: PAT_MRT4530_65336C.1
cttctcctcctccccaccgcgtcaaaccccaccccgaagcaaccgccgctcctccccaatccgtcaccggcgaccccaatccgcgccgccggggcccgatccccactccgatccgccgtaatccggccggcccccccgcgcgcgcgcggccggcggcggcgccgccttcgcccccgatgtacagcaacttcaaggagcaggcgatcgagtacgtgaagcaggcggtgcaggaggacaatgccggcaactacgtcaaggcgttcccgctctacatgaacgcgctcgagtacttcaagacccacctcaagtacgagaagaaccctaagatcaaggaggccatcaccgccaagttcaccgagtacctccgccgcgccgaggagatccgcgcggtcctcgatgaggggggtgggggtggtggcgccaacggcggcgacgcggccgtcgccacgcggcccaagaccaagggtaaggatggggaggggggtggggatgattccgagcagtccaagctgagggctggactcaactccgccatcatcaccgagaagcccaacatcaagtggaacgatgtcgccggcctcgagagcgccaagcaagcgctgcaggaggccgtcatattgcctgtcaagttcccgcagttctttacgggtaaacggagaccatggagggcttttcttttgtatggtccaccaggaacaggaaagtcttatttggctaaagctgttgcaactgaggctgattctacatttttcagtatatcttcatcagaccttgtttcaaaatggatgggagagagtgaaaaacttgttgcaaaccttttccaaatggctcgagaaaacgctccttccattatcttcattgatgaaattgattcattgtgtggtcaacgaggagaaggaaatgagagtgaagcttctaggagaatcaaaactgaacttcttgtgcaaatgcagggtgttggccataatgatgacaaagtactggttcttgctgctacaaacacgccatatgctctagaccaggctgtgcgccggcgctttgataaacgtatttacattccactacccgacctgaaagcaaggcaacatatgtttaaggtccatctcggggatacaccacacaacttaaatgaaagtgattttgagaacttggctcgtcgaacagacgggttttctggttcggatattgctgtttgtgtaaaggatgtgttatttgaacctgtccgcaaaacacaggatgccatgttcttctttaaggctgatggtgatatgtggatgccttgtggaccaaagcaatctggtgccgtacaaacaaccatgcaggagctcgcatccaagggccttgcagcaaaggtaagattgattgacatttcctccactgcgcatgttagaagaggcttctgatgattagcaagatttatttcctgttatgtagatccttccaccaccaatctcaaggacagatttcgagaaagtcctcgccaggcagagaccgacagtgagcaagaaagacttggaggtgcacgaaaggtttacaaaagaatttggcgaggagggttgacaagattatgcgcactcacttatgcatagctgctccacagaaatgtatattttatgacttcgattgttctggttggaagttggattcacagatttgtacaattgatagcctaactatgattaattacaacctgtttattgcgttaggctatcattgctcctctgtcgtcaacttatttcatttttactgtcacttatacttgaaattttccacaagtgtattaattaaggaataatacttaacgtggagcccttgtggtgcagcttgtatagtttgttctcctctggtttccgattcctgtccaagaataatactcaaggccaacaacatatacaagaagttaaaaacaat

SEQ ID NO: 64166 - DNA, 282 bp, Oryza sativa
  Clone ID: PAT_MRT4530_65337C.1
atccgagatatctaaggggattgctgttcaaatgggggtgcaacaccaaaaggtgatgtttatagcaattacaggaggcttagaaaatataaataaattaaatacagtctatgtaactgtaagcagctatgacaaaataaactactaccctacttgctcttcttcccttcagtcttctgatactgatatggtgggcaggtggctacctgaacagattcagatcagaatggataaatgccgggtgagatatgaaagggacattttggtacaataaagcatgag

SEQ ID NO: 64167 - DNA, 338 bp, Oryza sativa
  Clone ID: PAT_MRT4530_65338C.1
aagccgaaactgatttcaaattgtagagttgactaatttctcaatgtgacaacgcaataggccaaacctatgtattatggatgcttacgagtgtacagagaggaaagaaatggagggatatgtagtcgttttttacaatttagatgtcagtattaaagtattagagggtgctcggtttacactttcgtttgcatttttattgctttttaagtatgcatatttattttattaatttttggttttttttgcttttgtacctctttcattcttttattcttttttttttttttcaataacctcaatttctattttttttttattagtttattttttttttc

SEQ ID NO: 64168 - DNA, 189 bp, Oryza sativa
  Clone ID: PAT_MRT4530_65339C.1
atgcagacggagacaccagtcggcggcggtgaaggcaggccagcggcggagacaccagtcggcggtagcgaaggcatgccggcgatgaagatgtggacgcccatcaaggatggcttcgactatgattacaagcttaaaaggaggaacatgatagaacttcgtggattatttggtatcgagttggcttga

SEQ ID NO: 64169 - DNA, 627 bp, Oryza sativa
  Clone ID: PAT_MRT4530_6533C.1
ccgtcacgtagccggcaaggatggcgtcgaacattgaccgcgtgtatgagtcctcgtgtagcagtcgtcgcgccggccacaccagaggagtccgaaccagtgggagcatgtgcacttggcgatgatgtagtcgcgaacgccgcccccgccactgtggcccatggtgaggagtctgacgcagcagcacgtcttcgcacatggctgcaaagtggaattcgcaaggagaaaatctacactgatggtacagtaaaatggggtcttttgacctcaactggtgtgtctgaaaatttacaagatgctttgaaagataagaattggaaacttgcaatggatgctgagtatatggctttgattaaaaataatacatcgcatttagttcctcctcagaagggtagaaatgtcattgattgcaaatgggtttataagataaaaaggaaagaagatggtagtcttgatagatataaagctcgcttagttgcaaaagggtttaagtagcgttatagtatgtagactatgaaggtacctttagtcttgttgttaaggtatgtaaactgttcaccgtgataactaccctcgcccctaagacggcacgtgtgaaattcagttcatagtgtggcataatagtaa

SEQ ID NO: 64170 - DNA, 337 bp, Oryza sativa
  Clone ID: PAT_MRT4530_65340C.1
acgactcatacttaaacacgtgtgtagttgtcgccaattagcacacgctacttatgccgaacgaatgacgatcatgaggactactggggcctaataattggaaatgtgtctgatgcttgcacatatatgtcatctcggagcaacaaatacgctactcgaagcatcagataaaacgtacagtcctcacgatgagtaggactatgacattgccaatctacactaaccaaatagagattcaccttcctataagcttacattaaagggaggattagatgcacaaccggacgtgcgctattattatactcatgcaaagctatctgtaagagcaaaactatac

SEQ ID NO: 64171 - DNA, 1269 bp, Oryza sativa
  Clone ID: PAT_MRT4530_65341C.1
ttattcagcattcagtctgaggatgccccatgcctcggcgacgtgcagcttgaccatgaccatgaagttgtccgacgcgagcatttcgtcgaacgcctcgtgcgcatcccccgcccgcgcacgcgagctcatcgaggagcatgctgtgggaggagcacgtcgcgcgtcgcgccggaccaccgccgtcggtgccgtccacgtcgtagtctcgctccacctcctcttcttcgtcttccagaggtgcacgacgagagagaagccgccgccgtcgttcatcgccgcctcctccgccgtggcccagtcggccaccgtcgccatgctcccggccgacgacgccgccgacgtcgacgccaccgacaccgccggcgacgagtccgaccccgacctgaacggccccctcctccaccctctcctgtcgctgtcgctgctgcaccagctctcggcggcggcgccgccgccgccgccgtggtggtggtgcttcctgttgaaagagctctgccttagcgcgagcatgccggcgtcacgttccatgtcgatcttggaggtgtccgcgacgtcggccgtctcgaaccggaggacgaacaccgcgacggcgtcggcggcgaagagccagccgtggaggtcccacgagacgcggacgcggccgcgcgggaggtcgagcctctcgctgccgcggaacttccaccggagccgccgcacctggagcgccttctcgccgtcgatggcaacccacatgacggcgtcctccaccgcgatcgacacctcgtgcctcccccccgcgacggcgacggtggtggcgtacgcctcgccgccgccggcggcgaccgcgttctcgcggcgggtgaggaggaacccggcggacggggcgagcagcgcgaggtcgcccgccgccagcacgagctccccgtcgacgcacacatgcagggaattcctcgccacgggctccggccgccgtccggcgaggcgggcgcgggacatgtcccacgtgaacgcgacggcgtgcccgccgccggcgaacctcttgcaccctcgccgccgccacgggagcaacggccggagcaagaaccgcagcgcgggcgcggcgccctccccggcgaggtggagctccgcggcgaggacgagcccgagctgcccgcgcgaccacgtcagggtgacggtgccgaggtgcgtccagtacaccgacgtcgccgacgcggccggcgccggggacgacgacgacgaggcgcccgcgcccccgccgccgcgtgcggcgaagcaggcgagcggcat

SEQ ID NO: 64172 - DNA, 205 bp, Oryza sativa
  Clone ID: PAT_MRT4530_65342C.1
tgaagctctgcaggctcagacgccgctgcatgagtagaacagaggaatataagagccggtgttttttttaggaaggtggtttttaaagacaagaagcaggtggattacaagtgcaaaaaaaacagcggcagaaactactgctgcaaggtagggagccgtaatgagcaggcgcaatagccggagagcccttgctacaggctagctc

SEQ ID NO: 64173 - DNA, 252 bp, Oryza sativa
  Clone ID: PAT_MRT4530_65343C.1
atgtggccttctaaccgaggcgaagtggcgctggctgccagcttaggcgacacggcggtggagtatcttctcggggaagtggcagcagttctcgtcttcgccgcgggatcagacgtgagccgcggagagatgtgggtgacggagagcttctgctcgaacggtctcgccactgttttgtttggagaaggaacacgagcaagaagaatcagctgctcacattacattgctctcgaacttggagtgcagctctag

SEQ ID NO: 64174 - DNA, 482 bp, Oryza sativa
  Clone ID: PAT_MRT4530_65344C.1
aatccccacaattgaaaggttaaggggagtttattatcatcttgcaattacagggttacttaaattattcacaaggcagtttgattaaagaggggggtttatcacctctcattgaaaggaagggttttttaaattacaaaagaatttgccaacccccaacttgggggtacatacgtaaacgggatttggggaaaatttaaccggcgagggccctggggttgtaaacaaggagggccccccccccgaggaacccgggaaggggcacggcccaaaacaaaaacccggggggtccaccaacttaggggcacccggggggaaacctttcctcccgcgaataaattgggctgtaaccaccaagctttgccccgtatttgtgaacgaattggtacccacccttacccgggctttttctgccagatgcctcattttggactgaaatgccacctccaatcctcaaggggttggtgggcttgatctttttc

SEQ ID NO: 64175 - DNA, 504 bp, Oryza sativa
  Clone ID: PAT_MRT4530_65345C.1
aacctcctcaaggtgttcaagatgcacaagatgacggcgggggactggagaactgccgcggcgcgcaggatcgctgaacagggagaggggagggcaaggtgcccctcattcttgaggaaggccagaggaggaccccggctcacggtgtcgggccaggtcccgccgcctccggctgggtcctacaaggagcccgtcgtcagcggcgcgccggctggctagctagctagcttagcagctgcactgcactgcacacagtgtaacgatgagaataagggaggtgacaaacaaggtgccatgcattactgccattgccaccctgtaatttcgtatttcagctgtcacgtactgtagactgtctgaaacttagatgtgtgcctgtgaatttatgtcgatatattacatgttaataagctttttgctctcctgcatatatttcccaaataaaatcagcatcatcacctatatatccaatgaaggttttccctgtcaaaaaaaaaaaaaaaa

SEQ ID NO: 64176 - DNA, 430 bp, Oryza sativa
  unsure (1)..(430): unsure at all n locations
  Clone ID: PAT_MRT4530_65346C.1
actgcgactgtgctgacagacnnagaaaggtacactatggcgtcgtcntanttgaagccganaaaaccacttccangaagtcccccggcgtggaaaacagcgntgcnantncggcaccanctgctcctgcnccnactgcaagtgngnaagtgaaatcacnaacaaccgaacactcnccccggngagtctctncctttattagtcccccntaaaaacccccccntnaatgttggtttggtgtgtntgctgantaangccgaattaanaccccngttttttccaatnanttaaccngctgggtcncnncggcnancnntncctntttccacctntgaatttgtnttgatgtgncgttcccgggccannccccngtnaaatttttcaatcctgtttncnnggtggttgccccntnnaaanggtcttctccccc

SEQ ID NO: 64177 - DNA, 601 bp, Oryza sativa
  Clone ID: PAT_MRT4530_65347C.1
caaggatacatatggaccttatggaacaggaggaggggttcctttcagtaccccagtgaaaggcaacagtagcattgttggattttttgggtatgcaggtagatacatgcatgcgataggcgtcaacgtggatgcaggagtggacgagaacgatcggcttgcaaagattgggccatggggcggaagcgaaggaattgttaaggacatcaatgtggcagtggcacctcaccatttagaaagcgtgacgatctgcagtgctgttgtcattgattcacttgcattttcgtacagtaaatccaacgggcaaaaatacgatataggcccatggggtggtcctggtgggatgagccatacagttaagttcggctcttctgagttcttggtgcgagtttttggaacaataggtccatttcgtgcatcacgatgtgttagcaacggaaaaattgttggcttctttggtcacgcaaggtcatatgtcgaggcacttgggaggtacagtcatgttgggctgcggacagatcccgagctcacaactgcattacaaaagggaagcggaagccaggtcttggaccaaacatcacaggcgcgacttgggaactag

SEQ ID NO: 64178 - DNA, 240 bp, Oryza sativa
  Clone ID: PAT_MRT4530_65348C.1
atggcggcgcggtgccccggctgggtggcggccaggcgccgatcggccctgcgcggctgcggcatgaagcgccgggcaaaggaggaggtcgaacgccggttggaggggtggccagcagcgctgtccgcttggctcggcagagacggcggagacggcggcaacgagggaaggggaggccagcatggcggtgcaggcgtccagcggctcggccacgctcagctaggcgctggccaggagtga

SEQ ID NO: 64179 - DNA, 447 bp, Oryza sativa
  Clone ID: PAT_MRT4530_65349C.1
gatcggcttgcaaagattgggccatggggcggaagcgaaggaattgttaaggacatcaatgtggcagtggcacctcaccatttagaaagcgtgacgatctgcagtgctgttgtcattgattcacttgcattttcgtacagtaaatccaacgggcaaaaatacgatataggcccatggggtggtcctggtgggatgagccatacagttaagttcggctcttctgagttcttggtgcgagtttttggaacaataggtccatttcgtgcatcacgatgtgttgtaacatctgttacatttgttacaaatgttcgtagctatggaccttttggtcaaggaggagggactccatttgacgttccaatgcagagcaacggaaaaattgttggcttctttggtcacgcaaggtcatatgtcgaggcacttggggtctacgttcgcacatattga

SEQ ID NO: 64180 - DNA, 355 bp, Oryza sativa
  Clone ID: PAT_MRT4530_6534C.1
gtcaacacacgtgcggcaagttcaagcatggcaaagcacaggccaccatggcaaagttcaagcatggcaagcatggggcacggcatgttcggttggtgccaagttcaagaagtggaaggtaatgcgcatgatctggacgcatgctggaactctggtttaggctttaagctgaagtgcttgccgcttggctggttataagccgtaaaaaagcctctcgaatggtatctaaacaggatggaccttttgctcagttctgctcccatccctgtcctctaggattgggtacttcttatatgtgctcagtgacaatatgctggctaataattaattaatacttcgtgacgctaaaaaaaaa

SEQ ID NO: 64181 - DNA, 353 bp, Oryza sativa
  Clone ID: PAT_MRT4530_65350C.1
tttttgggtggttttttttttttctttttttctttttttttttttttttttttttttttttttttttttttttccctccccaggcaaaaagggaccctcgggcccaaattaacggcttgggaccccctcccaaggggggggatgggaaaacaaaaggcaccctattaccccaccttgaataaacggggggggggggccctgagaaaccccgcccacgttttttttctagcatagacaaagcatcccggatttcccggctggggggccagggaacccccgggcaggcaaagggtttttccggggcccgggccatgggggggaccaggggaaaaccccgggtggtgaaacccccc

SEQ ID NO: 64182 - DNA, 744 bp, Oryza sativa
  Clone ID: PAT_MRT4530_65351C.1
aaaaccgggcacagtgatgatatggacgtggaccagacctttctactactgttctaatcacattttttgaaccggacacagtattgccacactgatctgcattttcaccgctgtgcgccacagttgctccacgactttgcttcttcttcttcatcaggtcagaagttcagtcaggcaagtctttctgtgcgcgtgcgtgactcgtgcggccctttttgtgcaaaccgtggggacggatcgcgcgataaggtgaattattcgaatcgtctttagcactccaaattcgatcaggcagcaggtgcagggtcgtatggatttggagctttggacggaccagaggagggacaggattagtggggctacagtaaagcatcagagtaatcgccatcagcctatctagtagtactactgtatgttgggtctcttgaataagtcggtcagtcgttgtggtcaccattcaccaatgtacaaattaagcaggagattaaaatactactgtaccattcattaatgtagaatgaaaacgagaagtgggtattactgattcgatgactaaaacgagaagaaaaggatgtaatagtactccctccgtataggaaaaaaacgtcgttctagcccctaaccttgtttgcgatttaaacgacgttctgaaccacagccaagtcttatggacgggattgcccttgtctattcgatagccgagctgccgcaattaatccgcagcacgcccgctcgcccggtttt

SEQ ID NO: 64183 - DNA, 631 bp, Oryza sativa
  Clone ID: PAT_MRT4530_65352C.1
cggcacgaggaaatagctcaatatatcttattgcctctgtcaggcatttcaattcagctgagatagagatgtagcatccacaacaggttgaaacgagctgattactgacggatgatcagtgtcaagtgagctatacaaaatataattttcaattccaacaaattgtgaaactttaccatttaaatttgcagacaaacaagttacatatgttatacgtatacagctatggccaagttatatgtttggattaattattttttcccatgtaaatctaataatggcctggtatatatggatggttgacagcaggggagagcagcaaagctgctgcacctgaccactgcacatctttggctcttcctttctgaccactctaggagatggattacaagcgaggcaagggctccagatcaatatcatccagaagaaagtagtactaattttaaaaaaaacttgttattttatatattgcactacttataatttataatttacagatgcctaaatatataggatgttgatttattaatgtttttatcaccgaactactccacagctaaatgccagagaggatggatttctcagcaattgtctccacaattctgaagcagcgaacatacttataaaatag

SEQ ID NO: 64184 - DNA, 231 bp, Oryza sativa
  Clone ID: PAT_MRT4530_65353C.1
atggccaggggccgcgctgccctcctcatccctccactggtcaattccttcccacaagctcctttgtcccagatctataatatctggattattccccaagttatgtggttagtgaagaagttgggtgaagaaggacccgggcaagacttacatgctagctgcctctccatgaagattggagccatgttccaagaagtcattccaaaattgcaatgtctgttccagtactga

SEQ ID NO: 64185 - DNA, 1257 bp, Oryza sativa
  Clone ID: PAT_MRT4530_65354C.1
gatcaagacgaacaatgctcattccaaacggataccatacagtagtgcaattggagatcagtagatcaccagtcaccactgaatacaaaacaacaaattggagactatcgaacgaagcatacacacatactggtaagcagtagcacaccatcaaactcaatcatcacgcacgacagacaacttaaataaagaacttcagaaaaaagcaaaccaaccatttcttttggcaggcagagagcatcacccccctggatttgcaatggacaagaatgctcttcttcagttgagctttttccctgttccaattcaggcttcgtttcaatatcctgtagatgggttcagtctcacgctcctgttgagctgctgctgttgcgctccatgaacagccttatcctgaaggacgagaggatgtgctggctgcagcttattcacattccacattgctgggaaatcaactgcaatcactggacgatgacgcaattttagccacgcttgatgcgcgtgagccgctgatgctccagtgatgtgaggcagtaagagcttcctcctgaagttcttgagttcagcgagggcagtgtcagctgtttgagcagaaaacgcaagaactccttccttcagagcaggagtcgtcgctgccatccctgttctggcgccggcaatcccattgtcgccgccgacgcgggcaatcttcttgatcccgacgaaagtctcggtgaaccgacggatgtaaaccacgcggtagttcggcggcaagcggaactcgctcgccgagccaattggggcggcaaagatgccgccatccttgagcaccctgtcgacgaggccaaccctgtcgccgtccttgtcgaagtagccgaaatccagcacgaagtcgacggacaggtcccccgtcgtcagcaactcccgcggcgtgatgcgtcgcatgtcgtcgccgtcgagggcgggagggtggtggtggcagtctccatcggcggcgccgaggaagacggcgcgcgcgccgggggcgagcaggccctcgcggcggaggtcgcggagcaggagccccacctggagcgcgtccccggcgggggcctcggcatcgcggagccaggccagggagagcagcgcgacggcgaggagcaccgagcgcgcgatcacgcggaggacgcgcgggtccgggagccggatcaccacgcagccgtccggcatgagggcgaggcgggcgtgcggcgcgcggagcgtgaggaggaggaggtgacggatccgctcggtctccat

SEQ ID NO: 64186 - DNA, 447 bp, Oryza sativa
  unsure (1)..(447): unsure at all n locations
  Clone ID: PAT_MRT4530_65355C.1
atanaccagataaagatgatgataatgttataatatccaagatttgttatttttatactgaaaaataattgctatttttatagtgaccatttaagtaggaaattaaattattgggtttcctcctgatgtaagttcaccattaattattcacttcggtataaattttatagttctgaaatgtgaatacctataaaatctcgtaccccgttgtgcccttatggcccatgggatggaaatccgcccgcctttgatactacccgggtttacaatgctatagccacgccattgcacaacctttttgtaccacgtactttgtcccatataaaactggagctttgatttccaatgagaaagttggtcttgatctatctgcttaaaaaaacttctcccgtttcattccaataaaagtgtaatttaaccancaanaaaaaaaaaaaaaaaaaaaaa

SEQ ID NO: 64187 - DNA, 2214 bp, Oryza sativa
  Clone ID: PAT_MRT4530_65356C.1
atggcaacaaataagcgagtagtggagctggagcgctgcatgttgattggcgtctgtctgcttctgctatgcctcctgcacaccgctgaggcgcagttgatgcagcatccgccggcggattgcccagaaacgtgcggcaatatagctatcccctacccatttggcattggcaacaattgttccttgctagggccggcaggcgacgacttcaccgtcgtatgcaatgatagctacaacccaccaaggcccttcaggggtgactatgagatcaccggtatcgtgctggaggaaggcgtgttgaacgccagctacacagccgtgccgtatatctgctatagctcgcccaacacctcccaacaattcaccatgtcattcgacctcgccggctcgcctttcctcatctcgacgacaggcaacaagttcacggccatcggctgcaacaccctggcgatgattataggcaaggaagatatgacctactttaccggctgcatctcctactgcggtggggatgtacaaaaggccgcacccgatggctcgccgtgcagtggcctcggctgctgccagactgaactcacgccggagctcagcttcttgaacgtcacctggggagtcgatggccacaacgacactacaaatagtgcgtgggattacagcccctgcagctacgccttcatagccgataaaaactggtactccttcaagcgggaggacctcgttggcaatgccaactactttgacaaaaaaggcattcctttggtgctggactgggctatcaggagtaacgggtcttcatgcccgcacgagtctggcaagatggcaaacccggttgtgccttacggtgcttgcgtgagcagccacagctactgcgtcaacgtcaccaacaacggacacgggtacctctgtaattgctccgatggatatcatggcaatccttatctccccgaaggatgcatagatattaatgagtgtgatccatccacttataaagagaatccttgccctggtgggacatgccataacctagaaggtggctacaaatgtaaatgcaactttgggcgaagaaaagatagaaaaaacaacaattcctgtcaaccagtactatccaaatcagctacagcgctgatcgcaacaatatgtgccatcgcaatttcgtccatcgtactcattttcttgcgcatggaatatgagaagaggaagcttagagatcatttcaacaaaaatggtggtcaacttctcaaaaacataggtattaagatattcacaaaggaggaggtaggcaaaatcacaaacaattatagtatcattcttggaaagggtggcttcggtgaggtgtacaagggaactactaatgacaaccagcaagttgcggtgaagcgctccattgcagttgatgatgaggcacgcaaaaaggattttgctaatgaggttacaattcaatctcaaatcaatcataagaacgtggttagacttgtgggttgttgtttggagacaaatgtcccaatgctggtctccgcgtacataccaaaaggaagcctgcacgatgtgcttcatggtaatggcaatcacgttgcaaaatataatctcacattacaagtacgtctagaaattgctattgaatctgcagaagctctagcttacatgcattcatctgctagtcagaagatacttcatggagatgtcaagtccagcaacattctcctagatgatgacttcaagccaaaagtctcagactttggaatatctagactcatatctatagagaagaaccacactaacttcgtcgtaggggatataaactacatagatcctgtgtatatgaaaacagggatacttacagagaagagtgacgtgtatagctttggggttgtgctcttagaactaatcacaagaaaaaaggcaaggtatgatggaaacaatagcctcccaataaactttgttaaatcttacatgacggatagccaggcaagagagatgctcgatgatgatatcacgtcacctgaagtcatggactgtcttcacatgattggtaggatcgcagttcaatctttgaaggaagacgtggatgagaggcctaccatgaagcatgttttggagcaccttcatttggccaggtcgatgataccaaaatctacgagtgggcaacagtccggaagaatactgatagctagtggaatcaatcaagcaatagtcaggttcctcacaagctgctaa

SEQ ID NO: 64188 - DNA, 317 bp, Oryza sativa
  unsure (1)..(317): unsure at all n locations
  Clone ID: PAT_MRT4530_65357C.1
gcggacnncnagagnaacgtgtgggnanaatttnttaanttncaagcaaatcaaagctcatcgaagtatagctatggcattggcatcaaacaagtncgtcctctccgccatcgtgctcgcngtcctcaccgtcgcggcacggcggcgggctacggcggctacggcnacgtcggcnagtactgccgcntggggaaggcggtntcccggaacccggtcccatcgtnccggaactacatcgcgcggtggtgcgccgtcgccgggggccgcctggactccggcaagcagccgccgnggcagttcctggagccgttcttccg

SEQ ID NO: 64189 - DNA, 163 bp, Oryza sativa
  Clone ID: PAT_MRT4530_65358C.1
cggcctgctgggcctcctgacggcgaggttcggtacttggcgaaacccgtgccttcatgctaaggctttcgcctcaccatcttcgcctgtgcggccctttgacgaggtccgaccgaatgtccccgtggtgtacctccaacaagcccctcataggcaagggtga

SEQ ID NO: 64190 - DNA, 128 bp, Oryza sativa
  Clone ID: PAT_MRT4530_65359C.1
aacaaaagcatcttctgagctagattagaggacatgacactataaagatgctccaatgcacagaagcagtggaactagacctgatgaaaaagcataaggaagactcacatacctacaatactatattc

SEQ ID NO: 64191 - DNA, 705 bp, Oryza sativa
  Clone ID: PAT_MRT4530_6535C.1
atgtccttcaacggcaaggccttctccatctacctaccccctctgcagcacgtgcgattgagcggccaagctccgccgtcatcgacggcatgcatgctcgccgccgtcgacaattcagccgccgaccccgtcgacgtgaactacctgaccccgccccaaaagtgcatcttttggttcctctgcaaggcgctcgtcggtgaccgatgcccccaaaatgtggccgttgggaagggaatcttttcatcccacctcggaaagtccgagatgacatcagataccggtggcgtgacaaccttcgtcggcgctcaacgcgcagctactaccagggtccagtcggcggcgtggcacccgtcgccggcgcccaacgtgcagccgctaggttccagtcgatggtgcggcgcccttcgccaacgtcccacatgcatttgccgtcctcgatgcttccaaggatccagtcggcagtggctcggcacgatgccccatcacatcctcatccacactggctcttcatcctcaacgttgtcaagccgtcgccgtctcagctctgagaagacactgctgcagttgacatcattgccgccggacagatctgagccatggtcagggccaggggaagagttcgttggtcgggggcagggacgttcttgtccaacccggcccccaccccgccccgttgccaagcctaatggccacaacataaactga

SEQ ID NO: 64192 - DNA, 192 bp, Oryza sativa
  Clone ID: PAT_MRT4530_65360C.1
atggggagctgccatgtgactttcaaacacttgaggatcaagggcaccacagtttccaatttaattaagctcactacagcagaaggaagaataataatgtatgctgctccagcaaattatcttttccacagggctttcatgcacggggtctcctttaatttgaagctcacaaagcatgaaagggagggagct

SEQ ID NO: 64193 - DNA, 277 bp, Oryza sativa
  Clone ID: PAT_MRT4530_65361C.1
tttcttgtgggcggacgcgtgggttgtgcaccatggccattgtcggatttgatgggcctgctgcaaagcttgccaaaagaaagagaaagaaccaatttaggggcattcgccagcgcccttggggtaagtgggctgcagaaatcagagatcctcgcatgggtgttcgcgtctggcttggctctttcaacagtgctgtagaagctgtaagagcttatgatgctgaagcactcaagatttgtggtaagaaggccaaggtgaattttacagaagcttcaac

SEQ ID NO: 64194 - DNA, 306 bp, Oryza sativa
  Clone ID: PAT_MRT4530_65362C.1
atgaaccaaatccggtggagaagggcgagtgaagacattgtcgtgacggatcgtgcgaggccatttgaaactatggattatctgtatcaatcatttgagaaatggaagatgcaaagccaaagatcaagaatatttgattcgttgataatcaagaagggcattgatcaaggcaaaggtggccaggagactccaggcctgttcatgccgaggcttccaggaggctccaaaattgaacctcgggcacccgaaagggcttcctggagactcgggccaaatccaggagactccgggcctatactaacctga

SEQ ID NO: 64195 - DNA, 522 bp, Oryza sativa
  unsure (1)..(522): unsure at all n locations
  Clone ID: PAT_MRT4530_65363C.1
ccggccggggtacttcatagtcataatatctatatactcaaagaatggatgcgagagctgcaaccatcttgttgcttgtcctacttatctttcaagcaaatccatcttctgcagaggagtcctgcattatcactggtgcaaggatgttaatgtgtatgcaaccgacatgcttctgcgggtgtgagctcgacgcagcagtgcatcatgcacagctcaaagatacctggtgtgaaggattttttagaggcttttgccgatgtaaactttgcaataacagttgagtaatcgatcgatctctgcatatgttggcctcttatcgtaaggggaataaatctttatataanaaaaaaaaaaaaaaaaaaaaaaaaaaaaaaaaaaaaaaancnncccacaaacaccaactttacgctcccttaagagacaattaattgcccgcttgacgcaatcatgaaaaaaaatgctgcgccccccaaattccaattttttcccccttacaggagacatattcgccccttggagaaa

SEQ ID NO: 64196 - DNA, 1012 bp, Oryza sativa
  Clone ID: PAT_MRT4530_65364C.1
gaaacctctgggcgtgttggccaggggccccgatactgataggaactataaaatggaaggtggactgctgaagtataaaggaaggatatatgcatgagggccacttgccatagaatcaaaatgtttttttactagcctggtctcaagagggatgctgacaaaatggttagggaatatcgtatgccaagcgactaaagaagaacacaagttcatattccaggactcctcaatccttttgatatagttgacatggcttggtcacacattaccatgaatttcattataggctaccaaaatccagaggaaaggatgtgatatcggtggtggttaacagattgactaagtatgctcactttttggccttgtttcatcattattcagtggagcaggtggtggatatctttatatggatatataacatccacaaactacatgggatgccaatgggtatcataattgatggtgacaagatattcactagctgtatatttcaggaagtatttcaaatcaatgaatatgcagctgagattcaatacaggtcacctccatgaaacaaattgttagacagaaagagtgaatcaatgtctttgagtcctatatgagaaatatgaccttccaagagccccaacattggtatttatggtcggcgttggctgagtggtaatataccacatatcatacaactatcgagatgaccctattcaaagcattatataggtacacccattcaattgggtgggtttaatatagtggtgcgctatggtgctgccgtccgagtcaccggtgacgaacacgcggccgaagtcagcagcctcggtgagccagccatcagcattgtccaaggtgtgttccctaatccagtggaggaaacccgtcgcatcgtcaactgcgtataccaaattttgcctacctaaaattgcagccctacaggcgtacatcatttggtatcaggggctctcttaagctgagattaaaattttatggccctttcacaattactaggaagattgga

SEQ ID NO: 64197 - DNA, 668 bp, Oryza sativa
  Clone ID: PAT_MRT4530_65365C.1
cccacgcgtcctgttgcatcatttttcttcgatcgggctgctgaggccggttttgtaaacccgaaggcaccatttgctaaggttaaaccctcagacttcgaagaagctgcacgacgtgtttgtaaactgaatgtgaaggatgcacaggccacctacccggatgtttcagaggagaacgttccatacctttgcatggatctagtctaccagtacacgttacttgtggatggatttggtgtggatccctaccaggatattacattggtaaagaaggtgccttatagcaattcatttgttgaagcagcatggccccttggtagtgccattgaggttgcatcttcatcatagcagaaatagcttggctataacttatgaaagaaaggaaggtctcagcatatagttttggcttagttcaccgacttagtagggagtgtagatcctatgtttgaggttagattctttttttacttgattcaccatttgttgtccattttcgattctatttgtttggccgcctacaccttgacgtacacatgaggaatatagcttgcagatgttaagtactgaccattgtaaggattttttttttgtattaatgcaaagccatatcagagcctttttttcaaaaaaaaaaaaaaaaaaaaaaaaaaaaaaaaaaaaaaaaaaaa

SEQ ID NO: 64198 - DNA, 1270 bp, Oryza sativa
  Clone ID: PAT_MRT4530_65366C.1
gggctgcaggaattcggcacgaggggatcgggctgaccgcgtctcgtttagaaatatcctcgtgacttctcctcctcctgagtcgtcgtcgtcgtggtggtgctcgtcctcctcggcggcggaggcttcggggggcgggagatccgggcggcggagatggcgaagggagggggggcgctgctgccgatgtccgcggaggcggggaagggcaacgggggcgggggcggcggcggcgacgatgccgcgctgttcaaggggtccgccatgacgcggcgcggcgcggtcgccgcgctctcctacatggcctgctccgatctcagaatactgttgcgtactacacctctttctttggcttatttactctatatgttagcttcaatggaatctgtgcgtggagtcaatgttccgatgtatacaacactgaggcgcacaacagtagtctttacaatgacaatggagtatttcttggcaaaacagaagcatacgccacctataatcggcagcgtggctttgattgtatttggagcatttatcgctggagctcgagacctgtcgtttgatgctcgtctattgtctttgtggcgtactacaacattacaacagctgtttaccttgctactataaaccgtataggaaaatctagtggtctaaatagcttcggcctgatgtggtgcaacggacttgtctgtgggccttcagtactttttctgacatatattcagggtgacctgaagaaggctatagaatttccctacctctattcccctgggtttcaggcggtgctgcttttctcatgcatgctagcttttctgctaaactacactatcttctggaatacaatcctgaattctgcactcacacaatcgatgtgtggtaatttgaaggatttcttcaccgtcggaattggctgggttctgtttggtgggcttccttttgatctgcttaatgttatcgggcaaggtcttggctttcttggctctggcttgtatgcctactgcaagatcaaagggaagtagatacggatgtccagtgggggtctgaaggagagtagatattgaagtttattttggaggggccaatgtgccatactgaagtagagttcgtgctgtttgctcctgcatatgggagagaaattttgtaggttttcctgtatgtatttaacacttcagtcctcctgaatacaatttcgagtgaacagccattgttttacatttttacaaggaaatagaatataacaagatttcagtattaaaaaaaaaaaaaaaaaaaa

SEQ ID NO: 64199 - DNA, 725 bp, Oryza sativa
  Clone ID: PAT_MRT4530_65367C.1
gtcggatcgggctgaccgcgtctcgtttagaaatatcctcgtgacttctcctcctcctgagtcgtcgtcgtcgtggtggtgctcgtcctcctcggcggcggaggcttcggggggcgggagatccgggcggcggagatggcgaagggagggggggcgctgctgccgatgtccgcggaggcggggaagggcaacgggggcgggggcggcggcggcgacgatgccgcgctgttcaaggggtccgccatgacgcggcgcggcgcggtcgccgcgctctcctacatggcctgctccgtgttgctagtgatgtttaacaaagcagcactgtcttcatataatttcccctgtgcaaatgtcattacgctccttcagatggtgtgctcaacaggccttctttatgttctgaggcggctaaagataatttcatttacaaatagcgagccatccgtgccttctgatgcgttattcttcgttccgttcagaatactgttgcgtactacacctctttctttggcttatttactctatatgttagcttcaatggaatctgtgcgtggagtcaatgttccgatgtatacaacactgaggcgcacaacagtagtctttacaatgacaatggagtatttcttggcaaaacagaagcatacgccacctataatcggcagcgtggctttgattgtatttggagcatttatcgctggagctcgagacctgtcgtttgatgctcg

SEQ ID NO: 64200 - DNA, 584 bp, Oryza sativa
  unsure (1)..(584): unsure at all n locations
  Clone ID: PAT_MRT4530_65368C.1
ccagcttgttaagatgccaaggtacttgggacagatgggctgaatgcttatttgaacaaatacagaattgagcttgatcctcacttgaagcccttgttggaaggcatagcctgganaacctgggcaaagtttattaacggcagataaccaacacctagtatctcctgaggccatagatttcctcgacaagcttntacgttatgatcaccaggacaggcttactgcacgcgaagcaatggtacacccatactttcaacaagtggagagccgcagagaacagcaggacgcgtgcataataggcaagagcgaagatgtgctatgtcgatcatcagctacactcactggaggctgtgctccatcgatttcttgcttcagtcatatatgtacgagatgaatagcggttgggtcgcttggcagaaacgaacaattgccagggagcctctgttgtagcctatccttaaccgcattgagaaggaaaacaaatttattcaggttgtgagcttgagatatggttgcgaacaatattcatgtaatgtgtttgccataaaaggctatctgtttgctgttaaaaaaaaaaaaaaaaa

SEQ ID NO: 64201 - DNA, 1945 bp, Oryza sativa
  unsure (1)..(1945): unsure at all n locations
  Clone ID: PAT_MRT4530_65369C.1
atgtcggcgctgcagagctggcgcaaggcgtacggcgcgctcaaggacaccaccaccgtcagcctcgccaatctcaactccgacttcaaggatctggatgtggcgattgtgaaggccacgaaccacgtcgagtgcccgcccaaggagcgccacctgcgaaagattgcagcggcgacgtccatcggtaggcctcgggcggatgtcgcctactgcatccatgctcttgctcgtcgcctcgccaagacccggaattggattgttgcactgaagacacttgtggtgatccacaggcttctccgggatggtgatcctacattccgtgaagagtttcttactttcacacaaagagtgcggattttgcaattatcaaacttcaaggatgactccacccctgttgcttgggactattcttcatgggttcgtacatacggtttgtttttggaggaaagactggaatgcttcagggtcttaaagtacgatattgaagctgagcgtttgtcgaagcagggtcaagggcctgaaaagggccacagtagaaccagagaattagattctccggacttgctggagcaattaccagcactgcagcagttactctatcgacttattggatgtcggccagaaggagctgcaaatagcaattatttggtgcagtatgctctagctctggttcttaaagaaagcttcaaaatctattgtgcaataaacgatggaattatcaaccttgttgacaagttttttgagatgccaaggcacgaagcactcaaagcccttgaaatttacaggagagctggacagcagccaccacaatcattcctttcgaccatggaggagtatgtgagagaggctccacgcatggttccaattaaggaacctttggagtttcctgagagactcctcctgacatacaaaccagaagaatcagaagagattcctgagcctgtttctgctgaggaggaaaaaccacaaattgaagaacctgctgttgcagtgccatctactgaagtagttccaccaccacctcctaaacctgaggtcgtagacaccggtgatttattgggattaagcgatccaacccctagtgtatcagcaatagaggaaagcaatgctttggccttggctattattcctacaggtggtgagacgtcaacaagtggcacagctacactgcaagataaaggatttgaccctacaggatgggaacttgctcttgttactaccccgagcaccaacacaaactcaatggccatggacagtaatttggtgggttttcttactctttctctgaggatatttatgggtggtggatttgacaaactcattctggacagcctatacgacgagggaacctacaggcagcagatgcagcagcagcagctgtatggttcagctgcccccaaccctttcatggcgagtgatcctttcgctatgtcgaatcaagtagctcccccaccatcagttcaaatggctagcatgactcagcagccccagcagatgcctatgatgatgcagccaaatcccttcgggccaccactacagccgcagcatgcaggcattgctcaggcacccaaccccttcctcgatgctgggttcggccctttcccagcatcaaatgggatgcacccgcaagccaacccgtttggaaccgcccaacttttgtagggtcacagttaacacacgagatgggcacttgggcagtgcaaattcaagtctattgagttgcatattgcatattcagaagtgagatttgcagatgtcgcaatggtatacatactttgtattggcttctcttgggctgtgtggccgcttggcgatcttgattttttgtagttcaagcctgtaaacctcctgtgcagtagtatttgtttttttttttcaccatttgtgacggcggctggtctgggacgattctccttgtaaagaanattattttctctgattcata

SEQ ID NO: 64202 - DNA, 101 bp, Oryza sativa
  Clone ID: PAT_MRT4530_6536C.1
tctcgtcggctggatgggtcttgatgttggcccagatgcctttatgacttgctgagccgcatctgccacctgtaccacgttgattgggaacggagctatgg

SEQ ID NO: 64203 - DNA, 1037 bp, Oryza sativa
  unsure (1)..(1037): unsure at all n locations
  Clone ID: PAT_MRT4530_65370C.1
tcaccccctcggagccgccggcgtgccgctcatcctcgacggcgccgccttcgcctccacgcgccgctcgtcctcggcctccaccggcacgcgggattcctccgcctccgccgatgcgccgctcatcctccgcctccaccagcacgtgggattcctgagctggtcagcctccgccggtgccgctcgtctccgcgcccaattggtgcattgggaattgcaagttttgtaggctgccatcgaagagccggcgaattctgaaacaaaatcgaatattctgctatgatcctggcgggaagggaagggaagcgacttgcggcggagccctccccgcgtctcccccgccatcccaccaccgccgatggccgctaggcccgccaccgacggggagggcgtcgacgcctccgtaccctggtggcggcggaagcgcccgcggctgccgccgccgccgccggaggccgacgcggaggaggtgaaggcggaggcgctggcgctgatggcggcccaccccgtgctcccgcggctcgtcgtcttcgacctcgaccacaccctctggccgttccagtgtgatcgtctgccaaaagatgaacccccttatctttatccacaagctagaggtatactgaaagcacttaaggataggggaattgagatggccattgcttctcgagcatccaggaagaaaggtgttgcaaaagcatttctggaaaaacttggcattcacttcatgtttggggctcaggaaatattctacacttggagtccaaagaatgagcatttccagagtatccatcggaagacaggtgtacctttcaagtctatgcttttctttgatgatgaggccagaaatattatagcaacaaggaaattgggggtcagttgtgtgcttgtggatactggtataactctggagaagttaagaactggactaagcaactatgctaatagatcagcatcaccaaatgcagaagccgcgggcggncgaagtgctgagattacgtgggatttagatggggctactggctagttaatactagtct

SEQ ID NO: 64204 - DNA, 103 bp, Oryza sativa
  Clone ID: PAT_MRT4530_65371C.1
gcaaaactcagtcattgacacaacgaaacctcgcaaaacttgtggagcttgatgtctctattaacaagtttggctatccagttgaagccagccatgtcccaga

SEQ ID NO: 64205 - DNA, 894 bp, Oryza sativa
  Clone ID: PAT_MRT4530_65372C.1
atggccgctaggcccgccaccgacggggagggcgtcgacgcctccgtaccctggtggcggcggaagcgcccgcggctgccgccgccgccgccggaggccgacgcggaggaggtgaaggcggaggcgctggcgctgatggcggcccaccccgtgctcccgcggctcgtcgtcttcgacctcgaccacaccctctggccgttccagtgtgatgcaactacttcaggaataggaagttacatgttttgcataactactgagagtctgagtatgtgtatttacaaattacatagggactatggaaaatgtgtgtgggtattagaaaactttctggctagtcttttggttttccacattcagcaaacgggcaatgggacagtcattcgggcaactggtataatttcagcagccatcgaaatgattgtgaaattcttgggtgatcgtctgccaaaagatgaacccccttatctttatccacaagctagaggtatactgaaagcacttaaggataggggaattgagatggccattgcttctcgagcatccaggaagaaaggtgttgcaaaagcatttctggaaaaacttggcattcacttcatgtttggggctcaggaaatattctacacttggagtccaaagaatgagcatttccagagtatccatcggaagacaggtgtacctttcaagtctatgcttttctttgatgatgaggccagaaatattatagcaacaaggaaattgggggtcagttgtgtgcttgtggatactggtataactctggagaagttaagaactggactaagcaactatgctaatagatcagcatcaccaaatgcagagccggcgggcgggcgaagtgctgagattacgtggtatttagatgtggctactggctag

SEQ ID NO: 64206 - DNA, 795 bp, Oryza sativa
  unsure (1)..(795): unsure at all n locations
  Clone ID: PAT_MRT4530_65373C.1
aaaagcccggcgggcaccagcaccaaattcccccagtctgccacagccccaggcgccaccaacaaattattgacactacatttgagacaaaaaaaaacacttagacacataattaaccatgtctaccaatgggagcagcgtgatgatcagccctgtggtgcaaggaaagatgcagcagggcgtcatgaacggcatgcagaactctaacatcggcaacagcacgagtgtccctgtgtctggctccagcttcaatggcactgccttcctcagtggcaactatgctaatgcacctgcaccggctcggcaggttccaagtttttctattactggcataggagggaacgcaaccttctaagcagctagcctcagatggcaaaaggaccagcatgcataattaagcttgaacgaacgaatgaattatgtgtgctgcaaccaaataaaaaaccgcttaatagcgtgtttgtaatataatcctatatatgtatgattaaataaaatcatgggcctagctgggactaagctaaaaaggcattttaattgatacatatggattaatggattaatggatgtctcagtgtatgactcagaagatataccttgtttacatactccttttttttttccctgttaattacaatccttccaaatataaaaaccccaccngggntcctattctaangcccccnggacccctttcctataggtttcnacgggtaccgcncntccctttaaattccccacccccnnnaacnanaantacnggnccaaatanccccattgttccccncccnccgc

SEQ ID NO: 64207 - DNA, 223 bp, Oryza sativa
  Clone ID: PAT_MRT4530_65374C.1
aaggataaagagagggtttattattattagttgaaagaatggacagtttatagtaggaaaacaattggttggaatttatggagtgagttattttttattcggaaggggaattaaaaggattgtgggggattataaaagttttgggaggttttgtattggattggagtgaatggaaaaaaataatttgttttattatggttagagttttggaaatatttttttg

SEQ ID NO: 64208 - DNA, 442 bp, Oryza sativa
  unsure (1)..(442): unsure at all n locations
  Clone ID: PAT_MRT4530_65375C.1
ccaccatgcacagatcgatggcctctcaggcggtggcgcccctcctcctcatcctcatgctcgcggcggcggcggggggcgcgtcggcggcggtgcagtgcgggcaggtgatgcagctgatggcgccgtgcatgccgtacctcgccggcgcccccgggatgacgccctacggcatctgctgcgacagcctcggcgtgctcaaccggatggccccggcccccgccgaccgcgtcgccgtctgcaactgcgtcaaggacgccgccgccggcttccccgccgtcgacttctcccgcgcctccgccctccccgccgcctgcggcctctccatcagcttcaccatcgcccccaacatggactgcaaccaggttacagaggaactgagaatctgattnaggagcgttaaggnattcgggttcaaagttgnatttatcaatcaattaat

SEQ ID NO: 64209 - DNA, 835 bp, Oryza sativa
  Clone ID: PAT_MRT4530_65376C.1
aatagtgtagtatataactattgtatgaatgtgctattagattggttataaataaattggagctggtaattggctatactgttagcttgctcttagtatgttgcaaggtgcatagaaagaaaggaagaaaggaaaaaaattaaatcgttacaatacaggcgtgcatatgcagtcggctgggttgttttttttttaaacttaaacctccattaatataaaacgacagagttcactggaataaatcccagtacattgccaaacagataaagagagcataaaaccatctgtttccaatgaacggaaaactgcactagggctacaatcttcatattgaaaccacacaacagagaagttgcacatcgacagggagctgcgataatgccgtgacgaatgcaaccttgggcctccttcggcgtgcagcacgctcgacaaaccggcaatccccatccggttgcctctacgaagactgcacaaaaacggaggtctgctgttgagccatagattttggattaagcataaccggactcagcaagagatgtccacagagttcgtcattaaatctgaggagcgtgagctcaacccgaacaacaaaccctgcatggagcaagctggtaggaaacacatagaaagaaggagcccacatctaaatccccaaaccaactgaataactcgattggtggcaaacagactgttgtcttcttggatcgacttacggggatggggaagagaaatcctgtgaatcttgacggatggaaccttggcattggaagctctcgaaccgccacctcgtcgacgggctatcatcatgcaccacgagcagcaagccggacgcggg

SEQ ID NO: 64210 - DNA, 645 bp, Oryza sativa
  Clone ID: PAT_MRT4530_65377C.1
atggtcacatcaggcgcggcggccgtccccccgttcagcagcggtagatctggtgggcgccgcgagaaggtccacggcgatggtggcgtggcagggtgcggcgaggaggagcagggcggcgacgcggcaggacgcggcaaggaggagcagggcggtggcggggcagggcgctgcgaggaggtccacggcgacgaggtccaaggcggcgcgaaggtcacaggatgtggcgcgggggccgtaggcgctagcgagggggaggagaggcccacagctaaagtcgctgaggtcactgaggtcgccgaggaggctgcagtcctagcagactttgccggcaaggaggggaaatcccgatccggcgaggaggcccggcggctgctcagcgacggcggctcggcagtggtccacggcggtggcaccgctatgccggcggtccacgggggcggcgcggcaggggagcacagggcggcgtcgcagagaggaggccaaggacggcggtgcggcgaggaggcccagggcgcggcgaggaggcccgtggcgctggcgcggcagggagcggcgaggaggcccgtggcggcggcgctgcagggcacgtcgacgtggttcacggcggtgcgacggtcgcagcctgcagcgcgggggccgtag

SEQ ID NO: 64211 - DNA, 594 bp, Oryza sativa
  Clone ID: PAT_MRT4530_65378C.1
ggggatggacagtgcaggacccaccgcccttgggacgcgacgaggcccgtcgggctcgggctcgtcggcgccttgaacgacgacgaggacgacgacgacggagaggtcgacgccgcccccggcgacgccgcggcgtcgtctgtcctgaccgggcagatcaggctccgggtccagacgaactactacgcgccgtgcacggagttcggcgtcaagagcggcggcgccgccgtgcagtacgcgcctcctcctcgccgccggtggatgtcgccgagggagatgatggaggagatgtcggaggactacacctgcgtcatcgcgcgcggggccaacccgaggacgacgcacatcttcgacaaccgcgtcgtcgagagctccggcgacggcgagtacttcccgccggagctctggccaccgagcgccgccggcaagggcgacgacgacggcgacggcgacttcttgcgctactgccatggctgcagcaaggaccttggcctaggcaaggacatcttcatgtacaggggtgagaaggccttctgcagccacgaatgccgctaccacgagatgctattcgacgagggcatcgaagaactctga

SEQ ID NO: 64212 - DNA, 240 bp, Oryza sativa
  Clone ID: PAT_MRT4530_65379C.1
atggtggccatactacacccgcaggggcagaaagatcacgccgacacggggattaaaatagggtggaattgggcaggaaaagaggggggtgccccactaccaacaccaaagctagggttcttggagacctctgtttcttggctcacgtggttacagaacaacaatgccacaggaatcatcaacaaaaggaatgcaagaactagagaattggaatttaccttcagaatgcagagatcctag

SEQ ID NO: 64213 - DNA, 1848 bp, Oryza sativa
  Clone ID: PAT_MRT4530_6537C.1
atggctaaggaactcgaactccttaagtgtgtcttacccgacaaatttgtggccgggtgcattattgtgaaactatctccctcttggagatgtttcagtactgcactcaaacacaaaagacaggaatactccgtcgaggggttgattgcatctcttgatgttgaggagaaagttcgggaaaaagatgccgcgtctaagggcgatggtgggcagtctagtgccaatgttgtgcacaaaggtccaaaacaagtacaaagagaaatacaaacctcagcagagcaccaacttcaagaaaagaaaacgaagaatagcagtccaaaccaggatgagagaactagctttgtgtgtgaattgcattgtcatctagaagtgtccacaacgcaagggatgatggcacctgtagggcagtcttctaaatctgccaatgtgacaattgacaacactggagatagaagcaggtatggggctaatgcacatgtttgtgctgacatctcgcagttttcttcttatcagatcacacaagattctaccgtcctaatggggaataggtcacatgcttctgttcatggtgttggcatggaggattatagtgaagctcctcagagaagtaaaaggcaaaggatgactaagtcttttggtgattatttcactgtctacctcgtggatgacactcttaagtcaatttcagaagcatatgcatctcctgatccagactactggaaggaggctatccgtagtgaaatggattccattctcactaacgagacttgggaggtcataaagcgaccctataggtgtaaatctgtgaggtgcaagtgggtgttcaagaagaagattggtactattgaaaagtacaaggctcggtttgttgtaaagggctatactcaaaaagaacacaaatatttccttgacatttactcacatgttgctagattgaccacagttcatgtgttacttttcctagcagcctcacatagttttctcgttcatcaaatggacgttaagacaacttttcttaatggagagctggatgaggagatctatatgaatcaacctgatgggtttgtagtagaaggtcaagaagttaaggcttcgcagtcaatgaggcagataaatgtgtgtactatcaccatggcgtgggatttggaagtagctgatgttatcttaaatattaagttaattagaggtgaggataagattacactcttgcagtcccattatgtggaaaagatcttgagtctattcggctacattgatagcaaggcttctccaacaccttataatcctagcttgttgcttcgcaagaacaagagaattagtaggaatcaactggagtactcccaaatcattggctcacttatgtacctagctagcgcaacaaggcctggcatctcttttgttgtaagcaagttgagccggtttatctctaacacgggatatgatcactggcgtgcacttgaccgagtaatgcgctatctaaaaggtggtggtgctatttcatggaggtcttgcaaacagactattttgacaaggtcaaccttggaagcagagctaacggcactagatactactactgttgaggcagaatggttgcgtgatctattgatggatctatctgtagttgaaaaatcggtgccaactattgttgtgaactatgacaatcaaacggttcggagaagaaggaagaagatcgacgaggatctggtgtggaatcgagttgaatttggagtcagattgcgcatcggctggacaccgtatcggctatacatagagtatgagttgatcaaggtcgatgaagccgatggccgatactatcgatatgaatcaaatcagctggcacacccttga

SEQ ID NO: 64214 - DNA, 174 bp, Oryza sativa
  Clone ID: PAT_MRT4530_65380C.1
atgacggaaatgccctcctccgccgcggcggagcgcgaagcggtgtggggatgcatctgggccgtcggattgatacggtcggtgccaatacgtgtggccgggcagcatgccacgtcgtcagcattagtaagtgagagggaggatggatgtgctggggagaaaatagaaggttga

SEQ ID NO: 64215 - DNA, 522 bp, Oryza sativa
  Clone ID: PAT_MRT4530_65381C.1
gggggggggggttttttttttttttttttttttttttttttcacaccaaagtgaactttatttttcatcatcaacacagttcatgacacagtcgatccaacacattattgataattcatccgtttcacaatgtaagtcattctaacattttgcgggtgtatgggggtgctaatgaatctaaataagtatatatgtttagatttattagcatcaatatgaatatgagaaatgctagatgacttacattgtaaaacggagggagtagtagattattagactcacgtaatacgtctcaaccaacctagtaaacaccaacgggaacatctatcattctatctattattccacatatttttttagtttaagcatgcaggccacgcgattaattagctagattcctccatcacatcaccccctggtcgagacggccgccgccgccgccgcctccggctgctgctgctggtgctcgaccttgaccttggggaaatctatggtgccctcgccggcggcgaatgcttccca

SEQ ID NO: 64216 - DNA, 238 bp, Oryza sativa
  unsure (1)..(238): unsure at all n locations
  Clone ID: PAT_MRT4530_65382C.1
cgcaactgaagaaacttgaatgtaaattatgggacagtggtgtgtncccctgggacacctgcgtgcgtgctatgcttggtgttgtaatgtgcnagtgctataaccaactgctggataaaccccaccaaaaaaaaatgcccggcaatgtgaatgctgtgcaagcaactggaactgtatctgccggctttaattgaaatggactatcttatgttagttataaaaaaaaaaaaaaaaaaaa

SEQ ID NO: 64217 - DNA, 1333 bp, Oryza sativa
  Clone ID: PAT_MRT4530_65383C.1
ccggccggggcatcgatctgcaggcgaagtcctgcagcctccgtagcagacacgtacaacgtaccgagcaaccttagctagtggcgcctgaaaattattaagcgcttcaagatggcaaagcatggcgttgcttccgttttaacactggcattggtccttggagttgcggccattcctacagtggtgcaatctatcggcgtgtgctacggcgtgatcgggaacaacctgccgtcgccgagcgacgtcgtgcagctctacaagtccaacggcatcgactccatgcgcatctacttcccaagaagcgacatcctccaggccctcagcggctcaagcatcgccctcaccatggacgtcggcaacgatcagctcggctccctcgcctccgacccctccgccgccgccgccttcgtccagaacaacatccaggcgttcccgggcgtcaacttccgctacatcacggtcggcaacgaggtttccggcggcgacacgcagaacatcctcccggccatgcagaacatgaacagcgccctctccgccgccggcctcggcaacatcaaggtgtcgacgtcggtgtcccagggcgtgaccgccggcttcccgccgtccgccggcacgttctccgcctcgcacatggggcccatagctcagtacctggcgagcaccggcgcgccgctgctcgccaacgtctacccctacttcgcctacgtgggcaaccaggcccagatcgacatcaactacgcgctcttcacgtcgccgggcacggtggtgcaggacggcggcaacgcgtaccagaacctgttcgacgccatcgtcgacacgttctactccgcgctggagagcgccggcgccgggagcgtcccgatcgtggtgtcggagagcgggtggccgtcggccggcggcacggcggcgagcgccggcaacgcgcagacgtacaaccagaacctgatcaaccacgtcgggcaggggacgcccaagaggcccgggagcatcgagacctacattttcgccatgttcaacgagaaccagaagggaggcgacgagacggagaggcacttcggcctcttcaacccggaccagtcgccggcatactccatcaatttctaagaagattgttctgagaagagatcgatcgatgatgaattaaacgtcgatcgatatagatatatacatacacgcgttccatatatagtttgggtttgaataagctttctgcctgcatattgcaaagctcaatgcatgcatgtaacggtgcagagacaaataatatgaacttgaataaagtttaccagacctattttcgcgtagtaaaaaaaaaaaaaaaaaagggcggcca

SEQ ID NO: 64218 - DNA, 241 bp, Oryza sativa
  unsure (1)..(241): unsure at all n locations
  Clone ID: PAT_MRT4530_65384C.1
gngaacaaggagttatgttattttataatcatacgggaccagtttttttatagttagaaaaaaagagcccaaaacattttgggataaagaaaccaactgaaacattgttaaatgcataaaatgttaaaaggtggttttgttacttccgcacatagggaattaacacaaacggggggttggtttattttttttaaggctttaaaaatgggtttaagctttattttttccggttttttttaaa

SEQ ID NO: 64219 - DNA, 962 bp, Oryza sativa
  Clone ID: PAT_MRT4530_65385C.1
gagccgggggagggccggccgccggggagcgacgggcgcccccacggcgccgcgcggcagctcatcggcggggaggggagagggacacgtggcgcgcctccggtcgcagctcccgacgatagaggggaagagaagcgaggaggaggaggcgtctccgggaagacagcgagcggaggccgtggagccgtctctgcctctccgggaagattaggaggggggcaacgggggtggccgcgatgacggcgaggatgaggaggaggaggacgacgacgacgacgaggggttccggccgcgggcgtcgtacaccgttaacgcctcgtccgtgccgttcgattgggaggagaggcccgggacgccgaaggccgggctcggtggcggcggcggcggcgcggcgtgggatacggacttcgaattcggcacggccgtccggcctccaagagcgccgggtggaggaggtggcggctcagcgacctcctcctgttccggaggcggcggcggcggagggcatcgcgtctgatgcgcggcgtcgggtagtcgtggtggcggagaacgatgctgactccgcgatggcgacggcggacactacgggctttcatgcatgggtgatgggtgagacacgtagagagagaggaggagatcccattgaccggccgcttggtgaactccgcggcgttgaggatgatggtagggacggggtcggtggcagcggaggcgggaaggcgagggccggcggcagtaacgggcggtggtcatggcatcccaccgccagatttccgccgcatcccggagttccgccgccagaactcacccgagctgtcccgccgtcgctgtagctccgaccctcgcccccgtgtcgccgcggccgctccgctccgcgcatcagacgtcgggatgaggggatagagagagagagagacatgagagaaatgagagctgacatgtgggctcaaggacatttttga

SEQ ID NO: 64220 - DNA, 290 bp, Oryza sativa
  Clone ID: PAT_MRT4530_65386C.1
ggaagcaggcacgcctgcaggtgccggtacgctatacagcggtcgacctacgcgttcgcccacgcttccgggaagcacaaacggctcccacctcgtggggaagattgattatctctgcattgatctcatcggtcaacatactatcacatacttaacgagcgatgagactgattatgtgaatgctagctctatgcttacttgtgcatccagcgatgatccatttggcagcagaactgtttgagcctatccacgcatatcatgaaacgtcctttacttatgtgtactccagg

SEQ ID NO: 64221 - DNA, 248 bp, Oryza sativa
  unsure (1)..(248): unsure at all n locations
  Clone ID: PAT_MRT4530_65387C.1
gtcgngtcgaaccnaagcagagtagagaaggagaggagcggagnncnatcagccgtccnatcgagtgatccgatggctctcgctctctacanctntgctgctgctgccgctgcngccgcggcgcgngnnctcgcggcnnnggtnacgacgacgnggggttacgccgcgtcggggcatnngtcggcnaatgaggcgaacgtcagcngcgagtngaagagaagagcgctacggggattacgcaggcgaag

SEQ ID NO: 64222 - DNA, 485 bp, Oryza sativa
  Clone ID: PAT_MRT4530_65388C.1
gaaaccaaaaaaaaacccaatttcaaaaaggggagccaaccccggaaacgattttttaaaccccaaaaaaccccaaattaaaaaaaggttccgggggccccccctgggcaaaaccggggccaaattaaacccaaaaaattcggccggggaaaaacccccaccttagggaaaagggttgggaaaaaagggggggtaaaacccccaaaaaaggggccaaaaaccccgggggaccgggcccgggaaaaagccccgggaaaccaaacccccccttaacagccccaaggccccgggttggcccccaacaggggggtttcccccacgggccccccttattttttttaaagggggggcccggttttccccccttgggcggccggccaaaccccccaggccccccccccggggcgatccgggacccaaccaccggaccacctccaccttaaattttgggggaggcccaaacaggcggggaaaaaacccccccc

SEQ ID NO: 64223 - DNA, 601 bp, Oryza sativa
  Clone ID: PAT_MRT4530_65389C.1
ctagtggatccccgggctgcaggatcggcacgaggagttgacgaatcgatttgttcgcatcgtgataaggcgcagaaggtaaggcggaaattgccttggtttatcctctccccctaaatttcctctgctgcgattggttgattggttaatgaaaaacccaatacttgcaagcagattctgattagattcttaattattgggattttctagagttagtttaaggaaaagtgagttaattatcgacgatgaaatatacacttccatgattagaattatatatcgtatagacaaatatgtgtatgtattaaaaatatctgacaaattggactgtatgattataatgcctttcaaccattgctttgtgcaatgctcattatatctcccggaaattaatcgatttctgcttttgtaccatgtgcaatgtttacttttaaactgctcaggttcattctatcttattttctggtgcttctgaagcgatgtatatttcttcatttttaaactgctcaggttcatgaatgccaccatcactgaatgcacatctggtcctcccttattttcgttcgtatgtagtatgtacgtaagaactaacaagtttatt

SEQ ID NO: 64224 - DNA, 276 bp, Oryza sativa
  Clone ID: PAT_MRT4530_6538C.1
atggcggtggtgatggtggctgacggtggcggctggcgacggtggtggctgtggcagtggcggtggcggctgtcgacgatggtacctatggcagcgatggttgaaggccatcatccggctgacggtgcgtcgtcgtcgacggcgggaatcgcgggcgaaagccttgccaagccatttggccggctgacaacggcgacgccgtttggcgtcgttcctctccttggaggcgttgttttagcatacccctttcctttccctactatattctccgggtga

SEQ ID NO: 64225 - DNA, 308 bp, Oryza sativa
  Clone ID: PAT_MRT4530_65390C.1
cgacggcgatgtacggcccctcttcgccgcgaaaccacctctcgacgcagctaaccgcagcgattcccctccttccagaacctcggacgcaacgactaagcagtaagctttatattttgcaaatttttttccccaaaagatagccaaaatcagatagtacgttttttttcctttttttttctcatattttcgaggatccaagtagatatattgagtatttaatttcgtcaggaatcaagtgaaaccaatcaaagaggtacaatatattgaactccaaaaaaaaaaaaaaaaaaaaaaaaaaaaaaaaa

SEQ ID NO: 64226 - DNA, 657 bp, Oryza sativa
  Clone ID: PAT_MRT4530_65391C.1
atggcattgagtgacttgcgattcactatgggcgaattcgagctcggtaccccaacgggcagagcatacagtgcttttcctagcgcattaatgccattgattaaccaacatggatttgagctttttgtgactattaatgggcaatataatttctatcaaactcagctaatcagtcagtatggattaagccaacaacaaattgaacgctgtatccattttttaaaacaacttaatattgcttatggtttcgttaccaccgatcaaatcgctgtatcagaaaataacctaatggtgcatgaggcactctcgcccatcaaagccgattatattgttgatgctgaacattaccgacaacataacgtcatgcaactattagcattttatccacaagaacgtgatcacgaaatctttaatacaggaatctttcaacaggatttaaaagtgcctcgttggcatcaaaatgcggtcgatattctctgtaaacaacattcaaaagcccaagggattaaagatgtgattaaacattttaatctcaacctagccaatacattagcctttggtgatggttttaatgatttagaaatgttagaaacggtcggggtaggcgttgcgatgggtaatgcagaagaaagctgtaaacaattagccgatttttga

SEQ ID NO: 64227 - DNA, 519 bp, Oryza sativa
  Clone ID: PAT_MRT4530_65392C.1
atggttttcgtagtagtgtgcacctctgcaaaccccaaccgacgcctccttccccttgctgtggcggacaaggagctccgagctgagcggcggtgcgatcgtcctcgtagaggttgccgcggacctcgtcttccttgtggagccaagacgagccgtggcgcgctcatcctcgcggagccgagccgagcggcgcagaaagtggccatatataacaaggcagttctagacaagcaagaagagcagaagaagttggacgaggcacttagcgcgccggaagacccgcgaactgcacagcttgagctactgccgttgctcggcaaaaacctgccagatctgaacgtaactgtgtatgatcgccgcagcgcgagaatccggaatgcctacaacgggcagcgggtggccgaagcagtgcaatcaagctccggctccgacaaatgcagcagaacaacgaaaaggaaaactggtcacccaaggtccttcggtggttttgaccccggttttggtctacgtggcggctaa

SEQ ID NO: 64228 - DNA, 327 bp, Oryza sativa
  Clone ID: PAT_MRT4530_65393C.1
atggctagcggctacacggcctctgcaacggtggcggatctgccgccctcgagtgcggttgtgtcttggcgacggtgggcggcggatctggcggcgccgtcctcgggagggggagggggggtgaatccgtcgcacttgggtgtagcggcgacctcggcgacagcgggcagcgacgcctcggcgatggtgggtggcgagagaacagaggatctggcgatgccaacctcggcgtggcggccgcttcctacctccacgcgccgtgacggatctagcgccggtgacggtgatggcgggagcagcggcatggtgctcggccgacgccgatga

SEQ ID NO: 64229 - DNA, 3468 bp, Oryza sativa
  Clone ID: PAT_MRT4530_65394C.1
atgtcgcgccacctcctcctcctcctcgcgctcctcctcctcctcctcctcttcccgctcgccacgtccgcacagccgccgccgccgtcgaacacctccgcctccacctccgccgcggccgtcctcctctccttcctcgactccctcccacccgcctcccagcgcctcctcctcccgtcatggcggcaaagccgaagcagcagcagcagcggcaatgccaccgcgcctccaccgcactgcgcgtttcttggcgtcacatgctccgacaccggcgcggtggcggcgctcaacctctccggggtggggctcaccggcgcgctctccgcctccgcgccgcgcctctgcgcgctcccggcctccgcgctccccgtgctcgacctcagcgggaacggcttcaccggcgcggtccccgccgcgctcgccgcgtgcgccggggtcgccacgctcctcctcggcgggaacaacctctccggcggggttcccccggagttgctctcctcgcgccagctcgtcgaggtcgacctcaacggcaacgcgctcaccggggagatccccgcccccgccggctcgccggtggtgctcgagtacctcgacctcagcggcaactccctctccggcgccgtcccgccggagctcgccgcgctcccggatctccggtacttggacctcagcatcaaccggctcaccggcccaatgccggagttcccggtccactgccggctgaaattcctcggcctctaccgcaaccagatcgccggcgagctccccaagagcctcggcaactgcggcaacctcaccgtcttgttcctgtcctacaacaatctcaccggcgaggtgcccgatttcttcgcctccatgcccaatctgcagaagctctaccttgacgacaaccatttcgccggtgagttgccggcgagcattggtgagctggtgagcttggaaaagctggtggtgacggcgaacaggttcaccggaacaatcccggaaacaattgggaattgccggtgtttgattatgctgtacttaaacagcaacaacttcaccggctcaattccggcgttcatcggcaatttgagcagattggagatgttctcaatggcagaaaatggcattactgggagcattccacctgaaattgggaaatgccggcaattggttgaccttcaactccataagaacagcctcaccgggacgataccgccggagatcggtgagctaagccgattacagaagctctacctgtacaacaacttactccatggtccagttcctcaagcattgtggcgattggttgacatggtggagttgtttctcaacgacaacagattaagtggtgaggtacatgaagatatcactcaaatgagtaatctaagagagatcaccttgtacaacaacaacttcaccggcgagctgccacaagccctggggatgaacacaacatcagggcttcttcgtgtggacttcactcgcaaccgctttcgcggcgcaattcctccaggattgtgcacgagaggccagcttgccgttcttgatcttggtaacaaccagtttgatgggggcttttctagtgggatagcaaaatgtgagtctctatacagggttaatctgaacaacaacaagctcagtgggagcttgcctgcagatttgagcaccaacagaggtgtgacacacctcgacattagtggaaatctgctcaaagggaggatacctggtgcgcttggtttatggcacaatcttacaaggcttgatgtatctggcaacaaattctcaggtccaataccacatgaactcggggctctaagtattcttgacaccctgctcatgtcatcgaacaggctgaccggagcaataccacatgagttggggaattgcaagaggcttgcccatttggatcttggaaataaccttctcaatggaagtatacctgcagaaattacaacacttagtggcctgcaaaatcttttgcttggtggaaacaagctcgctggaccaattccggattctttcaccgcaacgcagagcctccttgagctgcaacttggtagcaataatttggaaggaggcatcccacagagcgtaggcaaccttcagtacatatcacaaggtctgaatattagcaataacagactaagcggcccaatcccgcacagccttggtaatcttcagaaactggaagtgctcgacttgtcaaataactcattatctggtcctattccatcgcagctaagtaacatgatctcactttctgttgtgaacatttcgttcaatgagctatctggtcagctccctgatggatgggataagattgcaacacggttacctcaagggtttctagggaatcctcagttgtgtgtaccatccggaaatgcaccttgcacaaagtatcaatctgcgaaaaacaaaagaaggaacacacaaattattgtggcattgctagtgtcaactcttgctttgatgattgctagtctggttattattcatttcattgtgaagaggtctcagcgtctatctgcaaatcgtgtatcaatgcgcaacctggactccaccgaagaattgccagaagacttgacatatgaagacattcttcgggccactgataactggagtgagaaatacgtcattggaagaggccggcatggcacagtctaccggactgagcttgcagttggaaagcagtgggcagtcaagacagttgatttgtcccagtgcaaattccctattgaaatgaagatattgaacacggtgaagcaccggaacattgtgaggatggctgggtactgcatccgtagcaacatcggcctaattctctatgagtacatgcccgaggggacactctttgagctattgcatgaaaggacacctcaagtgtcccttgactggaacgtccggcaccagatcgcccttggtgtggcggagagcttgtcctatcttcaccatgactgtgtgcccatgattatccatagagatgtcaaatcgagcaacatcctgatggatgctgagctagtacccaagctcacagattttgggatggggaagatcattgatgatgatgatgcagacgcgacagtgtctgtcgttgttggcacccttggttatattgctccagagcatggatactccacgagattaagcgagaagagtgatgtatacagttatggagtagtgcttcttgaactgttgtgtcggaagatgcctgtggatcctgcatttggagatggtgtggacattgtgacttggatggggtcaaatctgaatcaggcagatcactccaacatcatgaggttcctggatgaggagataatatactggcctgaacatgagaaggcgaaggtgttggacttgttggatttagcgatgacctgcactcaggtttcttgccagttaaggccatccatgagggaggtggtgagcatcttgatgaggattgagagaagtaatcacgttcagttctttgaagaagctccatga

SEQ ID NO: 64230 - DNA, 549 bp, Oryza sativa
  Clone ID: PAT_MRT4530_65395C.1
atggatagctcaccggcgtgcgaggagaaccgggctccggtggggttcagcggaaaccaagcggcggccgaggtggctcacgcggcggcaatgctaatggcggcggcggcttggcgcagcggcggctctagcggctgcggcgcgcgaccggaggtggcggcaagcggcggcgctagtggcgagtggcgcggcggcggcgcgcgcgcgggcgagaatggcggggagggcggcgacgtggggacgcggagcgggggtgcggatgtggaggaaacgggcggcgtggggaggtgggggcgccggcggttgcagctcggctccaaccggctggaggaggaagacggggccgacaggtgggccccacctgtcggtgacccggagagaggagggagggagacgtgggtcgggcccaacaaggaggagggcagcgcgggaagagtgggccgacggcctaaaggaggaaaagaaaagaggaaaagaaaaagattttcctgggattatttattgcggtttaatgtttttaattggttaaaattatttcgagagctctga

SEQ ID NO: 64231 - DNA, 401 bp, Oryza sativa
  unsure (1)..(401): unsure at all n locations
  Clone ID: PAT_MRT4530_65396C.1
ccggggtttcagccggaccntcggacgcccccccgttggcctctgcgaaccgcccgtcaaggccaaacgtgcttcgggcatgaaactcaacctcgccgtcgatctaagcctcatcctcaacaagtgcggcaagatctgcccctccgacttcacctgctaattgagctcaaaccgtgcgtgcagcatgttggatatcatgattcatgagtttgatctttcatcccgattcccgacgcagcgttaaacattaatcttgaaataattctcttgtttactcgattcgccatttgcagctcgttctatattataatgtaaaattcttgaatcacttggttgttgtatattgtaacgcccattatatatagtagtattttttgttctcacaaaaaaaaaaaaaaaaa

SEQ ID NO: 64232 - DNA, 336 bp, Oryza sativa
  Clone ID: PAT_MRT4530_65397C.1
aaaaattatttttttaaaaaaggaggggggtttttatcaaccggtcaaaggggcccctggggtcaaaacaaaagggaccaggacatcaaaacattaggggggggggggggggagaaacggactcggggaatggggggaggcgatacacaccaccacaccggggcaaacaacaaaaccaaaacccccaaaaccaaaaacaaaaaacccgggaagggtaaaaccccaaaaaaaaatagggaaacaaacaaaagtaaaccctggggggaggggagggctctaacttaagaaacgcaaaagacccaccccccgacttggcgaaaaaagaaaaacccttcg

SEQ ID NO: 64233 - DNA, 603 bp, Oryza sativa
  Clone ID: PAT_MRT4530_65398C.1
atgcaaaatgatattgttagcctagcaggcctgcatgcgcatgagacatgtcagtgggctccgtacgtgtgcgcgctcgcccttccccggaaacagccggctcgggtagaaaacgggagaagcgacgggcaccgacgtggcgctgccatctccggccaggcagaggcgatgtcaccgtgtccgcacgcatgtgacatgtcgccgcgtcccacttctcacccagcggaggaggaaacgacgagaaaaagaaccaccgcgcgtcagaattccacacccgtaacgtacaccgtacgttcagcactcatgcatgtgattgctcctagccaagttcagaaccatcgacagagatataactggcatacagatataacaacaaggatagacattgctgccacacctaaagatgaatgtggtaggcgacgtatccgtcgactacgaggcgcatgtggtgacttcgtcaatctcaagggtttaccggctcagtcttcgaagatgtccataggttgccacacttgccacggcacgcatgcggcagcgtcgtgtcgcggcgtcccagcggaggaggaaacgacgagcagaattccacacccgcacgctgttcag

SEQ ID NO: 64234 - DNA, 978 bp, Oryza sativa
  Clone ID: PAT_MRT4530_65399C.1
atgcacaccactgagctcgtcggaaagagagagaaagaggatcgggccagcgccggcgacggtggcgcagccaccgcggaagaggaccgggccgacgccggcaatggcgacgctgccaccgcggacgaggaccggaaaggagataatgagttagagtattcggagcaagtgtgtgccctcaacttcactgtcgagcacatagaggcctcccaacgcgtgccacttccccaaacgaacgactcctctgtctcggcgtcgcacacggtgcaagatggctgcccactgcccgaggacaatgacacgcacttccacagttataccttcctggcacatcccactggcgcattggaattcccgacgtacgacggcaagggtgattcgctcccgtgccgctgcgacaggcttgagctcaacgccggcgccccatcctggcggcgatttgtccaattggtgcacacccgttttggcccaacaatgatagatggccccctcagcgaactcatggcgttgtggcgcactggcatggtggaggattacatcaatagcttccttgcgctggtgtactgcgacgctatgctctcggagaatcaacacgttcaacttttcacggcaggcctcgtgaacccgctcaagacagattgtcgccatggtgaatggagaccacgtgacgtcgcccggtcggtgtccgcccagcgcgtcaaaattaacaattgtcctgggtgcaccttcgacatcgatttctacgtgctgccactgggggctatgacaacgtcctgggtgaggatcgacactctgccaccacccgtccactccatggccatcgacggcacctctggcgaactcatgaacaaactactcaatgacttcatcaacatcttcgccgaaccacaaggcctaacatcagaacaacacatgtgccatagcatccgcctagagcacatggagttcgccgtcgtcgtgcaccctgtcgaaacatga

SEQ ID NO: 64235 - DNA, 404 bp, Oryza sativa
  Clone ID: PAT_MRT4530_6539C.1
atatagtactttatcaacagctactttgtatacaactcaattcatcatccaaggaaagtgttgatcaatacctacgctattgcatcgcaaactcaggagcctcttgctcactgtaacgatagccaacaaaacctacaactggccgactcccaagatgctatacctgctcccactaaaccctgaccatcatccaccacagatcatccttctgtctataactgtcaatccttacacctatcattcgctgctagtgatactcctatcaataacatctctattattacgacccttaccgcctgaacttgtgcgtccaccacgaccacctagagtcggagcactaccaccaccattacgatcacgcacgcttcagcggactcgtgatgctatgctcggatctactcacc

SEQ ID NO: 64236 - DNA, 565 bp, Oryza sativa
  Clone ID: PAT_MRT4530_653C.1
gacgcacgatccagcgagcggtttttttttttaaatgacaagtgtgagccactctccgtttcattccttcctggtgaaaaaacttattctcgaccgccccttgtatagtcgaacattatattaatgatggaagcagagttgtcttggccgcaatgtaactgcaatcttatgctgaggattcgagctcatacgctcacaaaataatccgctccttactactttccacctgtgcgcgtattttgggctttttgacacgtgattatttcctccatcccctaccaccaaacaattacatacacgcgatatgccatgatctttttttatggaaatgatcacccctgagaccactgatcgtagggcttgtgctaggacgaacgctttatctagaagacccttatccgtgtgaaggatgaattcaagggggcagcgcgatggctttggatgacaattggagcgggatcattgactctgggacacacgattttacagttcgactgtccaacaccatgagtggggtctcttttccaattgcgaaccatttcttaccaacgattagattttcatc

SEQ ID NO: 64237 - DNA, 247 bp, Oryza sativa
  Clone ID: PAT_MRT4530_65400C.1
gttttggtttttttttttttttttttttttttttttttttttttttttttttttttttttttttttttggaggaaatcggagtttattttaaacttccaaaccactggaatgttaaaactcagtacaaaacaccgccaagggggggaatgctgctgggggcactatagtccctaggggagataccatatctagagggcaagttcaaagccaacagagcttgagcttgagcttgacccaaattccgat

SEQ ID NO: 64238 - DNA, 762 bp, Oryza sativa
  Clone ID: PAT_MRT4530_65401C.1
atggctggaaagaagaggcagaacaaaagaaatggaaaagtgtcaaagccacaagcggagcctaagaaagtcactgagaaacaggaggatctgatcagcaagctccccgatgacatcctcctgcacatcctatccatgtgcccctatcacgacgccgtgcgcactgccgcggtttcacggaggtggcaacatctccacacccggcttccaaacgttcggtttcgtatgtcggtacttggcaaccttgcatctctaggcgagtcgagcgaaccgcgcgtgcagagcatggagcgcatgcttcgccaacgctgtcacgacgacggtggcctgcacgacaccatcgagacgctccacattggttaccggaaggacgtcccgttcgagtgccggtacgcgaacgagttcgtcgcgctggccaacgcgtcgaggctagagctgcacgtccagtgcaagaggggactccctgacgaggacgccggcgtgtggtcgctcgagctgccgccggcgaccaccgagcttgagctaggcctgtactggtacgcggtgaggccgccacgcgtgcgtggccccggcgtcacctccctccggtggcttgcgttggacggcctgacggtgctgcgcccgagcgatttcctctctaccgtcgtcttcccttcgctggaggagctgcacatcgtcgactgcacgctcccggccagcatcgacatcacgtccgacaccatgccgcggctcaagcgcctccgcatcaccgacgtcacctaa

SEQ ID NO: 64239 - DNA, 771 bp, Oryza sativa
  Clone ID: PAT_MRT4530_65402C.1
atggcggcgaggccatgccgggcggcggaggggctcggggcagcgtacacgcgcgttcggacaaactacaccaagctcactactcttgttttgaaggaattgaaaagagtagcaactacgcagcccgcaagtagtagtgaaataaccactatctatgaagtcgtgcaaaattccgaaaatctcagaatgagtaagggacaaatggttcatgagatacattcaaagaattcctggaacaaggaaatgcggttgagtacctactcgaccgccttggactccactctgaagacgtgctcccgatttatatcgctctggctcattggcaataatctacacaatcttgagctgtggcggctggaggtggcatctcatgacctccatgtggttaagtacctgctcgacctccttggacttaactatgaagacgtgctcccaatttatattggggatgacacgaccgatgagaatgccttcaaggtattagattccggtccaatttatatcggggatgacacgaccgatgagaatgccttcaaggaaaagttacagcaagctcatgacatcttttacttttataaggttcacgagatacatttaaaggattcccgaaacaagggaaatgtagttaagtacatgctcgaccgccttggactcaactctgaagacgtgctcccgatttatatcggggatgacacgaccgacgagaatgcgttcaaagtgatggaattcctctgtttgttggctagttggagggagctttcacaaagctaa

SEQ ID NO: 64240 - DNA, 462 bp, Oryza sativa
  Clone ID: PAT_MRT4530_65403C.1
atggacgggcatgggaaggagggcagcagcaacggcgccagcggcggcggcggcggcggctggagcgatcagtgcgacgtggtggccagggccttcgtggagtactactaccagacgttcgacaccaaccgcgccgcgctcgccgcgctctacggccagacgtccatgctctccttcgagggacacatggtggccggcgccgaggagatcggccggaagctgttggggctgcccttcgagcaatgccggcacgccgtctgcaccgtcgactgccaacccacgccgtccttcccgggaggcatcctcgtcttcgtcagtggcaacctccagctcgccggcgaggagcaccagctcaggttcagccagtttggaaacggtctgatctcgtgtttatgttatgatttgatcccagatgtttcagctggtgcccaacgagcagggaagcttcttcgtgcagaatga

SEQ ID NO: 64241 - DNA, 1320 bp, Oryza sativa
  Clone ID: PAT_MRT4530_65404C.1
atggcggcgtcgtccttgctccggtcgctctcccgcatctcgcgccgcggctgcgtgggaggcgcggggccgagcccgttccaccacagccgcctcccgtactcgccgttctccaccgcggcggcggatgcggtggagaggagggggttcgcggggctggggccgacggcgaagggggagaaggcgcgggtggtggtgctggggaccgggtgggcggggtcgcggctgatgaaggacatcgacacgaccgggtacgaggtggtgtgcgtctccccgcgcaaccacatggtgttcacgccgctcctcgcctccacctgcgtcggcacgctcgagttccgctccgtcgccgagcctctcgcgcgcatccagcccgccgtgtccaagtcccccggctcctacttcctcctcgcccgctgcaccgccgtcgaccccgacgctcacacgattgattgcgagacagttactgaaggtgagaaagataccttgaaaccttggaaattcaaggtagcgtatgataagctggtctttgcgtgtggagctgaggcctcaacttttgggatacgtggtgttactgaccatgcaatatttctccgggaagttcaccatgctcaagaaattcgcagaaagctccttctgaacctgatgctatctgatgtacctggaatatcggaggaagaaaagcgcagacttttgcattgcgttgttgttggaggtggtccaacaggtgtcgaatttagtggtgaacttagtgattttatcatcagagatgttaaacagcgttattcacatgttaaagattatatccatgttaccttgattgaggcaaatgagatattgtcatcttttgatgttcgcctcaggcaatatgctacaaatcaactaactaagtcaggtgttaggcttgtgagaggcattgtgaaggatgtacaacccaacaaattaatcctggacaatggagaagaggttccttatggtttgctggtatggtctactggagttggtccttcatcattcgttaagtcgttgccatttccaaagtcaccaggtggaaggattggggttgatgagtggttacgtgttccttctgcccgggatgtgttcgctattggggattgcagtggatttcttgaaagcacaggcaaggatgttctcccagctttagctcaggaatcgaaagggatatctcttgcaggatttgtgagctggttcatctggcgctcagcatacctgactcgtgttgttagctggaggaacaggttttatgtggctatcaactggctgaccacactgttatttggccgtgacattagccgtatttag

SEQ ID NO: 64242 - DNA, 784 bp, Oryza sativa
  Clone ID: PAT_MRT4530_65405C.1
gaactcgcttccttggtttgttttgatagtgttatttaagaaaaaaattctgtggaaatacacatatctgacaaaaaaaaagaagtgggaaaggatgcactgtactgttcatcgttcagatatctacaaacaggcacctaaatacggctaatgtcacggccaaataacagtgtggtcagccagttgatagccacataaaacctgttcctccagctaacaacacgagtcaggtatgctgagcgccagatgaaccagctcacaaatcctgcaagagatatccctttcgattcagaaacagtaaccagccttgctttgcctcagatcgactagagctttgtatcttccgacagttgccatgctccccagatgcttatacacaaaggcaggacctagatcaacgtcgatctcacagttcgcatgccctcctccagctttcatgacatggttaagcaggtgagctagatacttgccttgtcgttctgcaacctgagctaaagctgggagaacatccttgcctgtgctttcaagaaatccactgcaatccccaatagcgaacacatcccgggcagaaggaacacgtaaccactcatcaaccccaatccttccacctggtgactttggaaatggcaacgacttaacgaatgatgaaggaccaactccagtagaccataccagcaaaccataaggaacctcttctccattgtccaggattaatttgttgggttgtacatccttcacaatgcctctcacaagcctaacacctgacttagttcggacgcgtggg

SEQ ID NO: 64243 - DNA, 276 bp, Oryza sativa
  Clone ID: PAT_MRT4530_65406C.1
atgggggaggaggcggtggtgatggaggcgccgaggcccaagtcgccgccgaggtacccggacctgtgcggccggcggcggatgcagctggaggtgcagatcctgagccgcgagatcacgttcctcaaggcggaggtgaatcacggcgccatcaatccgaggctggcgagacaagcttggccctctttgggcgtggcgccatggctgtactacctttgtcgttgtttggttgggctcctcgttggagaaaagaagagcgtgggcatggacaactga

SEQ ID NO: 64244 - DNA, 358 bp, Oryza sativa
  Clone ID: PAT_MRT4530_65407C.1
aaaacccacaaaaagctaattttgcatttttttatgggttcatttttaaaggtttacaatcaggaggtggacaaaaaaacataaaaacaatggtactttttttttgaaaaaaaaattttttttgaaaggaaacaatccgcatttaatcttgttgtcccccaaaaataaaggattaaccccccttggctacaaaaattgtacagctaaagatatttgtttgagcttgcaaaaacctggtggtaaaactttatttacttcccccagctgggaacattttttaagcgccccccaagattgtgacaaaagttactggggggatccatgcaaagatccaccccgttggggatttttccctcaa

SEQ ID NO: 64245 - DNA, 255 bp, Oryza sativa
  Clone ID: PAT_MRT4530_65408C.1
atggaggctcatcggagaccaaacgacggcggcgcgacggagactggcaacggcgtgacgaaggccagcggtggcggatcgacggcctacggggcggcggcaattagggttggtggcagtgcgctcctgaggggggcacaatacgtcgattgcgcgtgcagggcaaggagatgcgcccgcgcgggggtagatgcagagatttatgctttgatgcaaattgtagcacgcaccatcttccagcatcacattatctag

SEQ ID NO: 64246 - DNA, 542 bp, Oryza sativa
  Clone ID: PAT_MRT4530_65409C.1
agcgcgtggcatcgcgtggccaccgcgtgtccttcgtctctacaccacgcaacatcgcgcgcctcctgccggtgagccccgccgtggcaccgcgtgtcgacctcgtggtgctgccgctcccgcacgtcgatgtctctcgtttggtgccgagtgcaccaacgacgttccctccgacaagttcgagcttctctggaaggccttcgacgccctggcgccgccgttcgccgagttcttgggcgccgcatgtgtgggaacccgagcccttccggcaggtggtgacgttcatgaaaaagcggcttgtccccctcggccttctgctgccgtcgcccgacggaggacgccgccgcaccgcggagatggtcgacgacgccaccatgcagtggctggacgcgcagccgccagattcagtggtgtacgtcgcgctggggagcgaggtgccgctgcgcgtgaagctggtgcacgagctggctctcaggctagagctcgccgggacacgttttctcttggcgctgagaaagccctgtggcgttgatgactcggat

SEQ ID NO: 64247 - DNA, 466 bp, Oryza sativa
  Clone ID: PAT_MRT4530_6540C.1
tcgtttaatgaataatattttttttatgaattttctaaggattttacctaaaatttaaaccataactttttacaaataatttaacattatgttatacacattttataaacatttttactgtcattaccgctaaaggattgtgtatctcttatttcacatgatgcatatatccatttttcccaagcttttgaatggctagcattcataattggcagaccacctagagccttgacagaaatcttgccacaggttctctcgccaaatataactaatgccaccaacacatgacttgatgggtcggccgtaccaagtataaacggggagaaaacttgttacaacatctctttcaaggcgttgatatattttcttattgatcgaatccatgcattcaaaagcattgtctgcaggggggctcactctgatgccaataaaactcctttgaacttatggcacctgtctattgaac

SEQ ID NO: 64248 - DNA, 525 bp, Oryza sativa
  Clone ID: PAT_MRT4530_65410C.1
cccgggctgcaggaattcggacgagggacacttttttctcaagtgatatgatatcacatccctcacaactacgcaactgagtggagacttgcagattgtgaattttttccttttaaagattagacttgcagagttgtaggttagttccatggtctgagatgtgaagcaaaattggtttgcgattggtaactgatcagctgaaaatgccaaatcatctaaggtggggtccgcgtacgctcgcatacgtcatcacaaggtcagcaagacatcaacatgtcccgatgtccgcccaatgtacaggctggtgttcagtgatggtgagacttggcacatggcgaaatggggcccagaggcagcggcagttgagaactgaaaccgactgcatggtggggcctcctgcctctctaatacgaagggcagcatgttgtctgataaattcggggttgcaggtagctgataatttaatttagattgactagaataaactagtattagatggttatgaaggtgatgtgagtgacacga

SEQ ID NO: 64249 - DNA, 2205 bp, Oryza sativa
  unsure (1)..(2205): unsure at all n locations
  Clone ID: PAT_MRT4530_65411C.1
ccggcccgggaaaaaaaaaaaaaaaaaaaaaaaaaaaaaaaaaaaaaaaaaaaaaaaaaaaaaaaaaaaaaaaaatttccgctactcgacccccccgctcctcgcctcgctcccgccccccgagaccctagggcgccgccgccgccggcgccgccgccaccgccaccaactcactgggtgagccgccgcggccctaaaccctagcccagcgcgcgcctctcctcctcctcctactccccccatggccgcgccgcaggcttccccgtcgccctccgcgcaagtggtgggcaacgcgttcgtgcagcagtactaccagatcctgcaccagtcgccggatctggtgtaccggttctaccaggacgccagccgcctcggccgcccgcccgccgaccgctacggcgacatggtctccgtcaccaccatggaggcgatcaacgagaagatcatggccatggacatgtcgcgggcggagatcaagacggtggattcgcaggagtcgctcggcggcggcgtcaccgtgcttgtcaccggccacctcaccgtccgcgacggcgtgtgccgtgaattctcccagtccttcttcctggcgccgcaggagaagggctactttgtgctcaacgacatgttccgctacgtcggggacggccctacccctgctgctgctgctgctgcggaggtgcagcccgaggcagatgccgtggctccacccctggctaatggtacagctactgctcctctgcagcctgctgctcctgactatgatgctatgccgcacgaggagccggatgttgtggagaatgtggcggtgcctcctgaggaggaggaggaggtttataatccgcctctggaggaggtggagggtggggctgtggaagaggaacaatcagttcctgaggtgattaatgaagtcccaaataatgtggtgcccgttgtagctcctgcagatgctccggtgtcacacgaggaggcgccaaagaagtcatatgcctcaattgtcaaagtcatgaaagaagctccagtgccagcccctattcctgctactaggcctgcacctgctgctagacctgcacctcccaaacccgagaagcaatctcctgcccctccggctcctgctccagttgcagatgctactccttttagttctaatgctgagagcagcaatacgcatgagccagaagttgatgcacatgcgatatacgtgaggagtctaccattaaatgccactacgacacaactggaggatgagttcaagaagtttggcaccataaaacctgatgggattcaagtcagaagccataagattcaagggttctgttatggctttgttgaattcgaggaagctactgcagtccaaagtgctatagaggcttctcctgtaatgattggtggacgccaatgttttgtcgaggagaagagaacacctggttcacgaggatccagcagaggaggaaggtttgcaccaggaagaggtaataacaacttcagagctgacgggatgagaggccgtggcaattatagtggaggaaggagctacggaaggggtgatttcagttacagatctgattatggtggcagaggtggtggcagaggtggctctgcgcgtggacctgatgttggctaccagagggttgacggtggtcgtggtggccgtacatcagcaggccctggtgcccctgcaaaatgaggggcgaagtagcttgtgtctctagtattatcattccatggtccttggaatgtccagattcaacataggcttcatcaattgattgcatgctggaattgtcaagcccaatttacaaattatgaggttctatttttgaaggcggcaaaaggggttaaattggttgctaattgtagaatatacacctattcacatgtagtcttagcttggtctttgatgatcagctgatgtgttattttttttctttttgtgttaattttgtcccgtttaagtttggagcattcatttgttgtgtccatttgattttatagttactacgaactgctgaaaatttgattttatagttactacgaactgctgaaataattgatagtttagactctagagtagctggtaaagtagtaattaggagagattttgtcttgttcttgtgatgtcttgaggcgaaggacactcttattgatactagtttgatactggtttatttaattttcgaggaaaaaaaatnaaaanaaaaaaaaaaa

SEQ ID NO: 64250 - DNA, 437 bp, Oryza sativa
  Clone ID: PAT_MRT4530_65412C.1
aaagcaagaaatagggggcaaaaaaaacgggtgcccctggcacaaattaaaagatcgattgcattgatgagcttggtacaggtatactcacccgttttttgaagggagaaaaaaaaagggccaatcaacctttacgatccaattgggggcccggcgctcttttgataatatatggaaacccagggcagttatgccacaaatcccaatgttagggtcgttttggcagatgcttgcttaaaaaatgggagttggaaaattttccaggcatttatcgcccgggattccctgaaccacattattttatagggccctgtagtgaagactggagaaaaaaaacattttcccaatttctgtttggaggtacgcaaacccaccaaggcctcctagcggaacccctcaaacagttggccagttaattgcccttgggctctgggaaa

SEQ ID NO: 64251 - DNA, 285 bp, Oryza sativa
  unsure (1)..(285): unsure at all n locations
  Clone ID: PAT_MRT4530_65413C.1
atgagcggcacgacgatcgcgtttgttcttgatgacttgcgtcgccgtcgggagaaggaaggagatcagcatcaacaacttgagtggggagtaatgctagcctttggaccaggnatcacaatagaggcaatggtgctgcgtaacccactctcatgaagtcttaaggaaaattaattgccactatcttatgcttgtctggaatcttattacggaatatgttaattaatcaatgcatgacactaaatcaattctgcatgcttaagtggaattatgacctaccggtga

SEQ ID NO: 64252 - DNA, 516 bp, Oryza sativa
  Clone ID: PAT_MRT4530_65414C.1
atggccaaggatagtgacatgggcccgactaacgcccacgcccagcttgccgcctccgttcacaacgccggcaatggtcggctgtgccaggtgggcgccgacaagttcggcaaccgctacttcacccgcgtcgaggaggtcgacggcgtcatggaggagaaacggtgggtggagttcaaggggagcgaccaggatcagaccactgttcaaggcatgtgtgttgagtggatttgctggttgaatggacaaaggaagaaagctccgacgccagaggagttggctgagctggaagcgaggcgtgaacgtgtcaagcaaaatattgaatatctggaccccgacctcagcgccaaggtcgatggtgctgaggttgaacacctcagcgccaaccgcatcggcgctgacgccaaagaccttggcgctgaggttgtgcacctcagcgccagttgctctggcgctgacatgtacaatctcagcgccattctatttggcgctgagatcaagcagtggctggcatag

SEQ ID NO: 64253 - DNA, 999 bp, Oryza sativa
  Clone ID: PAT_MRT4530_65415C.1
tcaaaatgtgcctataatctggtgaagggaggtgtaggtgccaacaacattgacgcacactcctatgaccagtatcccgacaatcatcgtcctctcgaagcagccaactcctcctcgggacatgtagatcttgagatagctcaggcacgggaccagcacagcaacggtgacgttcagcgaggacccgatgaacaacatgagatagccgaagaagggcaccgtgcatgccagcaccactgtgctgatgacgacggctatgctggtgagcaccctggtcaaccagttattctcaacgtccgtcgtcgctgacaacttctcctctatcgctgttgtgactggctggatcacaagcgtgtagttcgccagcggggtgatcagtgtcgtcaggatggcaaacctggtgtacagcttccctgtgggtaagttctgtgtcacctgcgactgcacatcctcaccatagatcagatatctcaacactactgtcactgcgtagtttaggctacacaacaccgacgagatcaacaaaaccttaggaaaatccttcttggacttcattgaggagtacacggtcgggaagacgccatggccggcgaagcaaacgaagtagagggtgagggcggtgggcaacccactcagattcaagaggttgttgcccgccatgtggaagcccttgtcgggcacgccggcccagaccccgtcagcgccactgacgagatgagcccgacctaggatctccaccaccgtgctggggaggagcttatcgaggttgtcgccctcgaggatgaggaagctgatggcgacgaggtagagctcgacgtacatgacgaggccgatggtcgtccagccgtaggcgccgaaggcgaggtagccgatgtctgggtagctccgtacacagcggtcggcgcacatgcagcggtcgataaggttgccggtgtagaagcagatggcgccgaccatggcaaagagcgccaggctaagccacccaccctgcaacggcat

SEQ ID NO: 64254 - DNA, 329 bp, Oryza sativa
  Clone ID: PAT_MRT4530_65416C.1
acaacaagatcctttggccccccaacaccgcctcccaggacgacctcaataaggcgtcccggacggccaccatgaagaaccacccggacaagggcggaaagccccacaagcccaaggagctcgcacaagctaatgacgtatcgagagacccaaacaaaccagacagcgatgaccaatatggtaaaaaggccctcaaagcaagaacgggtggacgcagaacccatgtcaagccatctgacaaaccacaataaagattgggacctaacttgggcggggggggcctgagcacgagcactaggcataggagaggaaagggcagtgacccatcc

SEQ ID NO: 64255 - DNA, 1829 bp, Oryza sativa
  Clone ID: PAT_MRT4530_65417C.1
accatgcatggcatatacagtatgatgaccacttttagaacagctcaggatattggagatatcagaatcagacttatattgaagctaagatataaggtctaaactattttcgataaatgaagttaactgaaacacacctgactgtgatttgggctgttcttcaaggccgtacaaagcgcattttgcataggtaagaagtcgcacatggcgtggtgcacctagattacctaaaattgacctcagtagtccatctgttcgaagtatggtgagaaagtcaggaggcaaggactccataaacgaagatatatcatccattcccagagagttcaggtcctgctttaaacgcgttttctcttcaatagacatttgtcttccaagccttgatttgctttcgatagtcctcccagtgaatattacgggaaagtacttagcatatttgccaacaccaaactgttcacctaactccagaattttttgagaatccaacaatatcaacgctttccacagctgacaatagtccaatctgaacttttggtctaattctttataaattccatgatcaagcagcactaatgaaaatttcccttggccttgaggagaaactaatatatttccaggatgaggatcgccatgaacaaaaccatgtacaaaaatcatttcgccaaacaattcaattaatgtttcagctacctttgttggactgatatctgctttccttagggagtccaagttatcaacccaaaacacgcaaggtactttgacaacattatttttcctgaagcagctagctgttctctcagaattcttagcctcttgggtaaaatctagttccattgacatggttctctcaaactcggtcaataacttctcaaacctataatcaggaaaaattttcttttttacaaggattttgccagagacactagtgctccaagaatggtttatttttagaattttagtaacaatcttgatgttaaaaaagctgacagttgacaatataattgaactgtgctcattacctgctcttctttcagaatattgtatagacgatagtaataaattgcatgggtaaaaaattgttttcatgtaaatgagccaagagacagattttgacaagaaagacatagtcattatgtctatcttcatgcgccgctcaagcccaggatattgaaccttcacagctacttcctgattattattcaaccgacctcgatgaacctgagcaattgatgcagcagcaatcggatgttcatcaaattccaggaatatgctatgtaaatccttgccaagtttctgctctatcactatgctcctgcctcgcaagttgcgggaggctgcaaagttgtgatgggtggcagcaaagaggataggcatgaacctgagcttgaacattggagcattgcagtaaaggatgggaaagccctggaaaacgagtggatgagtgagataccaatcccacgtcgcggccctcatagatctataacttcccctccccatgatttctattgttgccatggccaacaaggagattttatggcgatacctggatctcctatatttaaatgtgttagaagtgagcaggtggtctacagcaatgtatacatgcttgatgatggaatgagatggaaagaacttccacctatgccaaagccagattcacatatagagtttgctttgggtgaatgttaacaattctcattattgctgggggaaccactgaaaagcacccaataaccaaaaaaaaggttttagttggtgaagtgtttctgttcaacttgaacacactggtacacacctttatccgccgtcgcccactggttgagagacga

SEQ ID NO: 64256 - DNA, 888 bp, Oryza sativa
  Clone ID: PAT_MRT4530_65418C.1
atgggtcatctgatcaccaaaatgctactgctgctggtctcactcgcgccagtagcagccggtgagcatggcgtcgccgccgccgagccgaggctagtggagatccccttcaacttctccgtgcactcatggaacgagctcatctccaaccgcctcaaagcagagctcgccgacaacccgtgcaggcaggagatcgagggcatccccaccatggcggggctgcacggcgacgacgagccgccggcgaagtggatcaccgtccgcctgttcggcggcggcgaccgcgacgatgaccaggcgaagctcctcgtcgcggaggacgacgcctacgtggccggcttcgccaaccggacgggccactggcacacgttccgcggcggccgctgctacccggcgctcccggccacggcgtgcaccgagctcccgttcgggggcagctaccgggacctcatcggcggcgtcgccaacctgcgcgccgtgccggtggggaggtcgtcggcggtgggcgcgatggaggtgctctcccggtacgatccggcggcgaccacggcggccgccgacgccaagatggcgctggccaagttcatggtgatggtgacggaggcggcgcggctgaagccggtgcggcgagcggtggtggagcggtgggagcaggtgagctacctgagctccgacgaggtgagggacgtgccctactatggcaagatgtcgctcatgatactggagtggaagaggaccgggcggtggggtgagttgggcccttgggccaacatcgacagggcccgctgcccacggcccaccggctgcgaggacgaagacgacgccgacgccgacgccggtgccggcgagttacgaggattgcgagcgatccacgcgggcacttcatag

SEQ ID NO: 64257 - DNA, 331 bp, Oryza sativa
  unsure (1)..(331): unsure at all n locations
  Clone ID: PAT_MRT4530_65419C.1
ccccctcgaccttgcgtccgcggacttttgggtggtnagccacatggcataagatagttccatcttccntgctctcccaaatgatgttctaccaaatgcatatcgcatctcaagagaagaggctcagaggctcaagcataatagaggagatgagttcggtgcattcactccaatccaatacattatctaccaagacggtgtgatgcnncanaatcctcttaggtctaattacagataaagaataactaaataaataaattgcaagcaattgttttgctgctatgtactgtccagtctttcgactaatgatgataaagcctctctttatcct

SEQ ID NO: 64258 - DNA, 499 bp, Oryza sativa
  Clone ID: PAT_MRT4530_6541C.1
tggacacctccaccgtcacgaacatcggcgacatcccacccatcgtgaatttgcctggcatgtacaacaaggatgacacacccgtacaccataatcgccaccggcaacgacttctccacgctgcacccccgctttcacccgttactgccgtatggagaagttatactgggctacgacctcccacctagcgctccatgctctgcaccggtatattgcgcaccgacaacattcactacctggacataggcacgatccacaacctgttacctgtcatgtgaatcatttgcttaagacttttttgtgctcgaacacacaagctccatgcagcgatatgagcagcgagacacgaagctaagatatcattgactttaggctgatagggcatgaggaagaaaacctcgttaaattaactatacgaatatgacaagctagaggctcatcatgagaatgaactagctcttgaaggagcatgagaacgctctgttgcatcatctacatg

SEQ ID NO: 64259 - DNA, 1602 bp, Oryza sativa
  Clone ID: PAT_MRT4530_65420C.1
ccacgcgtccggctctaggacagttaggacagcagtttgttgagatgctctaggacagtttgttgggatgctgacagcaccctcttagactagcatggctgcatggctgctacaagcagctataaatatgtatccaatcctctttgggaggacatggcttttgtgtttagtgaatgaagaaaaccagaaaattgccccatctcgagtgccatcctcttctcaatgagagtaaccattgaaattctaacagtaagggaatcagccagtatgacctccttaagtttggccgaggattcatgaaactgcaaaggtttgagtatgagatcaacagaaattactggtcatcggcagcccgtgatcctgcctatgttgctcactacccatacaggtacgatatctgctgtgaaaatatgaaggaactgaggttggcgcatattgtaactaagccagagataggactccgttttctcttggggaaatgcagagcattggagaaactttggctggagtatgtcattggtctaactgacaacgatgtgattgcactattccagaactgcggcaacctcagaagcctctcgttaaggctcattcctctgttgtgtcatgctatttattttcggacagcattgaccaatgacagccttaaggccctggctctctactgccctatgcttcaggttcttgagctcacctttacattttgttccgaggactatccgtcagaagtaggcttttcacaggagggtattgtaaacctcgttcagtcctgtccaattcgtgttctcatgcttaatggtgccagcaattttgacgacgagggaatgaagggcctgtcatcctcaagatccctggagacactcgagcttgtggattgcatgtttataggggatttaggcatgcgttccatcgcgcgcaccccgaacttgcggaatctaacactccggaagtgtgtttgtgtgactgacaatggagtgtctgagctggtgcatgcacagaacttggaatccctgaccattataggttgccatcggatctctctgaaagctgtgcagggggctgccagatcagtttactactcagctgagtctgaaaaacatgagagtctgaaaggaatgaagatgacaaggtcttcaaagtgatgtttggctgtcaatgtttcttgctatatgttacctgatgttaatttctgactactttctatagtttactccaattgtgactggatccagctagcggcaacattgttccagctaatggtaatgattcagtactcaaggtctcactgtcacaaaataacccacatggcaagaaaccacctcgcaatgcgtatacgggcgttctgaaatttgctgggaatctaattaactggtcattctgagcctgaatgtgtgaaactctacgtgtatgctccccaataagccaagtaagattatttaaaggttgccctccaattatggttgcccatagtcgagtttgcatatacaccgaaggtcctttgtttggattggctgagacatgccacacgtctttgtattatattatactcgtagtcatggatacccccagtcaaagacaacgacaaaaaaaaaaaaaaaaaaa

SEQ ID NO: 64260 - DNA, 190 bp, Oryza sativa
  Clone ID: PAT_MRT4530_65421C.1
atggcgcacaagccaccgcagagaaagcgcactacaggcgcgaccctcgaaaacttgtactcctgcaccggaccgaacgaacaaacacaaaggcaggcccacagcactcggcaagggcaggatgacgtgtcaagtcatggcaagggccacgccagcggcaaaagccgatttcaccagcgattcccggcag

SEQ ID NO: 64261 - DNA, 276 bp, Oryza sativa
  unsure (1)..(276): unsure at all n locations
  Clone ID: PAT_MRT4530_65422C.1
ccaatcctgaatccgccccccccccccccccccgaagcagcagcggcggcggctggcgggaggaggaaggcaaggatccggcggggagaggccgcctctctttcccttccttcgcgtccgncgtcctgcttgctgcggcctgcagctgagcttggcggacaataatacatatgcttgtccttgcaaacctatagtacagcgatcctttctgtggaacattgcatcagtctagaaatagattggaaaggggtttagcttgcgtatactatctgagac

SEQ ID NO: 64262 - DNA, 729 bp, Oryza sativa
  Clone ID: PAT_MRT4530_65423C.1
ccggaattcccgcctcgacccacgcgtccggagaactcttgatgcagccgcgagggtctcacaactcagcaggcgcagcagcgcctcgaaatctttggccccaacaagcttgaggagaaggaggagagcaagttcctcaagtttttggggttcatgtggaatccactctcatgggtcatggaagctgcagctatcatggccattgcgctggcgaatggaggggggaagccaccggattgtcaggactttgttggtatcataactcttcttgttatcaactcgacaatcagtttcattgaggaaaacaatgctggcaatgctgctgctgcactcatggcccgtcttgcaccaaaggccaaggtgcttcgtgatggccgatggactgaggaagaggcggccatccttgtaccaggggatatcgtaagtattaaacttggagacattatacctgcagatgcgcgtctccttgagggagatcctttgaagatcgatcagtctgccctgactggagaatcattgcctgtcaccaaaggtcctggtgatggtgtctattctggttcgactgtcaagcaaggtgagatcgaagccatagtgattgctactggtgttcacactttcttcggaaaagcagcacaccttgttgactcaactaaccaagttggtcatttccaggaagtcctgacggctattgggaatttctgcatttgctcaattgctgtgggaatgttt

SEQ ID NO: 64263 - DNA, 689 bp, Oryza sativa
  unsure (1)..(689): unsure at all n locations
  Clone ID: PAT_MRT4530_65424C.1
nncagtatttgatatgcaagtatgcgactatagattattctttgaggtgccnaattatnaaaanaaaaatgtcatcctccaggcagacggtgattttgcacatgatgtgattggagataattccatcatatgcagcatggtgatcaatgatgtaagtgaaaggtatagtctctgcaggtccctccctcctgggattttctttacaaatgttaattgatttcataatttaaattataatattattatctcaaaaaatttcttgattttccttatctttcattcttatgtatttgaggaggcaagaaccaataacctttttttacagagcgattagccaattgctaacgtcagttcagtcgatcaatctgcagaacttccccccgaatttgtatgtatattaggttactcatctataaaacagggattggtgactgggcaataagcttcatatcatcgatattagctgtataaggtatttttcagctttgctcttctcatttggaaacaagcgtttggtctatataaactgtgttcagttagacaatagatagcctacagtagctccagccaaagtatgtatatgtgaccattcaattgttgtcgctacatgagaaagacttctctttatctcatttctttaaacttattggttcatcatccttaataaaaaaaaaaaaaaaaaaaaaaaa

SEQ ID NO: 64264 - DNA, 364 bp, Oryza sativa
  unsure (1)..(364): unsure at all n locations
  Clone ID: PAT_MRT4530_65425C.1
aaattttctaaattacaagcaaatcaaagctcatcgaagtatagctatggcattggcatcagacaagttcgtcctctccgccatcgtgcncgccgtcctcaccgtcgcggcagggcggcdgggctacggcggctacggcgacgtcggccgagtmctgcsscgtggggaagccggtgtcccggaacccggycccaatsgtsccgggaacwcmwtsgcgcggtgktgcccgytcsccgggggccnccttggcmcccsggcaagmggccgcgcgggaragbtccgggrvcnkgtctkcckgngwghbtwbackatatmcgatayvmgtccgggygcarcgctttgagagtsccgcgcgcgacgacgt

SEQ ID NO: 64265 - DNA, 1667 bp, Oryza sativa
  Clone ID: PAT_MRT4530_65426C.1
tcgctttgttttgctttgctttgccgattacgcgcccgcctacagcgggtatagatcaatttacaaaaacaggtgattgattacatgtggcaaggttctataaaaccatgactgattacataattggagggtttttaaggcaacttggtaatgggtatacaccaagagtataagcaaaaggcaattaggtacatcaaaagcttcaggatttctgtacccacaacatacaaattagccatctgctcgacagttcgttcagtcatagcttacaataaaacaaactataagagtttatctgacagaggttgcattgcatataaactgacagcagactattatcaggtagatacttcataagccaaggatgaattgccacgggcacaccggagtgcgccagtgagggtaaaccagaaccgcccgtgtcccgcgatcccgaggttttcacctcatgacggggacacggtggttctggttcattgtggggtggcgatcagcggatgcgaagctgatgtgctcttggtgagccagcatgccgcccccaaatgagatgctggagatctcggagcctgtcggtgtcgatggcgagcaggatgtgctgttctctgggcacaggttcttgccaaggacaacggcaccgccgctcgttctggctctacctgttggagactgagctgatgccggtggtggcttctgctgctgctgctgctgctgctgttccagcagctcctttttggtaaggaaccgaccacctgatccacgggctcgcttcatagcatgatgatgtcgagattcatggaggtaaggcttccgacctttcaccgccttattttgggcctccaattttgcacgcgtttgccttcttctaaggatcgcattgtattgctttgcattgacaaatatgggctcttctacagaaggatcaacaggcaatggcatcctagagtttgcagcaccagtaatttgaggatgaacaaatgcatgtgaagtgtatcctgttaatactccaccataatatggatcagtaccatatggataagaaacacatgcaaaaggctggttgtaatcgaactttgaaggaggaaaggcagcttctgtgttccccaaagacaataccgacttagtgccatggtcccgctccccacaactatcattgttgttaatatctgaggggacaaacactgattgtggtgaggtgtgttgtccgttgagactgctgtcacttactgcagatgcttcttggtgagactccccagactttgttggtgacgagtcaccatcagagttcctctgaactaactgtttcattggatagttattcctggcaagaaaatcatagttggtcttggccatgcattggacaggatgattctccatttcttgcaacagcattatcattattagaaggcattactcaagatccacaaacattttctgtcctcctctctttctctctctccctctctcctcccccaatcaagactctctctctctctctctctctctctggggaaagatcgagggcaaagaaatggtggcactactactactagtgctgaagcatgacgatgaggctgcctcctctgatcctcacctcccctcttcggctcttcctgccaaatatgcactagagtctctctctctctctcctttgtactactcccggccgg

SEQ ID NO: 64266 - DNA, 341 bp, Oryza sativa
  Clone ID: PAT_MRT4530_65427C.1
tattttcttagcacaagagcaattattcacaatattcgtaataattttattcttgtgccgagaaggaaatcaaaagctaatttagagtggttgcaaaagagggtgcaaaaatatcggtctacaaaaaacgatattggtgaaactattgaagattttgataaagtagaaaagcttggtcaagggtttacatcggccgatccgttggaggaagtagacataggtgatggaactaaaccaaggccgacttttgtaaacaaaaaaatgagagccgattataaggttaaaataatcgagctacttaaggagtatgttgattgcttcgcatgagagtatcatgagat

SEQ ID NO: 64267 - DNA, 1208 bp, Oryza sativa
  Clone ID: PAT_MRT4530_65428C.1
atggagggccgtgctacggacgacccacctcctcgtcgatcccacgcgtctcgccgcgtcctccttccactccacacccgtctcctccgccaagtggaaggacaagttcgattgcaagctggactaccaaaatatggttttgttaaaaccatagtcacaaagttcctgggtcgatgggatcaaggaatggggtcgaggaacgtgatacgctacttgcgagagaactacgagaggtatgttgttcgtcaaaaacgagcagaaggtaaaaaggccctaaaagattatcttctatttggaaagagttcacctcatttacagggtggaagtacgggcagctttgctaattcgcatgatatcccacgattcaaaacctttaggaaaggatctcagtctcatggctcaacaaagtcgcgacaaggtgtacaccatcacagaaaatgtaaaaaggacagggagaggttctacaatttcttccgtgaggagtattatgtgcatcctgacaaaatctttgaagacatgttcggtgagaatcatcgttttacctggtcccatatatcgtgggagagttttagcttcagagattcatcgtccagatttcgaaggactggtgaatcgaagagagaaagagtttgtagcgatagtgacgatgaaagtgaggatgaaacaaccaacattgggtcacatgcacaccgggctattcttggactaccagcttgtggtccactaactctagatgctgtcaaaactgctttccgggcatctgctctgaggtggcaccctgacaagcacccaggctcatcacaggccgtggccgaagagaagtttaagctttgtgtcaacgcatacaattctatctgcaatgtcctcaaggctgcttagctttcctcttgcatcgatggtggttcaagcttgcagttgctggaggctgtgaactcgcagcaacagcatttcaaggcttgtagctgacaaggccaagcatgaagctgctgcattgtttcagagcatcaatcggatgacacattcagttcaccaactcaccaagctcagagaaggaaggggatttgtgctgttgtaacaaacatgtacgtactactaatcactgtaacaaacatctattccttcatttgatttgatttcctattccttgagcgaataaaacaaacactgttcacagaaaaaaaaaaaaaaatataaaaaaaataaaaatg

SEQ ID NO: 64268 - DNA, 1207 bp, Oryza sativa
  Clone ID: PAT_MRT4530_65429C.1
tcaaaaaccaggtacaggattcccagttttgcacatttgctcactggatgcggcaacaagcttagcgtcaaaaatcggccggagcggatttgccacaaactgtggattactccggttgttaccgatgaccatatgcacttgtagcactgttggagactgagctgatgccggtggtggcttctgctgctgctgctgctgctgctgttccagcagctcctttttggtaaggaaccgaccacctgatccacgggctcgcttcatagcatgatgatgtcgagattcatggaggtaaggcttcagacctttcaccgccttattttgggcctccaattttgcacgcgtttgccttcttctaaggatcgcattgtattgctttgcattgacaaatatgggctcttctacagaaggatcaacaggcaatggcatcctagagtttgcagcaccagtaatttgaggatgaacaaatgcatgtgaagtgtatcctgttaatactccaccataatatggatcagtaccatatggataagaaacacatgcaaaaggctggttgtaatcgaactttgaaggaggaaaggcagcttctgtgttccccaaagacaataccgacttagtgccatggtcccgctccccacaactatcattgttgttaatatctgaggggacaaacacaatctgcgtaagatcatattttgttaattctgattgtggtgaggtgtgttgtccgttgagactgctgtcacttactgcagatgcttcttggtgagactccccagactttgttggtgacgagtcaccatcagagttcctctgaactaactgtttcattggatagttattcctggcaagaaaatcatagttggtcttggccatgcattggacaggatgattctccatttcttgcaacagcattatcattattagaaggcattactcaagatccacaaacattttctgtcctattttgaagttcagaaaattttcaggtcagactgacagtggcacataaagaaagccaagttactagataaattagtaccttgaattcggtttgtatagtatccacatacaatgattagggattaggttgtacaaacatccaaactcagctggatgaacagttgaaaatgatcgaagcataaaataaatcaaagaactattgtacggcctctacaatatcattaacaaacaatactatgtcaactttatg

SEQ ID NO: 64269 - DNA, 272 bp, Oryza sativa
  Clone ID: PAT_MRT4530_6542C.1
gagcttcgtacagagctccctaggctacagattggacgttcgcccagccggtggaatcaagaagttcagtctgctgcttactcaacttgcgctcgaagcaatccgatatccttacatgctttccccttggagtaggatttctgcattttccttgtttgtgcaataaatctccttggtggctgctttctaatctttcccttgtctttccgtctttattcctgcttgtcatgatcttgaacactgatcaatgtgtgcttggtgtttgggtttcc

SEQ ID NO: 64270 - DNA, 266 bp, Oryza sativa
  unsure (1)..(266): unsure at all n locations
  Clone ID: PAT_MRT4530_65430C.1
atggcgcggaggggcgggaggtggacggcgngcgccgtcgcgcaggggtgcgggaccccgaggtgggagcggcaaacaatccaccggccacagcagctgccacaacggcgcaccctctgccgccgacatcgtggtggagggcgacctggagccggaggtggagttggggtggatgatggagatgagctgcgtcatgccgaggccctccgcgaccatctcatgcaccgtcctccgtgtcgctggtacgaggacgaggagcagagtcg

SEQ ID NO: 64271 - DNA, 2193 bp, Oryza sativa
  Clone ID: PAT_MRT4530_65431C.1
atgaaggccggctccgatggggagctggtgatgatgaatactaactccgacatggagctgttgatgctggtaaagatggcagtccgtcaccaacgcgccaccagtccagccgacggcatcagcttcggctcctacaccaattgcaccatcgtcgacacaaaggcaaatgctgatacaaagtcccagatttttcaaagttctgaggacaagacagcgttacgacgtatgagcatgtcagccgattcttggctcaatgtggagagacagcagatccaggcggccattgaaggggggaagatcaaatttgatgattcaaagaagccgatgaaggttgatggtaatcatttccctgtcaatatgccgtgcgctgccgccgttccggtcgtcgtcgtcgctcggggaggtcgccatcgtggtcgccaagtcgccgccgtcctcgtccgccgcttcgccgccgccgaagaccgccagagcaccgccgtcaccgtcgacccgaagaccgccgccgtttcttcctcgtcgccggcgccgtccgttgctcctccgccgcttctttggtcaccggatgaagatgaggagtttgaagccaggcaagctgatgttgataatgttgaagaggcctctgctaggttggtctatctcaagctgttgtatatcaatggaggagccgctgtgaagttgatgccgtacgctatattcagaaagttgggtagaaattcagacgatctcatcaagactaacatggttcttaaggattttggtggcaatccattggagactaaaggagttttgaatgtggagctgacagtcggcagtaaaaccattcctaaaatattttttgtcatcgatgggaagggttcctatagcctgttgctaggaagggattggattcatgctaattgttgtattctttcgaccatgcaccagtgcttaattcaatggcaaggcgacaagattgaaatcgtgccagccgacagccgattgaagacggagagcccaaattattattttgagggcatcgtggaggaaattgacatacgtccaggagatagaccaaggccgacattcattattccggtcatcaagaaaaatggcaaggttagggtgtgcattgatttttgggatctaaacaaggctacccaaaaggatgagtacccaatgccggtggccgatcagttggttgatgctgcttcagggtgccctggtgcaattaggttgtttgagtgggttgtgatgactttcggtttgaagagcgttggagctacatatcagagagccatgaactacatattccatgatctaatcggctggttggttgaagtttatattgatgatgtggtcgttaaatcaaaggaagtagaaaaccacataaccgatttgagaaaggtttttgagagaactagaaaatatggcttgaaaatgaacccgacaaagtgtgcttttggcgtatcggctggtcagtttttgggatttcttgttcatgagagggggactgaggtaactcaaaggagtattaatgcaattaaaaagattcaacctccggaggacaagaagaagttgcaggagttgatcggcaaggctcttgaatgcagaaacaagctgttggctccaattttgaaaggaagggttggaaagtggatatttgctttaacagagtttgatcttcggtatgaatcaccgaaggcggtgaagggacaagctatagccgattttattgtggatcatcgtgatgactcaattgactcagtcgacattccctatgcaactaacaatccggctgagtatgaagcggttctcaaggggttgcaattgcttaaagaagttgaagccgatgctgtcaaaattatgggtgattcattgttggtgatcagtcaattggtaggagaatatcaatgcaaaaatgatatattgatggtttacaatgagaagtgccgggaattgatggatggatttcggctggtaactttaaagcatgtatctcgggaacaaaatgttgaagcaaatgatttggctcagggagcatcagggtacaaattgatgatgaagggtatcaaggatgagttaacagccgatgagtactataatctcatggccgatgagaaggaagatttggtccaatcaaaattacgagctcttgcaaaagttatcaaggataaggaaagggttgctctgcattataacaagaagggatga

SEQ ID NO: 64272 - DNA, 417 bp, Oryza sativa
  Clone ID: PAT_MRT4530_65432C.1
atgggatgcacagctcggctcggctgcgtggctgtggatggggacgacgccggcgtggtcgccccgccctcagatctaaccgtcgtcgcgccaccgccgtgtgtgtcatcaggatacttctggcgtgagggagggacgaagacggtggagcatatggacatacaggcggcggcggcgcagctggggatggggaaggtggcgacacggctggggacggggacggggacggcggcggcgccgacatggttggggcaggtggggatgttctcctacatcgacacggatggcgtcgccggcaccaccgtcatcccagccgcgccgctgagccaagcagccttccccacccactccggcgtcgtccccgtccctagccgcgccggcgccgaggatccatctcctccacgcaactccaattaa

SEQ ID NO: 64273 - DNA, 180 bp, Oryza sativa
  Clone ID: PAT_MRT4530_65433C.1
gccgggacgcctctttacacaactattgagtatgatcaaagccctgagcttcccaatggctgacttatgataaatgacctatcgccagaatggagactagacaacggcttcaaagcagactcgcttggtagcccttctctgcacacacgccggccctggaatgacttctgaaattctgga

SEQ ID NO: 64274 - DNA, 114 bp, Oryza sativa
  Clone ID: PAT_MRT4530_65434C.1
aaatacccgcattccacaacagggggagggcattaatcaggctcagaacctgtttaaacccaacataaaatagatagttttaaactacacagtgcacacagcgcgcatatgata

SEQ ID NO: 64275 - DNA, 507 bp, Oryza sativa
  Clone ID: PAT_MRT4530_65435C.1
atggtgaatttggggaaagagatggaattccatcgaaatggatgcatcaaaagatgccgcagcgtcgaagtagatgtgatcaaactgccaattcagatattcagagatgcacgcgtcttcagagagagagcgttgtgcggtagcttcacggagcggccttcgtttgcagcatatcttgaggaaaagctggacgtgtgcgaatatttgagagagatggaggagggtgagagagagagaacaaaggtgtacgacaaccacctgtatcggcgttctgatgccgccttcatgcgtctttggattgtcgtcttctttgcagaattgcagttgagggcacagcccgacagacaggcgcacgccctcgtcgacgcccaacctccccaagtttccgggggtttccacgtgagccgtccctccatcactggccgttgctacgcgcacatatcgtggaaaaaaaaaactgccaaagccacacaccctggcccgtacaacctcgtgcgcttcatcaat

SEQ ID NO: 64276 - DNA, 706 bp, Oryza sativa
  Clone ID: PAT_MRT4530_65436C.1
gaggaagcgcatcactgtattgaagcctaccagatcagtggagttgaaaggtgaaaaggaaattaaaaggcagcaagaccagacagtcaatggaagtagagtagagagaagcaatactcataggaggtctcattcaggcggcggtcatgccaaagcagaaaggcttccacaacacacacgaatagtcgtggtaaaacctagcactgctcttacttcaatggagcattttcagaaaaatgggcatgataacctggatgattctgaagcccccgttatatcaaggcatttgagtgatgaaataaattggtcggcacagggcctgcgccaccctcgtgccgattcctgccgcccgggcatgcagtcaaatatgttcatcagagatagagtgtactatggatatgctgaagaagagggtagtagcttcagtgactcggaaattggaagtccaacatcacgacattcctgggagtacatataccggtttagcaatccttacttcggctcaactttaagccatgcttcttgttctcctgactcgcttgtaactagggaggctaagaagcatacctctgataggtggccaactgtatcttctaatgagattagccaagaaaaggtgctggtgcggaggagcttgagcacactcggtgaaatgcttgcgatgtctgatatgaagaaaaaaggggctgctgaacaagtggtcact

SEQ ID NO: 64277 - DNA, 3058 bp, Oryza sativa
  Clone ID: PAT_MRT4530_65437C.1
atggcggcaccggtgcccggaggctgtgcgaggatgagacgggtggttctcggcgtcgtgctgctgctctcggtgtgcgtccgagcaagccatgccgtgacggatagccaggacacatctgttctccgcgcgttgatggatcagtggcagaacgcgccgccaacgtgggggcagtctgacgacccatgcagcgattcgccatgggatggagtggtttacgtttacccactgctacccgactgtttcagtaaaatttctaccatgggcatcaagggagttctagctgctgacatagggcaactgaccgagcttcaatccctggacatgtcatttaataaggatcttggcggcgtgctcactccaaacatcggaaacttgaagcagcttaccaccttgattctggccggttgcagtttccatggcaacatcccggatgagctagggagtctgccaaaattgtcttacatggcattgaactcaaatcagttctctggaaaaataccagcttctatgggcaatctttccaacctctattggttcgacatcgccgacaatcaattgtcaggtcccttaccaatctcgacaaatggtggaatgggtttagacaagcttttcaaaaccaaacacttccacttcaacaagaaccaattgtccggtccaatcccagatgccctcttcagtcctgagatgacactgatccatttgctttttgatggaaacaaattcactggtaatatcccagactctcttgggcttgttactacacttgaagttgtccggcttgataggaattcgctctcagggccagttccagagaatctgaataacctcactaaagtaaatgagctggatctgagcaacaacacgttcgacccttctcctagcccacaatggttttggaggctgccacagctctcagctctgatcatacaatccgggaggctttacggcacggtgccgatgaggctgttcagcggcccacagttgcagcaagtgatcctcgacggcaacgcgttcaacggcaccctcgacatgggcaagtacatcagcagcgagctgagcatcgtcagcctcaaggacaaccagctctcctccgtcacggtcaccgccagctacaacggcaccctttcgctggccgggaacccggtgtgcgaccggctgccgaacacgcagtactgcaacgtgacgcagcgcgccgcggcggcgccgtactcgacgagccttgtcaagtgcttctcggggacgtgcaacgcggtgggggagagcatgagcccgcagagctgcgcgtgcgcgtacccgtaccagggggtgatgtacttcagggcgccgttcttcggggacgtgaccaacggcacggcgttccaggagctggagagccggctgtggaccaagctggacctcaccccgggctccgtcttcctccaggaccccttcttcaacgccgacgcctacatgcaggtccaggtcaagcttttcccctccggctccgcctacttcaaccgctccgaggtcatgcgcatcggcttcgacctcagcaaccagaccttcaagccgcccaaggagtttggcccttactacttcatcgcctcgccctaccccttcccagaggagcggtcgtcgtcgaggagcaagggtgccatcatcgggatcgcggccggatgcggcgtgctggtggtggcgctcgtgggcgcggcggtgtacgcgctcgtgcagcggcggcgcgcgcagaaggcgagggaggagctgggcgggccgttcgcgtcgtggaaacggagcgaggagaggggcggggcgccgcggctgaagggggcgaggtggttctcgtacgaggagctgaagcggagcaccaacaacttcgcggaggcgaacgagctcgggtacggagggtacggcaaggtgtacagggggatgctgccgacggggacgttcatcgccatcaagagggcgcagcaggggtcgatgcagggcgggcacgagttcaagacggagatcgagctgctctcccgcgtccaccacaagaacctcgtcggcctcgtcggattctgcttcgagcagggcgagcagatgctcgtctacgagttcatgtccgccggcaccctccgcgacagcctctccgggaagagcgggctgcaccttgactggaagaagcggctgcgggtagcgctcggcgcggcgcgtgggctggcctacctccacgagctcgccgacccgcccatcatccacagggacgtcaagtccagcaacatcctcatggacgagcacctcacggccaaggtcgccgacttcggcctctccaagctagtgtccgacaccgagaggggccacgtcagcacccaagtcaaaggaacactgggctacctggatcccgagtactacatgtcccagcagctgaccgagaagagcgacgtgtacagcttcggggtggtgatgctcgagctgatcatcgccaagcagccgatcgagaaagggaagtacatcgtccgggaggtgaagcgggcgttcgacgccggcgacgccgagttctgcgggatcaaggacatgatagacgccaggatcatgaacaccaaccacctggccgcattcagcaagttcgtccagctggcgctccggtgcgtcgaggaggtggccggcgcgcggccgtcgatgagcgacgtcgtcaaggagatcgagatgatgctgcagagcgaggggctgagcagcgcctccacgtcggcgtcgacgtccgcgacggagttcgacgtcaccaagggtgccccacgccatccttacaacgatcctctcccgaagaaggacaaggacatgagcaccgactcgttcgactacagcggagggtattccttccaatccaagatcgaaccgaagtagaagataaccggattgggattctgttttggtcgatctttttcttcctcttcagcaagtggattatcgaatatgtagagatgcgaagaaattttatgttatgtgattggtacatttacactctttaagagtgattttgtatggtgatttttctaatatattgttagaagcaccccgaaaaaaaaaaataaaaaaa

SEQ ID NO: 64278 - DNA, 222 bp, Oryza sativa
  Clone ID: PAT_MRT4530_65438C.1
tctgttatgcatattccaacactatgtgctgtgcgcggttaatctagatgagactggtgtggctatcattcctgaaaggagagtttatttgattaggccttcatacaagaccgaaaaaggtagagtgtgaaatacctatagtataatactttatttttgttcctgatcacatacggtttacgttagagtgccaacttatacattttatatgaaacataagca

SEQ ID NO: 64279 - DNA, 1668 bp, Oryza sativa
  Clone ID: PAT_MRT4530_65439C.1
atgggcgacgccgcggtacccgccatggtggtggaggaggaggaacaggagcacgtgttccggagcaggttcccgccggtggccgtgccggacggcgtcaccgtgccggagttcgtgctggacggcgccgaggcctacgccgacagggtggcgctcgtggaggccgcggcgggcgggcggtcgtacacgtacggcgaggtggcgcgcgacacggcgcggttcgccagggcgctccggtcggtgggcgtccggaaggggcacgtcgtcgtcgtcgcgctcccaaacctcgccgtgtaccccgtcgtgtcgctcgggatcatgtcggcgggggccgtgttctccggcgtgaacccgcgcgcgctcgccgcggagatcaagaagcaggtggaggactccgaggcgaagctggtcgttgccaacgaggtcgcgttcgacaaggtgaaggacgccggcgtgccggtgatcggcgtcggcgacagggagcggatgcctggggcgatcagctgggacgggctcctcgccgcggcggaccgcaccggcgccggggtggtgccggtggacgcggcgcagcagtccgacctgtgcgcgctcccctactcctccggcaccaccggcgtgtccaagggcgtgatgctgagccaccgcaacctggtgtccaacctctgctcgtccatgttcgccgtggcgccggagacggccgggcaggtggtgacgctggggctcatgccgttcttccacatctacggcatcaccggcatctgctgcgccacgctccggcacaagggcacggtggtggtgatggaccgcttcgacctccgcacgttcctccgtgcgctcgtcgaccaccgcgtcatgttcgcgccgctggttccccccgtgatgctcgccatggtcaagagccccgtcgccgacgagttcgacctctccgacctcgccctcaagtccgtcatgaccgccgccgcgccgctcgcccccgacctcctcgccgcgttccagcgcaagttccccggcgtgcaggtggaggaagcctacggcctcaccgagcacagctgcatcaccctcacgcacgccgccggcgacggccacggccacgtcgccaagaagagctcggtggggttcatcctgccgaacctggaggtgaagttcgtggacccggacaccgggaggtcgctgccggcgaacacgccgggggagctgtgcgtgcggagccagagcgtgatgcaggggtactacaagaggaaggaggagacggagcgcacggtggacggcaaggggtggctgcacaccggcgacgttgggtacatcgacggcgacggcgacgtgttcatcgtggacaggatcaaggagctgatcaagtacaaggggtttcaggtcgcccccgccgagctcgaggccgtcctcctctcccacccctccgttgaggacgccgccgtcttcggggtgccggacgaggaggccggcgaggtgccggtggcgtgcgtggtgcggcggcacggtgcggaggagggggaggaggagatagtggcgtacgtggcggagagggtggcgtcgtacaagcgggtccgggtgctgcacatcgtcgacgccatccccaagtcggtgtccgggaagatcctgaggaggcagcttagggacgagttcatcaagaggatgaaaccgtcagcttga

SEQ ID NO: 64280 - DNA, 264 bp, Oryza sativa
  Clone ID: PAT_MRT4530_6543C.1
gtagaggggggggggggggtggatataaatatggtaaagtataagagctaggtagattaatactagctcattcacagcatatcctttggtgctgttctaggagctccattccagacttgttcttgttagtttcaactagactgtactctttggttcccacaaaaaatatgcccctagtataggaggcaatattctgttgtataacgaatctggacaggctggccatcttccctgtaataggacatgtcaccttaatactaggct

SEQ ID NO: 64281 - DNA, 388 bp, Oryza sativa
  Clone ID: PAT_MRT4530_65440C.1
cctctttccgatatcctcctggtgcttcgagaagccactcttgattgccgagttccttatgacaatccgtcatgaccattcaactggggctaaatacggaggagtaccctccccaggaaattaactttggactacatatacgcgcggaggaatacccgtactgagctatcaccatcagcggcccacctcgcttacgtagcatataaccccaaataatgatatccagtaatctaaacaccacgcttaaactaccgaatactactttaatatcatcatgatgacatagagtcatcgtaaatacgatcattatacccacaccattgcatctcccagataagctaacattataataaatataacctggatatataataaaggtggtatttgt

SEQ ID NO: 64282 - DNA, 398 bp, Oryza sativa
  Clone ID: PAT_MRT4530_65441C.1
tttttatataaacttcattcctagcctctattgaatcaacactacggggatgtcaaataagcatgatatactatcaacaacccactactatcctgcttaaccaaactaaaaacacctaactcacaacctttatagcttcccaccctaattttgctttaacaatcatatatactaaacatcaacattttctaccctctaatcattaaaaaataatggcacagaactcgcaccctaatgaccaattgaatgccttctctgttgcatagcaaatgtcgaaacaccgtttactgcttatactggcggaatcctatacatcttttttctaattgaaaaggatcactgcgcaaaggctaataccttacaccaccataatgacaacctacatgcatcaatcttta

SEQ ID NO: 64283 - DNA, 567 bp, Oryza sativa
  Clone ID: PAT_MRT4530_65442C.1
atggcgctcggtggccaacgttgcggagacggtgtgcggcagccgccgcgggggcgtgggcaactgcggtgtcaccgacgcagcagggaggagggccggcggagaccgttggcggcaagtgaagaggagctgagcgacggcggcgtggcatcaacaacgcaacaaggaggaggggctgacggagagaagcctaccggcggcggcggtggcgtctctgacatggcggggaggatcactagtgaggcaggcgcaactggctccctgccactcctatccccgcttccccgccaaccggctctcgagctcccaattcacaggctcggtgccgctgccgctgacgtcgagctcatctctgtcggccgccattcttccacaatgccatgttgtcgccgcgcaggtgctgagcttcctctagtcttctctcccctcaaactgtccgcactaccgccgccaccggcgttcttgggagccacccgccgccggcccacagccgccagagtcgcgcgcccttctctgcccttcctccccgcacacaagaatgagaggaagaagagagaaaagaaataa

SEQ ID NO: 64284 - DNA, 1320 bp, Oryza sativa
  Clone ID: PAT_MRT4530_65443C.1
atggcggcagcttcagcagcaaccgtggaattcgggcctcaaatactgtggctcgacaaggagctgttgcaagtgcttgccgccggcaacaaggtcctcttggaggagcttctgagaggagagggcggtacacacccgcctcgcacaaacggccaggtcgcgataagcttccatggcacgagtgagccggcggcgcggcgcggaacaagccgccttctcggcgtgacgagcaacgggagcacggcgctgcatgtcgtcgccagccacggccacgccgagctcgcggcgctcatctgcgagagggcgccctcgctggccgccacgcgcaacaggtccctcggcacgccgctgcactgcgcgtcgaaggccgggcaccgcgacgtggcggcctgcctcctgcgggtgatggatcaggcgacaccgcggtcgaggaacctgacgggcgccaccgcgctgcacgaggctgttcggcacggccatgttgaggtggttgatctgctgatgacgacggatccctggctggcctcggtgacaaccaacggcggtgtttcgccactgtacatggcgttccgatcattgaactcagtaaatttcaactgtaaaccagaaatagctcaggagatactgaactggccagaaggtccatctttgctaaccagagccgattcgtcagggaggacacctcttcattttgccgtaatctatggaaggcttgacacagttaagctattcctaggtggtgatgctgcttctccaaggctgactagcatttctgacagcgatggttcatatcccgtgcatgctgctgctatgttcggaagaaccaagattattgatgagctcgtgaagaaatgtcccaactactatgaactggttgacgataaagggagaaatcttctgcatattgcagttgagagcgagcaggaaatggtggttcgccacatttgcggaaatgatatgttcgcgatgctgctgaatgcgacggattatgatggaaatacccctctccaccttgctgtgaaacaaggatatccacggattttcggtctgctactggggacaagaggtgttgatatgtgcattatgaacaaggatggccatactgctagagatatttcttgctgtgcctcaacgttagagcacggccgattgcgctattttctgcttttcgtggggagtcgcaaccaggcgacgcgttgggagcttggggcgcccgtggacacggctaccgcacctacgatttccccttctaccctcgacctcgtcactgggaggaggccgacggcagtagtgaggagcctgaggcggcgaggaggttga

SEQ ID NO: 64285 - DNA, 381 bp, Oryza sativa
  Clone ID: PAT_MRT4530_65444C.1
atggggcggcacctcgggttccatccactccaccgccgtgaacacacggggtgctcgtggggaggaggggggcacacggcgagatccgccgcctcgctagggtttcccgtgaaaattcaccactcgagcctctctctttgtaatcacagcccccgaccaaccaagaacaagcacggcgacgacgcaacaacacatgggcgtagacagcctagggaggaggaggagacggcggggaggttggttaccttggccctcatggtcgcctcctcgtcggcttcttcttctttttcggcggcggcggcggcggtgggaaagggaggaagtgggagagaggcggcgcgtggtggtatatataggtgcttcgggggaagcaaaccctag

SEQ ID NO: 64286 - DNA, 195 bp, Oryza sativa
  Clone ID: PAT_MRT4530_65445C.1
atggccccgaagatgccgctgtttgccagagacggccccaaggacgtcgccgccactcggcgttggggcgggcggcgcttcccggagacgagcacggggatgccgtcgccgcttcactccggatccacgcaccgccgccgtcgacgcaacaatgcagctaagtatgctgatggtagtcctgccagtaagagttag

SEQ ID NO: 64287 - DNA, 305 bp, Oryza sativa
  Clone ID: PAT_MRT4530_65446C.1
gcttccggacgagtgcttcgagctgcggcggcggcgcggcgatgagggcggtgagaggcgaggtggtgtcgtcgaagccggtggccctgaacaaggccgcgcgcgtgttcagcctcttcgccgcctccgacgactctgggcttccatccgacggcggggcactgttgctctgcgcggccgaggccgccatggagctccacgtttatcgccgagattcgttcaactacccaaatgcttgcaagttgagacgccgaaatctaacactggcagcttctgaacccatctccagccagttcagccgctag

SEQ ID NO: 64288 - DNA, 456 bp, Oryza sativa
  Clone ID: PAT_MRT4530_65447C.1
cgttgcgcgagcggcgcgcctgcgcctccccttcccttcccttcttcctcccccagctccggtcgcccgtcaccgcaccgtctcgcctccgtccgccgcctccccctttctcctttgcgggggctcctccgactaggggggagccgggttgcaccagctcccgcctccgtgtagccgggaggagagggggatcagtgcaggagcagcagcagctgggggacaaccgagaggaagggtttggggaggatggtttcgctgtcgacgtggttccgctacgccgcccacaagttcgagtactccatctccctctcgtggaagaaatataatgtcggccagatcaacagtacggagctaactgatgcaatatggaaaaacttcttccaaggcaagctcaccttcgcgcattggaccaaagggggagaagccatggctcccatcgagtcctcaaccggagga

SEQ ID NO: 64289 - DNA, 2502 bp, Oryza sativa
  Clone ID: PAT_MRT4530_65448C.1
atggaggaaggcagcgaggcgcagccgccgctccagccggaggccgtatcagccgaagcctcggagccgccgcctcctgtcccaatggaccaagacgagggccaggcggcagctgcggaggccatggagggggaagctgaaggcgctgcggcggccgcggggaccattgagggcgaagcgggatatgccgcggcggatgctgatcccatggaggatgaagcggcggacgaagccggcgccgctgagcccatggaggacgacccgccgacgtcgtccgcgccgtccgccaccgcggccgttgacgactcgaccatcgcgcggaagcgccgccgccgtaagaagcagtttcccggcatgatccccacggcgggtgtccgtgtcctccgagcagccgcctccgccccatccgcggcgcatctcaacggcgtccctcgccgccgtggtcggcccccgacctcctcctcactccgcctcgcgcgagagctcgatgctgaggctctcatagccctcgcggcggggttcccggcggactccctctccgaggacgaggtcgccgccgccgtcctcccacgcatcggtggcgtcgaccagaccaactatctcgtcgtccgcaaccacgtcctcgcgctctggcgctcaaatccgctctccccggttgcatccaacgccgcgctcgcctccattcgcgccgagcacgcccacctcgtcgctgctgcgcattccttcctttcagaccatgcgtacatcaattttggccttgctccatcagttatttccctcccaccgtgcccccctccttcccttcctcccccctctgtccttattgttggtgctggttttgccggcctcgctgctgcacggcacctgatgtcccttggcttcaaggtcgccattgttgaaggacgactgcgccctggcggccgtgtgtttactaagtctatgcgctccactgctgcagaatatcctgacattgcagctgctgctgatcttggaggcagtgtgctcaccggtatcaatggaaatccccttggtgtcattgcacggcagcttgggtttccactgcataaggtgcgggacaagtgcccgctgtatcttccggatggtcgcccagttgaccctgacatggacgcccgtgttgaggctgcctttaaccagcttcttgataaggtctgccaactgcggcaggttgttgcggacagcatcccacatggcgtggatgtgtcacttggcatggcattggaggcgttccgagcggcacatggtgtcgctgctgagcgagaggaacgaatgcttcttgactggcatctagctaatctggagtatgccaatgctgctcctctagttgatctatccatggccttctgggatcaggatgatccatatgaaatgggtggtgaccactgctttattcctggcggcaattctcgttttgtccgtgcgcttgctgatggcatcccaatattctatgggcagaatgtgcgaaggatacagtatgggtgtgatggtgcgatggtgtacacggataaacagactttccgtggtgatatggtgctctgcactgtcccccttggtgtgctcaagaagggtaacattcagtttgtgcctgagctcccagctcagaagcgagaggccatcgaaagattgggttttggtttgcttaacaaggttgtgctgctgttcccctatgacttctgggatggcaggatcgatacatttgggcacttgacggaggattctggtcagcgtggagaatttttcctgttctatagctattcatcggtctcaggagggccactgctcattgcgcttgttgctggggaatctgcaatcgagtttgagaagacatcgccagcggaaaatgttgagaaggccatatgtactcgatggggtactgataagtttacatatggttcatattcttatgtggctattggatcttctggtgacgattatgacattctggcagagagtgtgtgcgacagagttttctttgctggggaggcaacaaataggcggtatcctgcaacgatgcatggagctttacttagcgggtacagggaggctgccaacattgtaagagcagctaggaggagagcgaaaaaggtggactcacctaagaaaatggatgttaacaatgaagtcaaatatgaagttaaagtcgacaacattgatctggatgatctcttccgtactcctgatgctgcttttgggggcttctcagttctccatgatccatctacctctgaacctgattcaatttcattgttacgtgttggaattgccagtatgggcgcgttgctgtaccgacggattgaggtgagggctcgagctttctctcccgagagctggagggcggcggtttccaccgacattttcgcggtccagcctagcttggccgtgcccccactggcgttcgcgtacattgcatgccttttccaaccgactttacgcttcgctgaagatcgcgaagaaggttgccagcagtggctcgtggtgggttag

SEQ ID NO: 64290 - DNA, 455 bp, Oryza sativa
  Clone ID: PAT_MRT4530_65449C.1
ggattccaaaccaatatccttaaaattaattcccagttccaggtggacagcattcacggtaaaatcttacatgaaaaatactcccaaggtacatagcacatttaatcagagcttagtggtctagttcatcgagaagtccgaagatataaactgtcatcaggctaagacagacaatgtgcaaccgcatccaacagaaatagctgaagcagcatagctatccagcaacaaaacagaagtatcggaaaaccaaaaatcggcatgcagcgtgtgatgattcctggcatgaagtatttaacctatagcgatcacggtcacgctcggctcctcgctcccagctcctttcatagctggggtctctgcccctgtcccttcctcttttcttctcacggtctttacttttacttcggctttggggccgcttttttccatgactgcctctatctttggtcctgcta

SEQ ID NO: 64291 - DNA, 1785 bp, Oryza sativa
  Clone ID: PAT_MRT4530_6544C.1
atggggatagtgagagccgcggaggatgtggagggcgcggtggtggccggagccgcgggcggcggcggcggaggcggaggcggcgaggtgacggcgccgctgctcctccggcagcacaagcaggggcggggcgatgaggagaagatccagaatgatgccgggcggcgattgcgggggtcggcgcggaggaagagaagaagggtgggttattctgcacccactcagtcagggattgtggatgaagttggactgtccatttcgcagtttgcactattcggatctgtactgacgattggggcaatgattggtgctgtcactagtggtcgcttagcagattttcttggacgtaaaatggtgtgtcatatttttcgtttgtcgcagacaatgcggatatcagctactatttgcatttttggatggctttctttgcatttggctaagggtgttatcatgctctactttggaaggatattgttgggctttagtactgggattctttcttatgtggtgcctgtgttcatcgctgaaatagcaccaaagaatctcaggggaggccttgcaacttcaaaccagttgctgatctgttctgggagttcagctacatacataattggcgccctggttgcatggcgtaatcttgtgttagtaggtatagtaccatgtgttttgctattaacaggacttctcttcattccagagtcaccaagatggctggctaacgttggaagggagaaagaatttcatgcctcattgcaaatgctacggggagaggatgctgacgtttctgaagaggccgtcgagattaaagagtatattgaatcactccataggttcccaaaggccagggttcaagatttgtttctcagaaaaaatatatacgctgtcactgtgggtgttggcttgatgatatttcagcaattaggagggataaatggtgtaggcttttatgcaagctctatcttcacttctgcaggtttctctggaaaacttggaaccatcttgattggcattattcagattcctattacattgttcggagccattctaatggataagagtggaagacgggttcttctaatggtctcggcatccggaacatttttgggctgctttctgacaggaatatccttctacctaaaggcacaagggctattctcagaatgggttcctgaattggctcttaccggtatactggtttatattggagcatactcgattggaatgggccctgtcccttgggttgtcatgtctgagatattctcgattgacatgaaagcaatcggtggaagcttggtgacactagttagttggttaggttccttcgcgatttcttactcgttcagcttcctcatggactggagttctgcagggaccttcttcatgttctccgcggcgagcttgatcaccatcctgttcgtggtgatggtcgtgcctgaaaccaaagggaggacgctcgaggagattcaggactcgctcatcgactccagatcaagattgagggatccatagaccatagagatatgatccacttgctccactctttctacctgagccgccgtcaaattcgacgcacctctctctctcactctctctgtctctttagcctcctgatctttctctctccggttcttggcagttttgccgtagtgtactcaatacctagctaggctaagtcccgggctactacgcatgcaagctatgtataccatgtcactctgaattgtattgagcaatatatatatgggacacacacacatatgtgtgttctgaggctttaaaacaaaa

SEQ ID NO: 64292 - DNA, 2970 bp, Oryza sativa
  Clone ID: PAT_MRT4530_65450C.1
ctaaacaggttcaagttcaccatagaatgagtctatcgatggaatcatggccatcaaacgcctaagtagagtatcagtttcggcttgcctctgcttcatctcctcatcattcttggccctttcttcttctgctgcctgcattttcttcaccatctcatccagctgttggcgctgaatgttcactagctccctaagatctgctgatgtctgcttctcctccaccagtgcggcttgtagctcgcggcgacttccagcactggaatcgacaggtaagctgttgatccccacattcacaagaaatttgttcttcttagttttgccagcaagcacttcagaaacagcatcattcactgacttcggttcacagccatcctcaacaggttctgcgatcttcatctccatttcagcaatagctgattgtacagcaggagcgaaggctttcttcttgctgcagtggagctctttaaacaaatcaagcccatttggtggtgcatctttgtacttgtcccccagatgaagtggataaggatcaaaatacttctttttgagcttatgtcgctgctggcaaacagctctcttcatcattgccacacatgcctttctcacaggaccagcagttgtgtccatatcaaactttgacccaactttgttgatgtaaaaccttaagagtttcttgttgtccttgtaatccttccattttgggaatatgggaacatggttcctgactgcaatgttgcactcggtggcaaattttgcagcaattttcacagagtttggcctcattttacctggttcaatgaccacaggaagtttgcccttctttgagcgggacatcctttcaagacctcttcctacattaggaccccttatccacctctcctcatatgcttctgcatcttcagaatcaccctctgcgttttcattgacgttggtgtcatcaagagtatgctcatcaaggtggggggtagtgtccatctggcaatcatcgttccatccaacaccttcttcagtatgagcagcattaacctcgcttaaagcctgaattgggatttcagcttgagtgtcagcagcgagaacctcacttgtagcctgaattgggatctcagcttgagtatcagcaacaagaacctcacgtgtagcaagaacatctggtgccacatgctttttagacctcgtcactttaccaggttgcaatggtgcaacaactcttttgccccctatggcgtgatgagtcacagaggttacattctcagtattcttcttggatttcttggtagcaggcttatgtttcaagcaatcatgtccagacttcatgttctgtaggtcttcagtctcaggtactaggctatcattactaacatagccctcactgagatcatcatcttcagcattggcatcaaagtcagggtcatcattgtccttattcttttctctatctcgctgggcaactgtaatcttgggtgctgaccggggcctctttgcttgccctttcttcttcggcgccattagggtggtgttgcggtcgatgtccactgcggtggtgcagcgtcgttgggctttcggcggcatatggatcgcgtcctcaactggggcaacttcaccttcactccaatattccacagccgtgtcgtcctctatctcatcaccagacgattcaccatcttcagcaggtcgattttgcttcataagtcgagcaacttcagaagcatcaacaacctggcgagcttcatcatctcggttcaaaggcaggtcagataaattctcatctacctctggtcttctcccatcttcctcaatgcactgtgtctgttgatacggagatgcactaggtgcattttgttcatcaacattgtataaatgccgatgcttaaacatttggacaagctgccaattttcgccatgcttattatcatcatcttttagtgcagtcttcttgccatctagcttgtaccattcacatctaaaaagaaccaccgttcttgtattcccatcatccttgctgttgtactgcaactcaataatatctgtcaactttccaaagtaatcaattacccgaccattatgtattccagcacacgccactccagagttttgagtcttcttatttatgtcacgctcagcagtacagaaccggacaccattgacaacacatgaagagtaagatcttactctcaggtcagggccacatgctaaggcaaacaggtcatcatctacaatatctgaattgttcaacctccacatatggttcctgaaccaagtagcaaatccaagcctagtccttctatcaatatcagctgcttgcacccctgcttccatttgatcaaaatcttcagagtaaccatagtcacatgcaccaatcagattaacaccgtgcccaaaattatcattattgattgttgataaatcagagcatcctaaatttatcgtcgctgggctaaaccaagcctccacatcatccatactcccacaggaggatgtgcgggcttaatctgcaacataagaagcagaaatcgagcattccggtcgtcccgttgacataatctatcaatctcaagagtacaatcgtagctcaccaaagtactcccatcacaattgcaatggtcctcgcaccgttgcctcgtcacgaaaatggacagcaaggttaaccattacatcaaaaaaaacgggtggaactagattttctagccagcatagtaaagctagtatttctgtctcacttctctttgctttgctaaagagagcaatactcattcttcgtgcgcagaatatgacgacagacacagtactttgcggtagatagtaatgaatgcaccacaacacggcagctcgaaacttgaaatcttttcctgtgagagcattaattgtatttaaaacagaccaatgacatagtaacccctctatcagatgctggagaaaaacctcacagtgtgtcctccctctcgagataggaccaggaatcaacaaagccat

SEQ ID NO: 64293 - DNA, 470 bp, Oryza sativa
  Clone ID: PAT_MRT4530_65451C.1
tgccatggctctatggcccagctatttaatcccagcacaaacccatggcatagtcctcgggaaggaagttttagggagtgccgatttgatagactacattcttttgaacccttcggtaagtgggggcggaggctgcggtgtctgattactccgatgagaagaatgaattatttcagtgcacggttacttttgcgatccgccccgccattcaggctcaaggtcttttggtacctggatacacacatattcctggcgtggtactacatcatccaggggagaggttctatgtgattaaccttccgcgggtgccctgcgacttaccagcaacacttacaacaattttagtttcacggccatagtcagagcccaatgtttagagatgagcaccaaaagatccatcattttaggcaaggagacattgttgaactcccaggtggcgttgcacattggttctacactgatggggatgc

SEQ ID NO: 64294 - DNA, 219 bp, Oryza sativa
  Clone ID: PAT_MRT4530_65452C.1
gcaaagccaacggtgcattttgtttcaagagccgaactcttggcaaccttgtgggtcaaccttgcttgataaggtgtatcaaacaactgttggctgattatataattgtcaagtgctgcgttttgctatattgttatagatgattgctggctggttgtgattgccttgaatgctgtgtatgtacttgctggtggggaggatgtgtaaccctgcgtgtgg

SEQ ID NO: 64295 - DNA, 195 bp, Oryza sativa
  Clone ID: PAT_MRT4530_65453C.1
atgaacccagagcttggcatcttggcagcaacatctgaggaggcggcttatggatgggagttcattttggaacacgacttcgtttctatggttccagaggcaccagcagcagagaagaaacaatgtgttgttcaacggtaccggggcaccagcaaggttgttggtgtgcagcatgaagagggagagctctggtag

SEQ ID NO: 64296 - DNA, 1237 bp, Oryza sativa
  Clone ID: PAT_MRT4530_65454C.1
acgcccttggtttttttcttttttttttttttttttttaaatcattccatatctcatacgtgcgagcaatgcataagcaactggcacgaggtcatcataccaacgttacgtggggatgcagtcaatgtgtttaacaatgtgcgcttctaccaaacaagacctacgagtctactacacacgccacaccatgcgcaggaattacagcaagtaaccccagcacgctctccaagtcattgtttatttcccgcacatttttgtattggatagtcatcaacggattgagtaaaattctatagaagtcaaatccttccatacaaagtcacgacctgtacactgggactgcacgcaagcttcagaagtcgtaagcttgccatgaatgcagagggaaacggtacttcacatagcactcagccaggagtacagctgcactaaagatgacaacttgtcatgcacgtttatcctctggaaacacatgcatgttcactatgtctccagttcctttcacagcactgcctacaagagagagaccttcctcatcagcctcgtcagctgtatcctccgaatacgcaaaccctgttggattgcgagacggagaccaaaggatgcatatgatggcaaggaggacataggagagaacattccaaaacgcagggatgatccaagcccttcgccatagctcactcaatggatcagttgcattgaagtatagctcatagccaatccaagcaatagagataagaactgacaaagctagagaatttgtaaacttccgatacaattcaagttttgccatacttctccgcagctggagcttctccaaagttctcgagagcgatgaaaatatccagataatgaaggtagcatcaagtatggcaacaggtaacaccagaaataaccttgttttcccagagaagtcattgatgtttccaagattttcaacaagttcaagaccttccgaagcaataaaatagacgacaccaagagcacctactttagatgtaaccccacctaatgtgggtctaacaacaccatatcccatagaaaccactaataaaagaaggcgagatatggtcttcttcacagcagtaaatgtaactgcccacaaggttatagccataggtctgcttccagtcgaattgaagttagcatactcaaagtaccagaaagccatctcgcacatgccaagagcaataacagctgttatatggtagtgcagctgcaaaatatacttccagcc

SEQ ID NO: 64297 - DNA, 403 bp, Oryza sativa
  Clone ID: PAT_MRT4530_65455C.1
accagacgtacaggcactcgtactatatagggtactgtagttgagactattataaagtacaaaaaggcagcttgagttgaatgatgtacatgctgctattgtgcacatgtagattgatactcccattgctcgcgttgctgttgtaggacaacagcaagcttatgagaagctgatatgacgtcacagatctggtgtctcacgatgcatatgaatgcctactttcgtggaaacctctttcgggggttcatgagtctcagcatctactatgttgtgaggcaaagtgccagcagtggatatgcatcattgctaaagtgctagagccagagggctcgacataagcacatgaatggtggtgacgagatcacagctatcatataaactttctgatgagattgcttctgag

SEQ ID NO: 64298 - DNA, 896 bp, Oryza sativa
  Clone ID: PAT_MRT4530_65456C.1
ccgcgagtcgttgctccacctatgcgggtggatctcaccggcgagaatgcgagtcgttgctccacctatgcgggtggatctcaccggcgagaatgactggtaaccgatactttgttttgattgttgatgactttacatggtggatgtgggtgtttgtgattaaatccaagggccaagctttggaaaccttcaccaagttcaaacccctggctgagaacgtggttgggcggcgcataaagacgctgagatcggatcacggtggcgagttcctgtccggcgagtttgcacaacagtgtgaatcggctggtatccagcggcatttgacagtgccgtactcgccgcagcagaacggggtggcgagcgccgcaacaggtcaatgatggtgatggcgcgctcactgttgaaggggaggagcgtgtcaggctggctttggggggaggcagtgcgccacacagtgtaccttcaattctcaactggccgccaaccaaggcgatgggaaatcgcactccgtatgaagcgtggatggttaagaagccgcacttggcgcatttgcgggcgcatttgcgtgtgtggaagaagggagcaaggtgcatcgactatttgatcctcgtcgaggtcgcatccatgtaagtcatggtgtcatatttgaagaaaatgttgtttgaccatggtatagagctacaggcgagtaggtctctgctgaatttgatgtggaggagaccgtcgagcaaccagctggctcgacgacatctgtggtaggcttcgtaccgcggtaccaagcaccatcacccggcagatgtccatgcaaggaaccggtggtggtggaaaggggaaattcttccctggcatataaagcccaatgtgaaatttgtataattgacatcccactgtgcctg

SEQ ID NO: 64299 - DNA, 426 bp, Oryza sativa
  Clone ID: PAT_MRT4530_65457C.1
atgtggaatgaggggaatttacctttcccatcctggcgcatgacctacagcatggccctacccccgtaccccgcggatcgcaggagcggccagggggcctcggggtgccacgtcgtgcccctcgggccctcgcccgttttgccccgaggcctcggggtgtcacgtcgtgcccctcgggccctcgcctatccgccatctggcggggggagcaagcggggagggggcccaagccgaacctcctttaatgaacgcagcgccccaactgccccctgccgcattcaatgcgctgtgcccccacgtcacatctgcctccggcagagtggaggtaggtatgacccgtcccatcggaagggtcattcgaggggtgtcccccgtgtcaggcaagggacggcgctgaaccccactcaaggacaatccgtggcttag

SEQ ID NO: 64300 - DNA, 772 bp, Oryza sativa
  Clone ID: PAT_MRT4530_65458C.1
gcacgagggcaacacgccacgctccccaacactcgcgcatcgcccgcccacactagggtttttgatccgcttcgccgccgccgccgccgccgcctccttctcctcctcctccgcggccgtcaccgatctcatccgccgccgacgatggtggggctgggcgcgatgccggggtacgggatccagtccatgctcaaggaggggcacaagcacctctccggcctcgatgaggccgtcctcaagaacatcgacgcctgccgcgagctctccgccatcacccgcacctccctcggccccaacggaatgaataagatggtcattaaccatctcgacaagctctttgtcacgaacgatgctgcaacaattgtgaatgagctcgaggtccagcaccctgctgctaagatcctggtactagctggcagggctcagcaggaggaaatcggtgatggagctaacctcaccatatcttttgctggtgaactgcttgagaaggccgaggagcttatcaggatggggttgcatccaagtgagatcatcattggctacaccaaggccattaataagactgttgagatcttggaagatcttgtggagaaaggttcagagaacatggatgtgaggaacaaggaggaggttgtggtgctgatgagatctgcagttgcgagcaaagcattcggtcaggaggatatattgtgccctcttgtggctgatgcctgtatgcaagtctgcccgaaaatcctgctaacttcacgttgacatgttagagttgcgaact

SEQ ID NO: 64301 - DNA, 1254 bp, Oryza sativa
  Clone ID: PAT_MRT4530_65459C.1
atggagatgaggtgggcggcgccggcgccggcggcgagggggagggggagggcgaggcggcgggcgcctgaccagccgtcgttctcgtcgacgctgctcgacgccatctgcgactccatggacgagggcggcgaggacggccggacaagaaacgcggcgagtgcggcggccaagaagaggcaggaggcggcgaacagctaccactactactactgctacaagccgtcgctggccgccagctacagggcggcgccggcgctgggttccacggcggattgccccgggaggggctacttctcgtcgtccgaggtggagtactcgcttcgccggctccgccccatccgcacctccgccgccggtggcgcgggagacggcgcggcggtcgcgcggaagcagcggcatgagcagccggatgtggagaagacggcgaagacgaagccgggctccgcctcggcccgcgcgtgccgcaggccggcgtcgcccggcgcgcggctcgccagcttgctcaactccatcttctccggcaagcgtccatccgcgcagcgcccggcgtgttcgccggactacccggagcccgcgtgctcgacggcgccaccgtcgtcgtcgtcgtcgtacgcgcgccgcccctgccacgccaagacgccgcgcaccccccccaccaccaccaccacggcgagggcgcggccgagccggagcaggaccgtccggttcctggacatcgacggcaaggtcgcggtggccgcggccgtcgccggctgccgccgaattccggtcatggaggtggaggccgacaccgacgacggaggtgaggagagcagcgacgcgagctcggacctgttcgagctcgacagcctcgcggccattgctccggcgggtggtcgcgacggctcctacggggacgagctgccggtgtacgggaccaccggagttgggatccgccgcgacattggccgccgccgtccgtacggccatgctccttgtcggagctggagttttgaggagacttgtggtggccgccctctcgtggggagaacttcgaatgacccctccgatgggacgggtcacacctacctccactccgccggaggcagatacgatgtgggggcacgaccgtccatccagtcagatgtgaccggcgacaggctggtcacagatcggtcattcctgaccgtcgcgtgccagtcgagcacgccgcacgtctgcccctactgcgttgaatgcggcagggggcagttggggcactgcgcgcattaa

SEQ ID NO: 64302 - DNA, 549 bp, Oryza sativa
  unsure (1)..(549): unsure at all n locations
  Clone ID: PAT_MRT4530_6545C.1
ttcccgagctctttgagttcctgagcaaccaagagacgatcttagtcgcgagtctgagagactggaacactctcaagggccacgtcgaatcggtggtgaatctgaaggggctggacaatctgacncgatccacgcagaactacncagtgtgtaggaacacccctcgggcattcaaacgagagatcgtcatcagcgctggagcagggaattgcaaacggcgctgctggttgaaaggaaattgttgcgatggaatgattggaagaaccaaaaacaaaagacatggctgatgctggaacagccctgagttgtgaaagtggctgaccaaatatgatgggtccggtttgccctgctgtctgagaggaggttgttgacgttgctaagtgggagtaccgtacgtgacgtggttgggagtgacgacgacgtggttggtggatcgtttttggtcttgtttgactcgtgtnccccctaactacggtcttcttgcggaatgcaagatggagaaatgaatggatgaaaaatgtttctggccaaaaaaaaaaaaaaaaaaaa

SEQ ID NO: 64303 - DNA, 130 bp, Oryza sativa
  Clone ID: PAT_MRT4530_65460C.1
ataaatgacacatgatttttataaaaacgcgggcaaatcatttcatatatggacactcaacattacaaaactctatctcttaaagcacacgcttctcaactccaccaaattactccattattatttggca

SEQ ID NO: 64304 - DNA, 453 bp, Oryza sativa
  Clone ID: PAT_MRT4530_65461C.1
ggaaaccgttgggtgtcgccaaaatacaaattctttgcatggatagtattgcagaacagagcatggattgttgatagactctagagaagagactgggcaaaccaacaaatctgcccactatgccacacgacgcatgaaacgacagtccacctccttgtccactgcaggttctcacgacgaatctggtcagacctctagagatggatagggttgcacctcaatctgcaaaattgggatagatgaaccttccgagcctgcaaaaccgacaaaggctctaaaatctttggtaatcctcatctcctcggagctatggtgtgagcgcaatgcaagaatctatcaaaacagcggtatggcctaacaacaatgactgcaaaaataaaagaaaaggtgatcacttgggtccaggcaggcagtggtgaagcttccggtatggcgagatatggcattagccat

SEQ ID NO: 64305 - DNA, 150 bp, Oryza sativa
  Clone ID: PAT_MRT4530_65462C.1
gaccggcgatcctccagtacgagccacgcttcgccggcagggccgccggggggaccatcttcgcggcgcgcgaccgtgcccgcagagctgatggaacgagcacgacgagcctgttcaccttcaccctcaccgtctgagcccgcacgacga

SEQ ID NO: 64306 - DNA, 512 bp, Oryza sativa
  Clone ID: PAT_MRT4530_65463C.1
cttttgtgtcttgggaagtattatgacaggggaatttattaatttataaaatagtacacctgaatcaatggataattgtggagcgaaatgtaaagatgcagaattctgacaaagagtcctatagatcaagctcttatcaggattctcaatgggcgttcttcgtaagcgaggaattaccttactgtctgaagcgatttgtggatcccaatcgtgtctggtgaattgaacagtctttccaagatctctgaaccgcgattttcgaaataggaaaccatgatgattttttccggactatctcatgagtttgggtattgagaatgggagcagctgatttattgaattatctgcccttacactcgggtttccaagctgatgggataactcgtcgaccaaaccaagatctatcatgtctgattgagctgtgaccctaattgctgcatttctaatcgctcgtaatgttgggttaacgacttgtgactaaactttaatgtcctgatctctcgttccaagtg

SEQ ID NO: 64307 - DNA, 858 bp, Oryza sativa
  Clone ID: PAT_MRT4530_65464C.1
ctaagggttcggattacttaccggacttgaagtcccaaagctcaccggagcttttcgggaagcggcaccaccacaccttcacctcctcgtagtcgtgtcgggttccctgtgcgcgcgttgtgctggagcacccctccaccataccttgccgaagacgggaagcgtcggcttggcgtcgcccctcccgcctagaggtccatgccgctcggtgctcgtcgctgtttgcgcgcccacctagccagaccaccgacgccgtggcacggctttgtgccgccctcaggtgcgccccacagccggcaaagcaggagctgctcggcggtcattaccgcacgcgtgcactagcttgccaaaccgccatcgccgccttcgccattgttccgctcgcttatcgccgaagagaaataggatcaggagagagagagatttgggagctagggttttgcccctctctcctggttggcacttcattcggcaagaggacgatcggagccgtccaatagatcgaacggctcagatttgcctagcgtcaggccgccgccgcagcaacagattacgctgcgcccaatgggctgtggaagtgcatcggaccgtccccgcatatgtgccgtggtcagctgctcgacttgcaggctgtcgaattgactcggctcgccgaagatggccagcccaagtttgggtcgtcttgggaggacctgggccgaaagtttttaaggtgtcacactatcaaacggtgtttttcccgttgcaacgcacgggcactattgctagtactacttaaaaagtctaaaatgtttccatcctccgtgtgaaaaaaaagtcacgcgaaaaagaaaacgccatctgaaaaaaaagcccaaa

SEQ ID NO: 64308 - DNA, 402 bp, Oryza sativa
  Clone ID: PAT_MRT4530_65465C.1
cggtaccattgttcacttaggttccctgcaaaactctaaatccaagctgatcaaacactaaacaccaatcgaaatctccgattctactaccgattaactcaataaataggcgatcggagattggagtctctgttcatcggccagatttcaaaatccgagcgacggacatcgactacgaatggggtcaagatggagtggagagagtatttgcctcatcttcaaccgtatcggtagcagataaagcaatcgaatccgtggaggagacggagaggctaaagagatcactagcggattcgttgtacggaacagatcgaggtttaagcgcatcgagtgatacgagagctgagatcagcgagctcatcacacaggtcgagtctaagaaccctactccagctcctaacg

SEQ ID NO: 64309 - DNA, 1517 bp, Oryza sativa
  unsure (1)..(1517): unsure at all n locations
  Clone ID: PAT_MRT4530_65466C.1
acccacaccacatcagccactctacacagacccacagatcacgaccactaactctccatctctattggatccaatactctcggtcgacctttccaacccgnccgagattgcggtcgcgaacaggctacatatattnaaccaaagataggagaaaccaaccacgagtgactggaccagatgaaacaaaccgtgtttacagcaagggcacantgaccatgcttctgtatcagaatcgagcatcacaccaccactctgcttaccacaagcataggaggcgacacctacgagaacacaactcataggtatgtgctatacgactcncgctaatgacaggcaccctcntctcgacctcgaatcaatagccatgtgacagccgcgacagcgctgncgtgagaggagagtcacacaagacggcccgcaccgcggataccttgcgccngtacacgtacaccacgtacccgcgcagcaacagtcatccacacaccgagctngagacaggtgcatatatatcancacgacgcagatcacgccacacggccaacgcatccgaggtagtgacgaggccgagtacctggtgcgactgcgcccgctagtgagtgtgaccacccacccacggacagtgccgctgccaccgccacatctaccactacgtcactccacggctaacatcctactcccgtgccactgagatctacgcgcatggtacactcatggatctacacacgagtcgccnacacaacatctcaatacatacgacccgcacagccgcgccgcaagcagcataccaaccatgcgaatcctctactaccctcatctacaacaaccagcatcaaatacacaacctattacactgcaccccaccacgcacaccacaatccagagctaaatagacgntccagttaaacacacnatgaaccaatgacaagtacnagacgaaccgtacaaccagaactttcaaaccgcaaccacacgcatgcactcaatcctgctcaatgntgctgtcaccgtcncgacaaccccacacacgcgccctactcaatcaactacgagatgctccaccatgcaccacactgccaaccaatcaccagcatagcctagatactcacatcgcgcaacaaaccccacgtgcgaacaccatcatccaagcaacaacgccaccagaccacaacaagcccacacagacaactatcaacaagcgcagtccaccacaacatcatatccctacccacaccacgcanacaagtacgcatgtacaagcacacgtcacaagacgacacgcacgaantctaccacactcacgcaccacatcaccacacatatacgcaccgcacactacacgcacacaccgatcccgaantacagtactgactacaccacagactatcacactaccacccgcgtatactagtatatccgccgacncacnaacgcacgcagtacagccacacacgacagtcagtcgnacacagacgaatcacacagatantctaatctgccnactcacacacgcatcatcc

SEQ ID NO: 64310 - DNA, 260 bp, Oryza sativa
  Clone ID: PAT_MRT4530_65467C.1
tgctgggacgcctcgcgggcccggcccggacctgccgggcggccgctctcgaggtttctttctggcgtacgccggcatgcgacgacagggctattatagagcggcacctacattcaattaacgggacgtcgaacaacatcgtaacgcctgcaatatacgtggcgcttcccagcgaaatgtgctcggaacccatatttgtttattctgctgaagacatacaaatatggatccgatcatgagacacttacaccggttgatgc

SEQ ID NO: 64311 - DNA, 2139 bp, Oryza sativa
  Clone ID: PAT_MRT4530_65468C.1
atggcgtcggccgccgccaacaacagtagctcggccgcctacgatgcggcggagacaggcggcctcctccgccgccgcaacaccaccgccgccgcccgcggcaatgcgggggaggaggaggaggaggcggaggcggtggcgccgtccgtggagcaggcgttcgcggacaagcccgtgccgtcgtggagggagcagctgacggtgcgcgccttcgtggtcgggttcctcctctccatcatgttcaacatcatcgtcatgaagctgtccctcaccaccggcgtcatcccctcgctcaacgtctccgccagcctcctcggcttcttcctcgtccgcctctggacggcggccatcgagagggtgggcttcctcaagcagcccttcacccgccaggagaacaccgtcatccagacctgcgtcgtctccgcctacggcgtcgccttcagcggtgggtttggcagttacttgtttggtatgagcgagaccatagctaagcaagcaacagaggctaatgatccgatgaatatcaagaatcctcaccttggatggatcatcgggttcatgttcctcgtcagttttgttgggctatttgcactggtgcccatgcgaaaggtgatgattgtggactataaactgacctacccaagtggcactgcaactgcttaccttattaacggattccacacacctgagggtgctgatcttgcaaagaaacaagtccggacattaggcaagtacttttcgattagcttcctctgggctttcttccagtggttctacactgctggggacaactgcgggtttagctccttcccgacatttggccttgaggcttttaagaacaggttctattttgatttctcacctacctatgttggtgttggaatgatctgcccctatatcgtgaatgtgtctcttctcattggtggcatcatctcatggggcataatgtggccactcataagcaagaagaaaggaagttggtaccccgagacacttccagaaagtagtctacttggactgcaggcttacaaggtgttcataaccatagcagtaattcttggggatggcctttacaactttgtgaaggtcttcggctacacaatcaaaggcttcatagttatgtataagaacaaaaactcaaacacgcttcctatctccgacaatggcactcctgccaacgccactgaagaggagtcatttgatgacaagcgtcgcaatgaactattcctgaaggatcaaattcccaagacagttgcgattgggggctatgttgttcttgcagttataacgagtggttgcctccctctcattatcccacagctcaagtggtactatatattgattgcatatatatttgcacctataatggccttctgcaatgcctatggaagtggcctgacagattggtccctcgccaccacctacggtaagcttgcaatatttgtgtttggtgcgtgggcaggcgcttcgcatggtggtgtgcttgtaggactggctgcctgtggtgtcatgatgaacattgtgggaacagcttctgatcttatgcaagacttcaagactggatatatgactttagcctcgccaagatccatgtttgtcagccaggtgataggtactgccatggggtgtgttattgcaccctgcgtcttctggctgttctacaaatcctttaatatcggtgcaagtgatggtgcttacccagcaccttacaccattatgtaccgtaacatggcgattctgggtgtcaatggattatcctcattgccaaagtactgccttacactatgctacatagcctttgttgctgccttcatcatcaatctgataaaagacctggtaccagagagagtggcaaagtacatcccgatccccatggcagcagcaattcctttctatcttggaccatacttcgccattgatatgttcatgggcagcgtaattctctatttctgggaatggaggaacaaagatgaagcgcagtcgttcggtccagcagttgcgtcgggcttgatgtgcggtgatgggctatgggccctacctcaggctgttctttctcttgtcaacgtgaatcctccgctttgcatgaagttcttatcaagggctgccaatgccaaagtggatacattcctcggtaactaa

SEQ ID NO: 64312 - DNA, 609 bp, Oryza sativa
  Clone ID: PAT_MRT4530_65469C.1
tatatcgtgatgacgatctatctcgtggcccgattttctggtgaggggataactctcgctttgatcgagtgcgacgtttgcgatgtggctaccaaccaacagaacaagtccaggacgccgtgcaatcactacaccacaaatgatgtcgtaccaactatgacgcacggttgatgatcccaaaaatgaatttggatatgagaccggatacgtttgaaaggtagcgagataattttttcatcaagtccaagatcacccaaatcaaagttggcatgaagacactagtccgtttgtagtcagtgctttccctggagaccgaactggacttggacttaaaacaatcattgaaacgtgtgaagccacgtgcgtatccgatgaagtgaagtactcatcatatcggctgtcgacgatggtacctatggcggcaatggttgaaggctcatcgggacccatgctcgcgacctcctccggtcggggcaccgcggcggcgccgccaccgccgacgccgcgagctccccggcctccctgacgagctcgccgtgcagcctctcgaacgtagacgacgacggcgactgctgctgcttctcctcctctgcgtcgccgccggcggcc

SEQ ID NO: 64313 - DNA, 1861 bp, Oryza sativa
  Clone ID: PAT_MRT4530_6546C.1
cggctcgagcacgtccctcaccccgcgctcggctagggtttcgcctcctccgccaccgccgccgccgccgcagcagcggccggggacgcgacgcgcgatgcagcagcctcccccgccgacgatgaacggcggccaccacgcggcccctcctccgccgcaggtctccggggcgcccccgccgccgcatggccactaccagcagcagccgccgcctcagccgtactaccagcagcagcagccgctgccgccgcactactaccaggcggggcccccgcacgcgcctccgccgcagcagccgccggcgatgtggggccagccgccgccgccgccgccgcagtacgcgccacctccgccccagcagttccagctcccgcaccagcagtacgcgcctccccctcagcattacgcgccgccgccgccgcagcagcagtacggggcgcagatggctggcgggcccgctccgggaggcgacgagatcaggtcgctgtggatcggggatctccagtactggatggatgagagctacctctccaacgcttttgcccccatgggacagcaggttacctctgtgaaagtcatccgcaacaagcagagtgggcactctgagggttatggttttattgaatttcagtctcacgctgctgcagaatatgctctggctaactttaatgggaggatgatgcttaatgttgaccaacttttcaagctaaactgggcttctagtggtgctggtgaaaggcgtgctgctgatgatggtcctgagcacacaatatttgttggtgatttagcttctgatgttagagacttcatgttggaaaaagtcattcaaaaccagttatccttcagttagaggagccaaagttgtttttgacaaagtcactgggcgatccaagggatatggttttgtacgttttggagatgaaaatgagcaaacacgtgctatgactgagatgaatggagcgaccttgtctacaaggcaaatgaggcttgggccggcagctaacaagaagaatatgggtacccagcagacatattcaacaaatggttaccagagctcccaaggaaacagtttggagaatgatcccaataatacaacaatctttgtgggcgggttagattccaatgtaaatgaggaccatctaaagcaagtatttactccatatggggaaattggttatgtgaagattcctctaggcaagcgttgtggatttgtccaatttactagcaggtcatctgctgaagaagccatccgtgtgctgaatgggtctcagattggtgggcagcaagttcggctttcatggggccgtactcctcagaacaagcaggctccccagcaggatgccaaccagtggaatggcaactactatggataccaacagggctatgattcttcttactatggtgcacccaatgcacaggatcctagtgcgcaaaactactatggatattctggctatggcaattacgaacagcagcaggagcccccacagcagcagcagcaacccccacaacagcccccacagcagtgaccatggcgacgtgcaactttcagatctcgcagttggattatcagggtgtacattttgcgtgaactcgagctggcgcttccttaagttatttgtagatgtctttgtgtggatgaggtcgtgttctagctccgctaccacctgtcgttagacgactgatcgaacccttttgacagtagccagtgtttcgttttttgggcctccctgggtgtgatgatcatcaaatctgatgctctgagagttactgaggcgactaatgttatttatggatggtttgtttgggcttttgcatggaaatgaaaccatcacccccctgtgaggctgtgattcccgtc

SEQ ID NO: 64314 - DNA, 568 bp, Oryza sativa
  Clone ID: PAT_MRT4530_65470C.1
acctcctcccacccctctctcccctccgctccgggctccgccggagggggcgagctccgccgtcggcggaccatgggcgcgtggttccgcgtgggcgcggatcgccgccgccgctcgagtcctctggagaggtcccacgccggcctcggccccgtctgaagtgcgtgagcggctggcagtggagaccgtcaagctgttttctcctgggatgaaccagcaagataggtccttctggagctacctcattggctacaactgtggcgccctgatcatccttggcaatgctaatagagaacttgatcagagggcaaaggctcttgctgaggaacgggaagctctttgatggtggttgctaatgttcttcgattacccttgcgacggtgaaaatgtatggttatcacctttctttcactgattcgaacatgttctgtttccatgcatggaggaccatccgggtgcttgatctgctcttcccctcggtgccaaatgaaatctgtagtgccaattgatggattaaaatatgtgaagtgttaaatgctgcccgattcaaaaaaaaaaaaaaaaaaaa

SEQ ID NO: 64315 - DNA, 909 bp, Oryza sativa
  unsure (1)..(909): unsure at all n locations
  Clone ID: PAT_MRT4530_65471C.1
caggaaatcattatgaataatcttgatccattagcattgccattaaatggtaccttannnnnnnnnnnnnnnnnnnnnnnnnnnnnnnngttcacaatggcaaatttatatttacgtttattggtgggccttggttgtcagccgttaacggtagaaaaaaatttagtgggtacttttaccaaagcggcaaccgaagaattgcgtgatcgtattcgtcgtaatattaaagcctgtcgaagaattttttgggattatgaacctaaccaaattgatcaaaataaatataatttctatagtcaactttatgaaagggttgataatttagatgaagcaaaattacggttacgtattgcagaacgagaaattgatttagccagtattttcactattcatagtttctgccaaaaaatattatcgcagtttgcgtttgattctggcattcgatttgataatgattggcagacagatgaaagccatttattacagcagttaagtgaagagatatggcgagagcaattttacccgctgagtttgcaagaatgcgagatcatttataacgaattagaagaaccattaaaagcacttaaaatggttcaatcatttattgggattgaattgccggcgttatctgccgaacaaaaaagaatatttacgccagagctatctactcgttatctaattgaatataagaattttttacagcaaatcaaacagtattggcaaataaatggtaacgaaattgttactattattaatgcggaattaaaaaaaatatataaaacaggggagaaaaaagccttaaatcgtacctcttatcaaccccgttatcttgcaacatatcaatcagagcttgataattgggctaattcaatggatcttactttaccaaaaaatttcgagcgcttttgt

SEQ ID NO: 64316 - DNA, 603 bp, Oryza sativa
  Clone ID: PAT_MRT4530_65472C.1
atggacagcgcatggccggcggcgggcgacggcgcgcgcgaggcacgtggggacgatgtaggcgtcgatggcgacgttgggccgcgcgaggaggcgacggagcaagtggaacttctcgtcctcaccaccaccaccaccaccaccagaagcagcagagccgccatggcgcttgcggagctcagacgaggggagggcatcggcgcggccgtccccggccgcggcggcgaggaagtagaggcggcggcgccggggggggggaacgggagggcgcggtggagggggaggacgacgggaggagggccgcggcggccgagggacggggagaggcacgtggcttcgatccctcttctcccgccggcgcccatcggggagaagggcggcggactgctaggcgagcgtgcgcaagagagagatggccgccgccgccccaggcgcctcgcgcgccgtcggccatgcgttgtccatcgccgcgagggaggaggcgagctcgtcggggcggccggcgggagaggaggcagcgcaagccggccgacgggagggagggagaggagctgtggtgctcgggcgtcggcagccggctggagaggagcggcatctcactga

SEQ ID NO: 64317 - DNA, 376 bp, Oryza sativa
  Clone ID: PAT_MRT4530_65473C.1
ttttggttttttttttttttttttttttttttttttctccttattgtttttttttttttaatttaattttaagtggcaaattaccacatttcaaccttaatagtttaaaactgacaaaagggagaaacatcttatgataagagatgaaactattaatgactgaaacctaaattaagacgacaccgacgcgacgacccaatggcaaagggaagctgctcagccgggcgcgaaaaaaaactccgaggcgaaccttttggaccggaacagcttttccatctccggggttgcgttaaacgatgcctacaggaactccggaaagaacgcctttcacaccgaaatttttccccgccggggaccgaaaaacgggtttgggggg

SEQ ID NO: 64318 - DNA, 357 bp, Oryza sativa
  Clone ID: PAT_MRT4530_65474C.1
ccacctgtcttctagacagcaacactctgcgggggggaggaagggggaggagatcgcgactctcggcgtgagcgcggtgggcgcggtggcgcggagggcatcaggatggcggatgagctcgctcctggaggtgtcccggaagctgaagaatgagctggagacgctgacggacaacccggaactgatagcctcgatgggcgcgctctacaccttctacgtgcagaacaccccgcaggcgcgccgtaacctcaagtcctacgtcgagcagcgcggactgaccatcaaccgccattttctcgacgccttcctgcctgaccacaaggcgttggatcgcgtcagggggaggtgcacgcgctc

SEQ ID NO: 64319 - DNA, 3177 bp, Oryza sativa
  Clone ID: PAT_MRT4530_65475C.1
atggagcaacaattggcggaacttgtggaggtcatgtctgcgattcagaagcagaattcggcgattcaaacttcggttggatcgctggaggagatcaagcccctggtggtggagttagcgagttggaagccggcgatggacaaggcggtgacagagctgcatgaggagatgggggatctgcgccaacaagtggagcggatagcccgtaatccggtgctctccgtcaagccatcggagttgccggcgctgcttcctacaccgactcggcctcgggataccgctcccaaggaggaggaggtctctccaagtgtgggtggcgaaggtcacgggccgttaggccaccgcgttgcttcgattccacgggggaaggcgtgtgggaaggagtcctctccatcgtctctcccggccaaggagggttcgaatcggggttttactgcggggtttcacggaggaaacgctcgggtagattgtccacagtttgatggggagaaccctagagcctggaaaatgaagtgcgaaacctatttccgtgtgagtggaatttgctctgaagtgtgggaggctatgacgagttaccgagctacggcccgttctgctacaccgtcgtttgcttccaagacatttggtggtggccgagctgatgaacggacactgccagtggaagataaggtagctgccctgagagcttatcgcaaagcaaagggattatgccatacatgtggggaacggtggagtcgcgatcacaagtgtggacctactgttcagttgcatattgtggaagagcttttggaattgttagctgattctgctgctgatggtatgcctgagattattgaaccaactactgacattgggtctgagtctgaacctcaaggcgaagtctgtcagatttctcgtgatgctatgattgcccagaaggatgagattgaacggcaagtgaaggatatgctgcagcagggagttattcaaccaagttcaagtcccttctcttctccggtgctgttggtgcagaaaaaggacctcacttggcagttttgtgttgactgccgtcacctgaatgctgttacagttaaaaatcgctatccccttccaatcattgatgaattattggacgaattgtcaggtgctagtctgtttaccagcttggatctgcgcgcggggtatcatcagattagaatgcgagctgaagatgagtataagacggcgtttaaaacgcataatggtcattatgagtttcgggttatgtcctatggacttacaggagccccggccacttttcaagggttgatgaacatgatttttgcaccgttattgaggaagggagttttggtgttcattgatgatatattggtgtacagtcgtaatttgcaggaccatgtcatgctgttgcgtcaagtggtcttcgtttggacttcagaacatcaagctgcatttgaagctcttaaggctgctttggtttctgccccagtgttggcgttgcccgatttttctgggacctttgtaattgagactgaagcttctgatttgggggtgggtgcggtgttaatgcaggatggacatcccttggctttccttagcaaatccctgggtccacgcaacagaggcctgtcaacttacgaaaaagagtgtctcgctatattgctggctgttgatcattggcgctcttatctgcagtttggtgagtttatcattcgtacggatcagcgcagcttgattcatcttgatgatcagcgtttggtgacatcttggcaacaacgagcattaaccaaattacttggcttatcttaccggctggtatacaagaaaggtcttgagaataaggcagctgatgtgttgtctcgttgcagatccaatgaggtgtatcaattgagtactgtgtcatcttgcgtgccctcttggttggaggaagttcagaagggttatgattctgatatttgcacttctcaattgctcgctaaagtgttgctctctcctagtcaatttccttcttattctctgaagaatggtattctctattatatgaggctcatttggctgggtgcaaactctgaattgcaacttaaaattctgtctgctttccattgctctgccgtgggtgggcattctggtatacaagttacttacagcagagtgcggcgcttgtttgcatggccgggtttgaagcaggccgttcgccagtttgtgtccaactgttcgatctgtaagcaagcaaaagctgaacgtgtgcgttaccccggtcttttgcaacctctacctgtgccggagcatgcctgggtaactgtttcacttgattttattgaagggttgccttcttcagcaggttttgactgcatactggtggtcgttgataaattcagtaagtatgcccatttcctggctttagtgcacccattcaccgcttttgatgttgctttggcttatctgaacaatgtttataaactttatggattgccacatcatatcatttcggacagagtccgtatttttaccagcgccttgtggacagagttatttcagttgacggatactcgtctgaagttaagtactgcttatcacctacagacggatgggcaaacggagcgtgtcaaccagtgtttggagacatttctccgctgttttgtgcatgcctgtccaaagaagtggttccgttggtgggctttagcagaattttggtataacactgcttatcattcagcgcttgagaggtctccatttgaggtactgaataaggtgggagcagtggcttatcgactacgattgccggatgattgctcgattcatcccgttgttcatgtctcccaacttcgacaagctgtggcaccaaccactgcgactgatgttcgtgctcttcctaccatggcaccagaggaggtggttcctgttcaagttctcgcccggcgagtttcgaagaaaggagctggagctgtggaacaagtcttggttcgttggacaggtcaatcatcaagtgaggctacctgggaagatgctgcggctttgcgtcttcgatttccggatgcgccggcttgggggcaagccgctttcgaagggggaaggaatgttacgggtgctgctactgtatctgaaccggtaagggagaataatcctgtgaagtctgggaaacgacctcaaagggagagaaggccgaatgtccgagtctctgggccggagtggtcttag

SEQ ID NO: 64320 - DNA, 663 bp, Oryza sativa
  Clone ID: PAT_MRT4530_65476C.1
ctctaccagtgtagattctctcctaacaatctttattcgaaacgccgagacaatagccaacatcaactttgcatcatggaatacatgacacagccgagatttgtctccctgtagcatccaatcctaatgctatggaatacatttcatcatggaatacattattaaagctcactctcacatgtaccgatgaaaatggaggttctataagtacgtactacctttaataagattactgtgaccttggctcctccaccagtttggttgaataataaaagcatcaacagatagccaatcaatggtaaataaaataatagaatttcttcgaccacctgatagcgcttgttcaaaaccgaaggcaacctaacagatgatctattgctcttcattccgtttatttacagcttgtaagcttgtacacttcctgacggttttttagcatgcctatatggcaacctgcaaacataagacgaaaaagaactgttagtggcacaaaattagatatacttttgattcataaagtttgcaactttgtgttttttacgaagcgtacttttatacatgtaagctttggggtagtgtctcacgagcgcaagaaatgcacaaatctaacatgcaaactctagacccccctatatgctcggcaaatttggaaataacgtaggc

SEQ ID NO: 64321 - DNA, 705 bp, Oryza sativa
  Clone ID: PAT_MRT4530_65477C.1
atggcgcttgtcgatcccaaggccggggagtcctcctcctccaccgtcacagctcaccacctgttcgtcgttgtgatcgacggcgtggagacgtccatccacgagggcagcctccaggccagtctcggcggcacggtcaccatcaccagcgcggggaacctctccgccagcggcgtccgcagcgtcgtcgtgcgcggcgggggcgggggcagcgtcagcttcaccctgtgcggagacgcggtcgccgacggcgtcgactccgcgtcgttcgtccggtgcggcgcagcgcgggcggagggcgcgcgggcggtgtcggtcacgcggtgccgcgccgcggacttggagcaggccggcagggtgtccctcgagcggtgcagggaggcacgggtccggggcggcggcgcgctgcgagcagccaggtgcaggcgcgccgacgtggagagcttcggcgaggtgcacctggcacggtgcaagggcgcgcgcgtcgactggtgcggcagcgtggaggtcgagatgtgcagggcggtggatgtcagccggtgcggggctgtgaccggcggacggtgcagggtggtgagcgccgtcggctgcggcagcgtcgaggtggcccatgccgtggtgaacattcttgaagaagaacagccacaagcagcacaacatcccgtctctccatcacactccagtcgatccagtgacagtgaatga

SEQ ID NO: 64322 - DNA, 458 bp, Oryza sativa
  Clone ID: PAT_MRT4530_65478C.1
gggaaaaaaaaaaaaaaacttttttcccctccccctttgctttattggtcatacctaacgggttttaatttggccccttccccattgggtgggttttactttcgggttgggttttttttttttttttttggggggtttttcgggggccacttgccgtttggttttgaccccttccctttggggaaaaaaccgttttgggttcccccacaactttgggcaaagttaaactggttcaaatttgtttaagtttttaaaaaccccctttttttcccccccagacaaattttttttgaaaatttttttaatttttggtttaaaaaaactaattgggtaatttcaaatttcctttttttgcccttcacttaattaaaaagggaggtgtttaactttgcccaaagtcgaaacgggggggggtttttttaccccatttacccggggccccatttttgagggggggg

SEQ ID NO: 64323 - DNA, 774 bp, Oryza sativa
  Clone ID: PAT_MRT4530_65479C.1
atgctagtccgctgcctcctcgtcgtcgccctcgccgccgtcgtggccgccgccgctgggcgcctcgccttggccaaggagaataacggcggccgtgggagatggcaagtgtactcgccggcgccgtcgccgcagaagcacccgtgcctggagaacccgccgaacatgacggagaacacgggcggggaggccggcgacgtcgtccacggctacggcggcctggagtgctacgccaccggctcccgcagctcgggcggccgcgccgtcatcctcgtctcgacttactacggtttccgagcaccaaaactgaggaaaatagcggacaaagttgcataccagcttggatgctacgttgtggttcctgatttgttgttcggggacccttacaccgatgatccagcgaggccatttgaggagtggatcaagacacactctccggttgaagcagctgaaaagactaaaccgcttattgcggctctgaagaaggatgggacgtctactgttggagttggaggttactgctggggtggaaaggtggccgtggagctatcaaagactgaagaaaccaaagcggttgtcatttcgcatcccgcgctagtggttgtagatgacatgaaagaggttcatcacttggtgaagatcttcccggatgcgccccatggcttcgcctgcagatacaacgctaccgacccgttcgccgtcaaaactgcagaagaagctcgtgctgacatggtcaaatggtttgacaagtatctggagatcatgaagcggtga

SEQ ID NO: 64324 - DNA, 156 bp, Oryza sativa
  Clone ID: PAT_MRT4530_6547C.1
atggcccacgcgacgccggcgtggatgacggcgacgcgagggtggggctgggcccacacgtcagccagacgcggcgggctgacgcccctctgggagcaatcagcgcagagcttttcgatccgtgaagcaagcgaccgcccacagctgagctgctga

SEQ ID NO: 64325 - DNA, 547 bp, Oryza sativa
  Clone ID: PAT_MRT4530_65480C.1
cgcgctcgctacctcaggatggaggacgttgcgaacgcggacgagctacccagcttgttgaagaaaaggaagtacagatctcacaataaccatgcagaaagacaaaaaggtaaaggttcgatgaatatgccaacacggaaatcagagaggctagctaagagaatgaaactcatgacatcagtgctcctcacacaaaggaaaaagattggagttggtgagcattttcaggcagaggtacctgactggactgaaccaccttcagatgaacttgctcgttacaaaaatgacccaaacatctcaaagatgctaggaaccagaatttggccacctgaaggtcaagttctacaaactgataaaaaaatagctggccagggaaggatggaatcatgtaactgttcatacccgggatccttctgctgcagacagcatcacacagatgcagccagagatcagctaaggtgtgaactcggtagagcttcacagaatggcgatttgattcaattgggtgaggagtgttctaaaatgttgactcgtgaggagcatctaa

SEQ ID NO: 64326 - DNA, 855 bp, Oryza sativa
  Clone ID: PAT_MRT4530_65481C.1
atggcggagtgcgccaatgggagctacagctgccgctgcctcgagaatgacggggagaggcgacggcgactagggcctcaggaggcgcggatccacccgtgccgtccttgggaggggcggatctgcatccaccagcgaagtggtgggaaggaacagagacaactactacatagctacaacgaccatgatgacaatggaggcctcagggggcgcagatccacccgtaccatccttgggagaggcagatccacctccaccggcaaagtggtgggaagggatagcgacaactactacgcagctacagtgacaatgatgacgatggaggcctcagggggtgcgaatccacccgtgcccttgggagcgacgccggtgatggagtggcgaggagtggcggcggtggtttctagagcggtcctcattgacagcatcaaggacctatttggaaatatttttattatagataggctcgattgcgacggcgatcaggtcccggattcgcgtgacgcgtgctgcccaaaaaccgggtgcatccgccgccggacgggcgggagactgctccaagttgttgcaggcatctcagccgggctggcagctgcactggaagtggagaaaaagagggaactggaggccgctgatgagacggcgagctggagcggcggctttgaacatatcaatgccacctccgagaagacgctgacgacagcggcggctcagccagatcctgcgagcatgacgcgatccgcgccagagtgccctctcttatcgccggagagcttgagctcaagcgccgccaatcttgtcgccctttgccacagggagctcgacgccggagatcttttcactaccacgagctag

SEQ ID NO: 64327 - DNA, 456 bp, Oryza sativa
  Clone ID: PAT_MRT4530_65482C.1
aaatggttaaaaaaggaaaaatgcactagttttattggacctgactttgaccggttacaaaggcaaaaaattacgcgaacttttgcaaacctacgcctttaacaagtggggttaatacgagtgtcttgttaaatgttgggctcaaaatggaaactgccctggcctataattaaaaaattggctctgattcgctagctagttaccactaccacctcctgtcctggatatgcatgcgagaccgggagcccaagaggccgtctgcggagtttgccctagctggaaagaatgtgcgatcgaatataccttcgctatccggcaggaccttttcggactggcgattatactccactttgacagcgggcggatgtgggacccatgtaatcttgttgtgaacagtctgtcctagacgaggtttgactttaccaacaggttgaggggcctttctttctttgtgca

SEQ ID NO: 64328 - DNA, 1374 bp, Oryza sativa
  Clone ID: PAT_MRT4530_65483C.1
atggccgccgccgtcgccgccgccgcctgccactccccggcgcgcctcgtggtcacctgctcgagctccgccacgcccgcgccgccgcggcgcccgctgcgggtggccgtggtgggcggcggccccgcgggcgcgtcggcggccgaggcgctggcgtcggcgggcgcgcaggcgttcctcctcgagcgcaacccgtcgggcgccaagccctgcggcggcgccatcccgctctgcatgctcgacgagttcgccatcccgcgtgacctcgtcgaccgccgcgtcacccgcatgcgcgtcctctcgccgtccaacctcgccgccgacttctcccgcgcgctgcccccgggcgcccacatccccatgctccgccgcgaggtgctcgactccttcctccgccgccgcgccgccgacgccggcgccaccctcgtcccgggcctcgtcacctcgctctccctccccgccgaccccgccaccgacccttacctcgtccactacatctcctccgactccggtggcccctcctcctcccggtgcgtcctcgaggtcgacgccgtcatcggcgcggacggcgccaacagccgtgtcgcccgcgaggtcggcgcgggggactactcgacggccatcgcgttccaggagcgcatccgcctccccgacgaggccatggcctactacgacgacctcgccgagatgtacgtcggcggcgacgtctccccggacttctacggctgggtcttccccaagtgcgaccacgtcgccgtcgggacgggcacggtggccgccaagccggagatcaagaggctccagtcgggcatccgcgcgcgcgcggcgggcaaggtcgccggcggccgcgtggtcagggtggaggcgcacccgatcccggagcacccgcgcccccgccgcgtggtggggcgcgtggcgctcgtcggcgacgcggcgggctacgtcacccggtgctccggcgagggcatctacttcgcggccaggtcggggcgcctctgcggccgcgccatggccgacgagtggcggctcaccggcgcggtgacggaggccgggatacgggcgggatacctccggcggtgggacgacgagttccgccccacgttccggttcctggacctgctgcagcgggtgttctacggcgggaacgccgggagggaggcgctggtggagatgtgcgccgacgagcacgtgcagcgccggacgttcgacagctacctgcacaagcggatggcgcccgccgagccgtggggggacctccgcctgctgtggcgcacggcggcggccatggtgcgctgcggcgtgctcggcagggaggtcgagcgcctccgccgtctcgagcagcaggccgccgaccaggtgctcctccgccattga

SEQ ID NO: 64329 - DNA, 816 bp, Oryza sativa
  Clone ID: PAT_MRT4530_65484C.1
atggtgaataggaagaagaagaagaccaagcttggtatcacctctcttctcttcagcagcagcagcagcagcggcagggacacatccactactactagtggcttgccgtattcgtattcgtcgtgctccaatatgtcgtcgtcgtcgtcggcggcggcggcggcgtggcaatggccatcctgcaagcagccgaggacactctccttcaggcagcagcagcagacgatgatgaagaccatgaactccgcttacttatccgcgggcttctccttcgcctctcgagacagccacagctccacctgcagctgctgcaggagcaggacggcgtccgacgcctcggcctccgccgacgccgtcacccgcgcgctgcgctccgaccgcctcttttttgaccctgacgcgtccccggccgccgccgccgacctcaagctcaacaaggccaaggccaataagacgaagaagaaggtggaggcgttcggcggggcgacggcgatgaccatcgagtcgtcgaacccgtaccgcgacttccgggagtcgatggaggcgatggtgactagcggcggcggcggcggcggcgctgatgactggcggtggctggaggaaatgctggggtggtacctccgggccaacgtcaagagcacacacggcctcatcgttggcgccttcctcgatttgctcgtctctgctgccgcctcgccagctgcttcttcttcttcctcctctccggcggccaaaggcaaatattcctcttgctgcagcgcctgttcctcttcctccatcaagctggaagaagaacatcagctacgacattactaa

SEQ ID NO: 64330 - DNA, 159 bp, Oryza sativa
  Clone ID: PAT_MRT4530_65485C.1
atggcgatggtggcgacggctcgcgatgacgaccttgaggacgaccccgacgacgacgacggcgccccgacgaccttgcgaggagtacagttgctgcgggccgagaggctggtagagaggctgttggagatgctcttaatgaacaatttgtgtttctaa

SEQ ID NO: 64331 - DNA, 210 bp, Oryza sativa
  Clone ID: PAT_MRT4530_65486C.1
atggcggcaagccacgcgcgccctggccgtgtgtcagacagcgtgcggtgcggtaggtatgccttatcccgtcaaaatgatgaggggcacagtgacttgcaaccattcagagccggcttgaccgacctggacacacccgggacggcgttcctggcacattcgcacccaaaatcctccccgtgtcagcctgcatcgaccggcatgatttga

SEQ ID NO: 64332 - DNA, 807 bp, Oryza sativa
  Clone ID: PAT_MRT4530_65487C.1
ttagcgcgcgtcggcgagatggcgcttctgcagcgacgtaggcgacaccgtgtgttcgccgtcgttcagctccccctggcgtgtggctggcggcgacgagcggctaccggtgtaagatgggagtcgccccgccgccggcggtgggccagctggtggtggacggcagccgtattccgacgagccctcctggccatggcgcacgcagccagagccggcgccgacgccggtctgcccgccggagggttgcatcggcggcggccacccgtctgaaggcgagctttggaccaggagcactccagtggctgcagggcagacagggcaaccaggacggagatgggaggcgtggggaggctgccggctcgacgagtgcactctcaccgccgtggtttgggcaaggcacaagctgtgggaggtcggatgcgggagagaataggctagggctggaggcaaggcgccggggacgtgggagacgccgggcgcgtggaggttcggcttctcccggcgccggaggaatcgggacggaggcgtcggcgcgggagcgatgtgcgccaggggcagcgacgccggagacgcgagatgtgacgagaagaaacggatgacgacatccacaggaaaaatggaaatgcaggacgacagtgcgcctaactgtattgggcgtgtcatccccctcggctctaaagatccaaagacgaggcctatctcctccttgtggcatttcgacaaacacctccggctcatcttgtcagcagctaaactgagggcgaatcgacaagcttgatcaatcttcctgttctccataagtgccat

SEQ ID NO: 64333 - DNA, 191 bp, Oryza sativa
  Clone ID: PAT_MRT4530_65488C.1
gtataatgtcgtttgctgaggtgaatgcaaatttgcttcatcaacgtaggactcgacgtcaaatgacggtaaggggattgaccatgaatgagccattgtgtttaggggatcatttgtcttgctgtttactataaaaatgtgaaacattatacatgtctctcagagctccaatatcagatttattaacttgt

SEQ ID NO: 64334 - DNA, 483 bp, Oryza sativa
  Clone ID: PAT_MRT4530_65489C.1
atggcgcacgcagccagagccggcgccgacgccggtctgcccgccggagggttgcatcggcggcggccacccgtctggccgacagccttagttatcagagatttggagcaaccaaagtgtcacttgggaagtcccaatggactactgtgtggctatgatacgttgagctgcatcggtttcgatcttcaacaagaggatcaaatcaactggcacgctaatacacctgaaggcgagctttggacctgcactggagttaagcagatctcccaggcctcgtgttttctgtcaacacgcttttggcacgcccagtggaacttgtcagcgtcttaccaggagcactccagtggctgcagggcagacagggcaaccaggacggagatgggaggcgtggggaggctgccggctcgacgagtgcactctcaccgccgtggtttgggcaaggcacaagctgtgggaggtcggatgcgggagagaataggctag

SEQ ID NO: 64335 - DNA, 1908 bp, Oryza sativa
  Clone ID: PAT_MRT4530_6548C.1
atgttcaagaagcatgttgatgtaaaggctctacagcgtttgtcgggagctgacaaaaagaagctcagaagaactgccaaggaaaggttcccacaagcatctgatgctgaccttgatgccatccttcctcccaatgctaaggtatcagttgctaactgacaaaatggagttcatgaatatggcaaagagggagtgttcacaaggattttcgacattgattgatgacgccatgacttcttagctacagaacatagttgctcgggtcacaataatggattttatgcacggtagaaagggccagatctgtttcctgctttaacatgtagggatggtgaagtctcacgctccatacgttgatgtgcccagctgatgtttcctggtattagcagatcttcagaagagcttccgtcatttcacacgggccagccatggtgagtaacggttcctggtaatcctgctctaattgcagttgcagccacgactatgagcagtaatcaaggcttaacggtagggggttctgcttctgggcgctccgtccccaatggaggttttgatgagaacattgttcttgaagatcgtaattatgcttcaccgactcaacctgcttattcttctgaagatcatgtagaaggcatgcatgacagtaccattgaaggtgaagaagctgcagttgatgtttctgagagccataccacagatcatgacatccacgttgaggccatagaagatttaactgctggtgtgagtgaggtgaaattgcctgaagataatgctactgaggaaccaactgaggaaagggaacatcagaatttgtctacggaagaaattgactctcttttagataaatgtcttctgcaagctttacacacgagtgtaaaagataaagaccttcctattcctggaagtacattgtggtcaaatcacatactcccctgcagacctacaggtgttactctggatattaagaagtcatcacacaaaaagctatccaagtggttgcaatcaaaatcttccgctggccttatttcatcaaaagaagacaagcataaaaaggaagtcatgttgcttcgtatcaatcgtgggcatccagattacatggcctttaaaccagaaaagagggtacaggagcctgttgtacagcatgataatgttgttgctgaaggtagcagcacgaagcaactggaagtagcagaaacttataagccaagctctcatgttaaccccatatttatggctgttggagcggacacgagcaagtactatagtgcatcagaggcatctgacatagtcttcaggtacgttgaaaaggaaaatttggttaaacaaacagacaaggccaaagtagttttggatgttgcattatgcgacgctctctacaaaggagccatcaaaaagggttcagcatacccaaccgagatccacaagagggacctggggtcaacatttttaaaccgaatgcagattcaccatagagtagcaagagggaacgaggtggtcattcgcaagggcgccatacgaaccattcagatcatgacagagagaaggcaaggaaacaagaagatgacccggctatctggattggaatgcttcttaatggatcctgactcgttagcttctgagctgcagaagaagtttgcttgcagcaccaccacagctgagcttccaggttgtaacctatccctggtctttatttcttgataataaacaaaacaagggtagaactttgtggatgataaagaacatttacaatctggcatattttttccaggtaagaaagggcaacacgaggtcttggttcaaggtggagtcatcgatgaccttgcaaagcaccttgttgatcattacggtgttccgaagaggtttattgaggttcttgacaaaacaaagcgttagaggacaggacagaag

SEQ ID NO: 64336 - DNA, 465 bp, Oryza sativa
  Clone ID: PAT_MRT4530_65490C.1
atgaccacgagcggctccgtctcctcgtcgccggccgagagaggaggggtccagattcgcgccgccgccgccgctcggcccggaggagaggagagccggcgccggcggagcgaggaggggagagtcggctccgctcggccccgaggacgccgccaccgtaggtcccgctacctcgccacgcgcgcagccgtcccgccgtcgaggtcgtcgccgtcaggccccgacaaggagaggagggggcgggcagttcgccgtcgtgcgccgccgtggagccgagtgagggagagcctcatcgtcgtccacatgctccgctccgcgttgccgacctcgggaaagcgcggagaaggagaggagctcgaggttgaggccgcgtccgagctcgccggcgtctgtgccttcttgcccgccgtcctcgccccttgccgcttgccgtcctggtcagtggcatgcgaggagaatggatag

SEQ ID NO: 64337 - DNA, 260 bp, Oryza sativa
  Clone ID: PAT_MRT4530_65491C.1
gggtgtggcgcggtcttcggcgcacgaaggctagccggcggggacggggtgcagtggtcccacacatcggcagaggttgagctgtggtggagcatcggtgcgtcagccgtggatttgcaggtgtggcggttggtcacgcttagtgacggcctgtccggtgctagccttctcccggacccatgtgttggcgctgtcggtgtgtgggtggtggtatattttttcctttttcttggttaatcttgtaatttttttctgctcta

SEQ ID NO: 64338 - DNA, 361 bp, Oryza sativa
  Clone ID: PAT_MRT4530_65492C.1
gcttcaagaataaaccaggatgacatttttattcatatatacgaacagccgatgactataccagatacaaacacatgacacacactatgatgttgacactgtactaatacaactgtatcaatataatggcacacactaccaacagccggaatgaccaagggcacctttgcatggattgctgaaatacctaatatagactgcacacatgggggcgacatagatagccatctgggtctgctcctgagctaggagctcgtcaacaaaggcagcatcaaactgtactggctgcatgatagactgctgcatggggcatatagcctggaaatgatattgatgcatccatgaacctcatcagctgaca

SEQ ID NO: 64339 - DNA, 433 bp, Oryza sativa
  Clone ID: PAT_MRT4530_65493C.1
ggcgtgccggccgccgccgccgccgaggccgagcccggcgtccaggtcgggccgttcgccgagggagacgtcgaacgtgagcccgccggcgccggtgttcctcctgaaggtgtggcgcggtcttcggcgcacgaaggctagccggcggggacggggtgcagtggtcccacacatcggcagaggttgagctgtggtggagcatcggtgctgggcgttctcttctgtgttcctttgttggcctagtggcggttggtcacgcttagtgacggcctgtccggtgctagccttctcccggacccatgtgttggcgctgtcggtgtgtgggtggtggtatattttttcctttttcttggttaatcttgtaatttttttctgctctatcaataaaacttcgcaccgtcttgtgcgagtcgttcaaaaaaacaaattttgc

SEQ ID NO: 64340 - DNA, 332 bp, Oryza sativa
  Clone ID: PAT_MRT4530_65494C.1
tttaagcaactttttcactttggaaggcaaaaatcatccctttttgtataaatcggggaaaatttttaagcacctttttttgttaaactacagaggctttatatatatacatccttgctttctacaatattaggtacataacacataagcttgtcccacagttaccaaaaacgctgttactacctaaaataaatttacaaaaactgggttggctgatggtttttcaacctaaaattaacacaacctttgtttatgttttctagctctcatttccctgaagaaatggcccgctcctttaaaaaagttttctagttttcatttccctggagaaa

SEQ ID NO: 64341 - DNA, 195 bp, Oryza sativa
  Clone ID: PAT_MRT4530_65495C.1
catattcagatttggagacctggagttctgaagacttaccatgaatctttcgctggggacctggagctggtgccgtgcaagcccgagttcgtgagggggctacgctatgattcgctgcttctcgctggccatgaccgaatagccacaatgatttggctttatcagggtcagggtttccgaaacttcttggcttaa

SEQ ID NO: 64342 - DNA, 729 bp, Oryza sativa
  Clone ID: PAT_MRT4530_65496C.1
atgagaattggtcgacggcccgggcggccgcaaggggttcgcgttggccgattcattaatgcagctggcacgacaggtttcccgactggaaagcgggcattcttaatttgtcgtttcatagagtcaaaatatggcaccaagattacaccactctttatcacaattgatcctcaacgtgattcacctgctcagcttaaggcatatcttagtgagtttgacccaagaataataggactaacgggatccatcaatgcagtaagacagattgcacaggaataccgtgttttcttcaaaaaggttgatgacattggtcaggactatcttgtagaaagctctcataacatgtacttgctagatccatgcttggagacagcacgatgctttggagcagagtatgaggcatctgatcttgctgaggcgataactttggagatccagaaagcttctaaatcatcaacaaactagtgtagctgcccattgtcttgggggacctagttcggcacaatccaatgtttgctgtgaagcactttctccctctcccctgtatagccttgatcacaaaagggtgacatggtgaacctctcatttagctctgccaccaactgattccagctcctgttccccgctcctttgtgtgtaagaattgagcaaaactgtacagcgcctcctccgatgaaaattttccagctacgattcacttgcaaaaaaaaaaaaaaaaaattccctggc

SEQ ID NO: 64343 - DNA, 472 bp, Oryza sativa
  Clone ID: PAT_MRT4530_65497C.1
cgggctgcaggaatcggcacgagggagtgatcctctccacctgcccttttactcctctgatttttgtagaggagaaagggagtaattttgggaagtcgagaatggggactttcatttttgttttgaagatttcactaatttgtaggtgctgaccatctagagtaagttcatgccttacgctactgatatgatgtaaaaaagtagtctgtgaccaattgttctctcgttattccattgaacgttctatttgctatctgaaagctaaagcatgtggatgattatagagggagggacagagaaaattttgaagataaggacaccaatgaggcaatgaaaggatgtacaatgtgcactataacctggatttttcagctggatttgttcagagacttgcttggaagagctccaggtgaaaacatcagcggaggcacacactttgatcacaactgtcaacgctgttgtcagtagctat

SEQ ID NO: 64344 - DNA, 411 bp, Oryza sativa
  Clone ID: PAT_MRT4530_65498C.1
aaactcttcggacctccagagttgcaacttaaatagtgactattgtatgaacccaataaaaatacaaaggacaccaaaacagcatgatagtttaaataggcacacgtactgcttgatctaaacggccagcgagtacaattcatcgcatgggcacaatgcagcagtcaatctggtatcttgttcttctttgaaccaatattccagcttgatgaaaaaggatgaaggaatgttccagcacaggccatgaggctgccgtaataggcgagcgtgcacacgacaggcagatgagtgctggaaatcggtgggaaagtcactgttggtagccagcagcgaacgcttccggcatcgtcaagtaacaggtgcactatggagctcctgtagctcaggaggttgaatagacaaatgtcgtcg

SEQ ID NO: 64345 - DNA, 588 bp, Oryza sativa
  Clone ID: PAT_MRT4530_65499C.1
atggagaagaatttggagaagcggtcgcgcaagaggagcaggtacctctcccctccctacaccttccccttcactacagtcactgtccaagacgacgtgtccgtatccgattccgatcagtcggaggacctcaccaatgtcgccgtggcggacatgctgtcggcgctccacgccgccgcgctcttggacatggatgctgccaatgtccacctgctccgccgcttctttaccctgcacaagaccacctccccttcttcctcctcaacccgtatcaacgctcaagctgaattcaatccaagcagcagccgccaaaaggaggaggagactactagtaaaaccaagaagaagaagaagaaagaagcagcagcagcagcttctactccaacaacaacaatcaggctcccactcacggatgttaggaacaatctccagaagatgatctcctcactgctgggccgctcgcctacagctactgctaccgctagccatgaccatggagcaaagcttgcgcttgcgggagagatgcgaggccttttggccaaagttgacaagatgctctctgccactacccctgccaatcgccactaa

SEQ ID NO: 64346 - DNA, 511 bp, Oryza sativa
  unsure (1)..(511): unsure at all n locations
  Clone ID: PAT_MRT4530_6549C.1
aaaagnggtcaccgggggggcgtttagaatagngatcccgggcgcaggattnggcaggnggananccaccctaaccgnaaaagtcagcccccnagatttnaggggaggngaacccaaacnctgttcgntnatgggagttcttcttccgcggcngcggcttcngttccccnaccgggtgtatcaaaaccacggcanggttttnagcggttcagttngtcnccgtcgtcatnagctagcttagcttagtnatttccatgcatcaacccgngggattantagagtaatttaganttgtaaataacagcagcagttgagttgagnccgtaatgcaatgcagtgtgatgaatgatgatgtaatccatgaatccatccatggacaagccagccaccaccattttgangatgaaattttttgttttagntactaaaaaaaaaaaaaaaaaaaaaaaaaaaaaaaaaaaaaaaaaaaaaaaaaaaaaaacaaaaaaaaaaaaaaaaaaaaaaaaaaaaa

SEQ ID NO: 64347 - DNA, 456 bp, Oryza sativa
  Clone ID: PAT_MRT4530_654C.1
atgggcaatcggcgggcggcgtggtcgtggtcgacggggatcgatcggccaggcggtgatggcgtggccgcggaagacgggcagcgactcgtggcggcgtcgaatcggcctatgcagtgcgaccgtgagggcggcgaggcgacaccgccgctgcggtgctgcgcctgcgctgaggctgattcggccgcgcacggcgactggacggtggtctctggtcacagcaatgaaatcaacggcgatgaaacaccaaacaacacagtgtgccacctgaatccacagccacagccactgccactgcaatccgatcgagctgaagcagacgaagcacatggtcatggagatgccacagcaaagaagcacaaggccaccaccagctttagcatggatctaccgctccgcctccaatacccccacgagctcgccattggcgcctccccaaaaacccgctccgtttag

SEQ ID NO: 64348 - DNA, 1648 bp, Oryza sativa
  Clone ID: PAT_MRT4530_65500C.1
acacttggttggataggctccatcgacttttttccatctcctacacatattgataatctggtaaagaatcttcccacgaatagagcacctggccaaatggttttgatgatcttttttataaaaaagtgtcggcctataatttgccatgattactacaagctatgtgctgattttcacttgggatctctaaattagattctatcaatcactctgatccctaagaagttgaatcctatgtatatcaatgattataggccaattgctctcatgggaattgcccttaaaattcagactaagctcttggctgacagattacagaaagtcattttgtctttgataagttagaatcaatatggtttcattcaagaattaaagaaccattcaggattgaactttgaattcctacatcagtgccatcagtcaaagaaggaaattgttcttttgaaattagactttgagaaaacctttgacactatagaacatgaggctatgttacaggtgatgaaagcaatgggattcactgatgtttgtttaaattgggtatcaaaactgttctcttcttcttcttcttcttttgaatggcattcctggaaaaaatagttgtaaaagatgtgttagataaggagatcctctttctcctctactttttgtgcttggtgttgaattgttgcaagctgtcagtaataaatcacatcaagtgggtcttctttcaagaccaatccctctggtcgatgatcataattttccaatagttcagtatgatgatgacactcttctctatgtcaaggaaagtggtagagaattatttgttttaaaagctcttttgcaaacttttgctcaaggtactagtctcaatgttaactatcacaaatcttgcctcattccaattaatgtagataaagataaggcacaaatgttggcaggagtgttacatacctaatgtagtcagattggttcattgacttttacatacctaggcttacttttgggtactacaaggccaagagtggttgattttgctcccttgattgacataactgagagaaggttgtctgttaactcatcttttctctcctatggagatagacttatcctggttaattttatatttttctctttgcctacatattatgtgtacttttaagttgcctaaattggtgatagagaatattgacagagcttggaggaattgtctttggagaggatctgatattaattcaaatagaaaatctttgatagcctgggatgtagtttgcaaacctaaagtcaaggggggacttggtgttattaaccttatggttcaaaatcaagctcttttgatcaaatatatggacaagatctataataagatggatcttccctgggttagattaatctggagctccaattatatgaattgtgtgcctcatctggtcagagtttccttttggtggagacacatatgtaaatcgatggtcatttttagaggaatttctacgtgctctttaggcaatggggccacttgttcttgttgggaggtcctcttttttggttcagaatgccaagactattttcatttgccgctgacaagctggtttcagtccagaactttagaggaacaaacttggaagataatttccttttgcctttgtctcagcaggcttatagt

SEQ ID NO: 64349 - DNA, 414 bp, Oryza sativa
  Clone ID: PAT_MRT4530_65501C.1
atgtctctctcttcggcgggggcgaggctctacaccgtggtcgagggggaggaggaggactggcccatcttcttccttcctctccctccgggagaactcgtcggaggcttagagctctggtatgcttccctgagcttagccaaggagagcaagcacgccgccggcctgggcgggctcggcgccaacgccatcttcttcaagctcggcttgggggtgggcttcgctcatctttctcgatctgcttgttccaccggcgtgcgactgtcaatcaagggcgacataatctccggtgtgttctatgtcaccgccgccaccggccatgccgtcgaccagagctccattgatgcagtgaggcagagggttggcatggcctgtctcgttgccaaggaggagcaccggcggcatctctactag

SEQ ID NO: 64350 - DNA, 2915 bp, Oryza sativa
  Clone ID: PAT_MRT4530_65502C.1
ctcccgtcgctcggcgcgcggagcaaccgccgcatcaagctccgccgcttcatcatctccccctacgaccgccgatacagaatctgggagactttcctcatagttcttgtagtctactctgcgtgggtctcaccatttgaatttggcttcattccgaagcctacgggggctctagctacagccgacaatgtggtgaatgcattcttcgcggttgacatcattctgaccttctttgtggcttatttggataaaatgagctatatgcttgaagatgatccaaagaagatcgcatggcgttatagtaccacatggcttgttcttgacgtggcctccaccatcccatcagaatttgctcgcaggatactaccttcaaagcttaggtcatatggatttttcaacatgcttcgtctgtggcgtctccgcagagtcagctctctgttttctaggttggagaaggatagacacttcaattacttctgggttcgatgtgcaaagctcatttgtgtcacactttttgctgtgcactgtgcggcatgcttctactatcttcttgctgataggtaccccgtcccaacttctacgtggattggcaattacatggcagatttccatgaacggagcttatggattcgctacgtaacatcagtctattggtcaatcaccactcttaccaccgtgggctatggggatctacatgcagaaaatacaagggagatgatcttcaacattttctacatgctctttaaccttggtttgaccgcttatttgatcggtaacatgaccaatttggttgtccatggcactagtcgtactcgaaactatagggatacaatccaagcagcaacaagctttggagtaagaaatcagctaccacctcggctgcaagatcagatgatttcacatattagcttaaaatacaggacagattcagaaggtcttcaacaacaagagatccttgattcactgcctaaagctattaaatctagcatttctcaatatctgttcttccatctggttcaaaatgtttacctgtttcaaggagtctcaaatgatctgatttttcaactggtttcggagacgaacgcgtaatattttccacctagggaggatgtgattttgcagaatgaagcacccactgacttctacatcttagtttctggtagtgtggagttagtagagcagcaaaatggtgcagaccaggtgatacaagtggctacgtcaggagaagttgttggagaaattggggttctttgctacagacctcagctattcacagttcgaacaagatccttgtgccagttgttgcgtttgaatcgtacagcttttctcagcattgttcaatccaatgttggggatggaactatcataatgaacaaccttattcagttccttaaagagcagaaggagaacagtgtaatggctggtgtcgtaaaggagatagagagtatgctagctcggggaaatctggatttgccaattacactctgttttgcagtaactagaggagatgattttttgttgcatcaacttcttaagcgtggtatggatccaaatgagtcagataatgacgggcataccgcactgcatatagctgcttccaaaggaaacgagcaatgcgtcaggcttctattagaatatggagctgatccaaatgccagagactcagaaggaaaagttccactgtgggaagcgctgtgtgagaagcacgccgccgtcgtgcaactattagtcgaaggcggcgcggatctgtcgtcgggtgacacgggcttatacgcttgcatcgccgtggaggagagcgacaccgagctgctcaacgacatcattcactacggaggcgacgtgaacagggctcgccgggacgggaccaccgccctgcaccgcgccgtctgcgacggcaacgtccagatggccgagctcttgctggaacacggagccgacatcgacaagcaggacggcaacggctggaccccgagagccctcgccgagcagcagggccacgacgacatccagctcctgttccggtcgcgcaaggcggcgacggcgagtggccaccatcacgtcccaagctccaccaccaccagggtggcgccggcggcggcggcggcatcactgatcgggaggttcaacagcgagcccatgatgaagaacatgatccacgaagacgccgacctgcccagccgggttctccccgagaagctccggaggaagcgggtcaccttccagaactccctcttcggggtcatctcgtcgtcgcaggcgcagcgggagaccgaccacccgctctcgaggggtggcctcgcggcgacgggctccccgaacccgagcagcggcagccgcaacgccgtcatcagggtgacgatcagctgccccgagaaagggaacaccgccgggaagctcgtgctcctgcctcagacgctggacatgctcctcgagctcggcgccaagaagttcgacttcgcgccaaccaaggttctcaccgtggagggcgccgaggttgacgaggtggagctcatcagagacggcgatcatcttgtgctcgtcagtaatgaatgggatgcagagaagatgaaaggcaagagctagtaaaggagttgtgtgtttttttttctttttcttttttggttgtttactgttgatttccaagaaaggggagatagaatttaccccggagtccaacggttagctaaggaataactggaaatcattggtatagttattccaccatgaagagatggtgaaattgatgggttacgtccggtgttcgtaagtagagaagcgtaagaatttgattttgttatagcgtgttgtgatgttagcctgtttttgttttagttggcaagttgatctgctggcatgtacagttttacgcttttctaatttttgaaggaaaagtccaaagaatgtaccagtgcttc

SEQ ID NO: 64351 - DNA, 2832 bp, Oryza sativa
  Clone ID: PAT_MRT4530_65503C.1
atggcgaggtggggcgccgctcggatggcggcgtgcgggccgtggggccgcaaccggagggtcggcgccggcgacgcgttcgaggccagcgaggtgaggcgggacgggcgcagcaggatgatgcccgcgtgcgggccgtggggggcgggccatggcggcggggacccggcgctcgagagggagctgtcgcgggacggcagccactacagcatctccagcgccatcctcccgtcgctcggcgcgcggagcaaccgccgcatcaagctccgccgcttcatcatctccccctacgaccgccgatacagaatctgggagactttcctcatagttcttgtagtctactctgcgtgggtctcaccatttgaatttggcttcattccgaagcctacgggggctctagctacagccgacaatgtggtgaatgcattcttcgcggttgacatcattctgaccttctttgtggcttatttggataaaatgagctatatgcttgaagatgatccaaagaagatcgcatggcgttatagtaccacatggcttgttcttgacgtggcctccaccatcccatcagaatttgctcgcaggatactaccttcaaagcttaggtcatatggatttttcaacatgcttcgtctgtggcgtctccgcagagtcagctctctgttttctaggttggagaaggatagacacttcaattacttctgggttcgatgtgcaaagctcatttgtgtcacactttttgctgtgcactgtgcggcatgcttctactatcttcttgctgataggtaccccgtcccaacttctacgtggattggcaattacatggcagatttccatgaacggagcttatggattcgctacgtaacatcagtctattggtcaatcaccactcttaccaccgtgggctatggggatctacatgcagaaaatacaagggagatgatcttcaacattttctacatgctctttaaccttggtttgaccgcttatttgatcggtaacatgaccaatttggttgtccatggcactagtcgtactcgaaactatagggatacaatccaagcagcaacaagctttggagtaagaaatcagctaccacctcggctgcaagatcagatgatttcacatattagcttaaaatacaggacagattcagaaggtcttcaacaacaagagatccttgattcactgcctaaagctattaaatctagcatttctcaatatctgttcttccatctggttcaaaatgtttacctgtttcaaggagtctcaaatgatctgatttttcaactgttgcgtactgttacagaatatgcttatctggttcttttacttgatttcgtttttgaggtttcggagatgaaagctgaatattttccacctagggaggatgtgattttgcagaatgaagcacccactgacttctacatcttagtttctggtagtgtggtgatacaagtggctacgtcaggagaggttgttggagaaattggggttctttgctacagacctcagctattcacagttcgaacaagatccttgtgccagttgttgcgtttgaatcgtacagcttttctcagcattgttcaatccaatgttggggatggaactatcataatgaacaaccttattcagttccttaaagagcagaaggagaacagtgtaatggctggtgtcgtaaaggagatagagagtatgctagctcggggaaatctggatttgccaattacactctgttttgcagtaactagaggagatgattttttgttgcatcaacttcttaagcgtggtatggatccaaatgagtcagataatgacgggcataccgcactgcatatagctgcttccaaaggaaacgagcaatgcgtcaggcttctattagaatatggagctgatccaaatgccagagactcagaaggaaaagttccactgtgggaagcgctgtgtgagaagcacgccgccgtcgtgcaactattagtcgaaggcggcgcggatctgtcgtcgggtgacacgggcttatacgcttgcatcgccgtggaggagagcgacaccgagctgctcaacgacatcattcactacggaggcgacgtgaacagggctcgccgggacgggaccaccgccctgcaccgcgccgtctgcgacggcaacgtccagatggccgagctcttgctggaacacggagccgacatcgacaagcaggacggcaacggctggaccccgagagccctcgccgagcagcagggccacgacgacatccagctcctgttccggtcgcgcaaggcggcgacggcgagtggccaccatcacgtcccaagctccaccaccaccagggtggcgccggcggcggcggcggcatcactgatcgggaggttcaacagcgagcccatgatgaagaacatgatccacgaagacgccgacctgcccagccgggttctccccgagaagctccggaggaagcgggtcaccttccagaactccctcttcggggtcatctcgtcgtcgcaggcgcagcgggagaccgaccacccgctctcgaggggtggcctcgcggcgacgggctccccgaacccgagcagcggcagccgcaacgccgtcatcagggtgacgatcagctgccccgagaaagggaacaccgccgggaagctcgtgctcctgcctcagacgctggacatgctcctcgagctcggcgccaagaagttcgacttcgcgccaaccaaggttctcaccgtggagggcgccgaggttgacgaggtggagctcatcagagacggcgatcatcttgtgctcgtcagtaatgaatgggatgcagagaagatgaaaggcaagagctag

SEQ ID NO: 64352 - DNA, 600 bp, Oryza sativa
  unsure (1)..(600): unsure at all n locations
  Clone ID: PAT_MRT4530_65504C.1
gatccgccnagtcnggcattgagacangggggataagcttcntcgtccaaganggaaacagcccggatcaccagctaaggnccctaaatgaccgctcngtgataaaggangtgggggtgcaaanacagccaggaagtttgcctanaaacnccacccnttaaagantcgtnatagctcactgatcgagcgcccttgcgctgaaaataaacggggctaancnatctgccnaanctgtgggatgtccaaatgcatccgtnggggancgttccnccttanaaggaancaaccncnaaagcnggggtccaccaaacngaaaccaaaatgtcgcttgantnaccaaaacattggtgagaatccnatgcccccaaaaccccangtttcctccncnangttcctccnccganggtgagtccggcctaanatcangccnaaaagcgttttccatagacaacangtccatattccngttctaccccttgtttgtnccgaaggaccgaagaagctangtttcccaaanatagttttnngttttangacaccnngtgacctnctttttccggtttnaaagggtttaaaaaatnctccaaggggggggcccgt

SEQ ID NO: 64353 - DNA, 648 bp, Oryza sativa
  Clone ID: PAT_MRT4530_65505C.1
atggagttcggtcactcgacgattgttgtacaggggaagaaggaggaagttgtaaaagagacaagtgttatacaaaatcggctgaaatcaactactacaaagtatatgagtaatcggccgaaaagtgaaataattacaaaagagattgaagggagctgcttactcttaagagatgagtgggggcagaaggagttgaaggtgtttgcttgggtgaagccgatggtgttctttctgtgtcactcacttcggctcaacctgatcaacatcatcctcaatgtcttcttcatccagagcttgctcaatagatggatccaggacaagcagatcatcgaaataggtggcggcagccatcagaggttcgtcattagcagaattggctatggtgagggcaagcgcttggccgatcccaatctcatcccagtgaactttcttactagccgatacgcgctggtaccatatggtccaactcttctcagggcgtactcggccgatggcgcggtagacgggctagcggaagacaacatcgccacgggcggaggtctaactggagatgaaatcgcttggggatcgcctcgagcgtcggagaaatcgccggggagagaaaggagaaggttggcttcgacggtgaaaacagaagtaacggggtga

SEQ ID NO: 64354 - DNA, 419 bp, Oryza sativa
  Clone ID: PAT_MRT4530_65506C.1
aaaaaaacaattcattccattccctaaaaacctttttcataaattctgtttaccccagtttttaacagtccaacagtccaaaaaattggccatttggttcccaattttaactaactttttcaaagaaatacttttttttggaaaaaaatgtttgccaatgcccttttttatgacccaatttgatatattagggccgtagggccccaaatcatcaaaaacttctggtggttcattaaaatgacccagcaaacttctcctatgggctgccatagttaaacaaaaaaacccaggcaacttatttgcttacatttatgcataatttttttcagggccaacttgaacatttaaaaattgctcgtcaaccatgtcggtaagcaccatggaaccgggaagcttaaacacaaaacaggcttgggaac

SEQ ID NO: 64355 - DNA, 297 bp, Oryza sativa
  Clone ID: PAT_MRT4530_65507C.1
gatagttattggacgagcttgggcagggagagagatatatatacaaaaccaagcccgaaaaattttaactatttttttagcgaagaaatgcgtaaggcgtacacatgcaaattaacagctctcactacactggccaaggtcacctgtgacgggcccaaaccctcatctttgacggcttcgcgcatggtcagtgatcagtggtcactggtgacacccatctctgacgggcaagttactagaaggccgtcagaggtgttggtctccgctagcctagggcgagttaggacccgtcacagg

SEQ ID NO: 64356 - DNA, 226 bp, Oryza sativa
  Clone ID: PAT_MRT4530_65508C.1
aatacatatatagagctggccctgcagccgccggattccggtcgacccactcgccgcaggggcgcggtcgtgactgacatgactgcccctgtggatcttccgtccgaccggctcgcgcactgggactctccgctcggtccgaggcgcgactgcgcgcgcccggaccactgaacggggtgcctgtcagagggaagaactgcgaagaagtgagctctagagtgataca

SEQ ID NO: 64357 - DNA, 341 bp, Oryza sativa
  Clone ID: PAT_MRT4530_65509C.1
cgaggcaaaggtacaactccgtgtcctttgctttgaaattcaacatcacttgcacaagatgtcttctgcatcttcaggctatagtgagattcggcttccacaataacccacgaccttgaaagctgttattaagatctattagagtgggacacaatctttggaacatgattcagtaatgtggggtgttggactccacatttgggagacgcgggaattaggttgggtaagcaattgccatttcttccaataatctgatggtcaggtattcaggttataattgattcttccctataatggagggttttatattccgagtaaattggaagttatcacttttaata

SEQ ID NO: 64358 - DNA, 513 bp, Oryza sativa
  Clone ID: PAT_MRT4530_6550C.1
ccggccggggacttctcttccccaccgcttctctcccctctccgaccggccctcccctccactcgcctcgccggccttccccccatcttcctcatggcgtatggtggtgatggcggtgacttctcccatcgtgcggcgacgacgggcggcggtggcatctcccgcgtgcgacgaccacgggcggcggtggcggtgacttttcccgtcgtgcggcgacgacgggtggcggtggcttctcccatgtgcgatgactacgggtggcggtggactcttccatgtgcggcgatgacgggcggtggcagcggtttctcccgcgggcggatccggtggctggcggcggcggctcccgatccggcagctgtggcggcgtcggcctctcccttgacggatctggcatacagcgacatgagtaatggtggagccagacttctcgttgttcgtggttgtgagttcattgtctgtgatgttgattcgggttcttggataatattcattgttcttggttgtgacttt

SEQ ID NO: 64359 - DNA, 529 bp, Oryza sativa
  Clone ID: PAT_MRT4530_65510C.1
acttgttccctcttttgtgttgccgtggtttcgtgttagggggatgatccaagaggaggaggaggaggaggagaaggatgacaagtttttcatggcgcggtcaggggctttgtgcttgatttgattggcggctaactatcgagtagtgattcttgaatcagaggctaggacatgaggtttcagtggcggattttgaattagatctgcccgattttgctctgaattagcttagcctaatcgggttccagctcctggctggtgtgaggatgtggccatgattttgaatttgaggagtgtttgaaaacgaaaagtctaattctttgtaagggcatatggtagaggaattaacctttttcttgtttgatgtgtctgtgtgtagcaactgatttttatggagtgttattagttgtagggatctgtagtctgatctgatttggtaggagctccaaaaataaaaaaacattcatgagataacatgtgagaaatcgatttatgcagacacgttctttttgtgttcatttagtatgta

SEQ ID NO: 64360 - DNA, 228 bp, Oryza sativa
  Clone ID: PAT_MRT4530_65511C.1
atgacgtcgatagaggaagggaggatatggttgcgggtaagggagaggtctggcatccaatttgatccaattgacagctgttgcgacgaggcagagggagtgggaaggggtcattcgcagcccaatctagagcagtggttcctcctcccatctcctcttgctagatctgggcgccgccgacctgaagacaacaaatatggccgaggaatggtggcaggagatgaatag

SEQ ID NO: 64361 - DNA, 280 bp, Oryza sativa
  unsure (1)..(280): unsure at all n locations
  Clone ID: PAT_MRT4530_65512C.1
tcgaccgcccacggcctggttcggcccggcagcattttacgctggcccgggtcctgttttttttttcctttttcttttttattttgtagcaaggacagtgagtgacaagagtcgactttgataagggcntcaaacgatggaattaaccttttaattctgagttaattgtgcatgagtggataatgcaaatgtgaggatgctgaggataatgagcagatgctaccttacacatgggaatgtgatgcttgagcttgacagataaaaaaaaaaanaaaaaaaa

SEQ ID NO: 64362 - DNA, 2092 bp, Oryza sativa
  Clone ID: PAT_MRT4530_65513C.1
tgtggtaactgtgcaagcttctcacatgtctcatcattcctccctcagcctaggaacagtttgtcctaaagctaagtataatgttttacaataattccacaacttgcatgggatacactagctggttttacaaagcttccaaagggaaggggaaaataatatattggtgtttattgatactctaagcagataaaaagaaaaagaaaaaaaaaaggaagcattagcttgctcagagaaactaagaagctaaagttggagtgagtgtatagttagtggcatgggctgatacatctccatttgacataatggttgcctgcaaaattgcccaatatcctttaagttagtatttgcacatcttgcttgagtatatctgatcacctaatgagctgactcttgaaccctgcatgtttgtatttttggccagtaccctaatctcaattctagagctgaaatatcccatgtttttcctcctatggtgtacaatctcaacttctgccatgaaaatgctgtacactggcctgtgatcggagaagcgagactccccacgaacatagcacagctggttgaggccattaccataccagagaatgcgatcacaccatgcaggcgttcttcttttttctttgggatgcatgccctctccggcataacgatctgaattgaacgaatacttgtacgtgggaggaaaataaatccttccttctttccagccctgaaaaactctcccgtatctttgttgtattcgaagctgatctttttctaataattgtttccagttatgcatttcgacaagagctcttgctgaacaataggagagggcaatacgatagttcaaatccccaagccatattatacggtcatgctcaagaatcgtttcaggtgatttgacatcattagcaccacgaacccgtggaaaccttgtctttcttaatatttccataacatcagaattcctgcgcaattcatccccttccttttcccctgaggtcaaatggcaacaaatgaagcagaagcttgtctggtgcaaagacatgcttattgatatagaacccttatttccaagataacccatcaatcctctacccacacaagaaactttcaagtttctcacatcatctcttatttcattgcgcacccagacagtgagaaatatgccaaccatttgtttgctggcaaccaaacaataccttgatccattgggttgctcgtcgttagcttcagtaggtgccgttgtattgcagctataaggaagtggagaacattgtgcagcgttagagagttcctcatcgatgttctcctcatctggtgacccaagccaccgcaaattaccatcaaagtcacttggtctacctcctaagctgactgggtcacaaacgctaaatcttctgtccaactttggttgtgggaacatgtagtctgcatccattcttaaactgcggctgagattatggaatgatcgacggtgaaagaaagagtagttctcctgccttcttgcagatgcctcaaaatcagcttctagttctacgactggattaaggactggtgacggcgtatgatagacaccagaaccactggccccaggattcttgttcagggtcctcctaataagagatacccacttctttgctggaatattatcttcagtgccaagaacatttccagcattcaaagggacaatctcctgaaatcctaacacgtagatatcagcaggaggagaagagtgaagccactcatctaaatttagcccccttggtggggacttgcctccgacattccatgttgcggcaaagattctgtaatcttgaacctctgtcaggcgtgctagatcgaaatcattcctccctcggcggacgcgatcagcgctccgcttcgacgacgaccggtctgttctgcttttcttggctgaacttgtgcttgcagagctcgctgagaagctggccctcccccctgctccaccaccaccatccctaccttgggttgtggtttcagaatcagcatggaagtcctgtgccttggtcctgatgttgaaccacttcctcacgagcgatttggaccatgaaagcttgctcttcttggcgctctcttctctcat

SEQ ID NO: 64363 - DNA, 507 bp, Oryza sativa
  Clone ID: PAT_MRT4530_65514C.1
tcagacgactcggactcggacgacgctttgccttgatatgccagtaaagcgcttgcggcagccccctctgctcgagccatattctaccctaatacgggcatggaatttttccacttcctcgccggagacggcgtggagaagcaggggatggcggcagcaggcgcgggacgacttcgggagcgccgccaacgacgacgctagcgtgaagagtggcagctgcgagatgagccgctccatgtccgccgcgtgctccaccaacgcgggacgcaccacgacgggaagcaccggcgcagcagaggaagacgccgacgacgcggcggagaaggccgacgagccccgggcggcggcgtggcggcacatgtggcagatgaagtagtggatggagacggacgccaccatctcgtcccatgtcctccacctccgtcgtcggccaccatcggcaccctcctctccggcgacggcggcggaatcacagccgaagacgacatcaattcctccggttcttga

SEQ ID NO: 64364 - DNA, 1300 bp, Oryza sativa
  Clone ID: PAT_MRT4530_65515C.1
cggacgcgttggcggacgcgtgggcacgtgcgcgcgaacggagctcgtttcttctccccccctacctctgccccacgttggctcgcgtccgcggcccatctccaccgtccgatcccgagccgatggcggcggagcccccggcggacggccgcgatcccccggcggacgatggcgccgccggcgacggcgcggtggagtccgcggcggcggaggcgctcctgagcgcggcgtcggagcagctgacgctcgtgtaccagggggaggtctacgtcttcgaccccgtcccgccccaaaaggtcgcgccctttttcaccccttccaaaatttttttccatcgcgtccgtttggttcttccctttcgccctttcggtagctccgtgcctatctttggtgaatttgagaatagggttcaggctgttctattggtacttggagggtctgacatgcctcctggtttagtaagcatggctgtacctaccacattcgatgaaaagagtacaactgtggctgccagaagagttgcttccttaatgaggtttcgtgagaagaggaaggaaagatgttttgataagaaaataagatacagtgttcgtaaggaggttgctcaaaagatgaaacgacgtaaaggccagtttgctggaagggcagactttggtgatggttcatgttcttctgcaccatgcggctccacagccaatggcgaggatgatcatatccgagaaacgcattgccaaaattgtggcatcagctcaaggcttactccagcaatgcgtcgtgggccagctggtccaaggtccctctgtaatgcctgtggcctaatgtgggcaaacaagggcaccctaagaagtcctttgaatgcccccaaaatgactgtgcagcatcctgctgatctgagtaaaacgggtgatacagatgacagcaaagcaaatctgtgtgctgagcataatcaaaccactatgaaaactgacactgagatggtgccagagcaggagcagaaggcagacgtgttgccaccaaccaaagaagaagatagcatggctacctcgtgacaaaatgttcagacgcttgtgtataattgatacgtaggttatttttcaggaactcctgactttaggatggtacataaggcaacagaactaacaaagatcagctccgttgcgaacgatgcagacgcatcggcgcgccatatttatcaaatccatgtgttgttgtacaccctacccactcattctgtacgatttgaacacagatctgagtaatacaatccgttttgatcggttgtcaactatagtaaaaaaaa

SEQ ID NO: 64365 - DNA, 231 bp, Oryza sativa
  Clone ID: PAT_MRT4530_65516C.1
atggggaagaggctggagaagatccagagcgcggcgcgggagcagaaggcgaagctgtacatcatcgtcgcctgcatcgcgctgctcgtctgcggctgcaccaccgccgcccaccaccaccagcgcaagggatataggcaatgcaagtctgcgagatgcatttggctttctactgcaatattgggtggttcgaggctaattagttcagggctgagctctaaggctaattag

SEQ ID NO: 64366 - DNA, 420 bp, Oryza sativa
  unsure (1)..(420): unsure at all n locations
  Clone ID: PAT_MRT4530_65517C.1
tttgtttttttttttttttttttttttttttttttttttttttttttttttttttttttttttttgggaaaaaacagaggaccaggataggacttttaaactttttggggcaaccataaggcagcctaaacaggttgtttaagactcccaactaccaagaccggcgacccgggaaaaaaaaggcaaaagatagacaccctggggggttgggactaagggggttatgacctgggactccacccaggaggggggaaactaagaacaggggggggcccccgggccatgcgaaaaaggggtgtccaaagaagaaaaacatgttggccaccaaatccttgggcagcgccgggaagctcctgaaggcggaagcgccggccccgggggggggtgccnaaaacccccacgcccgggaagacggggggg

SEQ ID NO: 64367 - DNA, 488 bp, Oryza sativa
  Clone ID: PAT_MRT4530_65518C.1
ggagaatgctactgcttttgttccaatttcagaatccaatccaaaaagaaaaaatgaaaaccaatccaatgacctggccaccttctgacgatccagacaggacgcccgttctcgtcggcggtggcggtgctgctgtactggctgaaagggctcgggatcttcgttggtgaaattcttcaactacttgcatacgcacaaaatgctcaaatcttttgattaattcgggtgatgtaatgtaattacgaaaaccacaaatctaaccctacatgcataatttaccaacaagtaaataattgattgcctaaagaatctcaagaaggtgtgttagcttgctgttcctctatggcacatgagcattctttcttgtggctaggcaaaaaaacaaattacccaaagcaaataacatctccaatccaataaactggttgtgcgctgataatgcagagttgcggactgacatgctgctcccgtcggcggtggcgacgctg

SEQ ID NO: 64368 - DNA, 1952 bp, Oryza sativa
  Clone ID: PAT_MRT4530_65519C.1
ttcttcaacctccccttccccttctccttcaccttcccgccgtcttcgccgccctcgttcctctcttctaccaccacctcctcctccgccgtcaacgccgctgagatgggtcgcagtatgcttcccgagcagcaggaggacgtatcgaggaagagcaagaaggcgaagaagagcaagaaagacaagaagcggaagctggaggcggaggccgaggtggtggtggtggaggcggctgcggccacgtccacggatgaagcgacgaagagcagcaagaagaagagggccaagggcgatctgggccaaggagaggaggcggagaacggcggtgggaaggtcgtggccgtgaccgggaagggctccgcggacgccaagtacgccccgctgtcatctttcgccgccaccgcgcttcctccccaggtgctcgactgctgcaaggggttcgagcgtccgtcgcccatccaagcgtacgcctggccttacctcctcgacggtcgtgacttcatcggcatcgccgccaccggatctgggaagacgattgcgtttggtgtgccggctctgatgcacgttaggaggaaaatgggggagaaatctgctaagaagggggtgccacgggtcctcgtgctatcgccaacgagagagcttgctcagcagatcgcagatgtactttgtgaagctggtgcaccatgtgggataagttcagtgtgcctttatggtggaacttccaaaggaccacaaatttctgcccttaaatctggagtggatattgtcatagggacacctggtcgtatgaaagaccttattgaaatgggtatttgtcgtcttaatgatgtttcttttgtggtgaaatacattctcatcaaatctcaagttcaaactcaacttcgtttaggagtaacaaaaaagacaaatttcagtgttctagatgaagctgatcgaatgctggatatgggttttgaacctgaagtcagagcaattttaagccaaactgcatctgtacgtcagacggttatgttcagtgctacatggcctcctgctgtccaccagctagcccaagagtttatggatccaaatccaataaaggttgttattggatcagaagatcttgctgctaaccatgatgtgatgcaaattgttgaagtattggatgacaggtcaagggattcaagattagttgctttgctcgataaataccataaagcacagaggggttggagtgctgtttctgttcatggagataaggcacagcatgacaggacgaaagctttatctttatttaaagaagggtcatgtcctttgatgattgccactgatgtcgcatcccgtggacttgatattccagatgtcgaagttgtcattaactatagctatcctttgactacagaggattatgtccacaggattgggaggaccggtcgtgctggcaagaaaggtgttgcacataccttcttcactcaagagaacaagggacttgctggtgaacttgtcaatgttttgcgggaggctggtcaggtcgttcctcctgcacttacaaaatttggcacacacgtcaagaaaaaggaatcgcaaatatatggatctcatttcaaagaaatcaaagcagatgctcctaaatcaacaaagattacgtttggtgattctgatgaggactagcaacatttgctggtcttttcttcgttgcgttctgaagttttgatgcttggagtaggccaaatattcgacagcaaaatattgcctttcttgaagggagaacccctctaacagtatcattgtatacctaggttagtttagtatcagtgatttcctaccttgtccagaccatcttattttatacttggttgtatgtactgcaatttgcttctcttgtgttggaaaaaacagtaaaatcagatatgtgctaaggcaccattggcagttcacaaaagcagtttagtcaaatagaggaattttttttt

SEQ ID NO: 64369 - DNA, 569 bp, Oryza sativa
  Clone ID: PAT_MRT4530_6551C.1
atgagggggaataattccacaccctccaaatccaactccatccccatgtccgaacaaggcttaaaaggagttaagggtctcttacgtgaggggtgggggcgcgacggcggcggcggcggcagacgggggccgtggagctcgccggagggggcggatctggccgtgggatggagggggaggagcggcggcggcggcggcggcgaggcgaagaggaggggtggggtgggggatttggggatttcggggccccgtgagcgtgatgtgtatttcgggataggcggcgggtgcggctggtggagggcggcagcggacgggcgaacggcgcgcggggttggacggtggtctcacgggacggtgccgggacacctcggatccctcctcctcatcctcggcggcggcgatgccggcggagtcagagtcatgctggtgctgccgctcgacacgatactgtgccatgctcccgcacgcaggccgcggcggctccgtgatccacgctgccgccggctccgctacccggccccgatccgccacgggcgcgttggcctgaatacgccccgctcgggggcgcg

SEQ ID NO: 64370 - DNA, 551 bp, Oryza sativa
  Clone ID: PAT_MRT4530_65520C.1
cgggctgcaggcgcgattctagaccatcgaaactgtcaaccacaggctacttcgcatcgcatcgcctcaccccgccgccgccgccgccgccgccgccgtcgccgtcgcggtagctccgccttgagactgacagaggccccgtggcgccgctgcccgccggccatgccgctgcggcgcggagccctccctccccgcgcccctcttcggccggcacccggcggtctctgcggccgcgcgctcctccgccggacctgctgcctctcgtggccggcgacgacgggcggagcggcgctcaggttagcccccgacgccgctgctcgctgtcttctcttctcttctccagcgtattgaatttctctacctagtagttctgtaaaaaaaaaaatcccacaaatcaattgggaattgggttccattggactcgtccagaactttgggtcagttttctgtcaacaggaattttggaggagctggtttacgaaagttttaaatctatgaacagcatttccccctactacaattaatttgcatacacatttctactcggtggc

SEQ ID NO: 64371 - DNA, 1582 bp, Oryza sativa
  Clone ID: PAT_MRT4530_65521C.1
atggattttaagtttgtgtggtgtgtcatccatggcggacatggtgaagttcaccatggagtggcttcaggatcctctgagcctggcgatcgtcgtcacggtggccgtcctaatcatgcggatgcagcggcggcgcgcggcgccgttcccgccggggccgaagccgctgccgatcgtcggcaacatggcgatgatggaccagctgacgcaccgcggcctggcagcgctggcgaaggagtacggcggcctgatgcacctccggctcggccggctccacgcgttcgccgtgtcgacgccggagtacgcgcgcgaggtgctccaggcgcaggacggcgcgttctcgaacaggccggcgaccacggcgatcgcctacctcacctacgaccgcgcggacatggcgttcgcgcactacgggcccttctggcgccagatgaggaagctgtgcgtggtgaagctcttcagccggcgccgcgccgagacgtggctcgccgtgcgcgacgagtccgcggcgctcgtgcgcgccgtggcggcgtcgcgcggcgaggccgccgtcaacctcggcgagctcatcttcaacctcaccaagaacgtcatcttccgcgccgcgttcggcacgcgcgacggcgaggggcacgacgagttcatcgccatcctccaggagttctccaagctgttcggcgcgttcaacatcggcgacttcatcccctggctcagctgggcggacaccaacggcatcaacgcccgcctcgtcgcggcgcgcaccgcgctcgacaggttcatcgacaagatcatcgacgagcacatggagcgcggcaagaaccccgacgacgccgacgccgacatggtcgacgacatgctcgcgttcctcgccgaggccagcgccggcgacggggccgacgacctgcagaacacgctccgcctcacccgcgacaacatcaaggccatcatcatggacgtgatgttcggggggacggagacggtggcgtcggcgatcgagtgggcgatggcggagatgatgcacagccccgacgacctccgccgcgtgcaggaggagctcgccgccgtggtgggcctcggccgggacgtcgccgagtccgacctcgacaagctccccttcctccgctgcgtcatcaaggagacgctccgcctccacccgcccatccccatcctcctccacgagaccgccgccgactgcctcgtcgccggctactccgtccccaggggctcccgcgtcatggtcaacgtgtgggccatcgcccgcgaccgcgccgcctggggccccgacgccgacgcgttccgcccctcgcggttcgccgccggcgccgccgccgaggggctcgacttcaggggcggctgcttcgagttcctccccttcggctccggccgccgctcgtgcccgggcatggcgctggggctctacgcgctcgagctcgccgtcgcgcggctcgcccacggcttcaactggtcgctccccgacgggatgaagccgtccgagctcgacatgtccgacatcttcggcctcaccgcgccgcgcgccacccgcctctccgccgtcgccacgccccggctcacctgccccttg

SEQ ID NO: 64372 - DNA, 689 bp, Oryza sativa
  Clone ID: PAT_MRT4530_65522C.1
ccggccgggagaagtccggccggcgagagaaaaaaaaaaactagcaaaccattgtgacagtctcaattttgcatttttgctatactgcttgcagatccatggggcgttgggttaggcctgaggtttatcctctgatggccgcgatgatgttggcatcgggcatggttgtgttccagcttgggcgcaacgtgtgcaccaaccctgaagtcaagatcagcaagcgcaaccgccgcaacgcagtgccagacagcgcggcggaagcggagaggtacagcatgcatggtttccgccgcttcttcggccggcgtcgcccagaggtgatgccctccatcaaccgcttcttctccaactccgatcgacccaatcatgatgagaacaatgatgattgatgagtaattcgcattatgtggtgtatttgttcgctataaggaccagcgttatgtgacgtaatatggttagatgtgaactggtttattattttaagaactcggcctgtgtgcatgcaaaaaaaaaaaagcaagattggtaaatgtaatgtacttttactttatttgttggttcagcacttgatttttttcttttatcaacaaaaaaaaaaaaaaaatgtggccagagcctaagatcataaatcatttctattataaaaataaacagaattgctaactgtctactgaaaaaaaaaaaaaaaa

SEQ ID NO: 64373 - DNA, 607 bp, Oryza sativa
  Clone ID: PAT_MRT4530_65523C.1
gcacgaggggaccgcaagatgtacgaactctccaagtccgtgctgcgcacacagcgcgtgcggtacgacggcaagatgtcgtgtgcacggcctggctctggggcaacaagggccacatcgtgaccaacaaccactgctttttcaaccagaccatggtcgacgcggcgcagtttgactttggcgtcgagtcgccgagctgcacgaccaagtgcaagccgggctcgtgcaagatcacgcgcgccgtcaagggcaagggcaacgtgcagttcattgcctcggacccggacctcgacattgcgctgctccagatcaaggcgccgctggccgacgagatcgtgagcagctttggctacctgcgcatcctctttggcatgccggcggtcggcgacgagatctacatcccgcagcaccccggaggcgccgcgcgccagatcgccaagacggacgacgactccaacaagtcgatcgcgaccatcaagtcggtcaactcggccgtcgtcgtggactcgacgacgtaccagggcctgatcggctactcggccgacacggagagcggcagctcgggctcgcccgtcatcagccgctcgggcaacgtcgtggtcggtct

SEQ ID NO: 64374 - DNA, 588 bp, Oryza sativa
  Clone ID: PAT_MRT4530_65524C.1
atggcggccatcgattgccgcccgccgccgtccaagcccatcattacgcgcctcggcaaggacgccgccacctctagggatcgagactatccacttgcatccctagccacctcgctgtacaccatctcggtcagcggcggcagtgcgccgctcatcgtcaaccttgccggccagctgctctggtcgacgtgcctgtcagcgcaccgcatcatcccctacagctccaacgtatataaggtcgcggatcagaccggagccgggcgggagcagcggctgagggcggcgggcggcggaggcgacaccggcggcgggcggcgggcgggggccggaggcggctgggggcggcgggagcggaggcgaggccgtaggcgggcgccgaggccatggctggcgggcgtggaggcgaggccagcggtgggcggcgggcaacgggcggaggcggctaggggcgacaggcgcggagccgaggccggaggcgggcgccgaggccgcggctggcaggcgcggaggcgaagcctgcggtgggcggcgggcggatgggggagggcaggggtggaagcggaggcggatggcgggcgcggaggctag

SEQ ID NO: 64375 - DNA, 355 bp, Oryza sativa
  Clone ID: PAT_MRT4530_65525C.1
aaaaaaaaaacgggggggaaaactgccaatttttttttaaaaaaggggggaaaaaaaccctaaaggggttaaaaaaaaaaaaaaaaaaccccccggttgggtgaaaaaaaaaattttgccaaaaaaaatttaaattaaaaacccttgggggggcccaaaatgggggggggaaacaaaatttgaccaaaaacaatataggggggtccgactttgaaaattgtaattgggggcgagtttaccgcaaagggaaaaaaaagttccgtttttaaaaaaaaaaattgtatcctaaaacgctgccaaaatgaaaaaggggcttaaaaatcccaaaagggaaataagcccaaggtttttaagg

SEQ ID NO: 64376 - DNA, 540 bp, Oryza sativa
  Clone ID: PAT_MRT4530_65526C.1
atggcggactccacggccatgaccgtcgacttcctccgcgcgcggctgctctccgagcggtccgtctcccgcgccgccaaggagcgcgccgaccagctcgccaagagggttgcggagctggaggagcaggtccaggcggtgacggcgcagaggcggcaggcggagcgggcggcgacggaggtgctgggtattctggagtcacatggcttcggcggcaacctctccgacgtgctcgactcgggctccgaccgcgacggcgaggaggatgacgacccacgcgacgcgaggagcgacggcgacacggccggctcccgcggggaggagcagccgccggcgcaggcgaagcggcggaggacgcgctgtccgggacggccgagcccggcggcgggctgtcgtggaaaggccgcagcgtacgagaaggacggcgagatggaaagggtgctcgagaggcaggccgagctgatcggccagtatgaggcggaggaagaagctcagaggcagtgggagaatcagttcaacgagaatcggagctcagccaag

SEQ ID NO: 64377 - DNA, 2413 bp, Oryza sativa
  Clone ID: PAT_MRT4530_65527C.1
atggcggactccacggccatgaccgtcgacttcctccgcgcgcggctgctctccgagcggtccgtctcccgcgccgccaaggagcgcgccgaccagctcgccaagagggttgcggagctggaggagcaggtccaggcggtgacggcgcagaggcggcaggcggagcgggcggcgacggaggtgctgggtattctggagtcacatggcttcggcggcaacctctccgacgtgctcgactcgggctccgaccgcgacggcgaggaggatgacgacccacgcgacgcgaggagcgacggcgacacggccggctcccgcggggaggagcagccgccggcgcagtgcgaagcggcggaggacgcgctgtccgggacggccgagcccggcggcgggctgtcgtggaaaggccgcagcgtgagcccgcgcaaggcgaggcagctcaagcagaagcaccggaggagctacttctacctcctctcctccgacccgtcgcccaagtaccggatggggcagtcctgccgcaagaacaagcgcaaggagctcagcaatggcaagtcgacggcgccggaagagcagcgcggcgacgtcgaggagatcgcctggagtcagaaggggcagcaagatggatcggattgcaccgacgacggccaggcggacatggacggcgaggttgctggtggtcagtatgtgatcaggtacgagaaggacggcgagatggaaagggtgctcgagaggcaggccgagctgatcggccagtatgaggcggaggaagaagctcagaggcagtgggagaagcagttcaacgagaatcggagctcagccaaggttcatgttgaggcagagaataaggcgtgccagatagaaaatggttgggagcagagcaaggagcattctaggctcgcggatcaagcggttcattgcaacgaagaggcaaaaccaggcgttaaaaatcaccccagcgccagcaacaaccgctctgctggacttctgttgaatggttcccttcctgaatcaccccaagacacatcaggacaagaagcagcagccgaccaacgtgactcgcacgaggagcttcacggccactgtcatgcacagtctcaaggaaactctaatgtcgccggcacaatgacagggaagaatcaagaacaaggaaacgagaatccggatggatgttcaagctactgtgacatcaaagcgccatcagatgggagcccgtcaatgagtgatgccaccctgaacagcaaggtctctgattggagctcatcacgcttccatgaccatggcgacaaccaggtcgatgcagggccagatcaacagccaacgagcaacatggacatagagtgtgttcttcaggcacttcagcttgccaggatttccctgagtcagaagctgagcaagccagttccacccagccaggtgacgctggcgcttcctgcaccaggggaccatgaacattcagaagacgacggctactcccccgtcgacgacgagttcaattctgcaagagatgagctctgcagctcaagccaatctcctgatcaggagatactggctctccctgcaccagaggattaccatgacagggagaatttgcctgccaatgacgacgctaccatttcactgacagaggaacagaccagttcaagcccacaccggcaggagatcctggctctcccggctccggtagatgattaccacagagagatagtggatgacatcaagatacctatctgcattgccggcttgtttcggttgccaacagactcatttccaaaggacgagatggtctcaacttgcaacaaatatggaggttcagagctcaatctgagaccaactgcagctgctcctcagaacgccttcgtgagcaacactgctgatcgtgtcacggtagctccgtcagagataagagatgatcatggcttttcaacgaggccatgttacgatccacacagttctgggctgctgtctgtgcctacttctggtaggtgtagcactccaagttcagattttacaataaggggagcttctttcctctccggaattcccggacttgctgaagatttcaggaagggaaggccccttgcagatgcagacctgttcatgcagcgtggctgcgattacactatttctaataagtggatgctgtagcttgtaacatgcatgaatttgttctctttgctttttttactagcggaaggcagcactgataattgacaagtagtatttctcatggctgcatatccttgtgaagaaggcgttcgattactaggggagataatttgaccaagacatgggaagtgcgccactttttgacaattggttctccctctgtcccataaaataagggattttgagtttttgcttgcactgtttgatcactcatcttattcaaaaaaatttggaattattttttttt

SEQ ID NO: 64378 - DNA, 585 bp, Oryza sativa
  Clone ID: PAT_MRT4530_65528C.1
atgtactgtacgtaccggttggccgccgcccgccggagagaaaggaggaacactactacaagcacgcatgcatgccgggcggtgcactgcgcagacgaccaatcaaaatcccgccaccgcgccgatgaggaacccgctcgctcgcaagatgccgcacaggaaagccgtcctccaaccgccgtgcaaactgcaaagtcggcgccggctcaagaggaggaggaaattaattcatggaacatgacgaatctaattaaagaccaacaaggagaaccatatgtgaaatcattttccaaggatcggatcagtagcaagcagcgaggcagtcggctcggctgtatgcggcggctcagctgggccttgcgcgaggacgtggtgtcggcccagagcctagggcccagtcgggcaggagcgcagcaggcctgccgaagctggcccatgcggcagctcgatcgatcgatcgcaggcagagtcctgtccgggatgtggataggacttcgctttggggggagagagtttaatttggacattgtcatcggtatggaatacgagggctttggagagaataagagttctgctcctactccg

SEQ ID NO: 64379 - DNA, 1719 bp, Oryza sativa
  Clone ID: PAT_MRT4530_65529C.1
cccgcgtccgcataacgcattggtagaattggtatcttgtgcgctcatacggtgtgggggctttcaaatatcggttcattagatgaatctaatagattctaaggccaatagtaaaccatatactaatcagagcctttgagaaggatggcagaaactgaagatactcagttacaaaaagcaatattcgcacagtacattatgatgaagaagttattcatggagttggaagaggagagagaagcttcagcaacttctgcaagtgcagccttgtcaatgattcgaaagcttcagaaggagaaggaggagcagaggatggaagcatggcagtacaagaggatagctgaggaaaagattagccacagtgacaaagcactggagattctacaggaagtccttcaacagaaggaactggagaatttttatctgagaaaccaattgctggtgtataaacacaagctattggatgttggtattgatgagtgtgatattgcagacgagacgataactaacaatataccattatttgaaagcaaaaccgtggagaatctttgtcgtagcatcaaaaggaatttctctctgccaactttgcagatgaagaaactttttgccgaaaaggacaccgacagaaatgttgaatcaacaaagagcagattaggtggctttgtttgtaatttgagtgaagatgaattgaagcatatttctggaaatgctagtgacttcaaggctctagaggttcagaaaagcttgctgacagatggggatgccacagaagaacatggagaagaaccaaatcctccaagcagtgatctttctcaacaacctcatctcttggaagagtcaagttgttcctcctcgttgttgagtaatcatagagatacatccagtgaaagagcaatacaggttggggaaaatgcggaagatacacgacatggtgatcaactcaagcagtcacattcaggcattggaaaggaagaagtacaatcacatcccttggaagagtcatcaagttgttcctcgttctccacatcgagtaatcacagagatatatgcagtgaaagagaaatacaggttggaagaaacgcagaggatgcaccacatggtgatcaaaccaaagagtcacattcaggcattgaagcggaagaggttgcagttcatcctataagtgacatcgttgacacaatcaagattcaagaaagaagccaaggagtagaagaatcctcatgcactgcaaatgaaatcatcacaaaggagtcagaactttctcccaaggacgttccgaaagagcggcggcctcaggctctatccaagttatctgcaacaagaaaagttggctccatgaacaacctctacaggaatgtccatgtaatcaccgataagagttcgacgccacgaggaaagaattcaacgccacgagctggcactgagaggaccagatcaaggctgaagcgggtgcagagcgagaagatggttgagatgaatgacaccaggaaaaacaaggagcagatcataatgctcaaggaggtgtacgagcagcttaacatgatagaatcgcacatgaggccttcgacttcacaggagacccctcggaatgaccaatccttggaatctgtcttggagagttctaacatgtctaatcatgccaattttccaacaggcggctctgtccttctccttatagctagacccttgtggcctctactctaccatctgaacttctga

SEQ ID NO: 64380 - DNA, 135 bp, Oryza sativa
  Clone ID: PAT_MRT4530_6552C.1
atggcggcgaggaagctaggaggcgtgcagtatctacggcccatacagtacggcgcagttttgacttttgaaaaagcccataatcctgaggagcaaatagatgggcctcctaataaaaagtcagcccagatatag

SEQ ID NO: 64381 - DNA, 569 bp, Oryza sativa
  unsure (1)..(569): unsure at all n locations
  Clone ID: PAT_MRT4530_65530C.1
aattcggctttcgagcggccgcccgggcaggtgtgttataccactaaaaaaggtgctcctntaccctagctttctcgaaaaaaataaaacaaagnggagcactaccaatctgtgaaatatgttttgactgataactcagtccatatatacatagcatccaggtgtgtcgtgggtggtgggacagatcccccagtctccgcccttgctccgggggggcaacccgcgaatctcctttccgggccactgattctttcggcaattgctccgcaccgcttcggcgcgccaatctcaaaatatattgttccaatttnttgtagatacttatctcgagatagaatatgtgtttatagttgtaagtgtgcgtgtatttataggcgtttgtgttgtaccgcggccgccaccacgctaagccgacttcctgcacactgccggccctcgccaggggctccgcgctcggtcctcgcgggccggtttcctggcatagctgttctgtgtgaaattgtatccgctcacaattcacacaacatacgagccggaagcataaagtgtaagctgggtgcctaatgagt

SEQ ID NO: 64382 - DNA, 437 bp, Oryza sativa
  Clone ID: PAT_MRT4530_65531C.1
aataaaactattcatttgacaactttgtcacgtgattgctcaatatttcgtcattgcaaagataatatatatactgtccaatcattaatgatgaacaaactttttttaacatcgtattggagttggccgagataatgcaaactttataatttaatccttgcacccatgttcaatgtaaaccagtttttctgcaattcgaggcaggttctacagcaccaggtcagcagcagtccgagctatccttattagagtattagaatatcccgtggttaggttcttatggtaatgacagattgatactggacagatcatgaagttccaacgtctcaatctccagatgcaggagctgcccacactgggtgatggctcgagaccagagaccttcagagtgccttttaagtcacacatgcctaccattccaagaaggtatatgcaag

SEQ ID NO: 64383 - DNA, 1558 bp, Oryza sativa
  Clone ID: PAT_MRT4530_65532C.1
attggccatcgaccacatcaccaacaactctcgccgcctcacactcgcagatctgacagttgatttggggaaaaaaaattcaaaaaataaggagaaaatcttttcgccgccgacgaggaggagagggatgtcgcggccgaggacgacgagatgcccaaagcggcctgcgccccagctggccgtggctccgtgcgccgccaccgccaagcgccgccgcctcgcgccccccgagtcgccgtgggcgtcgttgaaccccgacctcctgcggctggtcgcggagcgggcgctcgccagcgacctcctcgactacgtccgcctccgcgccgtctgcgccgcctggcgctccgccaccccctgcccgcgcggccgcggcatcaccgacccgcgcttccacccgcgccgctggatgatgttccccgagggccacggcctccaccccggccacgccaagctccgcgggttcgtccgcttcttcaacctctccaccggcgccctcgcccgcgccaagctcctgctcttccaggaccacatggtgctcgactccgtcgacggcctcctcctgctgcagcgggaccacgacaccgccatccgcctcctccaccccttcaccggcgacatcgccgacctcccgcccctcgagaccctccggccgcagatgggtaacaccacaaactccgttctgtggaattacaacgaagagaagcacaggataggtttcctcagagatgtctgcgcttctgtcagtgttaacgacactggcagcatcactgtcatgctggccttccacctgttcaaccgggtagctttcgccgcctccggcgacctgcaatggactctgtccaaatgttactttgggcgcccctgctggaggacattgtcataccaagggaagctgtttatggtgaaggctaagcacgatataaccggcaattcagacattctccagattgatccacccaatgatcaggatgctgaaggctctcctttgccagagaaggagctggcaccgaagctggttgcaacaattcctaaggacaagctgttcggcccttgttttctggcagaatgcgactcggagatactgataattggccatgacagtagacccacatcattagactcacagaccatgctgctgccttttgcctacaacgacattggaaattacactcacacttcagtgtataggatttctgaccttacctcaggaagatttagtccggtggcgagcattggtgaccatgccttgttcattggtccacggactatctgtgtctcctctaaggcacttcctaccattttctgtggtgatactggtggttatatatttcacactcctccaacggaattgttctttacgcaataccacctcagcagtcgtacctggtcacctctgattgatggaagcattggaaattcacctccacctaggccgtatagcctcattcaccatatcttaacatgttgctatcgtaaatattggaataaggggctgattttttacagggagacaacaccttcgtggcgtgttaagcgaaattgccgagttggtggctaa

SEQ ID NO: 64384 - DNA, 109 bp, Oryza sativa
  Clone ID: PAT_MRT4530_65533C.1
ttgcggtcggaggagtgcacaaagactggtacgatggctgtgccgtgggtcacgaagttccccttcttatacagtcacagggagaacattatcggttcggaggatatgg

SEQ ID NO: 64385 - DNA, 339 bp, Oryza sativa
  Clone ID: PAT_MRT4530_65534C.1
aaatcaatcggttcagttttaatccaagaagtggcaggaaaagagaggattattttttatttaagctacagacttttggatgcagaaacaaggtattctccagtggagaagttgtgcttatgtttataaagttaaggcattatttgctgtccaatgagtgcactatagtatataaagccgacgtgatcaagtacatgctatcggctccagttttgaaagggagagttgggaagtggatttatgctttaataatatatgatcttagatatgagtcacccaaggcagtcaaggggcaggctatagccgattttattgttgaacatcgtgatgactcgatcg

SEQ ID NO: 64386 - DNA, 471 bp, Oryza sativa
  Clone ID: PAT_MRT4530_65535C.1
atgggaccctccgcgccctcatcctctacacatccacttctgggccacatgggccaaacacacactactaggcttcaaacgggctggggtgttacaggtcgagattgccgattgggccaagaaaatagtagtttttatgtgaaaggctgggaatcgcgactaggttggaaaggtgctgcaaatccaaaggaattgagaagcagaaaacatgaggagaaaaggagaaatcgatttcatgcgaggaaaagggatctagctggtgaggactttacctcagcgtactcagccgatggcgcagtagaagggctggtggacgacgacatcgtcgcgggcggagatttggtcgggaacgaaatcgcctggggatcgccttgtgcgtcaggaagatcgccgaagagagaaagggcaaagttggtttcagtggtgaaaacggaggaggacggtgtgagatttctcgagggtaacggttag

SEQ ID NO: 64387 - DNA, 932 bp, Oryza sativa
  Clone ID: PAT_MRT4530_65536C.1
atggcgagcggcggcggcgacgcgaggaggaggaaggaggaaggggaggaggacgggttctcgtcggacggcggggacaccaccgacgctgagtcgtcggacgagagggcgggggcgggggcggggaggagggcggtgccgggcgcgaaccccatcctgagccgcctcgcggtgtcgcggaacccgagcccgctcgcggcggccaccgcggcgcccggggtctgcctcctgcggttcgcgtgggagtccgccgctgggtccctcgtcggcgccgtcgtcggatatggaaaaggtttggtcaccactaaagggtttaaaggctcgtttgctgatgctgcatcttctgctaagatatttgctgttcttgctggtgttcaaagtttggttgcctgcactttgagacaactacgtgggaaagatgatgttctcaatgctggaattgcaggctgttgcactggccttgccctgagttttccaggtgcaccacaaacaatgattcagagctgcctgaccttcggaactttctcatacatcatagagatgctcaataaacaggaacctgcacttgctcgtccatctatcactggcacgaaggatctcaaggctggacacagagttcttcctcccttcacgctccctcttccgcaagaggcaatggagggtttttcctcgtttcaaaactttttgtcgaagttccaagggaagtgaaccaagtgaataacctcaagagggatggtgggtagcttcacctctttcctccgttggattttgtccgtgtaaatgcctcgtcttgagtttctcttttgttccacgagtgtaatgttctagggagtgacggattatgtgaatgttgatgtcattcttactcttttgaataacagctctgtgaatccttatcgtgctaaaaatagtgttaatttgccacttgcttc

SEQ ID NO: 64388 - DNA, 1692 bp, Oryza sativa
  Clone ID: PAT_MRT4530_65537C.1
ttattgaattctgtttgtgaacctccatccaaaattgacaaaaagttgcataaccgttgtctcaagaatacggcatgcagcctttaaaagctcactatcttcctcacacttttgtagttgtgcccaagaccggagccaatgtgttgccctgaaaactacctttccaactactaagtttcttctcaattctttgttcgataatcttccaatctttattgccaagctttttttgtgaaaatttattttcaagccagataacttttcaaacactgttaaaatcaatttcaaattcttggcttcttgtaaatcatgctccaaaaatatgatggtatcatcagcatattgcaaaatagataaaccatcatccattaaatgaggtattacctcacttaacataccatcatctttagccctcttaattagtaaagctagcatatcagccacgatattaaaaagaatcggagacagaggatctccttgcctaagccctttataggtttggaagttatttccaacttgatcatttactttaataccaacatgaccaccttgaatgaaagaagctatccattgacaccttttaggtgaaaagcctttcatcctcaatgtctgttgaacaaaagaccatttaaccttgtcgaacgctttcttaaaatcaatcttaaagattacaccacttttatttttacgatgcaattcatatatagtctcatgaagaataacaaccccttccataatatttctcccagggataaaagcagtttgagtagggctaattaccttttgagccactccaataattctattagtagcaactttggtaaaaattttaaagctaacattaagtaagcagatgggcctatattgctggattttcatggcctccatacacttaggcaaaagaatgataggaccaaaattaagagagaatagaggcaaagtaccattatgaaactctataaaaagatctaacaaatcagatttaataacattccaaaaaacttggtaaaactcagctggaaatccatcaggacccggagccttgttatgttccatttggaaaattgcctttttaatttcatcctcagtaaattcttgtgttaaagcttcattctccaattgagatacttgaggaatgtcatcaattttattttcatcaagttgtaaaccggaatcatcgggaggaccaaataaacctatgctagttagcttgcagtcttgcagataagggtttgactctctctctctcttctcctttagacggcggcggcagaggcaggagcgcggcgaggcgaggcgaggcggcggcggcggcagaggaggaggcgagggggtggagaggcgagcgcagcggcaagggaggcgaggtggcggcggcgaggcgaagcggcggcggaggaggcgagggggtggagaggcgagcacggcggcaagggaggcgagggagtggcggcaaggcgaagcggcggcggaggaggcaagagggtggagaggcgagcgcggcggcaaggcgagcggcgggggcggaggaggcgaggtggcggcagcatcacgatgctccagcgcatcggcgctcgcatggcgacggcctgtctcgccatggtcgttggtgcgctcgtcgaggcgagacgtgtccgcgtggcacgccggcctggtcgatcggccgaacgtggcgacggcctgcctcgccat

SEQ ID NO: 64389 - DNA, 1320 bp, Oryza sativa
  Clone ID: PAT_MRT4530_65538C.1
atgaagaacgggctgctgctcaccgagtcgaggaggatgttagatgccttgaagttgctagatgaccagcgggtgagtgtagtggaggaagtcaagccccttcgccgtgccgcgggcgtaggggagcatgggcacaaagcaatgtacctaacagctgtcttcctcaatgctgccacgtgctccggcctcatcttcatgcttttagtggtggggttaggccgcagtagcggagaggaggacgatggcggagtagagaaggacaacgacagcgcgaggaccctcccacagatcgaagcctcacctcgtgcagtcgtagaagtctcggtctccggcggatgcaaggggattgagggctggcgcccggcagcggtgatggcgtgcgaacatgaggctaggtggggaggcatggatgcgaggttgagtgcactcggcggattggagtgcgaccgacggcagtgggtgaggcgaggggcgggtagaacgtggggtggagtgcggccggtggcgtgggtgaaccggcggtttggaccgcggcgaagctgggggtgcgcgagggcgctggtccggcagtggagtgcggcgacggcgtcgggcatcggcggtggagcattagctgatcggcagcgtcgggggcgcgtgagtgtggcggcaccggcggagcagatcgtggcgatgagcgaggggcaagggcgtaccggcggcggtagcggggatttgggcggagccgcggagcgaggaggagtgaggaggcggagggattcgagcggcggagtcatcgcgcgggcggaaagcgcggtggagaggaatcaggtcaaactccaaatcctctacccatccagatctgcaccagccaccaaccaccacccgagtcagtccgccggctccgggagcccgggagccacgcgcgccgccgttcgccagtccaccgggagcccgggagccgcgcgcgccgccttttgccagccaccaccgacgccgttcaccaccccgtcgtggttgacgggggcgaggacggtgaaatattttcactgcggtgacggggacgcgaacatgacccccgacggtgaattcaccgttgccatctcagtagtgcctgtgcctatgctagccaggctgcagctgacgtggtggggtcgaggggaggagggccggcgcggcgggtgcagccagtggccgacggggaaggagtgcggcgaaggctccctgccgctgaacctccagcgccaccgcagccttggccacctcgcgccgctattgaggcatgacacacgacagcaggcgaaggcgaaggcgaaggcgaagcccaagcatccatcatga

SEQ ID NO: 64390 - DNA, 1358 bp, Oryza sativa
  unsure (1)..(1358): unsure at all n locations
  Clone ID: PAT_MRT4530_65539C.1
ccacgcgtccgctattgcctcctcttttgccctccaagggggaggaggatcagggagaaagggagggccaaacaatacaaaaagaattactgcaggaaccctagggattataattagcgagttaacggcaaattaagatgccggtgtcacgtggcggcaaggccgcttcgtcgaaggccgaccccttcgactcggactcggactcggacctggtcccgaagaagaagccgggggcgtacacggcgcccagcggcgcggcgaaggcgcggtacaaggacgacttccgcgactcgggcgggctggagcagcagtcggtgcaggagctggagaactacgcggcgtacaaggccgaggagacgaccgacgcgctgggcggctgcctccgcatcgccgagaacatcagggaggacgccgccaacacgctcgtcaccctcaacaagcagggccagcagatcagccgcacccacgagaaggccgtcgaaatcgaccaggacctctccaagggcgagtcgcttctggggagccttggagggttcttctccaagccatggaagcccaagaaaacaaggcagatcaagggtccagcccatgtctcggatgattccttcaaaaagaaggcgagccacatcgagcagagggagaagctagggctgagccctagtgggaagtcggctaatcgcagctacgccgagcctaccaccgccatggagaaagttcaggtggagaaacaaaagcaggatgatgccctagatgatctcagtggtgtgcttgggcagctcaagggcatggcttgtgacatgggttcagagcttgataggcaaaacaaagcgctggatgatctgcaaggcgatgtggatgaactcaactcgagggtgaaaggagcaaaccaacgtgcacgcaagctaatcgagaagtaggctggaaacatgggacgatcagctttgcctaattgccttgatctgcagtgcattggggaaaatgttaaaagagtcgtcctcgctggcacagcttctgcttatcaattaactgggttttgttttgtattaccgggggcatatatattttttctgtttcttaattttcacgatggctgttttcttgacgatcaaagttgtatactgtatgtacatatatgagaaagagaaattacatattgttgacatcaaaaaaaaaaaaaaaaaaagcttctccctttccctctcaacttctcaagtggcagtggtgggagggtagcatctggcccaagcagataatgngctcttgaatatgatcgcttttttctgtggtaaaatttgtgtgcaagatctggggtacaaaaggaggggacagcagcacaagggaggagaaggagttcttgc

SEQ ID NO: 64391 - DNA, 295 bp, Oryza sativa
  unsure (1)..(295): unsure at all n locations
  Clone ID: PAT_MRT4530_6553C.1
gatcaaatatccaccacatcaatgactaaatcacattatgcgaacaagtcactcaacagagaagtgaaaaccttgaccacacatcatcgagcaactaaancctacacaaacaacgttacacaacgaaacgcatttccaagtcttgggacgggattggaacggatcacttcatcaaaagcttacctcaatcgaaaacgcattactcatcaaaaacttgcacagttaaaaatgggacgagatgttactttttgacatagccatatggtttcgcccattacaaggccgcttctgcagt

SEQ ID NO: 64392 - DNA, 1562 bp, Oryza sativa
  Clone ID: PAT_MRT4530_65540C.1
attgacctcaaggtaatttacccaaccatgcgaggttgtgaattgagtagcgaaatcaccaattcacttagcactagcagattattaacagtttaacatgataaaatggtaggctgaaacaaaaatcgcttcgaggcaaactattaaatgggatcatccgtctcatcaccccaatcaaaatgcgcgcgaatgcacagcgagtgaacctgctgcacccaatgataggcttccaaccagacatagaatttgcatattgaggattaaaccacagctggtatttgaatcttttctcgcagttgctgagccacagcgtcaatgaattcttcggtgttaaggtagaactcccttgttaccttggggccatggataaggagtgcaagatcctttgtcatcttccccgattcaactgtttcaatacatgcagattcaagtttctttgtgaaatccagcagcctatcatttttatccagctttgctctatgttctagtccacgagtccaagcaaatatagaagcaatgctatttgtacttgtctcctgtcccttctgatgtagcctgaaatgtctagtgacagtcccatgagctgcctcagcttctaacgttttcccatcagaagataacaaaacagatgacatcaaacccaaggaaccaaaaccttgggcaaggaagtcactctgaacatctccatcatagtttttgcaagcccaaacatatccaccttcacttttcacagcatatgccaccatgtcatcaatcaaccggtgctcataccatatcgagttttcctcgaacttctccttccatttctcttcatatacctcctggaagatgtccttgaacctgccatcatatttcttcaatattgtgttcttggtgctgagataaagaggccattttttggaaagtgccattgccattgatgactcagcaaaagctctaatagactcatccacattatacattgataaagccacaccaggccctttaaaattataaacatttaactccacaggttcagcaccatctgggacagaaagtatccgtggtacatttttacacaagatgggctcccggaaaacagttccatttagaatattcctgatggtgccatttgggctcctccacattgacttgagtttgaactctttaactcttgtttcatctgttaaagtcataaagaaggaatttgaatacaaatccaacgtagcctcggcactctcaacagtgaccttatcatcggtggcatcccggttgagcagcccaaggtcgaaatacttgacatccagctccaggtaagggaagatgagcttatcctttatcatcttccaaatgacccgcgtcatctcgtcaccgtccatctcgacgatggggttgtggaccttgatgcggtgctgctcggccaccgccgcggcggcggcggcatagcagcggagggaggcgccgccgcggcggagcgcgcggggtccgggggaagaagggacgaaggcgtgcgcggcggcggggtttaagaggagggctttggtcgcggcggcggaggaggaggagccgtagagaggagccat

SEQ ID NO: 64393 - DNA, 794 bp, Oryza sativa
  unsure (1)..(794): unsure at all n locations
  Clone ID: PAT_MRT4530_65541C.1
cacgcgtccgctcgtgtgtgcccttttaggtgacgagatgacgcgggtcatttggaagatgataaaggataagctcatcttcccttacctggagctggatgtcaagtatttcgaccttgggctgctcaaccgggatgccaccgatgataaggtcactgttgagagtgccgaggctacgttggagtataatgttgctgttaagtgtgctaccattacacctgatgaaacaagagttaaagagttcaaactcaagtcaatgtggaggagcccaaatggcaccatcaggaatattctaaatggaactgttttccgggagcccatcttgtgtaaaaatgtaccacggatactttctggctggaagaagcccatttgcattggaaggcatgcatttggagaccagtatcgagctactgatacaataattaatggtccaggaaagcttaaaatggtttttgtcccagatggtgctgaacctgtggagttaaatgtttataattttaaagggcnctggtgtggctttatcaatgtataatgtggatgagtctattagagcttttgctgagtcatcaatggcaatggcactttccaaaaaatggcctctttatctcagcaccaagaacacaatattgaagaaatatgantggcaggttcaaggacatcttccaggaggtatatgaagagaaatggagggagaagttcgaggaaaactcgatatggtatgagcaccggttgattgatgacatggtggcatatgctgtgaaagtggaggtggatatgtttgggcttgcaaaact

SEQ ID NO: 64394 - DNA, 456 bp, Oryza sativa
  Clone ID: PAT_MRT4530_65542C.1
ggttgcgaagagagaacagaaggtgactaggaaaaaacaaaggaacacaggcaaatgcatgcacaggtttacagaagcagagcaacggattaccaaaggtccacacttacagtacgatgaacgtacaacagatacaagcaaaagaaacaggggggaggatgcactgaggggagaaactaaacggatgaatcggaggcaaagaccaggtgatcatggacaagcggagggcgtggacaggagtttagaaggcaggcgaggagagatgatcgagggtgggggagatgaagaggacctggtagatgacgacggagaggccaccgcggatgagtgggccaacccagcaaaaccgctgagacgcgaagcagcagttgacgagagccggtccgaaggagacggccgggttcatggaggcgccgtagaacgagccgccgacgaagaggtgcgggccgacgagga

SEQ ID NO: 64395 - DNA, 399 bp, Oryza sativa
  Clone ID: PAT_MRT4530_65543C.1
aaggggaacatgtggcgcaagatgacctgctgatgatcccaacatgtaaacacatcatatagcataggtgtgagtggtaggggaacattgcatattacacaagagtgccatgttctggagtaacagtggattttcaaggtccaaagatggatatagacgaacagaaaaacgactgtaggaaacaaagactacttatgcaaattgataaggaagaggtcttgaacaaaaggcctggctagaataggagtacatccgctggtgaaaacgatattgaagggggaaacaaaagttgtagcatactttatatttgattaacttgatgtcgcccttgctggggctattatccttgaacaatttcttagcaagtggggccgaggcttgaggcatggcccttttttt

SEQ ID NO: 64396 - DNA, 373 bp, Oryza sativa
  Clone ID: PAT_MRT4530_65544C.1
ggttgtttttttattttggggggtttttattttttttttttggatacagaacattgctttttatatcatagggggggtttgtccaaatatggttgggccttacgacttatcctttacaactattccctgaaacatcccatgcattccacggaaggaagcactgatccacactagatcatctccactggaaaatggggttttgccccagggcttcaccttcttcttttactaactagtacaggcgcttggtatactaggctgaatgaccattgagacttgagctttgcatggagagcgttctactggggtgatccttgaccctgatggcagttcggacacctcttccctttgggggcggtccgctaaaagcttt

SEQ ID NO: 64397 - DNA, 738 bp, Oryza sativa
  Clone ID: PAT_MRT4530_65545C.1
aaaaataaagcttaatgctatgctttattgtgtaaaaatgttggctttacatagtatcgacacaacccattcgtatatcgaggagaagcagtgaaatgtatggtaaacccacagcttagttgctgacaaagcgaccaaaaggcagaagctgacaatgcgagtacgtttagggttcccagggattaaccctggcagtctaatattattctggtaaacatatagttctaaggctccatcatcccggaaaatcttggctccacatccttgagaatgcactgaccctacagactctttatcaacaagaacagcaattatcttctcttttccctctcttgcatcaggaatctcaaacattgcttctgtcaaaatatcttccattatagatctcagttctcgagcccctgtttctcgtgaagctgctttctttgctattaaccgcaaagcattttcagtaaaatgcagcttgacatcattcattttaaacaacttcttgtattgttttcctattgcattttttggctccatgagaacctgaaccaattgagcttcactgagatcattcaagccaactgttattggcaacctcccaataaattctggtatgaggccgtatgcaatcaggtcatcactttcaatagcttcaacacagcatgattccccgatagcatttgtccaaccacagtttcgcagatcaccagatgttggaagtccaaaccccatatgacagtttcggtgtct

SEQ ID NO: 64398 - DNA, 174 bp, Oryza sativa
  Clone ID: PAT_MRT4530_65546C.1
atggacagtgagagcgggcgcagcaaacatggcggcggcggtggggacaaggggcatgtggacactagccatccaaggtcggatgcagcgccgatgactggcgggaaggccggatccaacaccggtgccagggcggagctcgacatccatcactccggcggcgaggcggcgtag

SEQ ID NO: 64399 - DNA, 267 bp, Oryza sativa
  Clone ID: PAT_MRT4530_65547C.1
atggatccagtgatggcagagattataggatgcatatcctgtggcgacgagcagcgacagcaaggatctagtgatgaccggcgcaagaagcatgcaccgacggtggctggagtgattgttgggcaatatctcaccataacatgccgcatagcattcgagctcaccgaactcgacgatgtcaacagtgttagggatgattatgagaatgatgctgccaacatccagcacaactctctcgcatttgaccagtgcctcttctcctggctg

SEQ ID NO: 64400 - DNA, 2693 bp, Oryza sativa
  Clone ID: PAT_MRT4530_65548C.1
gtctggttattggaaagggtggtgagaccggcaatggcggcggcggcggcggcggcgcccccacaggctacggctggcgggcggcgggcggccgaggagccgacgccgacgggcggcaggcgggcgaggaccgaggagccgacgccgacgggcggccggcgggcgggcgcggaggcggcggcaggcgaggagcggacgccgatgggcggccggcggcggggatggctgcgggcggtgggcgttgcgggggcggaggccgaaggcgggcgggcgcggagaccaaggccggcggcggcggccgatgcgtcgttggtgcggccggctccggttcctgttctagtgccggtggtggcggtgcccgcgccggtggtgacgatgccgatggaggtgcccgttgtgccggtgccggcgccggaggtgatggctcccgagcccattcccgtggaggtgatggtgccggaggtgggggaggccggggagggaggggagccgggcctggcggcggcggcgtcgacgcgcgcagtggggatggaggcggaggccagcatgcggcgcagggagggagaggagccgggcctggcggcggcggcggtgtctgcatcggcgcgcggggagggaggcggaggccggtgccagcgaagggaggggagctgggcctggcggcagaggcggcgccggcggcatctgaatcggcgcgcggggagggaggcggaggcctgcgccggcgtagggagggaggcggcgggatgcgctcggaggggaggcggatccacgccggcatcagcttgtggaggtaggggccgggcggcgacggcggcggcgggattcgcgcggaggggaggcggatccgcgctggcgtcagcttgtggatgtaggggggcggcggcggcggcggtatgcgcgcggagggggtgggacggggatcggaggacaggcggtgaccggctgaccgcggacatgacgcacgagtgaccgcttccgtggtagtggtctgtgcggagaacgcggcggcggcggtccggacagagaaggtcgtggcgagggagggtgggcgacgggcgtggcggggagaaagggaggacatttgtagtactattccgtagagagagagacaagaagaagaagaagaagaagagagagagagagagagagaggaggcggcccgtccggcgtcgaggtgggcggcggcggatgggggactccggcggctccgtcgtgtcgatcgacgtggagcgcatctccttcggcggcaaggaacatcatatacataccaatcatggacccgtatctgttgcggtgtatggtgaccatgacaagccggctcttgttacttatccagatattgctttaaatcatatgtcttgcttccaaggattgctcttctgccctgaagctgcttcattgttgcttcacaatttttgcatttaccatatcagccccccaggacatgagttgggggcagctccaatttcgccaaatgctcctataccatctgttgatgatttggctgatcaggttgcagatgttctcgatttctttgggttaggttccgtaatgtgcttaggtgtcagtgcgggtgcttacattcttactctcttcgcagcgaagtatagggatcgtgtactaggtcttattcttgtttctcccctatgtaaacctcccacgtggactgagtggttttataataaggtggcatccaatttgttatattactatgggatgtgtggactggtgaaggagggcttactgcagcggtacttcagcaaggaagtgcgggggtgctctgatttacctgaatctgacatagtgcaagcttgtagaagtttgctagatcaacggcagagcatgaatgtgtggcgcttcgtacagacaatgaacatgagatatgacttgacagaagacctgaagcagcttcagtgtaggacccttatttttgtcggcgagtactctcagttccatactgaggctgttcacatgacatcaaagctggacaggagatactgtgctctagttgaggtccaagcatgtgggtcgctcataacggaggagcaaccacacgcgatgcttatacccatggagtacttcttcatgggttatggcctgtacagaccaagccagttggactgtagcccgcgcagccccctcagcccattctgtatatcacccgatctcctgtcacccgaaagcatgggagtaaaactaaagccaatcaagacaagagtcaggcttgaagtgtagcatagcacacaggtaaataagggtggtgcagaggggtgtcgcttagggctgacatggtgtgagtttaggctaacctgatggtcggtttaccgagttataattttttggtgggtaaaacaagataatttttatactgtcatgtagatataggaaatgctaggttggtcaggtctggtggggtggggttgtattccattaatttgtagccataaacctgtaaattgttacacattgtttatcaaaagcaaaggaaaataatagcagaaaggtgagctgttggtgatcattagatggtgcacgttgctgtctcttgtgctgtgggttgcctgtgctgaaggaaatgttctttgtgagctggcttgtgaacctaaattcttattcgttcattgtatagttttgttccatcagtctagatgaagcctttttaaaaaaaaaaaaaaaaaaaaaaaaaaaaa

SEQ ID NO: 64401 - DNA, 249 bp, Oryza sativa
  Clone ID: PAT_MRT4530_65549C.1
atgtgggcggaggtgaccgtgtgcgcgcgcgcgcgatgcgaatgtgcgaagctgacagaccagagcagcaagcccctcgtcagccgcagccgcagccgcggccagtggaacggcaagatcatcgttcatcgatcatccaaccaacaactagcaaccggagtctccgtctccggattgaaccaccagtgttctgagaccatggtcatcggcggcgaaccaccggccgctgcgtctgcgctgccggcatga

SEQ ID NO: 64402 - DNA, 171 bp, Oryza sativa
  Clone ID: PAT_MRT4530_6554C.1
atggcgagatataagctgagctcgaggacgtcgttggctgtgttggtggtgacgaaagctccgagctgcctgtcatcctacttcacccttgctccactcatccgccggcttctccggctccgccggtgtcaattcgctagcaactggtatctatctgtgtcatgctcgtag

SEQ ID NO: 64403 - DNA, 316 bp, Oryza sativa
  unsure (1)..(316): unsure at all n locations
  Clone ID: PAT_MRT4530_65550C.1
aaattaaanttttccctaaattacaagcaaatcnaaagctcattcgaagtattagcttatggcagttggcatcatgacaaccgttcgtcctctccgccatcgtggctcgccgtcctcaccgctcgcggcagcnggcgggcgggctacnggcggcttacggcgacgtcggcgagtactgccggcgtgggggaaggcggtgtcccnggaaccccggtcccactcgtgccggaactacatcgcgccgntggtgcgcccgtcgccggggggccgccctggactccggcaagcagccgccgcggcagctcctggagccgtg

SEQ ID NO: 64404 - DNA, 1659 bp, Oryza sativa
  Clone ID: PAT_MRT4530_65551C.1
atggactccccagcgacccccgtgggcttatctccgccacttctcagtctggaaaagggaattattgcgtcatcagctcaggtttacggtggaacaggtgcacagcggcggtctacggaacggacggccgagatcgatccatccaaaacggacggccaagatccatcggtccacgatcggaccacggcgaacggcaacgatgacgtcatcaccggcgacggctcggcctcgcgtgctcgccggcgaacgacggcgcggcggcgcaaacggaggacacctacgcgtagaggaagacgcggcgaactcaccgagcacttggacgacggcaaacgacgacagacgacgatggcggcgaggttgaagcggcggcggtcttcgggtcgacggtgacggcggtgctccggcggtcttcggcggcggcctcacgatgccgatggtggcgacggcgaccgaaggcggcgactgcaacggcggcgcggcgcggctgaaccgacaacaacgacggcggcggctaaggctacacggaggcggcgctgcacgcgacggcgggctaagacaaaggtggcggcggagagaggaggtcccggggatctttttataggggctaggaggcagcgacgaaggcccacggcggccggcgacgggatggaaagttagggttcggagagagagagaccgatctgaatcgacctcgaatccaacggaaacggaaacggaaacggaaagagaaaagatagaggagatcgagaagatcatttcccctctattgatttcatcggaaacggaaaggatcgaccgaattggaaagcggcggcggctagggtttcggccggcagcggcgcgagaggaacgagagcctcggtgcctcgctctgcaaaaaggccggcacagccttggcaacgagcgtggcagtggtcctccaaagccggtgaagccgctcatccgttgggcgatttgcgcggtgatggaatcctcgctcctgtccggctccgtctgcatcgatgcgccggtggatggggaggatggagaaacggagcggtggaggagaagcggcgcgatggctggagagctcgtcgcctgcaccttggaggagcgccacctctcgatccgcgctacctggagctcgtcagccaagacacccccgatccgtgctgcctggagctcactggctgcgcgccactcgatccgcgccggtcagagctcgtcggccacaccgcccctaggtttgcgctgcccgtagctcgccggccgcaccgccccttgatctgcgttggtcgatgctcagcggccacgccgccccctgaggcgagaggggtgaggtggtggtggttgctcgcgtcgttgtcatcatattcgtcctctactcgagcgcgtcggttgggattggaggagaggacaccgacccccacaccacggacagtgagccctccttcttgccgtaagcctgtgcttggcgtggtttcggacacatgggcactatttttctcttgttccgaccgtttggcaaatggtacagcgtgcacgcgtacgtacaactacaagcaagttcataaatgttttgcggccatttacacggagatctcccggttgtccaaccgggactacgaatccgggactaaagatcgatctttagtcccggatcgtgttaccaaccgggac

SEQ ID NO: 64405 - DNA, 941 bp, Oryza sativa
  Clone ID: PAT_MRT4530_65552C.1
gcacgagggctggtaccatgctagagcataccttgcatcattgcatgtggttgcgccacataatgcacaatacactttgacttaaaaaatctttgcacatggtgattccttgtttctgtacgatacatctggttttgtagtttattaattattattatgaagcaagcattatagccgcaagaaattaccttttttcatgttttttttcctcatttactgcctcctgtgatgtactgttccaaaggtgatttgctcaacaacaggaactatctgatgaacatggtaacaaatctgctattccttagttttgtcaggtctggatttctcaatgaagttaccttcatttcttttcgacacagcagatgaactgctgccgacattgcaatttttcctggcagaaccttttaaacttcggtatcctaacccatactaatcatgaaggggaggctgttactgtcatgcaaatggggagagttattggtcgccctggtcatgcctagtatgatgattttacccagctgaatcccagccacacatgatgcgttcgttcattgtttgcacacaaatattattgcgtcatatgagtattctttgggtcagaactgcacagcaacgcggcctgggcactcaatctggcatgttgtctatggggtgcatgcttgttaacagaagaagcccaacatgtgggattttgttttttgcggttaatttttttcctgttttccttttgttccatgtatatatattcgattttgatctccaggtttggagatacaatggtcaaagtgttatgatagtctcttagtttgttgcctcgaagttatactcgggcgcaacatgtctgactgatattctgatgatgttactcgtttctgaacttcctgacgccaatatggtgcttggatgttgataaaatagagctgctgtctttaagttattcc

SEQ ID NO: 64406 - DNA, 357 bp, Oryza sativa
  Clone ID: PAT_MRT4530_65553C.1
tgttaacgaccaaatttggtaatccaaggatcggagatgaagaaggaatcgggacggagttcgagatggagatcgtcccggaatcagagtaaagatcagctggagtccgaatcggctgcgaccaggatcgatagagtttgagttggacagggttaatcgactaagccgaatccgacaatatgatttgcttggacaaaagtctgccgcaaagacttatggtatcttagagtttgttagagataagagtcgtgtccgatatggacatattttgatcaaatcaactggcatgctcacacacccaaaggcaagtttttgacctgcactggagttaagcagatctctcaggcctcgtgtttt

SEQ ID NO: 64407 - DNA, 323 bp, Oryza sativa
  Clone ID: PAT_MRT4530_65554C.1
gcaacagaacttcattcagctgaaaaaaaacggcccgctggttatttatgactgaccaacaaaggttcagtaatcatgctagggacgcctccaaatgaatttcttgtcatacaagggcattatggctctacaacctggggagacaggccctttgcctctgtgatacaacaccaccgtgtacgacgaccgaacccctacacagcaagatcatgcaaacctgagacggtagcactggcgactctgaacactataatgacgctccacacaaatccattgtataggcgggagcccctttatccattgcctttagagtgtgataaaag

SEQ ID NO: 64408 - DNA, 492 bp, Oryza sativa
  Clone ID: PAT_MRT4530_65555C.1
atggggaggaagaagctgaaggcaaaacaggacattgccccattgatgatcacgcacgctggtatggcggacgccgacgttgattggacctcacctgacagcgggccggtgcaagcggtgggcattaaaacatggcgcagcagggaggcaatctatttggcgccgtgcagcagggaggcaatctatttggcgcaccagagcatatggcatgtgggacagcgcaaaacagcgagcccacccgcagagggtttacagaggagacgttgtgtggccgaagggctctacctggagcacggtagaccaggtgctgcatataagcattcggcggagcacgcatggcaggtaggcaggagcagagtcatgccgttagggagccgtgcaaactgcaccattggtcaagcatgtcagggtgttaaaaaccctgtactccatgtgcactgtgaaccaaagaagctgcaagtggggcacgcagagacaggtccagaaacctaa

SEQ ID NO: 64409 - DNA, 463 bp, Oryza sativa
  unsure (1)..(463): unsure at all n locations
  Clone ID: PAT_MRT4530_65556C.1
atccacgtcggcgttnaatttgtcggcaggaatggcaggtttttgtcttaggcccgtctgatccaagctcgcnctctcgcgaagacctgagaattcgttcgaggatctcaaaagagagaccactccgttggttgaaactgacgaggagaggggtctcccgtgcacgatatgtagaacagttcagtgaccatgttactctgacttgactgactgacccgtcatcgtcgtcgttgctctcttactgtgcagaacttgtagagtcgtgcacttgcgcctaccactgtccttcatcttggaggacaataatgccagtggtgggcagaattctggtcttgatgtgaatccgtgatgtacggggtaagacaaggctcgtgaatgagtatactccatatctgtaaagctctatcatatccgaaggtcatcacgagttagttagagtgttaaaaaaaaaaaaaaaaaaaaa

SEQ ID NO: 64410 - DNA, 363 bp, Oryza sativa
  Clone ID: PAT_MRT4530_65557C.1
atggctcggccccacagctcgagcagcccctgtccctgtcaggggacggcgccgcgctgcgggaagaacgagggaggcgtggaggagagcacgaggtggcaggagcagcagcagctggaggaggagttagtttctgtagctgaagccgctggggaagggaggagaggtggagaggaggagcagaaaggcgtggaatttgggaggttgtttgtgacgtttgctcttcggttgtatcagaaattcaggattcagaagctacctactggcagtttcttctcctttttgttttctactactgcatttgattttgaaagtataagtgttttcaagagttttagcagaattaaggttaaggagatctaa

SEQ ID NO: 64411 - DNA, 420 bp, Oryza sativa
  Clone ID: PAT_MRT4530_65558C.1
cttcaacccagtgtccaactttcttgtgattcccagctttgctttgctggagtagttggcagtacaatgaaacccaaataggtttcagacttagccaaagggcagcttgcaatgtatttgcatgtggatcaagtgagctaagccacctgttatctcctcagctctatcaatacacaatgtttagcaatgtggtacacatgaccacctgagcctctgaggaacagaggaattcaggtttcctacacagctcattgtttacaagctctatctatcccctcaggcccaatagtgatgacactgcgaaatttggattcatgtttgaccttaagtgcaatggattctacacaagtacagatgcaggacatcaaatagttcttcaaacagaatttgaccggaccatctgaagcaagggttttgaaa

SEQ ID NO: 64412 - DNA, 5589 bp, Oryza sativa
  Clone ID: PAT_MRT4530_65559C.1
atggcctatctggcagtggcgcacagcctctctccgaacgctagcggtgacgacggggagcagaacccgcgccgtcgggctcgcaccccaccgtccccctctcgccgaaatcttgggcggggggaggcgctcggggaggtcgaaggatccgcgacttcgccgcccgcgggcgacgggggaggacggcgagacggggcgcgtcgccgcctcgtctacggcgatggcggcactccccagggcgcgctccaggctgcgggcgcgctcctgcgtcacccgcccgtcgtccccgatccagagactccagcccgacgttggctggatgacgtggccgacttgcgccggcgcgacgctcgtcgcgccacccacgcaacggagggcgcttcctcgtccggagcgccacttcggtccgggcacgggggccggccccccgtgtccccggttggcggtgccggctgtcgagcctttgtggcgagccttcggaacgtccgttggcccccaaggttccggcccaccatcaccgaaaaatacgacggaagcgtcaaccccgccgagtttctccagatctacacgactgggatcgaggccgccgggggtgacgacagggtcatggcgaatttcttccccatggccctgaagggtcaggcgcggggttggctaatgaacttgccacccgcgtcggtccactcttgggaggatttgtgccagcagttcaccacgaacttccagggcatatatccgcgcccaggcgaagaagcggacttgcatgcggtacagcaaagggacgatgagtctcttcgctcgtacattcagcggttctgtcaagtccgcaacaccataccgtgcatccccgcacacgcggtgatctacgcgttcagggggggcgtgcggcacaaccgcatgctcgagaagatcgcctccaaggagccccagaccaccgcgcagctttttgagctcgcggaccgtgtggctcgcaaggaggaggcctggacctggaactcctccggttctggtgtggcagctccggccgcccccgggtccgccgctcggtcagggcggcgggacaggaggaggaagaaggggtcggcccgttccgatgacgagggtcatgtcctcgccgtcgagggcgcttcgcgggccccccgaaaggggaggcctgcgagcgacaaaaagaaggaggccggcgctcccagcagggagcgcccgaccggcaagtggtgtaccgtgcacaacacctccctccacgacctcgcggactgccgcgcggtcaaaagtttggctgagcggacgaggaagtgggaggaggagaagaggcaggagcgccgtgaaggcaagaccccggcggctcccgccggcaaccggcgaggtgaggccaagcagaaggccaccgccgaggacatcgacgatggcgacgatgacctggggttccaggagcctgaggccaccgtcgccaccgtcgatgggggagcgtgcgctcacgcttctcgccggagcctcaaggccatgaagcgagagcttctggccgcggcccctacccatgaggcgacgcggcgggcgcggtggtcggaggttgccctcaccttcgaccagaccgaccacccgccgtgcgttgcccggggaggacagatcgcgatggtggtttcccccaccgtttgcaatgtgaagttggggcgtgtcctcatagacggggcctttgacgccatcaaggccccggggatggtgttccggccatcccagccgatcatcggtgtgacgccggggcacacctggccgctgggtcatatcgacctcccggtcaccttcggtggttccgccaacttccgcacggagcgggtggacttcgatgtggcggacctcagtctgccctacaacgcggtcctggggaggcccgcgttggtgaagttcatggcggcggtccactacgcctatctccagatgaagatgccgggccccggtggccccatcatcgtccatggcgacctcaaagtcgcgcttgcttgtatggagcagcgcgcggaccaccttgccgcggcgtccaagcccgcgggtggcgacgagaggctcagcacctccgtcccggccgccccaaggcagcggatggtcacgtgcgacgaggtcccggaagacgcgctcgtctccttcctgcgggcaaacgccgacgtctttgcctggagaccggcggacatgcccggggtccccagggaggtgattgagcaccgtctcgccgtgcggccgggcgcaaggccggtccggcagaaagtgcggcggcaggccccggaacgtcaagccttcatccgcgaggaggtggcgcgacttctggaggccggattcatacgtgaggtcatccatccggagtggctggcgaacccggtcgtcgttcccaaggcgaacggcaagcttcggatgtgcatcgactacaccgaccttaacaaggcatgtcctaaggacccttaccccctgccacgcatagatcagattgtcgtctccaccgcggggtgcgaccttttgtgttttctggatgcatactctggttatcatcagattcgcgtggctagggaggatgaggaaaaaactgcattcattacccccataggaacttattgttatacgacaatgcctttcgggttaaagaatgcaggtcctacttttcaacgtactactcgaatttctttgggtagccagataggacgcaatgttgaggcctatgttgatgacttggttgtgaagacgcgcaaccaagagaccttactctcggatctagcggaaactttcgaaagtctccgctcggcccgcataaagctgaaccccgataagtgtgtgttcgacgtgcctgcgggcaagcttctcgggttcttggtctctgcccgaggcatcgaggccaaccccgagaagatacgagctatagagcagatgcgcccccccagcaagcttagggatgtgcagtgcgtcaccggctgcatggccgccctaagtcggttcatatcgaggctgggagagaaggcactacccctatttaagctcctcaaacgctccgggccgtttacctggacggaggaggctgagcgggccttcactcagttgaaggcgtacctcagttctcccccagtcctggtcgccccggagccagatgagccgttgctactctacctggcggcaaccccgcaggtggtcagcgcggcgttggtcgtggagcgcgacgaggacaaccctcactccgcgcgtcctcaccctgtgtcgactcgacccgggagagagcagggaggagaggcccccgagccgaacggcggcccaaggcccccgacggccggagctggccctccgcctgcttgtccgacggtgccaggcgcccccgacccccaggatggctccggggccactgcgggaagaccgcgcctgtcgccctctgaccccgaggtcgtcggcacagaagccgagtgcgccccgcgtggcctctcggacgaagagcgccctggagatgcggcccctggcgaagaggatcggccccgccgaaaggtgcagcggcccgtctacttcattagcgaggccctccgggacgccaagacccgataccctcaggcccagaagatgctttacgctattctgatggcttcgaggaagttgcgccattatttccaggcgcatcgggtcacggtagttacgtcttaccccctcggccaaatcttgcataaccgagagggtactggacgggtggtgagatgggcaatcgaactctctgaattcgatttgcgctttgaaccacgccacgcgatcaagagccaggccctcgccgactttgtggcggagtggaccccagctcccgagcccgtctccgcccccgaggccagctcgggcccctcgcagctgcctcacaccgcgtactgggtgatgcagttcgacggctccctgtctcttcagggcgccggtgtgggggtcacgttgacctcgccaagcggagacgtcctcagatacctggtccgcctcgactttcgggcgaccaacaatatggcggagtacgagggactccttgcgggactcagagtggcagctggactggggatccgccgcctcctgatggacgcttacgtgcgccaggtgcggcgtatggagcgccatttcgacgggataaagcttcggcacgtgcccagacgggataacgcggtcgccgatgaactctcaaggctcgcttcctcgcgagcccagaccccaccggacgcctttgaagaaaggctagcccagccgtcggcgcgacccgaccccctaggggagacggacgcgcctgaacggcccccgaggcccgtcggagtccaggcctcgggacccgaggggagcgctcccagctcccctagattgattgcttggatcactgagatccaggcgtacctcgcagataagactctacccgaggaccgcgaagggagtgaacgcgtccggcgcatctccaagcgctacgtgctggtggaagggaccctctatcggcgcgcggctaacagagtcctcctgaagtgcattcctcgggaacaaggcgtcaagcttctcgtcgatgtccatgaaggcgagtgcggagcccactccgcctcacgcaccttggttggcaaggcctttcgccagggtttctattggccgacggctctcaacgatgcggtcgacctggtccggcggtgcagggcgtgccagttccacgccaggcaaacccatcagccggcccaggccctgcagaccatacctctttcgtggccgtttgctgtctgggggctcgatatcctgggtccgttcaggcgggccccgggcgggttcgagtatctgtatgtcgctgtcgacaagttcactaagtggcccgaggcttatccggtcatcaagatcgataagcactccgcgcttaaattcatcaggggcatcactgcttggtttggggtgcctaaccgtatcattacggataacggcacccagttcactagtgagctcttcggtgactactgcgaagacatgggcatcaagctctgcttcgcctcccccgcccaccccagaagcaatggccaagtggagcgcgccaacgcggaaatcctcaagggcctcaaaaccaagaccttcaacatcctcaagaagcacggcgactcgtggatcgaggagctgccagcggtgctctgggcgaacctaaccacgccaagccgagcaaccggggaaacgcctttcttcctcgtctatggcgcggaggcggtcctcccatctgagctcaccctgaggtcccctcgggtcaccatgtattgcgaggctgatcaagatcagcttcgccgagacgacctcgactatttggaagagcgaaggcggcgcgcggccctccgagccacgcgctaccaacagagcctgcggcgctaccatcagcgccacatccgggcccgatcactctgcgtcgacgacctcgtcctacgccgcgtccaaacgcgtgctggactgagcaagctctcaccaatgtgggagggtccgtatcgagtgatcggcgtcccccggccgggctccgttcggctggccacgggcgacggcacagagctgcctaacccgtggaacatcgaacaccttcgtcgcttctacccctag

SEQ ID NO: 64413 - DNA, 435 bp, Oryza sativa
  Clone ID: PAT_MRT4530_6555C.1
atggcggcggcggcggcgtcgtcgtccaccccggcggccgtccgcaagcagtacaccatccaggtcggcgagaacgagctcgtcctcaaggcatgccctgctcgccgcgctctcttgcttccgctctatgagctggagctggtgaatgacgaggcgaacgtgtacaagctgatcgggccggtgctggtcaagcaggatctcgcggaggcgaaggccaacgtcaagaagcgcatcgagtacatctccgctgagctgaagcggatggatcgagcgctcaaggacttggaggaaaagcagaacagcaagaaggaatcgccccatgtcgagcgccctgagcgtggtggggcgatcagcggccacctcttgctgaagccgtgcgacgtggaggcaggcgagcgcatcgacgaccgatggtggctgacggtattctggtga

SEQ ID NO: 64414 - DNA, 962 bp, Oryza sativa
  Clone ID: PAT_MRT4530_65560C.1
gcaggaattcggcacgagggagagagagaactagtctcgagtttttttttttttttttttgactaaacggccttttccaattttttaaccaataccaaatatactcttctataaatacacaggtagtacaatgtcctcgaatcttattggtgcacctgccagctccccctaattcccttaatcatcgatattcttgcatttgagatgacaaattaatagacggcaacagaatacaattgatcgaagaagtcccctccatgaatcataatcgaaagcaataatataaattaaaaaggaaaaccacagagagtagcagctactgaaattgggacgccgcgcgcggatcgagatcgagattggaatttggaaatcgaatcgaaagatggatatgatgttgcgtgttcatcctcgatgagaactcaaaatggatggacgtagatgccgatggactcgaggtagggccccgcgcgggcgaagaagccgacgacgctgccgttgttgaggacggggacggcgaagggcgtgccggcgccgttgccgaacggcccgatggtgcgttggctggtgacgagcttgagcgaggtgacgacgtgggtgtagtccccgatgggccccacgagccgtgcacctccttcacgtactccgatggctcgaacgtgattcggagaggccgccttggccgccccaggggccgatggtgtggaggttcttgtccttgtcgaggtaggagaagagatgcagtcgatgaccttgccgtagcggagccagaagccctccagccgctgcggcgccaccgtcacgtcgtactccttcccgccgtggtcgccgccccacgcacccagcttcaccagcgagccggcctttgcatcaggggtagctgcgttccgtggccagcgtgacgccacgccggtgcggcacgccgtgactcgtccatcaatgccgtctagcaattcagaaggcat

SEQ ID NO: 64415 - DNA, 350 bp, Oryza sativa
  Clone ID: PAT_MRT4530_65561C.1
gcgttcccatgatccccacgagctcacaagttagtgaactttatttccaactgttggttcagctctccatgaattggcagctgtgtttgctagctcttcctgtccccttcctagcagaacagatggcggtgctgtacgtcaccttcttgaggttgattgactaaaaaccttgaaaatactccctccgtttcacaatataagtcattctagcatttcccatattcatattgatgttaatgaatctatacatatatatatatctagattcattaacatcaatatgaatatgaaaaatgctagaatgacttacattatgaaacggaggaagtagttggcaagggaggtggatg

SEQ ID NO: 64416 - DNA, 5229 bp, Oryza sativa
  Clone ID: PAT_MRT4530_65562C.1
atggccgaacaggcagtggcgcacaacctctctccgagcgctagcggtgacgacggggagcagaacccgcgccgtcgagctcgtactccaccgtccccctctcgccgaagtcttgggcgggaggaggcgttcgaggaggtcgaaagatccgcgacttcaccgcccacgggcgatggagaaggacggcgagacggggagcgtcgcctcctcgtctacggcgatggcagcacgccccagggcgcgctccaggctgcgggcgcgctcctgcgtcccccgcccgtcgtccccgatccagagactccagcccgacgttggctggatgacgtggccaacttggtcatgacggcgcagcagcgcctaggcgccggcgggcggtcctccgccaccaaggcctctggcgctgctaccgccggctccgtgtcgtcgaggcggagggcgcggcgagcggcggccgttacccgccgttcgtccgccattccttcgtcaacgcctccgacccaagaagatgtgcgtggggggccagatgcccacctcaatatcgagcgccggcgcaatggtcgtcgtgctgcccacgcaacggagggcgcttcctcatctggagcgccacttcggtccgggcacgggggccaggcccccgtgtccccggttggcggtgccggctgtcgagcctttgtggcgagccttcgaaacgtccgttggcccctaaggttccggcctaccatcaccgaaaaatacgacggaagcgttaaccccgccgagtttctccagatctacacgactgggatcgaagccgccgggggtgacgacagggtcatggcgaatttcttccccatggccctgaaaggtcaggcgcggggttggctaatgaacttgccacccgcatcggtccactcttgggaggatttgtgccagcagttcaccatgaactccagggcacatatccgcgcccaggtgaagaagcggacttgcatgcgggacagcgaagggacgatgagtctcttcgctcggcggcgggacaggaggaggaagaagaggtcggcccattccgacgacgagggtcacgtcctcgccgtcgagggcgcttcgcgggccacccgaaaggggaggcctgcgagcgacaaaaagaaggaggccggcgctcccagcagggagcgcccgactggcaagtggtgcactgtgcacaacacctccctccacgacctcgcggactgccgcgcagtcaaaagtttggctgagcggatgaggaagtgggaggaggagaggaggcaggagcgccgtgagggcaaggccccggcggctcccgccggcaaccggcgaggtgaggccaagcagaaggccaccgccggggacgtcgacgatggcgacgatgacctggggttccaggagcctgaggccaccgtcgccaccgtcgatgggggagcgtgcgctcacgcttctcgccggagcctcaaggccaagaagcgagagcttctggccgcggcccctacccatgaggcgacgcggcgggcgtggtggtcggaggttgccctcaccttcgaccagaccgaccacccgccttggggcgtgtcctcatacacggggggtgcagccctcaacatcctttcccccgcagcctttgacgccatcaaggccctggggatggtgctccggccgtcccagccgatcatcgatgtgacgccggggcacacttggccgctaggtcatatcgacctcccggtcaccttcggtggttccgccaacttccgcacggagcgggtgaacttcgatgtggcggacctcagtctgccctacaacgcggtcctggggaggcccgcgttggtgaagttcatggcggcggtccactacgcctatctccagatgaagatgccgggtcccggtggccccatctccgtccatggcgaccacaaagtcgcgctcgcttgtatggagcagcgcgcggaccacctcgccgcggcgtccaagcccgagggtggcgacgagaggctcagcacctccgtccctgccgccccgaggcagcggatgatcacgtgtgacgaggtcccggaagacgcgctcgtctccttcctgcgggcaaacgccgatgtcttcgcctggagaccggcggacatgcccggggtccccagggaggtgattgagcaccgtctcgccgtgcggccgggcgcaaggccggtccggcagaaagtgcggcggcaggccccgaaacgtcaagccttcatccgtgaggaggtggcgcgacttctggaggccggattcatccgtgaggtcatccatccgaagtggctggcgaacccggtcgtcgttcccaaggcgaacggcaagcttcggatgtgcatcgactacaccgaccttaacaaggcatgtcctaaggacccttaccccctgcctcgcatagatcagattgtcgactccaccgcggggtgtgaccttttgtgttttctagatgcatactctggttatcatcagattcgcatggctagggaggatgaggaaaacactgcattcattacccccataggaacttattgttatatgacaatgcctttcgggttaaagaatgcaggtcctacttttcaacgtactactcgaatttctttgggtaaccaaatagaacgtaatgttgaggcgtatgttgatgacttggttgtgaagacacgcaaccaagagaccttactctcggatctagcggaaactttcgaaagtctccgctccgcccgcataaagctgaaccgcgataagtgtgtgttcggcgtgcctgcgagcaagcttctcgggttcttggtggtcagcgcggcgttggtagtggagtgcgacgaggacaaccctcactccgcgcatccccaccctgtgtcgactcgacccgggagagagcagggaggagaggcccccgagccgaacagcggcccgaggcccccgacggccggagcaggccctccgcccgcttgtccgacggtgccaggcgcccccgacccccaggatggcctcggggccactgcgggaaggccgcgcctgtcgccctctgaccccgaggtcgtcggcccaaaagtcgagtgcgcccctggtggcctctcggacgaagagcgccccggagatgtggcccctggcgaagaggatcggccccgccgaaaggtgcagcggcccgtctacttcattagtgaggccctccgggacgccaagacccgataccctcaggcccagaagatgctttatgctattctgatggcctcaaggaaattgcgccattatttccaggcgcatcgggtcacggtggttacatcttaccccctcggccaaatcttgcataaccgagagggtactggacgggtggtgaaatgggcaatcgaactctctgagttcgatttgcactttgaaccacaccacgcgatcaagagccaggccctcgctgactttgtggcagagtggaccccagctcctgagcccgtctccgtccccgaggccagctcggacccctcgcagctgcctcacaccgcctactgggtgatgcagtccgacggctccctgtctcttcagggcgccggtgcgggggtcacgttgacctcgccgagcggagacgtcctcagatacatggttcgcctcgactttcgggcaaccaataatatggcggagtacgagggactccttgcgggacttagggtggcagctggactggggatccgccgcctcctggtgttaggcgactcccagctggtcgttaaccaggtctgtaaggagtaccggtgctctgacccgcagatggacgcttacgtgcgccaggtgcggcgtatgaagcgccatttcgacgggatagagcttcggcacgtgcccagacgggataacgcggtcgccgatgaactctcaaggctcgcttcctcgcgagcccagaccccaccgggcgcctttgaagaaaggcttgcccagccgtcggcgcgacccgaccccctaggggagacggatgcgcctgaacggcccccgtggcccgtcggagtccaggcctcgggacccgaggggagcgctcccagctcccttagattgattgcttggatcgctgagatccaggcgtacctcgcagataagactctacccgaggaccgcgaagggagtgaacgcgtccagcgcatctccaagcgctacgtgctggtggaagggaccctttatcggcgcgcggctaacggagtcctcctgaagtgcattcctcgggaacaaggcgtcgagcttcttgccgatgtccatgaaggcgagcgggccccgggcgggttcgagtatctgtatgtcgctgtcgacaagttcactaagtggcccgaggcttatccggtcgtcaagatcgataagcactccgcgctaaaattcatcaggggcatcactgctcggtttggggtgcctaaccatatcattacggataacggcacccagttcactagtgagctcttcggtgactactgcgaagacatgggcatcaagctctgcttcgcctcccccgcccaccccagaagcaatggccaagtggagcgcgccaacgcggaaatcctgaagggcctcaaaaccaagaccttcaacatcctcaagaagcacggcgaatcgtggatcgaggagctgtcagcggtgctctgggcgaaccgaaccacgccaagccgagcaaccggggaaacgcctttcttcctcgtctacggcgcggaggcggtcctcccatctgagctcaccctgaggtcccctcgggtcaccatgtattgcgaggctgatcaagatcagcttcgccgagacgacctcgactatttggaagagcgaaggcggcgcgcggccctccgagccgcgcgctaccagcagagcctgcggcgctaccatcagcgccacgtccgggcccgatcactctgcgtcgacgacctcatcctacgccgcgtccaaacgcgtgctggactgagcaagctctcaccaatgtgggagggtccgtatcgagtgatcggcgtcccccggtcgggctccgttcggctgggcacgggcgacggcatagagctgcctaacccgtggaacatcgaacaccttcgtcgcttctacccctatgccctcagtggcccgggccggctaaaatcgccaaacggggcccagaaccgagccgtgccccggggcgtggtgaactccgggggggaattggcaaaggcccacaatcgggtcatccataaccctcggtcaccgcgctcccggcctggccagtctcgacacgaggatctccccaggcac

SEQ ID NO: 64417 - DNA, 3079 bp, Oryza sativa
  Clone ID: PAT_MRT4530_65563C.1
ttttttaaaacaagtgcacataacacagattaattgctcataacagaggatatttgcaacattctcgtcgtacaactcctagttcctacttgacctaaggctctgggctgacctgaactttggctaaacaacggcatacatctgcactacaccaggcaaatgcatggggtgatgggagtaacatttatatgcatacacatctcgactgaaatgaagtttaacagctcccaaatgcttgatacaccatgttggggctcgatcatcagagcggttatccttggtccagaagcaccatcatacactgcctgaaatcttccaccggcggaaagctgatgcaacccatctcaacagttcacagttttatctcatccaatctcgagtacaaacaagtgcctcgattgttctgatgtttaatgtactctggtgctttggaattactggtccactgctactgaatgctgcttcagattgaacagcagatgctggcatggctaagatgtcccgtgcaatagttgcaagtgttgggtacttagtactatgagtcatccaccagtttaaaatatcaaaatcatcctttctaggaactaaaccatcttcaaggtaatcatcaagctccgaagatagctgacgacttgcttgttcatggagatgctgatcccaatcttccaacgaatcattatcatctgcacacaaagcttcactgtttgaaacaacatcacttgcctgattcaaagaatggcagtattcattgaagagttcccggactgtttcacgtattacagataggtagcttgccgaatctgttccaaaagctcgtttcagacgaaactcaatgaaactgaatttgaatctagggtctagcacaacaggtatggccaaccacaaatatgaattttgccaatactcattgaatgcttcctgcatcaccatagccactgtagctatttctctgtgatcatttaatgcttcttcttgcaaaactgtcctgactttccatatctcgttaaaatatatatttgctgtcggagagctagggctggaaataacttcaatgacacgataaattgtcctcaaaatcttgcaaacggactcagcagtttttgtatcttctggggacaccctttcttcagaaggaaatgacttcttgaaatgcaaaagcacttcaagtctaaaataaagtttgtgccaccacttagcatcttcttgtggacactttagacccgtctgtgaaataacttccagaagctgctgctgggtcaatgacactaaaaaatccattactatgtcaccaacaagacgaagtatatctgcttgcactttgaaaacaatactgttaaggacatagtccacacaggcaacattgaatagcgtccctccaataggaaggcacttcttctctataagcatttcctttagcaatgaagtattggtgtcacccctaacttcaccaacagaagtcaagcttaaaagcttctgatcaagattccaatctctaatggcatccaatatgacattatatgatccgctctcagactctgggacacaggcttccatacaatgtatcatcctttccaaatcagcaggcgcggaccaaaacattccaaattttattattatcctatgaactttccagtcttcatcaatataatgtgctgtcaaacagaggtaatttactgttgtctcaggtccatcaggagtccagatgcttgctgacagagagacacgtcgggaaaaatgtgcaattttaccctttatattttccttttccttctgaaatagtgtcaagcaatgttcttccatagcattgcgagagactaaattgaccacagggttgagtttctttacaaatctcatcatttcttcgtgctccacaattgacaaaggataaccatgcaaagctatcatcccgactaggtctggatcagatgtttcctgaccagctggagtggtcacaaatgaggtcctctgtttcatcaggcttgtataatctggagtcggcacggaatgctctgctggtaccactcgaatgggcttaggggtcgagtcaccagagctacttgccctcagaagcttgctagagtattctgcgatctgaaccttcccatttgtcaaggcaggtgagagctcatcttgcaccctggacttcaaactaggcacgctagaaggataaaataaacccttctgatgaatttggccccctccacgtccacgtcgtcctgcacaggttataagatgtcgactcagatggcttctccccccgaacttattcgcactgaggcgcttctggcagtgaatgcaatctgcagcctggagtttcccctcaatatagacaggtgtaaactccttccacacctttgacgtgaatctgttaccgctgggtgttaccgagtttatatcactaagcgtctctgtaataacatcattgaccggatcgtggggtgaaactggatcgttctcattcaccaaaacgcatgggaagtaggaatccttctgtcgcctctgcgccgcttcctccttgccagggcagattttctgatgccgccatagatggcttgtgccgttggaatctttgcagctgaggcgattatggcagtagagacactccgcaaactgaaccttcccattcagaaagatgggcttgtactcctcccaaaccttggaccttttcttgtgcctgtaccggaacgggctgtgcactccatcaaatgccacatccactttcatgctgttatcctcctcatgctcctctccaggaacaggatgctccatagtgttttggagtgaatcatgatccattcatgggcggatctaacatggggcatggggggttcagttcaacacccccaaactttttgggaacaaacaaacatcaaggttaagccaaatttcaggatgcggcggaagcagcaggatgctcgctcgcgggatggatggggggatcggcgcaggcggcggcggcggcggcgaaggatgtggatgcggcggaagcagcaggacgagcggcagcgccgcctctgctcgctcgcggggcggatggggatcggcgcaggcggcggcctgcagcccgggggatccacta

SEQ ID NO: 64418 - DNA, 581 bp, Oryza sativa
  Clone ID: PAT_MRT4530_65564C.1
cgggctgcaggaatcggcacgaggtttttttttttttttttttttttttttttatagcaagagaattattgatggttattacttttctttcatgctacgaatgagcgtgacctgccgaaattccgtggaatacatgaatctgatgagaattgtatcccggtacagatgtaaaaatactgtgctcgcagtctctaaatacatgagctccatgctatgaatgaaatcgaatttggagcacgagagtttcgaaaaataatctaaagccgtggtttctgactgaactcatggtatgctttattttgggccaccatcctgactttgttctgttcatgtcactctttcataggtgccaccaatctgcatgtggagccattccgatggtgttgatccctgggcgtattctcttggtgtttgtggatcaaacgtcaatccaggagccgtgttgtatacctgagcaccaaaatcttagggtggaaatgcttcgattccattattcacatgagcattaacagcctcaagcttcatggacaaaaactcaacttgccgttgcaaagcctggatataattaattatctcatcaa

SEQ ID NO: 64419 - DNA, 5010 bp, Oryza sativa
  Clone ID: PAT_MRT4530_65565C.1
atgacggcgcagcagcgactaggcgccggcgggcggtcctccgccaccgaggcctctagcgctgccgccgccagctccaagtcgtcgaggcggagggcgcggcgaacggcggctgttacccgccgttcgtccgccattccctcgtcaacgcctccaacccaagaagatgtgcgtggggggccggatgcccgcctcgatatcgagcgccggcgcgacgatcgtcgcgccgcccacgcaacggagggcgcttcctcgtccggagtgccacttcggtccgggcacgggggccggccccccgtgtccccggttggcggtgccggctgtcgagcctttgtggcgagccttcggaacgtccgttggcccccaaggttccggcccaccatcaccgaaaaatacgacggaagcgtcaaccccgccgagtttctccagatctatacgaccgggatcgaggccgccgggggtgacgacagggtcatggcgaatttctttcccatggccctgaagggtcaggcgcggggatggctaatgaacttgccacccgcgtcggtccactcttgggaggatttgtgccagcagttcaccacgaacttccagggcacatatccgcgcccaggcgaagaagcggacttgcatgcggtacagcgaagggacgatgagtcccttcgctcgtacattcagcggttctgtcaagtccgcaacaccataccgtgcattcccgcacacgcggtgatctacgcgttcagggggggcgtgcggcacaaccgcatgctcgagaagatcgcctccaaggagccccagaccaccgcgcagctttttgagctcgcggaccgtgtggctcgcaaggaggaggcctggacctggaactcctccggttctggtgtggcagctccggccgcccccgggtccgccgctcagtcagggcggcgggacaggaggaggaagaaggggtcggcccgttccgacgtcgagggtcatgtcctcgccgtcgagggcgcttcgcgggccccccgaaaggggaggcctgcgagcgacaaaaagaaggaggccggcgctcccagcagggagcgcccaaccggcaagtggtgtaccgtgcacaacacctccctccacgacctcgcggactgccgcgcggtcaaaagtttggctgagcggacgaggaagtgggaggaggagaagaggcaggagcgccgtgagggcaaaaccccggcggctcccgccggcaaccggcggggtgaggccaagcagaaggccaccgccgagaacatcgacgatggcgacgatgacctggggttccaggagcctgaggccaccgtcgccaccgtcgatgggggagcgtgtgctcacgcttctcgccggagcctcaaggccatgaagcgagagcttctggccgcggcccctacccatgaggcgacgcggcggacgcggtggtcggaggttgccctcaccttcgaccagaccgaccacccgccgtgcgttgcccggggaggacagatcgcgatggtggtttcccccactgtttgcaatgtgaagttggggcgtgtcctcatagacgggggtgcagccctcaacatcctttcccccgcagcctttgacgctatcaaggccccggggatgatgaagatgctgggccccggtggccccatcaccgtccatggcgacctcaaagtcgcgcttgcttgtatggagcagcgcgcggaccaccttgccgcggcgtccaagcccgcgggcggcgacgagaggctcagcacctccgtcccggccgccccaaggcggcggatggtcacgtgcgacgaggtcccgatcaaggaggaagacgcgctcgtctccttcctgcgggcaaatgccgacgtcttcgcctggagaccggcggacatgcccggggtcctcagggaggtgattgagcaccgtctcaccgtgcggccgggcgcaaggccggtccggcagaaagtgcagcggcaggccccggaacgtcaagccttcatccgcgaggaggtggcgcgacttctggaggccggattcatccgcgaggtcatccatccggagtggctggcgaacccggtcgtcgttcccaaggcgaacggcaagcttcggatgtgcatcgactacaccgaccttaacaaggcatgtcctaaggacccttaccccctgccacgcatagatcagattgtcgactccaccgcggggtgcgaccttttgtgttttctagatgcatactctggttatcatcagattcgcatggctagggaggatgaggaaaaaactgcattcattacccccataggaacttatttttatacgacaatgcctttcgggttaaagaatgcaggtcctacttttcaacgcactactcgaatttctttgggtagccagataggacgcaatgttgaggcctatgttgatgacttggttgtgaagacgcgcaaccaagagaccttactctcggatctagcggaaactttcgaaagtctccgctccgcccgcataaagctgaaccccgataagtgcgtgttcggcgtgcctgcgggcaagcttctcgggttcttggtctctgcccgaggcatcgaggccaaccccgagaagatacgagctatagagcggatgcgcccccccagcaagcttagggatgtgcagtgcgtcaccggctgcatggccgccctaagtcggttcatatcgaggctgggagagaaggcactacccctatttaagctcctcaaacgctccgggccgtttacctggacggaggaggctgagcgggccttcactcagttgaaagcgtacctcagttctcccccagtcctggtcgccccggagccagatgagccgttgctactctacctggcggcaaccccgcaggtggtcagcgcggcgttggttgtggagcgcgacgaggacaaccctcaccccgcgcatccccaccctgtgtcgactcgacccgggagagagcagggaggagaggcccccgagccgaacggcggcccgaggcccccgacggccggagctggccctccgcctgcttgtccgacggtgccaggcgcccccgacccccaggatagccccggggccactgcgggaaggccgcgcctgtcgccctccgaccccgaggtcgtcggcacagaagccgagtgcgccccgcgtggcctctcggacgaagagcgccctggagatgcggcccctggcgaagaggatcggccccgccgaaaggtgcagcggcccgtttacttcgttagcgaggccctctgggacgccaagacccgataccctcaggcccagaagatgctttacgctattctgatggcttcgaggaagttgcgccattatttccaggcgcatcgggtcacggtggttacgtcttaccccctcggccaaatcttgcataaccgagagggtactggacgggtggtgagatgggcaatcgaactctctgaattcgatttgcgctttgaaccacgccacgcgatcaagagccaggccctcgccgactttgtggcggagtggaccccagctcccgagctcgtctccgcccccgaggccagctcgggcccctcgcagctgcctcacaccgcctactgggtgatgcagttcgacggctccctgtctcttcagggcgccggtgcgggggtcacgttgacctcgccgagcggagacttcctcagatacttggtccgcctcgactttcgggcgaccaacaatatggcggagtacgagggaatccttgcgggactcagagtggcagctggactggggatccgccgcctcctggtgttaggcgactcccagttagtcgttaaccaggcgtacctcgcagataagactctacccgaggaccgtgaagggagtgaacgcgtccggcgcatctccaagcgctacgtgctggtggaagggaccctctatcggcgcgcggctaacggagtcctcctgaagtgcattcctcgggaacaaggcgtcgagcttctcgccgatatccatgaaggcgagtgcggagcccactccgcctcacgcaccttggttggcaaggcctttcgccagggtttctattggccgacggctctcaacgatgcggtcgacctggtccggcggtgcagggcgtgccagttccacgccaggcaaacccatcagccggcccaggccctgcagaccatacctctttcgtggccgtttgctgtctgggggctcgatatcctgggtccgttcaggcgggccccgggcggtttcgagtatctgtatgtcgctgtcgacaagttcactaagtggcccgaggcttatccggtcatcaagatcgataagcactccgcgcttaaattcatcaggggcaccactgctcgatttgggatgcctaaccgtatcattacggataatggcacccaattcactagtgagctcttcggtgactactgcgaagacatgggcattaagctctacttcgcctcccccgcccaccccagaagcaatggccaagtggagcgcgccaacgcggaaatcctcaagggcctcaaaaccaagaccttcaacatcctcaagaagcacggcgactcgtggatcgaggagctgccagcggtgctctgggcgaaccgaaccacgccaagccgagcaaccggggaaacgcctttcttccacgtctacggcgcggaggcggtcctcccatctgagctcaccctgaggtctcctcgggtcaccatgtattgcgaggctgatcaagatcagcttcgccgagacgacctcgactacttggaagaacgaaggcggcatgcggccctccgagccgcgcgctaccagcagagcctgcggcgctaccatcagcgccacgtccgggcccgatcactctgcgtcgacgacctcgtcctacgccgcgtccaaacgcgtgctggactgagcaaactctcaccaatgtgggagggtccgtatcgagtgatcggcgtcccccggccgggctccgttcggctggccacgggcgacggcacagagctgcctaacccgtggaacatcgagcacattcgtcgcttctacccctag

SEQ ID NO: 64420 - DNA, 357 bp, Oryza sativa
  Clone ID: PAT_MRT4530_65566C.1
atgggctccgcactcgccttcatggatatcggcgagaagctcgacgccttgttcccgaggaatgcacttcaggaggactccgttagccgcgcgccgatagagggtcccttccaccagcacgtagcgcttggagatgcgctggacgcgttcactcccttcgcggtcctcgggcgcgttcgggggtcgggtcgcgccgacggctgggcaagcctttcttcaaaggcgcccggtggggtctgggctcgcgaggaagcgagccttgagagttcgtcggcgaccgcgttatcccgtctgggcacatgccgaagctctatcccgtcgaaatggcgctccatacgccgcacctggcgcacgtaa

SEQ ID NO: 64421 - DNA, 1968 bp, Oryza sativa
  Clone ID: PAT_MRT4530_65567C.1
atgggagacaaaatagacctcccagaaaacattcttagagattatatcccagatgttgacaaggtaaaatggataccggacaacaatcacaacataacttacttcacagaagatgatatcaaaagaataacaaacaattacagcactaagcttggaaagggtgcttatggagaggtttataaaggggttattggggataaccgtttcgtagctgtgaagaaatttatcagagtagataaactagatgagtttgctaaagaggtaattgttcatactcaagtcaaccataagaatgtagtaaggctggttgggtgttgtaaagacaacaatgctccaatgattgtatttgagtatgctgctaatggaaacttgagtgatcttctttattgtggtgatactccaatctctttgggcacaagattgagcattgttatacaatgtgcggaagcattagggtgcatgcactccatgtacaatcccattgttcattatgattttaagctgtccaatattcttgtggatgagaactttcatgcaaaaatatctgattttggaatatcaaggattctgtcaacagataacacaaattctgattttggaatatcaaggattctgtcaacagataacacaaatctaactgtgaatccaacaaacatggagaaaaatgtcactagaagatttattcaagctcctcaaaaacggaagggtgcaaaggagttgtttgatgtggacattgcaaaggagagcaacatgaaaattcttgagggtatttggaaaatagcaaaagattgcataaaagaggacattgataaacgtccagaaatgaatgatgtcgctgcacgtctccgagagctcaggaaaactcttgaactaggggggaaaagacagaacttctcaactgctctgagtaaaagctctagcagcgatgtttacttgggagacattgatgacaataccagagtggcagtgaaggttttcactaacgtgagtgaatctcgtgaggagtttgttttgcaactgatcatccaatctcaagtgcaacatcagaacattgtcaagctctttggttgttgcctggagatggatcatccgatttcagtgtgtgagtatgtgcccaatggtgccctttgcaattacctagttgtggagaagggtgaagaaacaggggaaaggtcactcttggatatgaatacacgtcactttattgcgttgggggtggcgaacgcgatagcatgcttgcacgagaagtggctggacacactgaatggcagcatcacgccgtgggatattctcctggatggtaacttctgctccaagttgtccaagccaacacctataattattaatgagagtaccatcatgactactgaagtagtaccaggtaactacatgtatatggcaccagagaggttatttttctctcggggattcatcacggcaaaggctgacgtctacagcttcggtcagctgctgctggatatcgtctttggtatccgtgacaccatgttctgggaggagttggtgggcagaaagtcatttgacttcgtcaatatagtctatcaggaagtttatctaaagcaacgaattgtggactgcctggatccatgcattatccaggcagaggcctatgattctgccagaagcatggccacagcagagcacatggtgaaaacggccttgtggtgtatgcaattcagtgcagaccatcgaccctccatgcagaaggttgttgagatgcttcagggcaccatcgacatcgatgaaccacccaatcccagttcgtccaatttatatgatagtgcgtcatactctagttgtgaacctgtgatgaagatgagttttaattataggcacaatctgccctatcctagtagtgatgaaggtgagtttaaattattaagaagaatgagtgatgctaaaggcctaggagcaggggcaagaactgaacttacttttatttgtatttaa

SEQ ID NO: 64422 - DNA, 1408 bp, Oryza sativa
  Clone ID: PAT_MRT4530_65568C.1
agtgttagagatattggggattgtgtgaatttttggatagtctctgtgcgagagtgctaaaagcaaagtattacccccatggctccctgacagatacagcttttggggttaatgcatcatcgggatggaggggtatcgagtatggactgaaactcctgaagcatggaattatacggagaattggtaacggggaagtcagtacgagtgtggcaggatcccaggctgccaagagattacacgagacggtcaatcactctgaaaagaaactgctgaatcaaatgggtttctaagcttatcactaatgtcggcacttgggatgctaccaaggtgaaccagaattttcagcagatagatacatatatctttctgaaaatccggctatccacagaaatgaagacgattttgttgcctggcatcctggtaaactagggcggcggttaggctgaggaatattgaagggggatcatgctcatcgacaagcagtgctaagaagtcttgggacctgatttcgaagtctcaggtaccacaaaaggtcaaactgtttgcctggagggttgcttcgaacaacctcgcaactcaggaaaacaaaaagaagaggaacattatgacaaatgatgcgtgtactatctgtggaagagagaaggaggatgttctacaagcactttgccgctgcccctgtgcgaatcacctatggcaagccatgtataaggcaggcaatgtttctgttgatataaaagttgttcagaatggcaccccattgttgtttgataccctggagcagatatcggagcctgaacagtctatgtttctgacaatcttatggcgcaattggcatgtttgacatgaaatcacacatgacaaaccagcccctcccatctcctctttgggctgtgagatcgatatatatatatagttaaaatactgttggagtaaacaacgagtttgacttgctaaattagatggagagttggccaaatagagatttggagagactgttgaagatgctctaagagatgagactgggaaagtcatctttgcttcctgtagatcaattggacggtgcagcggagctctagaatctgagcttcttgcgtgcgtggaagggattgcccatgcaattcagcggacgctacttcctatcatactggagactgactgcatgtgcctcggtgatacagctgctgcaatccaaggacaggggtctgtctcaactagctcacttggttaatgaggcaaattggagcttattactggagatgtggttgtaacccggaaaatccataggtgccaaaaccgtctgaatcatgttctaactaataagtctcgatcggagcatcttacgaagttctggctggaaagcaattgtaattttatctcacaacttgtttgtaaggactccttaattaag

SEQ ID NO: 64423 - DNA, 5514 bp, Oryza sativa
  Clone ID: PAT_MRT4530_65569C.1
atggccgaacgggcagtggcgcacagcctctctccgaacgctagcggtgacgacggggagcagaacccgcgccgtcgggctcgcaccccaccgttcccctctcgccgaaatcttgggcggggggaggcgctcggggaggtcgaaagatccgcgacttcgccgtccgcgggcgacgggggaggacggcgagatggggcgcgtcgccgcctcgtctacggcgatggcggcacgccccagggcacgctccaggctgcgggcgcgctcctgcgtcacccgcccgtcgtccccgatccagagactccagcccgacgttggctggatgacgtggccgacttggtcatgacggcgcagcagcgcctaggcgccggcgggcggtcctccgccaccgaggcctctggcgcagccgccgccggctccatgtcgtcgaggcggagggcgcggcgagcggcggccgttacccgccgttcgtccgccattccctcgtcaacgcctacgacccaagaagatgtgcgtggggggccggatgcccgcctcgatatcgagcgccggcgcgacgttcgtcgcgccgcccacgcaacggagggcgcttcctcgtccggagcgccacttcggtccgggcacgggggccggccccccgtgtccccggttggcggtaccggctgtcgaacctttgtggcgagccttcggaacgtccgttggcccccaaggttccggcccaccatcaccgaaaaatacgacggaagcgtcaaccccgccgagtttctccagatctacacgaccgggatcgaggccgccgggggtgacgacagggtcatggcgaatttcttccccatggccctgaagggtcaggcgcggggttggctaatgaacttgccacccgcgtcggtccactcttgggaggatttgtgccagcagttcaccacgaacttccagggcatatatccgcgcccaggcgaagaagcggacttgcatgcggtacagcgaagggacgatgagtctcttcgctcgtacattcagcggttctgtcaagtccgcaacaccataccgtgcatccccgcacacgcggtgatctacgcgttcagggggggcgtgcggcacaaccgcatggtcgagaagatcgcctccaaggagccccagaccaccgcgcaactttttgagctcgcggaccgtgtggctcgcaaggaggaggcctggacctggaactcctccggttctggagtggcagctccggccgcccccgggtccgccgctcggtcagggcggcaggacaggaggaggaagaaggggtcggcccgttccgacgatgagggtcatgttctcgccgtcgagggcgcttcgcgggccccccgaaaggggaggcctgcgagcgacaaaaagaaggaggccggcgctcccagcagggagcgcccaaccggcaagtggtgtaccgtgcacaacacctccctccacgacctcgcggactgccgcgcggtcaaaagtttggctgaacggacgaggaagtgggaggaggagaagaggcaggagcgccgtgaggccaagcagaaggccaccgccgaggacatcgacgatggcgacgatgacctggggttccaggagcctgaggccaccgtcgccaccgtcgatgggggagcgtgcgctcacgcttctcgccggagcctcaaggccatgaagcgagagcttctggccgcggcccctacccatgaggcgacgcggcgggcgcggtggtcggaggttgccctcaccttcgaccagactgaccacccgccgtgcgttgcccggggaggacagatcgcgatggtggtttcccccaccgtttgcaatgtgaagttggggcgtgtcctcatagacgggggtgcagccctcaacatcctttcccccgcagcctttgacgccatcaaggccacggggatggtgctccggccgtcccagccgatcatcggtgtgacgccggggcacacctggccgctgggtcatatcgacctcccggtcaccttcggaggttccgccaacttccgcacggagcgggtggacttcgatgtggcggacctcagtctgccctacaacgcggtcctggggaggcccgcgttggtgaagttcatggcggcggtccactacgcctatctccagatgaagatgccgggccccgctggccccattaccgtccatggcgacctcaaagtcgcgcttgcttgtatggagcagcgcgcggaccacctcgccgcggcgtccaagcccgcgggtggtgacaagaggctcgccacctccgtcccggccgccccaaggcagcggatggtcacgtgcgacgaggtctcggtcaaggaggttgccctgggccacggcccgtccaagaccacacgaatcggtggccggtccggcagaaagtgcggcggcaggccccggaacgtcaagccttcatccgcgaggaggtggcgcgacttctggaggccggattcaatccatccggagaggctggcgaacctggccgtcgttcccaaggcgaacggcaagcttcggatgtgcatcgactacaccgaccttaacaaggcatgtcctaaggacccttaccccctgccacgcatagatcagattgtcgactccaccgcggggtgcgaccttttgtgttttctagatgcatactctggttatcatcagattcgcatggctagggaggatgaggaaaaaactgcattcattacccccataggaacttattgttatacgacaatgcctttcgggttaaagaatgcaggtcctacttttcaacgtactactcgaatttctttgggtagccagataggacgcaatgttgaggcctatgttgatgacttggttatgaagacgcgcaaccaagagaccttactctcggatctagcggaaactttcgaaagtctccgctccgcccgcataaagctgaaccccgataagtgcgtgttcggcgtgcctgcaggcaagcttctcgggttcttggtctctgcccgaggcatcgaggccaaccccgagaagatacgagctatagagcggatgcgcccccccagcaagcttagggatgtgcagtgcgtcaccggctgcatggctgccctaagtcggttcatatcgaggctgggagagaaggcactacccctatttaagctcctcaaacgctccggaacatttacctggacggaggaggctgagcgggccttcactcagttgaaggcgtacctcagttctcccccagtcctggtggtcagcgcggcgttggtcgtggagcgcgacgaggacaaccctcactctgcgcatccccaccctgcgtcgactcgacccgggagagagcagggaggagaggcccccgagccgaacggcggcccaaggcccccgacggccggagctggccctccgcctgcttgtccgacggtgccaggcgcccccgacccccaggatggccccggggccactgcgggaaggccgcgcctgtcgccctccgaccccgaggtcgtcggcacagaagccgagtgcgccccgcgtagcctctcggacgaagagcgccctggagatgcggcccctggcgaagaggatcggcccgccgaaaggaagttgcgccattatttccaggtgcatcgggtcacggtggttacatcttaccccctcggccaaatcttacataaccgagagggtactggacgggtggtgagatgggcaatcgaactctctgaattcgatttgcgctttgaaccacgccacgcgatcaagagccaggccctcgccgactttgtggcggagtggaccccagctcccgagcccgtctccgcccccgaggccagctcgggcccctcgcagctgcctcacaccgcctactgggtgatgcagttcgacggctccctgtctcttcagggcgccggtgcgggggtcacgttgacctcgccgagcggagacgtcctcagatacctggtccgcctcgactttcgggcgaccaacaatatggcggagtacgagggactccttgcgggactcagagtggcagctggactggggatccgccgcctcctggtgttaggcgactcccagttggtcgttaaccaactctgtaaggagtaccggtgctctgacccgcagatggacgcttacgtgcgccaggtgcggcgtatagagcgccatttcgacgggatagagcttcggcacgtgcccagacgggataacgcggtcgccgacgaactctcaaggctcgcttcctcgcgagcccagaccccaccgggcgcctttgaagaaaggcttgcccagccgtcggcgcgacccgaccccctaggggagacggacgcgcctgaacggcccccgaggcccgtcggagtccaggcctcgggacccgaggggagtgctcccagctcccctagattgattgcttggatcactgagatccaggcgtacctcgcagataagactctacccgaggaccacgaagggagtgaacgcgtccggcgcatctccaagcgctacgtgctggtggaagggaccctctatcggcgcgcggctaacggagtcctcctgaagtgcattcctcgagaacaaggcgtcgagcttctcaccgatgtccatgaaggcgagtgcggagcccactccgcctcacgcaccttggttggcaaggcctttcgccagggtttctattggccgacggctctcaacgatgcggtcgacctggggctcaatatcctgggtccgttcaggcgggccccgggcgggttcgagtatctgtatgtcgctgtcgacaagttcactaagtggcccgaggcttatccggtcatcaagatcgataagcactccgcgcttaaattcatcaggggcatcactgctcggtttggggtgcctaaccgtatcattacggataacggcacccagttcactagtgagctcttcggtgactactgcgaagacatgggcatcaagctctgcttcgcctcccccgcccaccccagaagcaatggccaagtggagcgcaccaacgcggaaatcctcaagggcctcaaaaccaagaccttcaatatcctcaagaagcacggcgactcgtggatcgaggagctgccagcggtgctctgggcgaaccgaaccacgccaagccgagcaaccggggaaacgcctttcttcctcgtctacggcgcggaggcggtcctcccatctgagctcaccctgaggtcccctcgggtcaccatgtattgcgaggctgatcaagatcagcttcgccgagacgacctcgactatttggaagagcgaaggcggcgcgcggccctccgagccgcgcgctaccagcagagcctgcggcgctaccatcagcgccacgtccgggcccgatcactctgcgtcgacgacctcgtcctacgccgcgtccaaacgcgttctggactgagcaagctctcaccaatgtgggagggtccgtatcgagtgatcggcgtccccctgccgggctccgttcggctggccacgagcgacggcacagagctgcctaacccgtggaacatcgaacaccttcgtcgcttctacccctag

SEQ ID NO: 64424 - DNA, 691 bp, Oryza sativa
  Clone ID: PAT_MRT4530_6556C.1
catcatcaattgcatctctgatggacggcccttcacctagtgcctacgcccccttctatgttgtcccttgactctcctctgttccctcccgcagtcatagtgggagtttcatggacgatagcgatgacacagacgctttgactggagttgccacagatgattcttgttgtagatgttcgtcaatgtagccgatcatgaagtagccgtggttgtaggtgtagccgcatatagccgaaggcgaaaaaaaaattacgccatggtgtgaagacgatactacaattagtagcatcttgcaccttgtagatgtcagaggatgccattaggaacgtcttgcatatgtcagaggacgtcgttggcgatgaggccaccactttggttggtcgttgtagatgatgtgatcgatgccctcgttggtgacgcggtcgttgccatcgtagaggatgcagtcgatgtcatcgatgaagcgcgcgaggtgtccatctatgtgtacgagtcagcagcggcaagttgatgaagaccactggtgatgtagaatcggcgaagacgatcacatagtcatacaggttatggtgggagcatagaggggaagatatgagagagatagtggcacggcatgtgggtcccatgtctaaatttttatttgcttttaagactagttgccacgtagatgccacatcagccaaatccaatg

SEQ ID NO: 64425 - DNA, 342 bp, Oryza sativa
  Clone ID: PAT_MRT4530_65570C.1
atggcgaacatgaggagcagcagcaggacgtcgtcgtcgtcgccggcggcggcgttgctgcggtggggggcgctgacatctgcgccgcggtgcatggcgtgcggcgggacgaggcgggaggagtgccgcctgtgcacgcggttcagtgtccatggaagaccaaacagctggccaatgaagcttgctcagttggctaagaagttgcagcagaggatggtgtcagtcagtgctagtggacagaaggcggtcaccgccgatgattgctgctcagcggcggcggtggaggcgggctcgcgaagagacgggagggaggtgagagaaggtgtaggaagaggggaatga

SEQ ID NO: 64426 - DNA, 4848 bp, Oryza sativa
  Clone ID: PAT_MRT4530_65571C.1
atggccgaacgggcagtggctcacagcctctctccgaacgctagcggtgacgacggggagcagaacccgcgccgtcgggctcgcaccccaccgcccccctctcgccgaaatcttgggcggggggaggcgctcggggaggtcgaaggatccgcgacttcgccgcccgcgggcgacgggggaggacggcgagacggggtgcgtcgccgcctcgtctacggcgatggcgtcacgccccagggcgcgctccaagctgcgggcgcgctcctgcgtcacccgcccgtcgtccccgatccagagactctagcccgacgttggctggatgacgtggccgacttggtcatgacggcgcagcagcgcctaggcgccggcgggcggtcctccgccaccaaggcctctggcgctgccgccgccggctccatgtcgtcgaggcggagggcgtggcgagcggcggccgttacccgccgttcgtccgccattccctcgtcaacgcctccaacccaagaagatgtgcgtggggggccggatgcccgcctcgatatcgagcgccggcgcgacgctcgtcgcgccgcccatgcaacggagggcgcttcctcgtccggagcgccacttcggtccgggcacgggggccggccccccgtgtccccggttggcggtgccagctgtcgagcctttgtggcgagccttcggaacgtccgttggcccccatggttccggcccaccatcaccgaaaaatacgacggaagcgtcaaccccgccgagtttctccagatctacacgaccgggatcgaggccgccgggggtgacgacagggtcatggcgaatttcttccccatggccctgaagggtcaggcgcggggttggctaatgaacttgccacccgcgtcggtccactcttgggaggatttgtgccagcagttcaccacgaacttccagggcacatatccgcgcccaggcgaagaagcggacttgcatgcgcggttctgtcaagtccgcaacaccataccatgcatccccgcacacgcggtgatctacgcgttcagggggggcgtgcggcacaaccgcatgctcgagaagatcgcctccaaggagccccagatcaccgcgcagctttttgagctcgcagaccgtgtggctcgcaaggaggaggcctggacctggaactcctccggttctggtgtggcagctccggccgcccccgggtccgccgctcggtcagggcgacgggacaggaggaggaagaaggggtcggcccgttccgacgacgagggtcatgtcctcgccgtcgagggcgcttcgcgggccccccgaaaggggaggcctgtgagcgacaaaaagaaggaggccggcgctcccagcagggagcgcccgaccggcaagtggtgtaccgtgcacaacacctccctccacgacctcgcggactgccgcgcggtcaaaagtttggctgagcggacgaggaagtgggaggaggagaagaggcaggagcgccgtgagggcaagaccccggcggctcccgccggcaaccggcgagacgggggtgcagccctcaacatcctttcccccgcagcctttgacgccatcaaggccccggggatggtgctccggccgtcccagccgatcatcggtgtgacgccggggcacacctggccgctgggtcatatcgacctcccggtcaccttcggtggttccgccaacttccgcacggagcgggtggacttcgatgtggcggacctcagtctgccctacaacgcggtcctggggaggcccgcgttggtgaagttcatggcgacggaagacgcgctcgtctccttcctgcgggcaaacgccgacgtcttcgcctggagaccggcggacatgcccggggtccccagggaggccggtccggcagaaagtgcggcggcagcccccgaacgtcaagccttcatccgcgaggaggtggcgcgacttctggaggccggattcatccgtgaggtcatccatccggagtggctggcgaacccggtcgtcgttcccaaggcgaacggcaagcttcggatgtgcatcgactacaccgaccttaacaaggcatgtcctaaggacccttaccccctgccacgcatagatcagattgtcgactccaccgcggggtgtgaccttttgtgttttctagatgcatactctggttatcatcagattcgcatggctagggaggatgaggaaaaaactgcattcattacccccataggaacttattgttatacgacaatgcctttcgggttaaagaatgcaggtcctacttttcaacatactactcgaatttctttgggtagccagataggacgcaatgttgaggcctatgttgatgacttggttgtaaagacgcgcaaccaagaggccttactctcggatctagcggaaactttcgaaagtctccgctctgcccgcataaagctgaaccccgataagtgcgtgttcggcgtgcctgcgggcaagcttcttcggttcttggtctctgcccgaggcatcgaggccaaccccgagaagatacgagctatagagcggatgcgcccccccagcaagcttagggacgtgcaatgcgtcaccggctgcctggccgccctaagtcggttcatatcgaggctgggagagaaggcactacccctatttaagctcctcaaacgctccgggccgtttacctggacggaggaggctgagcgggccttcactcagttgaaagcgtacctcagttcttccccagtcctggtcgccccggagccagatgagctgttgctactctacctggcggcaaccccgcaggtggtcagcgcggcgttggtcgtggagcgcgacgaggacaaccctcactccgcgcatccccaccctgtgtcgactcgacccgggagagagcagggaggagagcccccgagccgaacggcggcccgaggcccccgacggccggagctggccctccgcctgcttgtccgacggtgccaggcgcccccgacccccaagatggccccggggccactgcgggaaggccgcgcctgtcgccctctgaccccgaggtcgtcggcacagaagccgagtgcgccccgcgtggcctctcggacgaagagcgccctggaaatgcggcccctggcgaagaggatcggccccgccgaaaggaagttgcgccattacttccaggcgcatcgggtcacggtggttacgtcttaccccctcggccaaatcttgcataaccgagagggtactggacgggtggtgagatgggcaatcgaactctctgaattcgatttgcgctttgaaccacgccacgcgatcaagagccaggccctcgccgactttgtggcggagtggaccccagctcccgagcccgtctccgcccccgaggccagctcgggccccccgcagctgcctcacaccgcctactgggtgatgcagttcgacggctccctgtctcttcagggcgccggtgcgggggtcacgttgacctcgccgagcggagacgtcctcagatacctggtccgtctcgactttcgggcgaccaataatatggcggagtacgagggactccttgtgggactcagagtggcagctggactggggatccgccgcctcctggtgttaggcgactcccagttggtcgttaaccaggcgtacctcgcaaataagactctacccgaggaccgcgaagggagtgaacgcgtccggcgcatctccaagcgctacgtgctggtggaagggaccctctatcggcgcgcggctaacggagtcctcctgaagtgcattcctcgggaacaaggcgtcgagcttctcgccgatgtccatgaaggcgagtgcagagcccactccgcctcacgcaccttggttggcaaggcctttcgccagggtttctattggccgacggctctcaacgatgcggtcgacctggtccggcggtgcagggcgtgccagttccacgccaggcaaaccaatcagccggcccaggccctgcagactatacctctttcgtggccgtttgctgtctgggggctcgatatcctgggtccgttcaggcgggccccaggcaggttcgagtatctgtatgtcgctgtcgacaagttcactaagtggcccgaggcttatccggtcatcaagatcgataagcactccgcgcttaaattcatcagaggcatcactgctcggtttggggtgcctaaccgtatcattacggataacggcacccagttcactagtgagctcttcggtgactactgcgaagacatgggcatcaagctctgcttcgcctcccccgcccaccccagaagcaatggccaagtggagcgcgccaacgcggaaatcctcaagggcctcaaaaccaagaccttcaacatcctcaagaagcacggcgactcgtggatcgaggagctgccagcggtgctctgggcgaaccgaaccacgccaagccgagcaaccggggaaacgcctttcttcctcgtctacggcgcggaggcggtcctcccatctgagctcaccctgaggtccccttgggtcaccatgtattgcgaggctgatcaagatcagcttcgccgagacgacctcgactatttggaagagcgaaggcggcgcgcggccctccgagccacgcgctaccagcagagcctgcggcgctaccatcagcgccacgtccgggcccgatcactctacgtcgacgacctcgtcctacgccgcgtccaaacgcgtgctggactgagcaagctctcaccaatgtgggagggtccgtatcgagtgatcggcgtcccccggccgggctccgttcggctggccacgggcgacggcacagagctacctaacccgtggaacatcgaacaccttcgtcgcttctacccatag

SEQ ID NO: 64427 - DNA, 477 bp, Oryza sativa
  Clone ID: PAT_MRT4530_65572C.1
tcaagcttcaggttgccgctgcatccccccctcaggctgcagtgccatcgcccgtggtccacctccattggctattggaatgctgagaggcgccctcctcagcatggcctcaccgccagtggagttcatgctgctgcatcgacataagagctgcaactgtgttgtccctttggaccacagcttcgctgcttttgtcatattcatcaccgttcgcgcattgacaacctcgttgtccgcactggtcatcatcagccgctcagggtcttcttcatttacttcgagcctcgccgccgcatctccaggctcaacatcagcacacccgatttcaacaacatcaaccatggctactctacgcacggattcatcgaccacagcttcctcgcacccttcgctttggctacatcgactatggcacaaagggatatcatccatattgagtactcttgcaggtttcttctccagtccaagtgtccgcat

SEQ ID NO: 64428 - DNA, 2365 bp, Oryza sativa
  Clone ID: PAT_MRT4530_65573C.1
atggaggaaggagagaagcagagcagcggggggcggtggcggtgtaggtggctcgtcgacgtcggccggtggcgcccctcccccgccgagttccaagccgccgccgccgtcctcccgccgcacgaccgccccgccatccacaggttcgtcagagaagaagacaggaaacgagcgctcgtcagccgcctgctcaagtactcgctcgtgcaccatgcccttggaatgccattccaccaaattcgcatcaaccgcacgcttgaagggaagccctatctgcagaataaaaatgtcaaccttcctggcttcaacttcaacacgtcgcatcagggggagtacgttggcatagcatctgagcctctctgcctcgttggcctggacattgtgtgcatctccaagccccaacgagaaactgccctggagttcatcaacaatttcacttcctatctcacagatcatgagtggaactgcattgttactgcagacagtcatgatggtatgctaactgagttctacaggtattggtgtcttaaagaagcatttgtcaaagctacaggtgctggcgttggattcgggctgcaacgcacgcgcgcatcccccgacgccatgggccagtgctgcacgggtggcgggaaggccgtcgccggcgacgaggcagagccggggacctccaaggcggcgccgccgagccgcggcacctcctccaaaaatgggtccgccaagcagcagccgtgctcgccggcggccaaggcggcggcgacggaagcggcggcggcggcgtcgtcgtccaagaagccggcaggccccatcggcgaggtgctggagcggccgatggaggaggttcgcacgacgtactccatcggcaaggagctcgggcgcgggcagttcggcgtgacccacctgtgcacccacaaggccaccggcgagaagctggcgtgcaagacgatcgcgaagcggaagctggcgaacaaggaggacgtcgacgacgtccgccgcgaggtgcagatcatgcaccacctctccggccagcccaacatcgtcgacctccgcggcgcctacgaggacaagcacaacgtccacctcgtgatggagctctgcgccggcggcgagctcttcgaccgcatcatcgcgcggggccactacacggagcgcgccgcggcggcgctcctccgcgccatcgtcgggatcgtgcacacctgccactccatgggggtgatccaccgggacctcaagccggagaacttcctgctgctgagcaagggggacgacgcgccgctcaaggccaccgacttcggcctctccgtcttcttcaaggaaggcgaggtgttccgcgacatcgtcggcagcgcctactacatcgcgccggaggtgctcaagaggaagtacggccccgaggccgacatctggagcatcggcgtcatgctctacatcttcctcgccggcgtgccgcccttctgggccgagtcggagaacgccatcttcgccgccatccttcgcggacagatcgacctcgccagtgagccatggccgaagatctcctctggagccaaggacctcgtcaggaagatgctcaacttcaaccccaaggagaggcttacagcattccaagtgctcaatcacccgtggatcaaagaagatggggatgctcctgatgtaccacttgacaatgttgttctcaacaggctcaagcagttcagggccatgaaccagttcaagaaagctgcactgaggattatagccggatgcctgtcagaggaggagatcaaggggctgaaggagatgttcaagaacatcgacaaggacaatagtgggaccattacgcttgaggagctcaaaaatgggttagcaaagcagggcaccaagttttcagacaacgaaattgagcaacttatggaagcagctgatgctgatggcaatggaattatcgactatgaggagttcgtcaccgcgacggtgcacatgaacaaaatggatcgagaagagcacctttacacggcattccagtactttgacaaggataatagtgggtacatcacaaaggaagagctcgagcaagccttgaaggaacaagggttatacgacgccaacgagatcaaggatgtcatcacagatgcagactctaataatgttgggctcaggttcatgtttggtcttgcacattgtcctggctgaggaaagatcaggctgtgcagaagcaacaaacccaaagaagaagaggccgagatctagttctatagcgaaacagggtaagtgtgtatagtggctggttttgtgcacaattttcaacaatgatgtgcatttaccacgaagtttattgtatacaagtgaaattttctttccaattgcatatttgcattttcaggttggg

SEQ ID NO: 64429 - DNA, 5751 bp, Oryza sativa
  unsure (1)..(5751): unsure at all n locations
  Clone ID: PAT_MRT4530_65574C.1
atggccgaacgggcagtggcgcacagcctctctccgaacgctagcggtgacgacggggagcagaacccgcgccgtcgggctcgcaccccaccgtccccctctcgccgaaatcttgggcggggggaggcgctcggggaggtcgaaggatccgcgacttcgccgcccgcgggcgacgggggaggacggcgagacggggcgcgtcgccgcctcgtctacggcgatggcggcactccccagggcgcgctccaggctgcgggcgcgctcctgcgtcacccgcccgtcgtccccgatccagagactccagcccgacgttggctggatgacgtggccgacttggtcatgatggcgcagcagcgcctaggcgccggcgggcggtcctccgccaccgaggcctctggcgctgccgccgccggctccacgtcgtcgaggcggagggcgcggcgagcggcggccgttacctgccgttcgtccgccattccctcgtcaacgcctccaacccaagaagatgtgcgtggggggccggatgcccgcctcgatatcgagcgccggcgcgacgctcgtcgcgccacccacgcaacggagggcgcttcctcgtccggagcgccacttcggtccgggcacgggggccggccccccgtgtccccggttggcggtgccggctgtcgagcctttgtggcgagccttcggaacgtccgttggcccccaaggttccggcccaccatcaccgaaaaatacgacggaagcgtcaaccccgccgagtttctccagatctacacgactgggatcgaggccgccgggggtgacgacagggtcatggcgaatttcttccccatggccctgaagggtcaggcgcggggttggctaatgaacttgccacccgcgtcggtccactcttgggaggatttgtgccagcagttcaccacgaacttccagggcatatatccgcgcccaggcgaagaagcggacttgcatgcggtacagcaaagggacgatgagtctcttcgctcgtacattcagcggttctgtcaagtccgcaacaccataccgtgcatccccgcacacgcggtgatctacgcgttcagggggggcgtgcggcacaaccgcatgctcgagaagatcgcctccaaggagccccagaccaccgcgcagctttttgagctcgcggaccgtgtggctcgcaaggaggaggcctggacctggaactcctccggttctggtgtggcagctccggccgcccccgggtccgccgctcggtcagggcggcgggacaggaggaggaagaaggggtcggcccgttccgatgacgagggtcatgtcctcgccgtcgagggcgcttcgcgggccccccgaaaggggaggcctgcgagcgacaaaaagaaggaggccggcgctcccagcagggagcgcccgaccggcaagtggtgtaccgtgcacaacacctccctccacgacctcgcggactgccgcgcggtcaaaagtttggctgagcggacgaggaagtgggaggaggagaagaggcaggagcgccgtgaaggcaagaccccggcggctcccgccggcaaccggcgaggtgaggccaagcagaaggccaccgccgaggacatcgacgatggcgacgatgacctggggttccaggagcctgaggccaccgtcgccaccgtcgatgggggagcgtgcgctcacgcttctcgccggagcctcaaggccatgaagcgagagcttctggccgcggcccctacccatgaggcgacgcggcgggcgcggtggtcggaggttgccctcaccttcgaccagaccgaccacccgccgtgcgttgcccggggaggacagatcgcgatggtggtttcccccaccgtttgcaatgtgaagttggggcaagtcctcatagacgggggtgaagccttnacatccttcccccccccccccgcagcctttgacgccatcaaggccccggggatggtgttccggccatcccagccgatcatcggtgtgacgccggggcacacctggccgctgggtcatatcgacctcccggtcaccttcggtggttccgccaacttccgcacggagcgggtggacttcgatgtggcggacctcagtctgccctacaacgcggtcctggggaggcccgcgttggtgaagttcatggcggcggtccactacgcctatctccagatgaagatgccgggccccggtggccccatcatcgtccatggcgacctcaaagtcgcgcttgcttgtatggagcagcgcgcggaccaccttgccgcggcgtccaagcccgcgggtggcgacgagaggctcagcacctccgtcccggccgccccaaggcagcggatggtcacgtgcgacgaggtcccggaagacgcgctcgtctccttcctgcgggcaaacgccgacgtctttgcctggagaccggcggacatgcccggggtccccagggaggtgattgagcaccgtctcgccgtgcggccgggcgcaaggccggtccggcagaaagtgcggcggcaggccccggaacgtcaagccttcatccgcgaggaggtggcgcgacttctggaggccggattcatacgtgaggtcatccatccggagtggctggcgaacccggtcgtcgttcccaaggcgaacggcaagcttcggatgtgcatcgactacaccgaccttaacaaggcatgtcctaaggacccttaccccctgccacgcatagatcagattgtcgtctccaccgcggggtgcgaccttttgtgttttctggatgcatactctggttatcatcagattcgcgtggctagggaggatgaggaaaaaactgcattcattacccccataggaacttattgttatacgacaatgcctttcgggttaaagaatgcaggtcctacttttcaacgtactactcgaatttctttgggtagccagataggacgcaatgttgaggcctatgttgatgacttggttgtgaagacgcgcaaccaagagaccttactctcggatctagcggaaactttcgaaagtctccgctcggcccgcataaagctgaaccccgataagtgtgtgttcgacgtgcctgcgggcaagcttctcgggttcttggtctctgcccgaggcatcgaggccaaccccgagaagatacgagctatagagcagatgcgcccccccagcaagcttagggatgtgcagtgcgtcaccggctgcatggccgccctaagtcggttcatatcgaggctgggagagaaggcactacccctatttaagctcctcaaacgctccgggccgtttacctggacggaggaggctgagcgggccttcactcagttgaaggcgtacctcagttctcccccagtcctggtcgccccggagccagatgagccgttgctactctacctggcggcaaccccgcaggtggtcagcgcggcgttggtcgtggagcgcgacgaggacaaccctcactccgcgcgtcctcaccctgtgtcgactcgacccgggagagagcagggaggagaggcccccgagccgaacggcggcccaaggcccccgacggccggagctggccctccgcctgcttgtccgacggtgccaggcgcccccgacccccaggatggctccggggccactgcgggaagaccgcgcctgtcgccctctgaccccgaggatcggccccgccgaaaggtgcagcggcccgtctacttcattagcgaggccctccgggacgccaagacccgataccctcaggcccagaagatgctttacgctattctgatggcttcgaggaagttgcgccattatttccaggcgcatcgggtcacggtagttacgtcttaccccctcggccaaatcttgcataaccgagagggtactggacgggtggtgagatgggcaatcgaactctctgaattcgatttgcgctttgaaccacgccacgcgatcaagagccaggccctcgccgactttgtggcggagtggaccccagctcccgagcccgtctccgcccccgaggccagctcgggcccctcgcagctgcctcacaccgcgtactgggtgatgcagttcgacggctccctgtctcttcagggcgccggtgtgggggtcacgttgacctcgccaagcggagacgtcctcagatacctggtccgcctcgactttcgggcgaccaacaatatggcggagtacgagggactccttgcgggactcagagtggcagctggactggggatccgccgcctcctgatggacgcttacgtgcgccaggtgcggcgtatggagcgccatttcgacgggataaagcttcggcacgtgcccagacgggataacgcggtcgccgatgaactctcaaggctcgcttcctcgcgagcccagaccccaccggacgcctttgaagaaaggctagcccagccgtcggcgcgacccgaccccctaggggagacggacgcgcctgaacggcccccgaggcccgtcggagtccaggcctcgggacccgaggggagcgctcccagctcccctagattgattgcttggatcactgagatccaggcgtacctcgcagataagactctacccgaggaccgcgaagggagtgaacgcgtccggcgcatctccaagcgctacgtgctggtggaagggaccctctatcggcgcgcggctaacagagtcctcctgaagtgcattcctcgggaacaaggcgtcaagcttctcgtcgatgtccatgaaggcgagtgcggagcccactccgcctcacgcaccttggttggcaaggcctttcgccagggtttctattggccgacggctctcaacgatgcggtcgacctggtccggcggtgcagggcgtgccagttccacgccaggcaaacccatcagccggcccaggccctgcagaccatacctctttcgtggccgtttgctgtctgggggctcgatatcctgggtccgttcaggcgggccccgggcgggttcgagtatctgtatgtcgctgtcgacaagttcactaagtggcccgaggcttatccggtcatcaagatcgataagcactccgcgcttaaattcatcaggggcatcactgcttggtttggggtgcctaaccgtatcattacggataacggcacccagttcactagtgagctcttcggtgactactgcgaagacatgggcatcaagctctgcttcgcctcccccgcccaccccagaagcaatggccaagtggagcgcgccaacgcggaaatcctcaagggcctcaaaaccaagaccttcaacatcctcaagaagcacggcgactcgtggatcgaggagctgccagcggtgctctgggcgaacctaaccacgccaagccgagcaaccggggaaacgcctttcttcctcgtctatggcgcggaggcggtcctcccatctgagctcaccctgaggtcccctcgggtcaccatgtattgcgaggctgatcaagatcagcttcgccgagacgacctcgactatttggaagagcgaaggcggcgcgcggccctccgagccacgcgctaccaacagagcctgcggcgctaccatcagcgccacatccgggcccgatcactctgcgtcgacgacctcgtcctacgccgcgtccaaacgcgtgctggactgagcaagctctcaccaatgtgggagggtccgtatcgagtgatcggcgtcccccggccgggctccgttcggctggccacgggcgacggcacagagctgcctaacccgtggaacatcgaacaccttcgtcgcttctacccctag

SEQ ID NO: 64430 - DNA, 126 bp, Oryza sativa
  Clone ID: PAT_MRT4530_65575C.1
atggctctaggcccgcggtcgtcgggaaccgtcggcgccattgccgaacatggcgactccatttccaacagatgcagcacgccgccaccatatcaagctgccaccgtcacctcccttgccagctag

SEQ ID NO: 64431 - DNA, 2236 bp, Oryza sativa
  Clone ID: PAT_MRT4530_65576C.1
atggtggaggaagaagagaagcagagcagcgtggggaggtggcggtgtaggtggctcgtcgacgtcggccggtggcgcccctcccccgctgagttccaagccgccgccgccctcctcccgccgcacgaccgccccgccatccacaggttcgtcagagaagatgacaggaaacgggcgctcgtcagtcgccttctccaatactcgctcgtgcaccatgctcttggaatcccattccaccaaattcgcatcaaccgcacgcttgaagggaagccctacctgcagaataaaaatgccaactttcctggcttcaacttcaacacgtcgcatcagggggagtacgttggcatagcatctgagcctctctgcctcgttggcctggacattgtgtgcatctccaagcctcaacgagaaactgccctggagttcatcaacaatttcacttcctatctcactgatcatgagtggaactgcattgttactgcaggcagccatgatggtattggtgtcttaaagaagcatttgtcaaagctacaggtgctggcgttggatttgggttgcaacgcatccattgcgaaagggcatccagaggatgctattgacagcttcaggagaacattatctgatgtggcacgcgcgaatcccaccgacgccatgggccagtgctgcacgggtggcgggaaggccgtcgccggcgacgaggcagagccggggacctccaaggcggcgccgccgagccgcggcacctcctccaaaaatgggtccgccaagcagcagccgtgctcgccggcggccaaggcggcggcgacggaagcggcggcggcggcgtcgtcgtccaagaagccggcaggccccatcggcgaggtgctggagcggccgatggaggagatcatgcaccacctctccggccagccaaacatcgtcgacctccgcggcgcctacgaggacaagcacaacgtccacctcgtgatggagctctgcgccggcggcgagctcttcgaccgcatcatcgcgcggggccactacacggagcgcgccgcggcggcgctcctccgcgccatcgtcgggatcgtgcacacctgccactccatgggggtgatccaccgggacctcaagccggagaacttcctgctgctgagcaagggggacgacgcgccgctcaaggccaccgacttcggcctctccgtcttcttcaaggaaggcgaggtgttccgcgacatcgtcggcagcgcctactacatcgcgccggaggtgctcaagaggaagtacggccccgaggccgacatctggagcatcggcgtcatgctctacatcttcctcgccggcgtgccgcccttctgggccgagtcggagaacgccatcttcaccgccatccttcgcggacagatcgacctcgccagtgagccatggccgaagatctcctctggagccaaggacctcgtcaggaagatgctcaacatcaaccccaaggagaggcttacagcattccaagtgctcaatcacccgtggatcaaagaagatggggatgctcctgatgtaccacttgacaatgttgttctcaacaggctcaagcagttcagggccatgaaccagttcaagaaagctgcactgaggattatagccggatgcctgtcagaggaggagatcaaggggctgaaggagatgttcaagaacatcgacaaggacaatagtgggaccattacgcttgaggagctcaaaaatgggttagcaaagcagggcaccaagttttcagacaacgaaattgagcaactgatggaagcagctgatgctgatggcaatggaattatcgactatgaggagttcgtcaccgcgacagtgcacatgaacaaaatggatcgagaagagcacctttacacggcattccagtactttgacaaggataatagtgggtacatcacaaaggaagagctcgagcaagccttgaaggaacaagggttatacgacgccaacgagatcaaggatgtcatcacagatgcagactctaataatgttgggcgtagattattcagagtttggtcttgcacattgtcctggctgaggaaaggatcagaaaaaaaaaagcaacaaacccaaagaagaagaggcgagatctagttctatagcgaaacagggtagtgtgtatagtggctggtttgtgcacaatttcaaacatgatgtgcatttaccacgagtgtaatgtatacaatggaattttctttccaattgcatatttgcattt

SEQ ID NO: 64432 - DNA, 5580 bp, Oryza sativa
  Clone ID: PAT_MRT4530_65577C.1
atggagggcgaggaacctcacttagcgcccccggccgaaccggcaaaggggggcctgcgcggtctcccggtgaggagccccacgctccgtcatctggcgcgccagaacccgcgccgtcgggctcgcaccccaccgtccccctctcgccgaaatcttgggcggggggaggcgctcggggaggtcggaggatccgcgacttcgccgcccgcgggcgacgggggaggacggcgagatggggcgcgtcgccgcctcgtctacggcgatggcggcacgccccagggcgcgctccaggctgcaggcgcgctcctgcgtcacccgcccgtcgtccccgatccagagactccagcccgacgttggctggatgacttggccgacttggtcatgacggcgcagcagcgcctaggcgccggcgggcggtcctccgccatcgaggcctctagcgctgccgccgccggctccatgtcgtcgaggcggagggcgcggcgagcggcggccgttacccgtcgttcgtccgccattccctcgtcaacgcctccgacccaagaagatgtgcgtggggggccggatgcccgcctcgatatcgagcgccggcgcgacgctcgtcgcgccgcccacgcaacggagggcacttcctcgtccggagcgccacttcggtccgggcacgggggccggccccccgtgtccccggttggcggtgccggctgtcgagcctttgtggcgagccttcggaacgtccgttggcccccaaggttccggcccaccatcaccgaaaaatacgacggaagcgtcaaccccaccgagtttctccagatctacacgaccgggatcgaggccgccgggggtgacgacagggtcatggcgaatttcttccccatggccctgaagggtcaggcgcggggttggctaatgaacttgccacccgcgtcggtccactcttgggaggatttgtgccagcagttcactacgaacttccagggcatatatccgtgcccaggcgaagaagcggacttgcatgcggtacagcgaagggacgatgagtctcttcgctcgtacattcagcggttctgtcaagtccgcaacaccataccgtgcatccccgcacacgcggtgatctacgcgttcagggggggcgtgcggcacaaccgcatgctcgagaagatcgcctccaaggagccccagaccaccgcgcagctttttgagcttgcggaccgtgtggctcgcaaggaggaggcctggacctggaactcctccggttctggtgtggcagctccggccgcccccgggtccgccgctcggtcagggcggcgggacaggaggaggaagaaggggtcggcccgttccgacgacgagggtcatgtcctcgccgtcgagggcgcttcgcgggccccccgaaaggggaggcctgcgagcgacaaaaagaaggaggccggcgctcccagcagggagcgcccgaccggcaagtggtgtaccgtgcacaacacctccctccacgacctcgcggactgccgcgcggtcaaaagtttggctgagcggacgaggaagtgggaggaggagaagaggcaggagcgccgtgagggcaagaccccggcggctcccgccggcaaccggcgaggtgaggccaagcagaaggccaccgccgaggacatcgacgatggcgacgatgacctggggttccaggagcctgaggccaccgtcgccaccgtcgatgggggagcgtgcgctcacgcttctcgccggagcctcaaggccatgaagcgagagcttctggccgcggcccctacccatgaggcgacgcggcgggcgcggtggtcggaggttgccctcaccttcgaccagaccgaccacccgccgtgcgttgcccggggaggacagatcgcgatggtggtttcccccaccgtttgcaatgtgaagttggagcgtgtcctcatagacgggggtgcagccctcaacatcctttcccccgcagcctttgacgccatcaaggccccggggatggtgctccggccgtcccagccgatcatcggtgtgacgccggggcacacctggccgctgggtcatatcgacctcccggtcaccttcggtggttccgccaacttccgcacggagcgggtggacttcgatgtggcggacctcagtctgccctacaacgcgatgaaaatgccgggccccggtggccccatcaccgtccatggcgacctcaaagtcgcgcttgcttgtatggagcagcgcgcggaccacctcgccgcggcgtccaagcccgtgggtggcgacgagaggctcagcacctccgtcccggctgccccaaggcagcggatggtcacgtgcgacgaggtcccggaagacgcgctcgtctccttcctgcgggcaaacgccgacgtcttcgcctggagaccggcggacatgcccggggtccccagggaggtgattgagcaccgtctcgccgtgcggccgggcgcaaggccggtccggcagaaagtgcggcggcaggccccagaacgtcaagccttcatccgcgaggaggtggcgcgacttctggaggccggattcatccgtgaggtcatccatccggagtggctggcgaacccggtcgtcgttcccaaggcgaacggcaagcttcggatgtgcatcgactacaccgaccttaacaaggcatgtcctaaggacccttaccccctgccacgcatagatcagattgtcgactccaccgcggggtgcgaccttttgtgttttctagatgcatactctggttatcatcagattcgcatggctagggaggatgaggaaaaaactgcattcattacccccataggaacttattgttatacgacaatgcctttcgggttaaagaatgcaagtcctacttctcaacgtactactcgaatttctttgggtagccagataggacgcaatgttgaggcctatgttgatgacttggttgtgaagacgcgcaaccaagagaccttactctcggatctagcggaaactttcgaaagtctccgctccgcccgcataaagctgaaccccgataagtgcgtgttcggcgtgcctgcgggcaagcttctcggcaagcttagggatgtgcagtgcgtcaccggctgcatggccgccctaagtcggttcatatcgaggctgggagagaaggcactacccctatttaagctcctcaaacgctccgggccgtttacctggacggaggaggctaagcgggccttcactcagttgaaggcgtacctcagttctcccccagtcctggtcgccccggagccagatgagccgttgctattctacctggcggcaaccccgcaggtggtcagcgcggcgttggtcgtggagcgcgacgaggacaaccctcactccgcgcatccccaccctgtgtcgactcgacccgggagagagcagggaggagaggcccctgagccgaacggcggcccaaggcccccgacggccggagctggccctccgcctgcttgtccgacggtgccaggcgcccccaacccccaggatggccccggggccactgcgggaaggccgcgcctgtcgccctctgaccccgaggtcgtcggcacagaagccgagtgcgccccgcgtggcctctcggacgaagagcgccctggagatgcggcccctggcgaagaggatcggccccgccgaaaggtgcagcggcccgtctacttcgttagcgaggccctccgggacgccaagacccgataccctcaggcccagaagatgctttatgctattctgatggcttcgaggaagttgcgccattatttccaggagcatcgggtcacggtggttacgtcttaccccctcggccaaatcttgcataaccgagagggtactggacgggtggtgagatgggcaatcgaactctctgaattcgatttgcactttgaaccacgccacacgatcaagagccaggccctcgccgactttgtggcggagtggaccctagctcccgagcccgtctccgcccccgaggccagctcgggcccctcgcagcggcctcacaccgcctactgggtgatgcagttcgacggctccctgtctcttcagggcgccggtgcgggggtcacgttgacctcgccgagcggagacgtcctcagatacctggtccgcctcgactttcgggcgaccaacaatatggcggagtacgagggactccttgcgggactcagagtggcagctggactggggatccgccgcctcctggtgttaggcgactcccagttggttgttaaccaggtctgtaaggagtaccagtgctctgacccgcagatggacgcttacgtgcgccaggtgcggcgtatggagcgccatttcgacgggatagagcttcggcacgtgcccagacgggataacgcggtcgccgacgaactctcaaggctcgcttcctcgcgagcccagaccccaccgggcgcctttgaagaaaggcttgcccagccgtcggcgcgacccgaccccctaggggagacggacgcgcctgaacggcccccgaggcccgtcggagtccaggcctcgggacccgaggggagcgctcctagctcccctagattgattgcttggatcactgagatccaggcgtacctcgcagataagactctacccgaggaccgcgaagggagtgaacgcgtccggcgcatctccaagcgctacgtgctggtggaagggaccctctatcggcgcgcggctaacggagtcctcctgaagtgcattcctcgggaacaaggcgtcgagcttatcgccgatgtccatgaaggcgagcgggccccggacgggttcgagtatctgtatgtcgctatcgacaagttcactaagtggcccgaggcttatccggtcatcaagatcgataagcactccgcgcttaaattcatcaggggcatcactgctcggtttggggtgcctaaccgtatcattacggataacggcacccagttcactagtgagctcttcggtgactactgcgaagacatgggcatcaagctctacttcgcctcccccgcccaccccagaagcaatggccaagtgaagcgcgccaacgcggaaatcctcaagggcctcaaaaccaagaccttcaacatcctcaagaagcacggcgactcgtggatcgaggagctgccagcggtgctctgggcgaaccgaaccacgccaagccgagcaaccggggaaacgcctttcttcctcgtctacggcgcggaggcggtcctcccatctgagctcaccctgaggtcccctcgggtcaccatgtattgcgaggctgatcaagatcagcttcgccgagacgacctcgactatttggaagagcgaaggcggcgcgcggccctccgagccgcgcgctaccagcagagcctgcggcgctaccatcagcgccacgtccgggcccgatcactctgcgtcgacgacctcgtcctacgccgcgtccaaacgcgtgctggactgagcaagctctcaccaatgtgggagggtccgtatcgagtgatcggcgtcccccggccgggctccgttcggctagccacgggcgacggcacagagctgcctaacccgtggaacatcgaacaccttcgtcgcttctacccctag

SEQ ID NO: 64433 - DNA, 395 bp, Oryza sativa
  Clone ID: PAT_MRT4530_65578C.1
tagtgatggcgatgggattatcgcgagaggtctaggggttgtatagcttaaggtggcgattaggacacggtggaatcgatcggcggaacgggcgtccgggtgtacgatacgcggatggctcctactactcctcctactcgacgccgcactgttgcagcccctccttccggtagcggcggtagcaggcgaggtccgcatcgcgcttaagaagcagaaggtcgactagacctgacgcgttgggggccacctagccggggaggatgcccagcggcttctcgcgcggcgccaagggttatttgaccaaacgctccgtctgggcacgcttgaggaaggccagggctgctgccgagggcgacatcgtggcgccttaataactacctcaacgctcagtacta

SEQ ID NO: 64434 - DNA, 741 bp, Oryza sativa
  unsure (1)..(741): unsure at all n locations
  Clone ID: PAT_MRT4530_65579C.1
caaggggctgaagnagatgttcaagaacatcgacaaggacaatagtgggaccattacgcttgaggagctcaaaaatgggttagcaaagcagggcaccaagttttcagacaacgaaattgagcaactgatggaagcagctgatgctgatggcaatggaattatcgactatgaggagttcgtcaccgcgacagtgcacatgaacaaaatggatcgagaagagcacctttacacggcattccagtactttgacaaggataatagtgggtacatcacaaaggaagagctcgagcaagccttgaaggaacaagggttatacgacgccaacgagatcaaggatgtcatcacagatgcagactctaataatgatgggcggatagattattcagagtttgtggccatgatgaggaaaggatcaggctgtgcagaagcaacaaacccaaagaagaagaggcgagatctagttctatagcgaaacagggtaagtgtgtatagtggctggtttgtgcacaatttcaaacatgatgtgcatttaccacgagtgtaatgtatacaatggaattttctttccaattgcatatttgcatttcaggttgggctcaggttcatgtttggtcttgcacattgtcctggctagttgttgggaagatggatttgttccttctttctgttcagtcatcttgtacactacatgattgaatcctacctgattagaaagcccaaaagattactggtacattcaac

SEQ ID NO: 64435 - DNA, 3658 bp, Oryza sativa
  Clone ID: PAT_MRT4530_6557C.1
atgggctcgccgcgctcgtccttgcctcctctctggcttctcctcctctgcgtcgtcgcagcagcacggcgcgcgtcgatggcgcgggcgcagcagccgatgccgccgtcgttcgcgttcagttggctcgactacaggtcgtcgttcgtcgccggcgacaccgcggtgatcaagatcacgccgctcgacctcccgcccggggacgaggcgcggcggtcgctgtcgttcacggcgacggtgaacggcaggcggggcaacagcacctacatcgccgacgtcgcggcgcaccacgccggcgagccggccgcctggaacatcacgttcgtgccgctgcgcgccggcgacttcgtcgtgctcgtcggcgaggagcggttcggcgtcgccgagtcgacgctcgagttcgcggtcgccgccgccggcgtgcacccgtcggcgtcgctggcctcctggacctactccggcgcgtgcgtcgccggatcgaaggcgtccgtgtcggtcgctctcagggacgcgttcggcaacggcgtcgcgcgaggggccgacatgcccggcggcaatggcaacttgaaggtgtcggtgtcccgtagcaatggcgccatcgtggaattcaaggattttcggtacaatggatgggcggaagatggacgcatcagccttgagtttgttccggttgttgctggagcattccttgtccgggttcagagcgatgacaacacattgcgtggttcgccattgttactgaccgtcaatccaggccctgttgatatagctaaaagcacatgcagctggaagtatgggactaatgtattgcagatattttccaagctggagattttcatacatcagaaggattattttggaaatgctgttccagatatccatccatttgatgctagaatagttaaacgagccacaaatttgtctgtcccggtagcagatctactgattgaggttgtggacgatggaactcggctgctctctttcaaagctgtggatcctggagagtttgttctcacaattttcgatcctaagctgaaccaaaagatctccaacatggactacgtgtataatgtttttgtagggtattgcgatggttcaaacagttttgctaatggatctggtttagcacattcagttgccggttcagtgtcacattttatggtttacctgcaggatcactatagctatccttccccaattgaatccgcatggctgaaagtacagattttgagtaaaaatggtgctagtgtaaattcaaccatatctccaggagaattaaatgaggaaacatttgtgggaggacatttcagtacatttgtgggaggacatttcagtggaggacctactggccatcaggaaaaaattattgcaggaaacatgcgaccaaatagttttaatgtttcatatactcctaaatttgctggggagtatgaaatttgggttcagtgtgggaacatagtgataaacagtggaaatccctataaaatgacagtttccacaggtgtagttagcaccgatttatcaacagttgtcacgttcgttcgtaaagtcaaaacttcagtccacaatgaagtagttgttcaacttgttgatccattcatgaatccaatgatacacttggcatcaaaattgaggattcagctaacctctgcagatagtacaacccctatgaatgcgccaagcttcaccgcaggggagtttgttgacaacaaagatggatcgtatactacttattatgtggcgaaaaataccggtttatatagaatttgtattcagtttgaggatgcacaactgaaaccttgcccattcgaagtgcatgttgttcaagatgaagacttctccacggttcaaaacgatataatttcagtacgggagaatgaatctgtttcctttgatgtattgtcaaatgactacattgcaggaggccaagctgtagttaatttttatccgccgcttcatgggtcagtcctacaatacaatcaaaaaaaatttaggtacacacctttcgaaggattctttggaaatgacacattttggtacataatattcgacaagcatgacaacattgcatacggcacagtgttcatatcagttctctgcagaccaccccagtttatttctttaccccaacagctacatgctactgaagacacgattgccccacaattcggtgggtttccagggattaagatagcatattcagatgcagcagaaaatatctctgttatgctacaagcgcagtctggaaatgtgtctcttgctcctatgccaatgaaatttcatcagacatcatatgacgtactttcaatcagcacaggagatagatatggcaaagatttgatattcaacggaacagtcgaagcaataaatggagcgctacgatttgttaagtatatcggaaacgaagacttctatggaaatgatattataaagatttatgccatgagcaggagtggaagagaagatgctcaagtacccattttcgtagagccaatcaacgatccaccagttatattagctccagaatcgattttcttgggtgggaaaaaatcaattgaaggatatcaaatctttgacaaacaaagggatccatttgagtcctccattgttgaaccagatcttcagagtttcccagggaacaagtcccatcttcagctggttctctcattagaagttcatgaaggagctctcatggtaaccttgacagctggtatcgtcgccactgcagaggtgaagattgaagggaacaactgttggcagccccttcagacttccagtgctgatcgcatagtcctgagagtagctggtatcaggttccgtgggagtgtctctgattgcaacaatgcaatgcagcggttgttctaccagggtcgaagcaatgaaacaaccttagttattattgtaaatgacctgggatactttggatgctacccagactgttcaatgaaatcagggacgccattgtccaccataaagaccattcgtctactcataaggaaatctgtgaagtcaagagatcttttgttgagaacagccttaacaattgagctatcccttgggtgtgttcttctgtattacatcttaaaatgcatctgtgctctcaaaggcaagggaaaaaatcacaacaagaagacacgtaagctgaagaagaccgcgtctcatcaaaatacgagcacctcatcgtcagatgatgctggatatttgtctgcacctgctaccgtgctctcctcaggtggaaacagatccagtttacggaagaggtcacctcggtcacgcaggcaggaactggagctgcagccgttaactatgtccagaaacaatggagatcaagatgaccagcttgcagaacacaaggacaagtagcacttctgctcgctccaatcaagctccatttgctcaatgcccaccatagaataacatttctttggttggtcaggtttccagttgatcagatctagagagtataagcagtttagctagctttaaagtagctttagactcattttctgttcttatccattatctagatgtcaagaaaaaagaaacaggaagcccttttcttagtttgacagatgccaagcgaaatcccctcagattaaacaatagcttacctctacatgaacagaatcaaatcaaataaaattttctatttgtcatg

SEQ ID NO: 64436 - DNA, 321 bp, Oryza sativa
  Clone ID: PAT_MRT4530_65580C.1
atggggaaggaagagctcgccgtcattcgcaaaaaaaagcttgccggcatggggaaggagcttgccgacgtggggaaggacgagctcgcgggcgttggggaggatgagatcgccgacgactgccagatgcgtgcgagcaaacggagcgagggggatgaactgacgacgcgcggcttcggggagacggagtggcatggaatgaagcaattcgcatcctcggtggcatattctgaaagtagtgcgaattggatggcaaaccctgaaagcaatgcgtattcggtggcatattctaaaaattctcgttactcttctaaaatataa

SEQ ID NO: 64437 - DNA, 687 bp, Oryza sativa
  Clone ID: PAT_MRT4530_65581C.1
atgccgctgccattcttctctggcaagcttgagtacgtgcccgagctcaagctctggtttggcctctctgctgagcccagccgccgcctgctggctgctgctgatctgatctcctctgactcccagccacaacttataggcgactggaatgaatttgccccacctgagggatggctggaatatcaagaaccgcagcttgtcaacctcggctccgccaggttctgcatttcaaggttcttccatattaggtccatggataatgataatgaagtaattgacagtgttgtagtcttcactggtgtggaggtgatgccagttgggcacaatggcgatggtaatgggaagtaccagtcttggggggagttggagacgggaggaggactgaaggagcacgcccagctgccgccgcctcaaaacgcggtggagcacaccgcgaagtcgaagctgtcaccgccgccgcctccgccgggagccgccgccgccacctcgatccgtgatggagccgtgccgccaccgctgccgcctccgccgggagccaccgccgccggctcgatccgcggtggagccgcaccgtctcaggccgggagccctaaagccgccgccgccatgctgaagtgtgcccttgaccagctcctcccatcatctgagctccggtcgtcagatccgtgtggagtcatcgtcctgtag

SEQ ID NO: 64438 - DNA, 435 bp, Oryza sativa
  Clone ID: PAT_MRT4530_65582C.1
aaaaatcgtggatagttgaatgagaaacgtctaccacatgtttaaacaaacgattatacaagacaaacattgtgttctatacctcacaccaatttggcggtgaaaacgcataagtccctgcataagatatgacatgaaacggacaactgactcctcagaccacgtaatgcttgggatagcgaaaaaggcggacctggtgacctcctctgtgcccaacaaaggtcattaatatatgtttttatttaccacgaggaaactgttcgccgacgcacctaggaaactggtgcgtacgattaggggtccttgaaccttgctgtaactgaggctgaccttcatagcacttaggtagaggctgccctgctgcatggccatgcaacccaattgtttgctccccagggtgcgtattaagctgagcgaccttccccgggagggcac

SEQ ID NO: 64439 - DNA, 266 bp, Oryza sativa
  Clone ID: PAT_MRT4530_65583C.1
cggccccctccaccctcccccatgctctcccgcacgaatccggcgcaagctccagtgatggagggctcgggtgggcggcgaccattccccgcacggatccggcgacggctctcccccgcgccgatccggcgacagccgccctcccccgcaacgacaacgacctcaacgacgataacttgggcggaagcagcaggctagggtttcgacgggaacaccactccacaggcatcctcaacggcacggacgaagcctactcctcggaatag

SEQ ID NO: 64440 - DNA, 481 bp, Oryza sativa
  Clone ID: PAT_MRT4530_65584C.1
gaagtaacttatataaatggagaactccgttaattaaaaactaaatgactatatgaaccacggccttaaatatcttaaggcgagatatacagcatcccaaatggttacaccctcgaaattacaaaaattatacccatataattaatcattgctattaatagcaggaacgacgccaactcgaaaaatacacctagtacgtgtgttcctagcacgcgtgtggatcgcccagattcttctgcattaacttacctaattaattcatctgcttgctctctagcggaagagattttggttactttttaactaaatttctcccacggattggagcactcaggacctaacatcctgatgcatatatcattcccaaattccaacaagcacactgcaatctacaacattgattaatcccttttggagcccattcctttaagattcggttgatgctgtaacaactaatgattaattccttggatgtggctta

SEQ ID NO: 64441 - DNA, 287 bp, Oryza sativa
  Clone ID: PAT_MRT4530_65585C.1
ccggccggtaaagttttggcaaatttactgcaaaggaagcccaatccaaagggggcttttttcgttccgtcaagggggccgggcccgccaatccggccggggagggcaatcaaaataaaattcggtggcggaagttcggttacaagcaaaagctgaagggcggcctttttgttttttccaacttggccttttccttttccataatttccggaagggccggggtaacaacaacgtccagcacggggctcccttacggggggccggggtccataacgctcggggggttc

SEQ ID NO: 64442 - DNA, 1744 bp, Oryza sativa
  Clone ID: PAT_MRT4530_65586C.1
atggccgccgccaccgccgccgccttcgcggagcccaaaggcaggagaaggagaaggcgaaggcgaagcaaagcaaaacctcggaagagcggcagagcccactccacacgcggagaggagaccacgccgccgccggaagccatggccgccgccaccgccgccgccttcgcggagcccaagaccaagtacgatcgccagctcaggatatggggtgatcaaggacaggctgcactggagaaggctagcatatgcttgcttacctgtggccctacaggaactgaagcgatgaagaaccttgtgcttggaggagtagggagtgttactgttgttgatggttccaaagttgaacaatctgacatgggaaacaatttcctgttggatgcagaatgcttggggcaatcaagagcaaaatctgtatgttcgttcctgcaagagctgaatgatgctgtaaatgccaagtttgtcgaggagtctcctctggctctcatagacacaaacccttcattcttttcccaatttaccgtagtcattgctactcagcttccagagagatctttactgaaactagatgatatctgcaggaaagcaaatattgtggttggttgctgcacgttcatatggtctaactggtctagtcaggatcagcgtttgggagcacaatgctttcgaatcagaaccagacaacttcttggaagatttacgccttaaaaatctttgtgttgttctagaaagaatattacaaacaagcggtggagtccacgtatactggttcagatactccaggaatcagagatgagatccgtcagataattgatgatagctccgctgaagtgaattcatcttcttcagatttctgggttttagtggctgctttgaaggaatttattgcaaatgagggcaacggtgagctacctcttgaggggacgatacctgatatgacttcacttactgagtactatgttagcctgcaaaagatttaccaagctaaggctgaatctgactgccttgccttggagcatcatgtaaaggatatcttgaagcgaattgatagagaccctgattctatttcacgggcatacataaaaacattttgcaaaaatgctagaaaactcagagtctgtaggtaccgcagtatggaggaagagtttagctctcctgttctttctgaagttcaaatatacttcaccgatgaagactactgctttgcaatgaacttctatgttctgctacgtgctgttgatcgacttgcagccaactataacagatgccctggaatctttgaaagtgagattgatgaggatgtgcctaggctgaagacagctgctgtttcagtaatgagtgagatgggtatgaacggggcacctttgtctgaagacctgattactgaaatgtgccggtttgggggtgcagagattcatcccgtggctgccttcattggcggagtagcatcccaagaagtaattaagctggtcaccaaacagtttgtgcctttgctgggaacatttatattcaacgggattgatcacaaatctcaagttttggcgttataacatcaatctggtatagagcttttcggaacctcacccaattaattacattagagttgccccagattttgtattatggccttccggtgcaatgaaaatcacttgtccatataaatgatcattgtcagatttggaattatcatcgtatttacatgggaaaaggtcaaaataccccttgaaacagtatgaattttgtg

SEQ ID NO: 64443 - DNA, 1020 bp, Oryza sativa
  Clone ID: PAT_MRT4530_65587C.1
atggcaattgccctgttggggttaagtccccaccaggtacccgctcgtacggggataaggcaaattttcacctgtaggtctgtcgaggaggggcttaactccttgcggaccagggtggatttttgttttcacccacgagtctctaaaacggtaaggtcaatttgtttgctcaatgttgcttttaagctgattactaaggtgttagcggtcagactgtcaagagttgcagggaaaatcattagagaatgccagacaacatttattcctggtcgatacattttagatggtgtggtcattctacacgaagtgattcatgaattgagtgttagaaaactagaagggatcattttaaagctagatttcgagaaggcttatgataaagtacaatggtcttttttgtttgatgtgataaggaaaaaaagctttgatgagatatggattcaatgggtgggcaaagctactctgaacgggagagtggccataaacataaatggagaggtggatgggtatttcaagactcagaaaggtcttagacagggggatcctatatccccattgttatttaacttggttgccgacgccctttctgaaatgttgaccctggccaaggaagctggtcacttagagggagtggttccaaaccttgtgcctggagggctcactcacttgcaatatgccgacgacacgatcctttttttgcagaacacagaagaaaacattctaacagtgaagttcttgctgtattgcttcgaggcgatgtcaggcatgaaaattaattaccaaaagagtgaggttttcgtgataggagtagatgatgctgaagcccaaagaatagcagaaaaatttaattgtgagagagggaagtttccaatgaaatatctggggatccccataagctcagtgagattgacagtggcagattttgcagcctccccagataaactagagaagagactggcgacatggaaatgtgggcacctttcttatggggggaaagcaatcttggtgaattcctcctga

SEQ ID NO: 64444 - DNA, 532 bp, Oryza sativa
  Clone ID: PAT_MRT4530_65588C.1
tccccgcacatctacctcttcatgctacccgtacctcaacaccagctcctcgggtgaggaggcctcgcgcgaccccaagtacggcggcacggccgaggagttcctgccgcccaaggcgctcgatggctcgccccagcccttgccccgcgcgtcgggcaagaactcgcccggcggcaaccgccagctgtacgacaccctgtacaccgtcacggcaaccatcaccaacaccggcaagctcgtgggcgaagaggtgccgcagttgtacgtgtcgcacggcggccccgaggacccgcccgtcgtcctgcgcggcttcgagcgcatccgtctcgaccccggccacgagcgccaccttcaaggtcgacctgaccacggagggacgtcagcaactgggacgtcaaggtccaggactgggtcatctctgagcaccccaagaaggtgtttgtcggaagcagcagcaggaagctccatctgagtgctgacctgaactgagctccttgtgcataaagaaacaagaaaaaaaaaaaaaaaaaaa

SEQ ID NO: 64445 - DNA, 1499 bp, Oryza sativa
  Clone ID: PAT_MRT4530_65589C.1
cccgggctgagcccaaacgcacgaggctaagcttagcgcggcgccatggacgtggccatggcgctcgccgtcctcttcttctgcctcctcctcctctcctccgccgccatcaccttcctcctcctccgtcactgcctctccgggctccggcgccgccaccgtgctgccgccgccgccgacgtcgacgccgaggccgcagaaggcggggcgggagcacgacagctgatgccgccgtgttctcctcctcctcagcaagagctgccgttgttgcggccggcggcgaagttggtgccgtcgacgaaggaggagggggagccttggaagctgacgtggcgggaggtggaggcgctcaccggcggcttcgacgaggcggcggtggtggggcgaggtggctccagcacggtctacctggcaagcagctgcagggtcgccgtcgtctcgccgcccgtggcggtgaaggtgcaccggtggtgcggcggcgagcggtggctgcgcgcgttccggcaggagctcgacctgctccgccgcctccgccacccccacatcgtctccctcctcgcctactccgacgaccacgaggagggaggtgcactggtcctggagtacctctccggcggcaccctcgccgaccgcctccacggcggcgcatcgccgcctctgccatggcgccaccgcatgcgcgtcgtccacgacgtggccggcgcgctcgagcacctccacgacggcgcgcctccggtggtgcacggcgacgtgtcggcgtccaacgtgctcctcgacggccgtggcctgggcgcgcggctctgcgacctgggctccgcctgcgaggggttctccgccgccgtcgcgcccaccagggcggccgtcggctcgccgggctacgtcgaccccttcttcctccgcaccggcatcgtctccaagaagtccgacgtctacagcttcggcgtgcttctgctcgaggccatcaccggctcgccggccgccgggatacccggcccggatggcggcgccggcgggggcaacctcacggcgcggttgctgccgcgtgtcaggacggagggggtggacgggctcgccgaccgccggctgggcgacgactacgacgcggcggaggccggcgacgtggcgaggatcgccgtcgagtgcctggcggcgcagccgggcctccggccgacgatggcgcaggtgcgcgcggccatcgcggagaaggcggcgacgtccatctccattgctcatcacgacctgcacgatgcctccgattccacatgatggatatcggattgcagtttatttttattttgtagatgatttacttagttatttttgtgtctgtgtgttttattattggcaaggtaattaattaattgtaggaaacgatgaacactgcttaggaaagaactggaatcaattgattagagtgatgaaatactggaatgtaaatattgatttctaaaaaaaaaaaaaagaaaaagcatttggatgctataaaaaaaaaaaaaaaa

SEQ ID NO: 64446 - DNA, 309 bp, Oryza sativa
  Clone ID: PAT_MRT4530_6558C.1
atgacgactggggagattgaggtctctatcgccgccctcgccacaaagaaggcactacaagaggccttcgacgtcctcactgctgcctgctcgcccttcacctggggcgacctcaactcctacatatcctcgctccaggacccgttgtatctgttgccggccggcatcggcatgggcgacggcggggagaagcaggcggcggcggcggaggggtggcggctgagcgtcaacgacttccagttgccggagcggcccaaggacccgcacttcgtcaagagggtcatcaagcgatgccacgagaacatctga

SEQ ID NO: 64447 - DNA, 391 bp, Oryza sativa
  Clone ID: PAT_MRT4530_65590C.1
gttagttgtatccgaggaggcaagggaactgaatatcaagatgctcccagacaacattgacctgcagtgaccattgacatccgttggtgagtttgagctgcccattcgtatgcctggggatacaccacgcgcagactgcaagcctcatggggctctgacggttacgatcagatgaggatgagaacaatggcagggggtagctctgtgaccctttcaaggagtgtaatgatactgaaacgtggcgaattaccgagcaggagacttgagataaggtatgttgcacaatacgattccattctgataatggaatactgcataatcgtgagtggatacgcaaaccggctgacagacattccaggcctctatccgggaggatgaggaagcacacatc

SEQ ID NO: 64448 - DNA, 3182 bp, Oryza sativa
  Clone ID: PAT_MRT4530_65591C.1
ggtaccgatccggaggttccagccacgacccacgtcttacgcttgggcggtcactgatgaactttttgagtaatatcctacgggaagagggtggctttgagtacaagaaggctattgttgattcaattatcatactcattagagatattcctgatgcaaaagaaagtggtttatttcacttgtgtgaattcattgaagattgtgagttcacttatatgtctactcagatacttcactttttgggaaatgaaggtccaaagacatcagatcctagtaaatacatacgttatatatataacagagtgatacttgaaaatgctccttttctccactgtcgtaagccctcctcctcctcctcctcccacgccgccgccgccggtgcccccactcgccgccgtgcgcgcgtcccgtagttcgccccaccagcggccgccatggcgcagccgctcgtcgtgaagaaggacgacgatctcgacgaggaagagtactactcgccgttcctcgggatcgagaagggcgccgtcctgcaggaggcccgcgtcttccacgacccgcagctcgacgcgcgccgttgctgccaggtcatcaccaagctcctatacctgctcaaccagggtgacaccttcaccaaggtggacgactgttcgagctagtgctgtaagtactttggcaaagttcggtgcattggttgactcactcaagcctcgaatttttgtccttctgagacgctgcctgtttgatggtgatgatgaggtgcgtgacagggccacgctttatctcaaattgcttggcggggaagctacagttggtgaaactgagaaggatgtgaatgaatttctctttggttcatttgatattccactagttaacctggagactagcctacaaaactatgaaccatcagaggcaccttttgatatttcatctgtatctttggaaactaaatcacaacctcttgctgagaaaaagactacgggcaaaaagccaacaggcccagcatctgctctcagcggtccagttcctactgttgatgcctcatatgagaagcttctttcatccattcctgagtttgctggttttggaaaactctttaagtcatcagctcctgtagaattgaccgaagctgaaactgaatattcagtcaatgttgtgaagcacatttatgacgggcatgttgtgctccaatacaattgtaccaatactatacctgaacagctgcttgaagaggtggtggtttttgtggatgcttctgaggccgatgaattttcagaagttgcaacgaaatcattaagatccttaccttatgattcaccaggacaaacctttgtggcttttgaaaagctagaaggtgtccttgctactcgggaagttctcaaatatactgaaatttattgttaaagaggttgatccatccacaggtgaagctgatgatgatggcgttgaggatgagtaccagcttgaagatctggaaattacttctgctgattatatgttgaaggttggagtttccaacttcagaaatgcttgggaaagcatggatccagaaagcgagcgggttgatgagtatgggcttggcgccagggaaagcctggctgaggctgtgagtgctgtcataggcatccttggcatgcagccctgcgagggaactgatgtggtcccaagcaattcgaggtcacacacttgcctgctatctggtgtgtttatcggcaatgtgaaagttttagtgaggctgtcattcggacttagcggaccgaaggaagtggccatgaagctagcagtcagatcagatgatcctgagatcagtgacaagatccatgaaatcgttgcaaatggctaaatctgatgaagagggtcaccccttttttgacctttttgtttttggctttcacgccatggaaagctcaacggaatttgattaattctatgatgatagtacatgtaagcttggttttccgttggatacatgtgttgttgcactcgcaccccatcatttgaaaacaaggcatataacaatttttgattgatttggaaccacatcatcaattcctttatatatcaaggatttgactagtacatgcaataaaagatagatgaagttatagcgttacagggccacgctttatctcaaattgcttggcggggaagctacagttggtgaaactgagaaggatgtgaatgaatttctctttggttcatttgatattccactagttaacctggagactagcctacaaaactatgaaccatcagaggcaccttttgatatttcatctgtatctttggaaactaaatcacaacctcttgctgagaaaaagactacgggcaaaaagccaacaggcccagcatctgctctcagcggtccagttcctactgttgatgcctcatatgagaagcttctttcatccattcctgagtttgctggttttggaaaactctttaagtcatcagctcctgtagaattgaccgaagctgaaactgaatattcagtcaatgttgtgaagcacatttatgacgggcatgttgtgctccaatacaattgtaccaatactatacctgaacagctgcttgaagaggtggtggtttttgtggatgcttctgaggccgatgaattttcagaagttgcaacgaaatcattaagatccttaccttatgattcaccaggacaaacctttgtggcttttgaaaagctagaaggtgtccttgctactgggaagttctcaaatatactgaaatttattgttaaagaggttgatccatccacaggtgaagctgatgatgatggcgttgaggatgagtaccagcttgaagatctggaaattacttctgctgattatatgttgaaggttggagtttctaacttcagaaatgcttgggaaagcatggatccagaaagcgagcgggttgatgagtatgggcttggcgccagggaaagcctggctgaggctgtgagtgctgtcataggcatccttggcatgcagccctgcgagggaactgatgtggtcccaagcaattcgaggtcacacacttgcctgctatctggtgtgtttatcggcaatgtgaaagttttagtgaggctgtcattcggacttagcggaccgaaggaagtggccatgaagctagcagtcagatcagatgatcctgagatcagtgacaagatccatgaaatcgttgcaaatggctaa

SEQ ID NO: 64449 - DNA, 480 bp, Oryza sativa
  Clone ID: PAT_MRT4530_65592C.1
agtggatcccccgggctgcaggcaaagtagtagcacatagacatagccgtgctcatccgatcaaggaagaaattaatggcgacgatgccgaagtcgaacacgaaagtggtcgtcctggtagccgccgtgacgtttacagtatttcttctgcttactgtgcctgccatcgcttcagatgagcaaaacccggttggttccagtactgctgcactgactgtccacggaggtactccactgcagcagggaggagactcgaagacatcttcaccatgcaagagtgcaataggtagttgcctttcacgtggtaattgcggtagtgttgggcactactacgtatgcgaaccatgtactaaaactgccaaatgtgattctatcctcgtcgggagacataggaaagacgtcacgggctgcaggcatacttgttcctagcaagctagctaggcatatgcacgaacggggacgcagttaatttagttaatc

SEQ ID NO: 64450 - DNA, 393 bp, Oryza sativa
  Clone ID: PAT_MRT4530_65593C.1
atggcctccttcttctggcctgggccgccgggagcgcagccggtgggcgacctgcaggtggcgaagttggcgctgctcgtcgccggcaacgggttcatctcgccgtcgtcctacctccgccgctgctgcgacgacgacggcccgtgcttcgtcgacggcgctggggagaggtgcttgcacctggccaacctcgtcaccgccatgctcgggctggccctcgtgctcggccagatggcattcttctcggcggcggcgttccggccgcaggtggcctcggtcactgttgctgcgcggtggattgtcagcctcgccaagctcgccacggttgggaccctccagctttgggtctatgttttctgcttgtgcctgaaaatgttgtgcatcagatactaa

SEQ ID NO: 64451 - DNA, 632 bp, Oryza sativa
  Clone ID: PAT_MRT4530_65594C.1
ccggccgggaagtccctctctctcacctctctggctctcccctctcctctccatccctctccccggcgtgcacggatctggccagatgctacggtcgtagggcggtggcggcgacggttaccggcggtggcgatggcgttggcggctgcggctccaggcagtggcggcgcaccccagctcggtcccctccctagatccggccggagggagggggagggcggtggcggtgacggctaccggtgctggtggtggcgttggcggctacggctccaggcaatggcggcgcaccctggctcggtcccctccctagatctggcctgagggagggggagggcggtggcagcagcggctatagacggtggcgcaccccggtgcggttcccctcctctccccagatccgggtggcgtcggctgctcccctccggatctagcgcggtggcagcggccctcccctccggctttggcgggcggcagctcctcccttccggtgacgactgtgtctatggatttgttttgtttgtgaatcatgttgcctctatgtgaatttgcgatgcttctgtgaatttgatttggtttgattggattaaacaaaaaaaaaaaaagcggccctgtggggacggatctggccagat

SEQ ID NO: 64452 - DNA, 230 bp, Oryza sativa
  Clone ID: PAT_MRT4530_65595C.1
ttgttccatcccctcccccgccggaaaggggggctattaaactcgcggccctctagcccgcactcagggagaacctgggcggggctcagcgcggttcgattcgatctcctggcggagatctgcccgcactcgcggaagaaaagaatacgacccatagagacctctgcggtcacgggcccacaagggaagagataggagttgacgccaaggaacccccgacggataccacg

SEQ ID NO: 64453 - DNA, 1725 bp, Oryza sativa
  Clone ID: PAT_MRT4530_65596C.1
atggagcactctcttgttgctgaggctgaagcacaagtgttcttcaaggccaaggccaagggtggtttcagagccctcccttttatcatctcaaacgagatactggagaaggttgctggattcgggctcaacatcaacttcatcacgtacctcaacatgcagtaccacctgagccatgccaacgccggaagcctcctcttcgtgtggggcgcagtatcaaacttcgcgcccatccccggcgccgtcattgccgacatgtacctcggccgcttcatcgtcgtcgcgatcggctccatcgcctgcttcgttgggatggttttcctgtggctgagcgccatgatacccggagcgaggccgccaccgtgcgacatgagtgcctcgccggagctgtgcgcgccgccggaggcgaggcacatggcctggctgctggccggcttcgtgttcctgtccgtcggcgccggcggcgtccggccgtgctcgatggcgttcggggccgaccagttctccaggcaccccaaggagaggaggtccaggatcctgcaggtgtacttcaacgcctactacggctccatcggcgtggcgttcatggtcgccgtcacggtggtcgtgtacgtgcaggacaacctcgggtggaaggtggggctcgccgtgccgacgtgcctcatgctgctctccgctgcgagcttcctcctcggctccggcctatacatcaaggacaggggctccaagcggatgttcgccgggataggcgccgccgtcgccgcggcggtcaggaaccgtagggcgtggctgccggcgaagaccgaggacggcgtgtaccatcacctcaaggactgcaagctcaccgttccgacggacaggctgaggttcttgaacaaggcgtgcatgatcagcaacacgaaggaggacaagtctggtagtggcggcgcggacggcatcagcgacagagggcggctgtgcacggtggaccaggtggagcagctcaagtcggcgatccgcgtgatgccgatctggtcgtccaccatcttcctcgcgcaggccatgaaccagtacttcgcggtgccgcaggccgacgcgatggaccggcgcgtcggcgccggcgggttccgcgtgcccagtggcacgttcgccgtgttcaacatgctcaccatgtcgctctggtcgggctgctacgaccggtggaccgcgccggcgctgcggcggctgacgggcaacccgcgggggctgaccatgaagcagcggatcggcgggggcctggtgttcggcaccgcggcgatggccgcggccgccgtggtggaggccgcgcggcgcaggcaggcgctgggcggcggcggcatgtcggcgttctggctcgtgccgcagtacgcgctggcggggctcgccgaggcgttcggcgtgatcggggtgatcgagttcttctacaccgagctgcccaagagcatggccagcttcagcatggctctgctctacatggccctgggggcggggagcctggtggggagcttgatcatcaagttggtccacgaggtgagcgggcggagagggaggacgagctggctggcggaggacttgaacgccggccgctacgactactactactggcttctcgccggccttggcgccgtcaacttcgtctacttcctctggtgcggctgggcgtacggcgaggaggggcagaacgtggagtgggaagacgaaggtgagggagagacgactatagcttag

SEQ ID NO: 64454 - DNA, 1574 bp, Oryza sativa
  Clone ID: PAT_MRT4530_65597C.1
aggcatcttccgtactgatgaaatgtattcattcacaaccattgttaacaatacagttgatgagttcttatagattattaagttgacgactcttaagtcttgaatgccttgtgtgcgttcaaggcactacttaaatttaccattgatggatgtaaattgggagtggcaattatttgatgcatagaaatatattgtgatggcttgtttgcgcgtttgctcatttggtgcaccttgtttgattcccttccgccctcctccgaaccttttctgcgaaaattagctgttggggacactggcccttggtgttctcgtctcttgcggtgggcagggttctcctcgcagcaaccggcagcttatgaaaagctgcaggcccatctccaagccctggcgaggccaccgtcgccctccgagcgcagatcactatgggaagaggctatgattatggtccatcaccgccaagagaatacaggagaagagcccgcagcccaagtcctcgtgggcgctatggaggccgtgacagggatctcccaactagtcttttggtgaggaatcgtccccgtgactgtagccctgtcgtgctacctggaccaggtggaaaatttggtcgtgtcaaagatatatatcttccaagagattattacactgggcgtccgcgaggatttgggttcatccaatattatgatcctgaggatgctgctgatgcaaaataccacatggatgggcaaattcttcttggcagggaagttactgttgtatttgctgaggagaacagaaagaaaccatctgagatgagggctagggaaagagtcggtagcagggaccgttcttatgatcgcaggtcgcgctctcctagatactcccgctcaaggtcacctgtgtactctccaagatcacggtcccgtagtcgaagctactcacctgcacctaagagaaagcactattcaaggtctcctgcccgtcgggagagatctctgtcgcgctcaccagcggacagcagatcacgaagtagaagcctctctgatgaccgccgcagcaagtcacctgacagggagaggtctctttctgttagccggtgaggagcttaggacccaaatgccaacggggcactgggttgaaccatgtttcgatgatgactgcttcttgttactaggttgaaccatgtttcggaatttttaggccatcctgatcttctaggaatgttaatgatgtgtggtcttctaggatttccttttcattgttggatcctgaagataaaaagtcgaagcatcgaacaacttatcatattctttgacctcgtgcccattttaagtgactggttattgccttttgtggtcctgtaacgttaccaatgatttccccattggcgagcaggcattgttaatgtaagaactcaagtcaggattactagttgtctcaattctgcttttcatactcatcatctggaggttattttgttggttaataagaacagttttttttctctgaaaaaaaaaatgtacctggagttaaaatcggtatatactcgagagatgtgacaaaaaaaaaaaaaaaaaaactcgagactagttctctcc

SEQ ID NO: 64455 - DNA, 603 bp, Oryza sativa
  Clone ID: PAT_MRT4530_65598C.1
aacaacaaaaaaggagggtttttgggtttccctctgttcttttataaattataacaaaaaagttactaactttttgtactggacaaaaacttatgtgccggcaaaagtcacaactgatggaacctggaaaatcaaaggagcaatttgagtaacatgggggttgtacaaaaaacatgattcacccccctgcctgaaaatctcccaaatcgtcgtccaccctcttttgaggggccttttttgctgcaattgggtgctcctgaagaacaacttttgctttcggggggggggaaaaaacaaccttttccccgggtgggtgttcataaaaaaaaagaaattcttctttgaaaggaggggtatcaactccaatatcaacaactggttggtcttgggaaagaaactccccttttaacggaaaaaccccgatgccaaaatttttaagaaaaacccgtaatggcggagggggagggaactttaaggaaactggggcccccttggagttggctttttccttaaaaaaaaacttgttgaggcctttctcaaaaaaagcaaattttatttttgcgccggactctttattttttaactgcaaaacccctcgtgccc

SEQ ID NO: 64456 - DNA, 153 bp, Oryza sativa
  Clone ID: PAT_MRT4530_65599C.1
atggactccgctacaccgaccccccccaaccccgcgcagctagcattcggcagcgtgacacacgctgtcactagcccactgctacctgttgcccgtgccgaccttccgtcgcagttggccgtgctggcctccctaccatgtcatcgcaagtga

SEQ ID NO: 64457 - DNA, 1920 bp, Oryza sativa
  Clone ID: PAT_MRT4530_6559C.1
cgccagacaccagcaggggtaacgtaaattgagcgctcaaagtctcaaatgcaaatgcagtcatacagatatatactacactgccatcggttattctctggaaaaatatgtacatcagtggagcaacaagggttgccgctatgtacaaaaatgcaacacctcccggccttcttatttcaggtgacccagcggacgaacgactccttacaccttaactccgatcctttctgcgacctccttgaaagagtaaacatcactgccccagagccaggcatcacagcctgcatccctggctccccagagatcattcctgcggtcatcaccaatatgcacagcttcttcaggcttcacacctaaaaactcgcaagccttcaagaatattgttgggtttggcttttccgcagcaacctcagcagatacagcaactgcatcaaaccagtgatcacaattcagggcctgtaaaagtggccgaagacgtgtgtcaaagttggatacaacagctgtttttacaccagcctttctcaatgcttcaaaaacatatttagcgtcagggtcgcagagctgccaagcctttgcagttgtatagtactgataaagttcctcaaagtactgtaaatctgagcatccagttgaagagctaactatatgctgccagaagggcctaccatcatccacatacctcagccgcgatctaccccatggctgcgcataagccctcctgtatctcatcaagatctcatcctctgagtagttgactccatacttttcgccaattgttctgtatacctgcgccatgggctcggtgggggcgaggagcgtcccggcggcgtcgacgaggatggccttgtgggtgatgtcgccgtagatggccctccggtagtcgtagtactcccgcgcccccatcggctcacacgcacgcgacaccggtcaagaagcgcgcgcgcgcgcaccactgcaccgcgcgagcggcaacggcggaggaggagaggctgtgagtggtgggcatcaggtgacccagcggacgaacgactccttacaccttaactccgatcctttctgcgacctgcatagcaatccagatttgatgatgtgagcttggttctccttgaaagagtaaacatcactgccccagagccaggcatcacagcctgcatccctggctccccagagatcattcctgcggtcatcaccaatatgcacagcttcttcaggcttcacacctaaaaactcgcaagccttcaagaatattgttgggtttggcttttccgcagcaacctcagcagatacagcaactgcatcaaaccagtgatcacaattcagggcctgtaaaagtggccgaagacgtgtgtcaaagttggatacaacagctgtttttacaccagcctttctcaatgcttcaaaaacatatttagcgtcagggtcgcagagctgccaagcctttgcagttgtatagtactgataaagttcctcaaagtactgtaaatctgagcatccagttgaagagctaactatatgctgccagaagggcctaccatcatccacatacctcagccgcgatctaccccatggctgcgcataagccctcctgtatctcatcaagatctcatcctctgagtagttgactccatacttttcgccaattgttctgtatacctgcgccatgggctcggtgggggcgaggagcgtcccggcggcgtcgacgaggatggccttgtgggtgatgtcgccgtagatggccctccggtagtcgtagtactcccgcgcccccatcggctcccacctcgcgatccccgcggccgcctccgccgtggccgtccccatccacctcccctccccaccaccaccacgtcccaccgccatcgccgccggcccgaccacgagccttgcccccgccgacctcagccgcgccgccacggccat

SEQ ID NO: 64458 - DNA, 168 bp, Oryza sativa
  Clone ID: PAT_MRT4530_655C.1
atgggcctgttcggctgtcatatctgcggcagcgctgcggctgcaacctgcgttgtgcggctgcagcagctgcaacttgctgcagtgcggctctggctgcacacaaggttccagacttgcgaggagaaagactggggcggatccagcacaggggcgacggggtattga

SEQ ID NO: 64459 - DNA, 3413 bp, Oryza sativa
  Clone ID: PAT_MRT4530_65600C.1
atgtccacggcggcgcggcgcggccacccgccgccgcacgagaacggcgtgggcgggcacgccgaccacgagccagacgaggagggtcaggaagtggagcaggagtcggagggggagtgggaggattacgaggaggactagccgcagtcctagtaccagcgattgggcgggagaggccccgcgatcgtcttcaccgacccctccgcggccacagcaatcgccgtcgacatgggcgcgctcgtgacgaacaacggtatcctccacttcctcgacttccagggtaatcaggtaaaggaaattgctgctcacacagcaactatcaacgacatcagttttgatgcagacggtgaatatataggaagctgctctgatgatgggactgtagtaataagcagcctcttcactgatgaaaaactgaagtttgagtaccatcgacccatgaaagcaattgccttagaccctaattattacaacaactatagaaggttcgctacagggggtttagcaggtcaagtacttgtgctgacaaaaaagtcgtggggaggtggctaccataaaaaggttctgcgtgatggcgaaggaccaatccattctatgaaatggaggacagacctccttgcctgggctaacgatgcaggggtaaaagtgcatgatatgaagacagacaaaggaatcgcgtttatagagaggccaaaagggaattcctcggccagagtttttacttcctcagttggtctggcagtcagatataaggaactaatggttttaaacctaaaggaaaaggatgataccatcttagttattggatggggaacaagtgtcaagattgcagcaattcgaacagattcatctcaaggactcaatggcatacagaggagtatcactgcaagtaatgagaagtacgtggatattgtgggttcgttccaaacaggctatcacatatccgggattgctccatttggtgatcttttagttgtgcttgcatatattccagaggaggaagacagagaaaacagttttagcaattctgttccttcacgtcagggaactgcccagcgtccagaaatacatcttgtatcatggaaaaatgatgaacttaccacagatgctcttcctattcatggttatgagcattataaggcaaaggattatgctcttgctcatgctcctttctcaggaagcagcaatgcaggtggacagtgggctgctggtgatgaacctttatattacattgtatctcctaaagatatagtggtcgcaaagccaagagatgctgaagaccatatttcccgttgtaatttgtgatggtgcaacacgatgatgagttatggggttgaagcaggacaaggacgaaccgagcttcttgatgaggtgggttcgagataccttgatcatttgataattgaaagaaaatatgctgaagctgcacgcctctgtccaaaattgttgcgaggatctccttcagcatgggagaggtgggtctttcagactgcccatcttcgccaacttgctgtattagttccttacatacctacagagaatcctcagctgagtgatacagcttacgaggttgctcttgtagctttaactaccaatccttcttttcatgaacttctcttgacaactgtaaaaaaatggccacctacattatactccgcttcacctgtcatatctgcaattgagccacagctaaattcctcttcaatgactgattcattaaaagaggctttagctgaattgtatgtcatcaacagtcaatatgacaaggccctttctctgtatgctgaactcttgaagccagaagtattcgaatttattgagaagcacaacttgcatgatgccattcatgacaaggttgtcaatcttatgatattggatagtaaaagaactgtaaacctattgatccagcatcgtgatacgatccccccgaatgaagttgtaggacagttgttgcatgctagtaaaagttgtgacaaaagacatttgttgcatctgtatttacatgctctgtttgagacagacatgaatgctggaaaagactatcatgacatgcaggtggagctttatgcagagtatgagccaaggatgctaatacccttcctccgtaccagtcagcattacaggcttgacaaggcatatgaaatctttgcacaaaaagagcttgtacgggagcaagtttttgtgcttggtcgtatgggaaatgcaaaggaagctctctctacaattataaacaaattggaagatattcaggaggccgttgaatttgtgatggagcaacacgatgatgagttatgggaggaattgataagacagtgcctccaaaaacctgagatggttggaatgctgttggaacatactgttggcaatcttgatcctttgtacattgttagtttggttcctgatgggctagaaataccaaggttgcgggatcgccttgtgaaaattgtgacagactatcgaacagaaacttcattaagacatgggtgcaatgatatacttaaggttaatattcaagaaaaagatatacttaaggctgattgcgtaaaccttttggtaaaatattatcacgaggctcggcgtggagtctacatggctagtatggacgaggaggacatctctgtcatcgtgttctactgctgccacgcatatcacacgtcttgcctcgaaggcgggttggacttgatgaaatcgaacagtagtactcaggacagcgacgaggatgatgaaggtaccccatcaggcgagtctcgaatgcgctgtgtattgtgtactacagctgctgcataataacttatttcgtaacgagtagtccatatccatgtgttgtgttgtaagtttgagccttgtaattagcgtgttattctggcgtgataaatatgtacaataggttaattctttggggggaagccatatcctcagcaagaggagttttgtgtagatttgacagatatgttgattacttgagcaaagttgtacggcatttttcttaatgccacgagtgccaaaaaaaaaaaaaaaaaaaaaaaaaaaaaaaaaaaaaaaaaaaaaaaaaaaaaaaaaaaaaaaaaaaaaaaaaaaaaaaaaaaaaaaaaaaaaaaaaaaaaaaaaaaaaaaaaaaaaaataaaaaaaaaaaaaaaaaaaaaaaaaaaaaaaaaaaagggggggccctttttaggaatccaaatttccttgcccgggcccgggaaattaattttttttttaagggcccctaaaatttatttcccgggccgcgtttttacccggcgggggggggaaaaaccctgggggccccccctttatgccccttggaaaaaaccccctttttccccgggggggaaaaaaggaaaaggggccaaccaagaccctttttcaaaaaatttgccccccctggttggggaaggggcccccccct

SEQ ID NO: 64460 - DNA, 4110 bp, Oryza sativa
  Clone ID: PAT_MRT4530_65601C.1
atggcagcaggggggggtggggggggcgcggctcgggatcctggggacctgcgccatctggcagccacgaagcgaacccaccgtccactcgccgagttcaggcggcttcgtcctgggcgaggaacgcacgccgcctgctcgacgaaatgcgcgggaaagacgggagcggaccatatgtcccacgagatcgaggaaaaggtgcgcgcgcgtcgcagacgcagatctactcccccgccgcgcccgcgcccctgccgtgaggcaagggagttgaacagtacacaggaaatgggaggaagacccgtctcgcctagcgctccaagacccaaagaattggatttacaaactgagcatagcctagaaggatctccaccacctttcccttggcaaaacagaaggatggcaggagtaggactggtagttggaggatggattgcaaaggcagtgattgccaatatcttgtccagagtacgctccctcctccacgataatttcagtctgcaaaaggacactgaaaaaatgctgaatgacttggaggttgcgcttcctcgcattgaggcggtgattgaagcagcggagcggagatcaattgaaagcagtgccctttccacatggttgcagcagttgaaggatgctgtttcccatgcaggagatgttgttgatgattttgaagccaagacaattaaagatcaggtcgaaagcaagagcaaggtcagtgcaaaggcatactctaccgtcaaggctttaaaggctttggtcttttctgatagtgaattgaagaagctgaagcatgctgtaagaagacttgaaaatgtatcagcgagagttgattctttcattgaattgatcaggctaaatgatgatgatacagtgggaaggattggccatagcttgcatagtgagaccagctctttacttggtgacaccaaagtaattggtcgggatgaagaaattaacctgatattggacatcatattgggttaccgctaccacttgccaagaactagtgagcatgcacgacctgatgatcaaccaaaatttggtcaaaggggaacactttttgataaattacggaagattttccttactggaactgctgaatctagtaaatcgagtgataaggctaaacttgaagaattagaagcaagaaagaaggggaacaaaattgaagaagaagatcctagcaaagattgcatagaaattggagaatacgaacctaatcagaagggacaaactgaaagattagattataatagttctgatgtacatgaaaccagtggttcatctcaaaaccttggcatccttcccatagttggcattaatggagtgggaaaaacaactgtggctcaagctgtcttcaacaataagagggtaaaaatgtgctttgatctaacagcatgggtttatgtgtcagacaacataagtgggaaacaaattatacaaaggatcatcatgtctttggaaccatggagtggactaactgatgatgcacttgatttggataatcttcagcacaaacttattggtatcataagatctaagagactttttcttgtacttgatggtgtaagtgatgatataatcattgtatggagtcagctacgaagcatcctacgctgcagtggacctcaaagtatggttttggtgacaacccagaagtacagcatagcgaatttgctagggacaatgggtccaataactttgaataccctagaacagactgacttcaggtatctctttaaccaccttgtgtttgatgactgcttctatcatcattatgaagtacacctctttgaatcaatatgcggaaaaatagctgataagttccatgggctgccgttggcagccaagacagttgcaccactattaagggccaatagaaatatggaatattgggaaaatgtcctgggaagtgattggtggaatatttctgatcatggtttgggaataaacgttctgccagccctaggaattggctgcctatatccagcgctaaggcagtgtcttctgttctgctcaatatttccaaggaattatgtctttgaaaaggaaagagtggtccagatgtgggtggcacatgggttcattcagtctagtgatagaagggatatcgttccagagaatgttgctaaaaattggtttgatgaactagttgataggtccttcttgcaaccaacagtctggcaaggccgttacgtcatgcatgatttgataagagagttctcagttgctgtttcttccaatgaatattatgtctttcacaggaattccaaggttcttccacaatttgctaatcatatttctgttgataatgataatttcgatcttcaatggggtcattatgatcataaaagattacaaactctgatgttttttggtcatcacagggttgacaaaaattatggcactcttggtagcatagtgagaaagtcaactagtctacgtgtactggatttgtcttacatttgcatgagtaatgtcagtcaggcttcagatgttctctgcaagttgtcacatcttcgatatcttgatctctcttttactggtatcaaagatctcccggaggcatttggtaatctataccatctccaggtacttgatctgcggggttgtataattgagaagctgccaaagaacatgaacaatttgatcaatctaaggcatttatatgctgattcacaaaccaccgcactgatctatgctgtaggccagctgacaaaacttcaggagttacaggaattcagagttaggttggaggatggttacaagataaatgagttaagggacatgaaagacctgaggaaattgtacattacaaatcttgagaaagtctcaagttggcaagaggctacagatgcaaagctggtggagaaaaagtcccttgactatctgcaattgaaatgggtgtaccaggtacctgaaagtaggtctacctctcagttgaacaaggatattctcgatggcctacaccctcacttccagttgaaaaggttgaaaattctgaactatatgggaattgattttccttactgggtgcagcgtctcacagacctcgttgctgttaacataattaactgccgatggttgagtgttctgccaccattgggagagctcccacgtctcaagaaactatctctttttggtctatcctctataactcatattaatgatcaagtatacggaaccaatgatgtgatctttccatatttagaggagctgcacttctcagaattgtttagctgggagcaatggtccgaggcagaatataaactgcttattcctcacctacggaaacttggtataaatgcctgcagcaaattaagtctattgccgattgaaactttgagttcatcagtcaaagagcttcatctttcttcatgcacatcatatatcagtatgctgcccgcttatttgaaaagactgacgtccctcaccaaattgagcatacaggactgctctgccacattactaatcccgtgccattccttgacattactggagcacttgcagctggaaagctgtttcgatgtacattttgaagggggcatgcagtactttaccaaactgaagaagctagaagtacatcgctgctttgatgtcactcagaacatatatgaacaaacatcactagtggagagatattctctgatggggggtcttcagtccctcatccatcttgttatcgacgacagattcatgtattacagatactaccatatgctgaacactctttgttcaattcgaactatgaagttttgtgcctttgatctttccgagttcaccacggaagacgaggaatggctccagcaactacagtccctacaggagatccagtttgcttcatgtcgcaatctcttacgccttccttctaacctgaataatatgtgtaacctgaagaaggtcgttctgaacgattgctgcaagctccagtcactgccgctgaatggcttgccagataacctaaaagaattccatgtctcaggaggttctgaagtactggagcaacaatgtcagaaaacagatggggatgaatggcagaaaatttctcatgtgccatacgttcggataaatggcagaactatccagatgatttcacatgatcttggaagttag

SEQ ID NO: 64461 - DNA, 787 bp, Oryza sativa
  Clone ID: PAT_MRT4530_65602C.1
tcatcttcttcctctctttctttgttcatcttcttcatcttctctctttctcattgcaccgccaccgagctccgccgtggccgagccgtcgtgcgtcgtcgccgtcgacagtgaacctcggcgatgcgccgccgccgcctcaccgtggccgagccatcccatggtgaccccatcgtggccgagccgtcctagttgcgagccacgatgcgttgccgccgccgccaccccgccgcggccgagccgtcgactgagccgccccgccgccactgccatcggcgaggacgaagaagccgttgagaagtgcgcgcgcttattggggctcatctcgccggagagcttgaagatgggggacttctgtggtggggattggaacatagggttggtgggggcggcggcgcctccgcgtgcgacgagggagaagaggccggagaaggggaagtcccgccagaggcgtcgcgtggcaacgacgcagtcggcggcggcggcactgccaagcgtgcgccgcgctggcggtgagacgccggtgctgatgagcggcacgaggcacgacgcgatggcgatggtgaggctgacaaaggtcaggatgctgttcgtgcggtgcggtggcagcgtgaggcactcgtcggaggagtctgtgttggacgacgacatctgggccgccgcgaggaagaaggggaaaagaaaagaagagagagagaggaagaacagtgtcaaaggtgggcgggctaaggtgagatcaaggctaagacgagagtgccatcaaacgtcgaattcttcgtctggctag

SEQ ID NO: 64462 - DNA, 199 bp, Oryza sativa
  Clone ID: PAT_MRT4530_65603C.1
aaataaaccatccttaatcttggcgggcccaggtggtgccttcccctcctttttaatcgaacagattaatttacatgacgggtacctcacgttggggggcgaataacccgcgcttaatgctggcgaccggagcctgaccggaactgaaccttttacccgggggtggtggggtcattacaagtggcctgattacctggag

SEQ ID NO: 64463 - DNA, 178 bp, Oryza sativa
  Clone ID: PAT_MRT4530_65604C.1
gttagacgagcgatcaagtttttgaggagcacgttcttcacacggctgctctcggcactgcatctccttccactacatcaacatgtcgcccgtaacctgaatggcagcaacggaggtggaggcgagaatgacaatgacaacggcaatgaaggcaacaacaccaaccatgcctcatcca

SEQ ID NO: 64464 - DNA, 589 bp, Oryza sativa
  Clone ID: PAT_MRT4530_65605C.1
cgggggtcgtggtattactcagtacgcaagttattcacccttcatcattgatatttgatgacgatgacgacgcgacggctggaacccataggaagcgcttaagtttacatttaaacttcgattcttctaagtgaagtactagcgaagcacgtaagagctaacctgaactgcagtactggttgttttgttaagcttactagtgaaagcattcttattttctgacagatgaagacgactatgattaagcggttactgtctgaaaaagtataccagtatcaagttttgtttctattcttttctgtctgcagcttatgagccatttctagtactagttgggtcatatactcatacttctagatcagaaacttgggtgattgggtctatctgaattctgaaataggctgctgcgactgtttctattgcagtgccattttttatgtgctgggaaatgtttcgtttgtcgtaacttttcttcccccattttgatccacacgttgcttcacgtttactgttggaaatggaatttatatgaattcatatggaattttcacatgttgcttttgtactactaagaaaaaaaaaaaaaaaa

SEQ ID NO: 64465 - DNA, 1152 bp, Oryza sativa
  Clone ID: PAT_MRT4530_65606C.1
atgtcatcacacggcgacggcggcggcggcggcggcgggaaacggcgcctgtacttggtgctggatgactccaagcacggctacggcttccgcagaatcgatatggacgagtactacttcgaagccgacgactccggcgacgacagcgcgttagagaggatgacggagtatctgccttcccgccggtgtctccgcgtgaaggcgccgcgtcatcaggcgatgctcttcaaggccctcggcaccaagatcatcgccacacacccgtcgcccacccgcgccgccatcccggcctacgatgcccgggcacaggcagtctccgccggcccagcttggccgccgggtgagggtgacagcacgctgccgtcttgctcgaccgtcttcgtccccgtcggcgacaggctgtacgccctggacggcggcggcgacagcggccgcgccgtcagcttccaggtgctcttcccgagcggcggcgacgggtggtggtcgtggagcagcgtcgcttcggcggcggcgccgccgttcgacccgtcgaggatcacgtcctacgcggcgcaccccaacggccgcgccttcttcgtgtccgtggcgaggaaggacgtgcccttcttccccacgttgagccgtggctggccgtggctgcacgcgggctccaccttctgcttcgacacggagagcttggagtggaccgactacggctgctggatgctgccgttccagggtcagggacactacgacgccgagctggacgcctgggttggcatctgccgccacccggacaagcccggccgcctctgctcgtccgacgtcccggccccgcgcatcagaggccgggacagcaggtggcgggtcccgtcgtgcaagatcggcaaggacgtcctcttctgcaaggacaaggagcggcaccgaggggtcgctctccactacatgggcagcgacagcaacttctgtctgctcgagtgcgtggagcagccggcggcgacggcgagtcggctcatgtacgtgcggatgttccgcctcaagtacggcaaagacggagggcttcggacggccacgctcggccgctggggccgctgcttccttctgcctcccgaggcttccagcttcgacgtgatggatcaaaagatcacggcgttcttgatgtgtataacttaa

SEQ ID NO: 64466 - DNA, 1290 bp, Oryza sativa
  Clone ID: PAT_MRT4530_65607C.1
atggcatccgccgccgctcccgagatccaggagctcatccaccacccctacgacggccgcgtcacctccttcgtcgtcctctcctgcgtcaccgcctgcctcggcggcatcctcttcggctacgacatcggcgtctccggcggcgtcacgtcgatggacgccttcttggagcgcttcttcccggaggtgtaccgccggatgcacggcggcggcgagcgcgtcagcaactactgccgcttcgacagccagctgctcaccgccttcacgtcgtcgctctacgtctccggcctcgccaccacgttcctcgcctcgcacgtcaccgccaggcgcggccggcgcgcgtccatgctcgtggcgggggcggccatcgccgccggcgccacggtgggcgcctccgcggcgggcctcgccacggtgatcctcgggcgcgtcctgctcggcgtcggcgtcgggttcggcaaccaggccgtgccgctctacctgtcggagatggcgccgccgtcgcggcgcggcgcgttcagcaacgggtgcaaggtgacaacgaggcgcgggctgacgctgatgctcacccaccgccgctaccggccgcagctggtcatggcggtgatgatccccttcttccagcagatgaccgggatcaacgccatcgcgttctacgcgccggtgctcctccgcaccgtcgggatgggcgagagcgtggcgctgctcgcggtggtcatcaagcaggtggtcggcatcggcgccacgctggcatccatgctcgccgtcgaccggttcggccgccgcacgctgttcctcgccggcggcgcccagatggtgatctcccagctactcatcggcgccatcatggcggcgcagctcggcgacgacggcgagctgagccaggcgagcgcgctgctgctgatcgtcctcgtcgccgtctacgtcgccggcttcgcgtggtcgtgggggccactgggatggctggtgccgagcgagatcttcccgctggaggtgaggtcggcggggcagagcatcgccgtggcggtgaacttcctgctcacgacggcggtggcgcagtcgttcttggccatgctttgccacatgaaggccggcatcttcttcttcttcgcggcgtggctggtcgccatgaccgccttcgtctacctcctcttgccggagaccaaggggttgcccatcgagcaggtcgggaagctgtgggcgcgccactggttctggaggaggttcgtcgtccccgactccggcgacggcgaggaggaaggcggagccattgatgccgataagctctga

SEQ ID NO: 64467 - DNA, 2391 bp, Oryza sativa
  Clone ID: PAT_MRT4530_65608C.1
atggccaacccaaccaagccaagtagccgcacgacccaaccaactgcgccgccgctgcgccctcgtcggctggctcctcctggcgagtggaatggcccagttttgctactactgttgcttccgacgacacagggagagaggaactcaacactcgtcggattcggactctctgcggcaacaggtttcagtagaagcagtgatctgatggcgacctgcatcgtagccagcataatgagcataggcaggctagctacggctttgtgctctgcaatcttgggagctttgcataagctctcagctcttcctcacatcgaagaagaacatgttggcgtgctgccatcgatggtggaggctgaattgccgcatctgccggaggatttgctggtacaaatactttcccgcttggagatccctgacttgctgcgtgcgagctccgtctgctcctcttggcactctgcatacaccacactacacagccttggacaatataaacggcaccagacaccttgcctcttctacacctctgaatctgccggtaagaatgtagggtgtatctacagccttgcagagcagagaacctacaagattactctcccggatccacccatccgtgatagatacctgattgggtcatcagatggttggctggtaaccattgatgataagtgtgagatgcacctcctcaacccagtcactagggagcagatggccctcccgccagtgatcaccatggagcaggttaatcccacctacgacgagtcgggcgctattgtcaagtatgagaatcggagccagttctggcacgacggagtgatgttttcctcaaggtcaatgggatccatcatttctcctagatggcagcagttgttcctcactgggagggcttttgtattctctgaaacatcgacaggaaagctccttgtggtgcttatacgcaatccattcggtcagctctcatttgcaagagtaggggatgatgaatgggactacctgccagagtacggccgatatgaagactgcacctacaaggatggcctgctatatgcagtcactacgttgggagaaattcatgcaattgacctcagtggccctattgccatggtgaaggttgttatgggaaaggtcatggatataggggatggtgacagaaatacatacatacttcacgcgccatggggtgatgtgctgcaaatctggaaaacagaagaggacgactacattcatccgtcagaagatgattatgatgccattttgaagaatactgcaagtatcgaagtatataagtctgacttggtggaagaaaagcttgtgaagatcaatcgcttgcaagaccatgtcctgtttgttgggcataaccagacactttgcctccgcgctgaagaatttccgtctctcaaggcaaatcatgcctacttcaccgatgacagccagaattggataacagaattcaagaataatagacgtgatattggagtattcaacttggaagataacagcagggatgaacttgggtctcctcagctttggtccaactggcccagtccgtctaatgccaatttgagaacgcgtgaatggcagcacggtggtaacccacctagttgtggggttgctgaccagggttcagtctctgggtctcaccaaaaaaaaggactaggagtttacgtgatgaggttgagaactaaaaaaggattttcatcatctcatgggcctctgagcccgaataccacctgctccattaccacacgctgctttctttctcttcttcttcctcatcgcgtcacctcctctagttcgcaactcgcatctgctttcttttgagttggtgttcgtagtaagaggaggaagctgaagatgagcgatcccaagtacgcgtacccttacccggcgcagggctactaccagggcccgtaccaggggcctccggtgatggcgccgccgcagtacgccgcgccgccgcccaggcggcagcctagtttcctcgaaggctgtttggctgcgctttgttgctgctgcttgatcgacgagtgctgctgcgacccgtcgattatattcgtcagctaaggatgcatccatcgatcgacctggcttggcctcaggtcgcatctattgtacagacacggcagcacggcttgatcctcaagtcctcatcaaggatgcagtattaatctgcttctcgaattgttttatgccagcttattgcttacagctgctgctgcttcctatatatatatgtactgtgtcctatcagtgtgattaataaacgactgtgtcctcctttaattactaaaaaaaaaaaaaaaaagctggttcgctttgtttgcccttgtgtttagcatcatgttcatttggatcgattgaaatattagcactattaaaaaaaaaaaaaaaaaa

SEQ ID NO: 64468 - DNA, 618 bp, Oryza sativa
  Clone ID: PAT_MRT4530_65609C.1
atcctgtatgagtatcttcatgttgcaacagaagagaaacgagagttacacttgcttggatagcagagttctgaagttttgtaatggaagctaaatcagatttttcagatgttttaaatttatttgcttccaacatgagttcacgcaccccacgtaatttgaatttgcaaatcgaagtgtgcaacaaagcctagcactcgatcgtcaccgcctcttgggaagctgaaacgcgcgcttcaagtagtggctcgccacctcgtcgtcacggtggcagagcacgcggaggatcgtgtccgggtccgtgcggctccaccgccatgtcgtctccggcaacggcatcctctggccggcggagctcgccgtgccgttcaactcgcacgcgatgctcagctcctccacgagctgctccgccgtttgccccatgagcgccacgacgctctctgccgcctccgcctcgccgtcgaccacctgctcggtcaccactccctcgccgcgcgtgcagaaggcgcgcttcaggctccggaagtcctcctccaccatgccgtggtcctccttcgtgaagcttctgtcgccgccgccggcgacgaggacgagcaagaacgcctggaacgaggcctt

SEQ ID NO: 64469 - DNA, 433 bp, Oryza sativa
  Clone ID: PAT_MRT4530_6560C.1
ggggaaaaagggatgaaggatacaattttttaccagatttggggttatttacacatgaaatggaccaacgacccttcaaaaagggggtggtggtacttaactggggggaggttattaggtatttaggacaaaaattttaacgagggaaaaactgtttggactaaaaaattttttttgaaaatccggtttcctgggaattttccttgagttttttgccatggggaaaaaaagagcttggatgtcctaaccccttaaaaaaagaaccactggactggatttggaggttcagggtttaaaaatttgggggataagggaggttttctatttgaacttcccgtccttgatgggggggtttttaaggaacaccaagattcccgaccttatgtagaaccctttctaaaggcgataacttttttggaaaaccttgttgttt

SEQ ID NO: 64470 - DNA, 1822 bp, Oryza sativa
  Clone ID: PAT_MRT4530_65610C.1
atggcgccctccgccgccgctcccgagatccaggagctcatccaccacccctacgacggccgcgtcacctccttcgtcgtcctctcctgcgtcaccgcctgcctcggcggcatcctcttcggctacgacatcggcgtctccggcggcgtcacgtcgatggacgccttcttggagcgcttcttcccggaggtgtaccgccggatgcacggcggcggcgagcgcgtcagcaactactgccgcttcgacagccagctgctcaccgccttcacgtcgtcgctctacgtctccggcctcgccaccacgttcctcgcctcgcacgtcaccgccaggcgcggccggcgcgcgtccatgctcgtggcgggggcggccatcgccgccggcgccacggtgggcgcctccgcggcgggcctcgccacggtgatcctcgggcgcgtcctgctcggcgtcggcgtcgggttcggcaaccaggccgtgccgctctacctgtcggagatggcgccgccgtcgcggcgcggcgcgttcagcaacgggttccagctctgcgtcagcgtcggggcgttcgtggcgcagctgatcaacttcggcgcggagaagatcgccggcgggtgggggtggcgggtgtcgctcgccgtcgcggccgtcccggccgcgttcctcgccgtcggcgcggtcttcctccccgagacgccaaacagcctcgtccagcaaggcgaggaccacggcaaggtgagagctctcctgagcaagatacgaggcagcgacggcgccggagtcgacgacgagcttgacgatatcgtcgccgccgacaggtgcaaggtgacagcgaggcgcgggctgacgctgatgctcacccaccgccgctaccggccgcagctggtcatggcggtgatgatccccttcttccagcagatgaccgggatcaacgccatcgcgttctacgcgccggtgctcctccgcaccgtcgggatgggcgagagcgcggcgctgctcgcggtggtcatcaagcaggtggtcggcatcggcgccacgctggcatccatgctcgccgtcgaccggttcggccgccgcacgctgttcctcgccggcggcgcccagatggtgatctcccagctactcatcggcgccatcatggcggcgcagctcggcgacgacggcgagctgagccaggcgagcgcgctgctgctgatcgtcctcgtcgccgtctacgtcgccggcttcgcgtggtcgtgggggccactgggatggctggtgccgagcgagatcttcccgctggaggtgaggtcggcggggcagagcatcgccgtggcggtgaacttcctgctcacgacggcggtggcgcagtcgttcttggccatgctttgccacatgaaggccggcatcttcttcttcttcgcggcgtggctggtcgccatgaccgccttcgtctacctcctcttgccggagaccaagggtttgcccatcgagcaggtcgggaagctgtgggcgcgccattggttttggaggaggttcgtcgtcaccgactccggcgtcgacggcgaggaggaaggcgaagccattgacgccgataagctctgaacagttaaccgtgcagatcactgactgactatctgattgtctgactgatccggccacggttgtttcagaacagaactggctatatccaacaacatgtgaagactagctagcagcacattttttagctggatttaagtatgtaacaatacatatttgattacacaaaccaatgcttaaacaagcatttagtagtaacttccttttgttttggaggccttacaatcatactagattatacatgtataac

SEQ ID NO: 64471 - DNA, 545 bp, Oryza sativa
  unsure (1)..(545): unsure at all n locations
  Clone ID: PAT_MRT4530_65611C.1
cttttgctcaatccgaaggcgcagcgctgttccggaaggcgtgcatcggctgccatgatatgggaggaaatatcctacagccgggcgccactctgtacatgaaggatcttgagagaaatggagttgccacggaggacgagctatacaatataacgtactacgggaagggaagaatgccgggcttcggagaaaaatgcaccccgagagggcagtgcactttcggacctcggctggtcgaagatgatatcaagctactggccgcgtttgtcaagtcgcaggctgaaaatggctggcctaagatcgacggcgatggagattagttcacccgacacaacagagacaaggnggcaaacattgttcagtgaaccagtgtatagttttggagtcaggtgtgctgtttgcatctgtaaaatcccaacggaatccatacaaataaaaagtagcttaaggccggntttaggatttcaacttttttttcaaactccccactttttccgcacatcaaatgtttggcacatttatngggcatcaaatttnggccggaa

SEQ ID NO: 64472 - DNA, 497 bp, Oryza sativa
  unsure (1)..(497): unsure at all n locations
  Clone ID: PAT_MRT4530_65612C.1
cttatgtaataagtgctcataagaaaagctttatatgggctgctaggaaccaacaacatacattagaattcagttagaaaacttagagacacctggcaatagcttactaggacttatggattaccctagctgaaattagcctctaggcaatagagatatanagctgaaacaatactnagttactagtcgtaacaatcctagatactgagatggatgcctggaactcgaattaacccactgcttcttctcgaggtagacttcaagtctcccgtttattctgcagacgcctgatcacttcaggagcctcatcgctgatgcttatgacagctgatttactggtggcggggattgataggagttcacagatggtgttgtcgatcctccatacgaaaatataagacattatattatagaatgagggagtatcttcattttattttggttgcgctgaaacatgcaacacagcatgcatagatggaactaattggcagagacca

SEQ ID NO: 64473 - DNA, 386 bp, Oryza sativa
  unsure (1)..(386): unsure at all n locations
  Clone ID: PAT_MRT4530_65613C.1
cttgggtgcaggatccgggttcgaagctcgtgccgaattcggcacgagcctanttcgtcttctttgctggtgtgttcgaaggaaggaaggnagggagggagggacnccccctngnagcanaaagacgggcggggctttacctgcctggcnaaanccggggggganngggaggnggncctctccncannataaattcccccncccgggnnaggggcncaannctnggnatgttggnnggaanntgattntccgntnagcnncgattnncgggggattacggcggnggggnncctnaacgcnattcgggcccgttntccgaggnacgcctngggntntgttnttgannntnggccccacgtcngnngggngaggcgcgncgnngtgna

SEQ ID NO: 64474 - DNA, 150 bp, Oryza sativa
  Clone ID: PAT_MRT4530_65614C.1
gggagtagcttgccagtcggctgcgcgcggaaggaggagctcatcgaccaagtacacaagcggggaggacctggcctgtcgggcacgcacaggggaggtttcactagccgcaacttgcgcagggaggagcttgttggccggtcgcgctag

SEQ ID NO: 64475 - DNA, 789 bp, Oryza sativa
  unsure (1)..(789): unsure at all n locations
  Clone ID: PAT_MRT4530_65615C.1
ccggccgggttaataccgtttgtttgatggggtatgctcgtgtacctattcttttactaagaattgtattctgatgtattattccgtttgtttcgatgtgggaagctctgaagagttcctttgctaatggcccttctggttgatgtagatatctgctgcattatgtcctaacatatggatcacacgacaatgttatggttgtcacgggcttatctctagctttcttgcttgttatgttagttggcattggtgagtctccaaatttctctatgcaacactcttagagttacgtcgttcaaaaaacactcttagagttactagtnatattgatgatgtggtttattgaaattgataggacggatatatttgggcatgcacagcttgattgatgttattgctggcatctgttttggcgttgtaatcctggcattctggttggctgtccataatcatgtcgatgcttttgttgtctccggtcaaaatggtatatctatacgncctctgagttttgtctgataggtgaaatgtaattttggaaggcttattctcgttatcttttcccttgcagttacaaccttctgggcgagcctttcctctgttgctgtgcttcgcatatccaaaaccagaattcccaactcctagctttgagtacccacagatttcaatggggtggcttttggaaatttgtaagtcttggtgactaatgcctgggaatccaaaatctttagtagctccaaacttgctggcatcatagtggattctggtcacattttatatattatctaccat

SEQ ID NO: 64476 - DNA, 577 bp, Oryza sativa
  Clone ID: PAT_MRT4530_65616C.1
agtccatacagttttgtctggacagctgctgggaagcaagctgatcttgagaagcaagttggagttggtggttatggctatccagcgatggttgctctcaacgtgaaaaaaggcgcatatgctccactccgtagtgctttccagcttgatgaaataactgagtttgtgaaggaagcagggcgcggtgggaagggtaatcttcctttggacggtaccccaacgatagtccaatctgaaccatgggacggcaaagatggtgaggttattgaagaggacgaattctcccttgaggagctgatggccgacaactctccagtaaatgacgagttgtgattctgataattccggaaatgatgttagagttgattagccagactgtaaatctgagtaacactaatgcttcactcgtgtcaactgtacaatttgggcgggacaattttcagaatgctcctttggtgttattacagtacattttagttgaagaaaaacatcgtttgtggtcttttaggagggatgcttttctctgggaaataaaactacttcgtaagcaaaaaaaaaaaaaaaaaaacccgcggcc

SEQ ID NO: 64477 - DNA, 206 bp, Oryza sativa
  Clone ID: PAT_MRT4530_65617C.1
aggataaaaattattctttctggggccgcccaaaaggagggttacatcttcccttctttcaccattacataaggtttagcaatagcagataacaaatcctcctcctactttaggggaaaaattcaaacacaattttcttgtaaggggggattttcaggaaaagagcgtgcctgggcattaatgggaccggggggcgggttaaaaat

SEQ ID NO: 64478 - DNA, 1633 bp, Oryza sativa
  Clone ID: PAT_MRT4530_65618C.1
ccggccgggaaggtccacctcctcccctctccactccttctagaaccttctcgaccccgccatgcgccccgcggtcgccgccgccctcctcctcgtcgccgccgccgtcgcggcctcgccggtttccgccctctactccgccggctctcccgtcctccagttcaaccccaacaacttcaaatccaaggtgctgaactcgaatggggtggtgctggtggagttcttcgcgccgtggtgcgggcactgccagcagctgacgccgatttgggagaaggccgcgggcgtcctcaagggcgtcgccacggtcgccgcgctcgacgccgacgcgcacaaggagctcgcgcaggaatatggaataagaggatttccaactattaaggtgtttgttcctggaaagcctccagtagattatcaaggagcaagagatgtaaagccaattgttgaatttgctctttcacaggtcaaggctcttcttagagatcggttgaatggaaagacatcagcaggttcaggtggcaagaaatcaggtggttcaagtgagaaaactgaaccaagtgcgtcaatagaattaaattctcaaaacttcgataaacttgtcaccaaaagcaaggatctttggattgttgagttctttgcaccatggtgtgggcactgcaagaaattggcacctgaatggaaaaaggctgcaaagaacttgaagggccaagtgaagctaggtcatgtggattgtgatgctgaaaagaatactaattcaagtgtttggtcagttgataaaagttaccgatctttgatgagcaagtacaaggtagaaggctttcctactattttggtatttggtgccgataaggagagcccattcccttaccagggggctagagttgcctctgctatcgagtcctttgcattggagcagttggaagccaatgctgctccacctgaagtttctgagttgactggcccagacgccatggaagagaaatgtgcttctgctgccatttgctttgtatctttccttccagatatcttggattcaaaggccgaaggaagaaacaattttgtctggacagctgctgggaagcaagctgatcttgagaagcaagttggagttggtggttatggctatccagcgatggttgctctcaacgtgaaaaaaggcgcatatgctccactccgtagtgctttccagcttgatgaaataacatgtttgataacaaaaccggtctcctgcagtgagtttgtgaaggaagcagggcgcggtgggaagggtaatcttcctttggacggtaccccaacgatagtccaatctgaaccatgggacggcaaagatggtgaggttattgaagaggacgaattctcccttgaggagctgatggccgacaactctccagtaaatgacgagttgtgattctgataattccggaaatgatgttagagttgattagccagactgtaaatctgagtaacactaatgcttcactcgtgtcaactgtacaatttgggcgggacaattttcagaatgctcctttggtgttattacagtacattttagttgaagaaaaacatcgtttgtggtcttttaggagggatgcttttctctgggaaataaacctacttcgtaatctaaaaaaaccaa

SEQ ID NO: 64479 - DNA, 339 bp, Oryza sativa
  Clone ID: PAT_MRT4530_65619C.1
aattcggcacgaggaaaggcggggcgcggcgttgtggaggtcgtccgcctcgtcgctccgtggcttcacgmgccgccagcgttctcctcttggtcgccgatgagaggaagatggcggtgccggatgaagaggaggctgcagcgagaaggaagatggcggcggtggcggcggcaccttgctgttggcgcctgaggaagagaaggccagatccgccgttgagctcccgcgcgtcgtcccccgccggccgggcscgtcccagctcgagcrgaggagctcgggccgccgcttgactgccccgccgcccgvgccgtccagatcgaccgmaagattgtccgcccc

SEQ ID NO: 64480 - DNA, 3234 bp, Oryza sativa
  Clone ID: PAT_MRT4530_6561C.1
atgccaccgaaggccaagaagaagcagtccgcggcgtcgccgcagccgtcccctcgcacccctgcatcccgcggccgcgaaggtggaagcgtcgccgcgggcggcggcgacggaggaggaactctcgacctcccgtccgtcgccgcggcggcggcggcgcggcacccggcgctcgtgccccgtggcggcgaggggtgcttctccgggaccgtcgcggaagtggcccccaggggcaggagccgcggcggggaggcgaggctctggctctccgagcccgccatggtcggcgccgcgctgcggcctgggtgcctcgtctccgtatctctcatttcttcaaataggggtcgatcagatggttcaccacttgatagtttatttgaggagtgcaacgagttctttgatcttgatgtggataatgatctcatgcctaatgaagctggtcgaaactttgtgattgccaaagttttcccctcacgtgaggtccaaaagaatggtatcaagctgtcttgggaccttgcttgctccctgggaaatccttcagtaggttgttccttgttttttagccccctatatacatctcaggccccaaaggaaactgatagtgttgacattttacgggtgataaaatgcagcaatctttaccttagttttgtcccagctaaagttggatcttccagcgagattgaatctgagtctgtacaccatcctataagaaatggaatggttatagaatcacctaagagaaattcttcagttctgtcaggcaggaatgagtcctatgatattgcatcccacagtggcccttcattgtgtttggatccagctactgcaagatcatcattagcagatgagaaaattaatgagttgctgcagacttgtgcatcacgctggctcagtggtaggcacctactgaaagcaaactatgttcccctcctgatgtgtgggaaattgtctatgtttattgttatgggagcagaagtagatggttctgctcctgatgtggtgcatgataaagataagttaccgtctaatgaagagatttctggtaaatttggggaagcgcctgtttcattccttgttgacagaaccacgaaagtgcatctttctggtccagtctgctcagaggagattgcctttgttaagccaggcccatcagcacacaattcctttcgtactgatgcaagaaacggagatttcaatcacggtccaagacttggtgggctatccaaagaatcaaaagaaataaaagaaatcatttcattttcaatcaaagaccaaattggcttgcaaagggtcaaagataacctctggtacagaggtatccttctttctggtccacctggaacagggaaaacctctcttgctacttcttgtgcctatgatgaaggagtcaatctttttacaatcaacggaccagagatcattagtcagtattatggtgaaagtgagcaggcactttatgatgttttcagttcagctaagcaagctgcccctgctgtgatatttattgatgaattggatgcaattgctccagaaaggaaggatgggagtgaggaattatccattagaattgttgtcactctgttaaaactgattgatgctatgagccctagagaccgtgttctcgtgattgctgcaacaaatcgacccgatagtattgatccggcattgaaacgcccggaaaggttggaccgaaaaattgagataggagtaccatctccagtacaaaggctggacatacttcaacaccttctagttggagttcagcattctctcagttgtgagcaacttgagtcccttgcttccgctactcatggttttgtgggtgctgatcttgctgccctctgcaatgaggctgcgttaagtgctcttcgccgttatatcagcctaaagaagagttctcaacaactagggtattatgacaataatgcagaaaagcctgatattagagagattaatgatcctttggggtatcaagtaaactcaatagcatcctctctctcaaagttaacaatgtcagtggatgatgtcctgtgcaccagtaggagcaatgacacagaaaacaatggatctagtggcaagaaagatgacttgctcttgttagtgaccactgaggactttgagaaggctaaaattaaagtgaggccgagtgcaatgcgtgaggtatcacttgaacttccaaagatacgatgggaagatgttggcggccaagtgagaatcaaggagcagttaatagaagccatcgagttgccacagaaaaacccgaaagcattcgaaaacatgggggtcagcccccctagaggattgctaatgattggaccacctggttgcagtaagacattgatggcccgggctgtagcttccgaggcaaaactaaacttccttgcagttaagggtcctgaacttttcagcaaatgggttggggactccgagaaggcagtgagatcactatttgcaaaagccagagataatgcaccagcaatattatttttcgatgaaatagatgggcttgcagtaactcgaggccgtgaaaatgatagcgtatcagttggtgatagggttctcagtcaattgctagtggaaatggatggtttggagcaaagaattggtgttactgttattgcagccacaaatcgccctgacaaaattgattgtgcacttctgagaccaggtcgtttcgataggctgcttgatgtgcaaccaccagatgaggctgatcgtgtggatattttccggatccatacacgcaacatgccatgtagtcatgacgtcaatctaaatgagcttgctagacttacagaaggttacactggcgctgacataaagcttgtctgcagggaagctgctattgccgccttagatgagaacattgatattccagaagtagaaattagacatttcaagtctgcaattagcagaataaagccatctgatgttaaattttaccaagaactggcggcacagtacagcagattcgttgatcctatgtcgcagagtaaacaatgatacttggcagtggacggtaaggcacatatttgaacctgccactttgtagcccattagatatttgtgtgtaaatagagaagctaagcttttgttagttaccagttacgcagaaaaaagaattaggcaacatcacatttccccattgcttcagagcacctatactgtttgtagcatttttactcttgagaaacttggccagtgctaaaaaaaaaaaaaaaaaaaaaaaaa

SEQ ID NO: 64481 - DNA, 1488 bp, Oryza sativa
  Clone ID: PAT_MRT4530_65620C.1
atggcttctgccgttgctcctgacatctggcactggaccagaagcctccccaaccccaagcactggaggggaaaatcctactatcttcaaatctgcaactctccatcaacaaaccagtctctgaacctcatcatcagctggcactctgaaacccaatccttcaatctgtcttactccatctgtgctgaacaccatgatccagtctcactctggagctcccattattccagattgaaatctgttaatggctcagattttgccatccatttcttccacgatatcatctgcggggtcctcaggtatggcccttactccaacaagatgtcacccttcaggctgccaaatgttcaggtatctgaagatacaggcaaaatcttcaacctggcagcactcactcttgcactcatggtctgcatctacgaagctccgtccaccctccgacgagacctcatcggcacggtcagtgcgcagctgatacgcggcgacatgtggggtgctgcgaagaagctgatgcttgccatggggtcagacatggaggagcagtggatgcggtcactgaacctcgccgtcaccaactggatcatagagactcgccggtcaggtggcacgccggtgtcgcctttcacggtcttctcctacgctgtctcggcgatcaggctgtggaaggtggagctgtactgcccagtggtcgccatgatcatggagcacccggctcatcagacgaaagatgagaagctgcagttctcgctgaactaccagcatctggaggccgtgatccagttcatctacagagtcaccttcagggagaactggatcgacgtcaccgtcaacgtcgacaacataaggtgcgacctgatccagctggtgtcggagacgctgatggcgaagcagggctacggctccgacgagaagcacttcccgtcgcggatatcactgcagctgacgccgctggtgcagacggacatcctctccctgacagtgagccggtcgacggacaaccccgcccaggaggtcgacacagagatgggcctcgacgcgacgctcagcgcagcaccggcgaccatcggcatcaccatgtcggcgcacgagacggtgacgaggacactccggccatggaagttcgagcactcggtgcacggcaacacggcggcgctgaactggttcctgcacggcggcgcggagggcagggaggtgttctccagcgagccgcacaagcgggagctgctccagccgcggtcatggttcaggaaccggtacaccaacccgggcaggccgttcaccaggggcggcggcgtgatcttcgccggcgatgagtacggcgagagcgtttgctggaggatgcccgccgcggcggcgggcaagacggtggagtgggagatgaaggggaggatatgggtgacgtactggccaaacaagaagaggacgctgcatgttgagaccaggagggtcgagttcagagagctactgcgtctcaccatcagagagtag

SEQ ID NO: 64482 - DNA, 359 bp, Oryza sativa
  Clone ID: PAT_MRT4530_65621C.1
ccccgcccaatttttttttttttggggggggagggcccaaaaacccccttttcccccccaaaagtcccaaaggtccttttaacccgaaaaccccccttcccccccccttaaaaatttggggtttttttcccgggctaaattcacctaagaggttccccccaacagttctcccccttttcctccggggggccctcaatttggggccccacccccttgaagcccttttccagcgggggggggccccccctggcctagaaaaactcccttttttcttttcttttccccccgtcccagggcccaaacccccccttggggaacatgagggtaaactttgggggaaccccggaaaaccccccccc

SEQ ID NO: 64483 - DNA, 2682 bp, Oryza sativa
  Clone ID: PAT_MRT4530_65622C.1
atggccgcgccagcgacgccgcggctactcctctcgccgacctccaaggacctcatcgccgccgcctcctcctccttcccgtcgccgccctccccgacgacctcttccgatcccgcctccccgctcgacgccttcgcctccgacccggtcctctccgcgttcctctccccgtccttctccccctccgacttctcctccgccgcgctctcctcgggcctcgccgcctcccgcgccgagcagctgcaggaggccatccgcctcctccgccgccacctccgcgccgaggtgctccgccgccacccgctcctcctctcccacctcctctccctccgctccgcctccgcctcgctctcctccctcccctcccacctccacctcctctcctcccacctctcgctcctctcctcccatctctccgcgccgcgcgcacacctcgcgcactcctcctcctccctctccaccctcctctccaccgccgacctcctgctccactcccaccgcctcgtccgcctctcctcccgcctcctcacctccacgccgcctcctgacctcgcccgccaggccgagctccaccgcgagatccgccttctctacgaggagaagaacctcgccggcatcaatgccgtcgacgaggagatgcgcaaggtcgatgcggctgcctctaagctccgatcggaggccagcgctgtgatcgatcgcggcattgctgagtccaaccagaacgacgtctggtgcgggctgcaggtgtactataatctcggagaactgaagccggcagtggaagggctcgtggcgaagtacaaggcggcaggagcgaagagtgtggctgtggcactggacatgaaggctatatcaatggctgcagggggtggaggtggccctggaggcgtgcagaggagtggcacgccacagattggtggcagtaagaaggcggcggaggcactgtgggataggatgagacagtgcatggaggagctgcatcggtcggtcacggccgcatggcagctgcagactgtgctcaccaagaaacgtgttccattcacacaaatgctgttcctcgaggaggtttggcaggagggtgatcctctgttaacagagagagtatgggatgctattgttaaggcctttgcaagtcaactgaaatctgcctttacagcgtcaagctttgtgaaggaaatttttactcttggatacccaagattgttttcaatgattgagaacctcctcgagaggattttaagagacaccgatgtaaaaggcacccttccagctcttactcccgtagggaaaaaccacatgactgcagccattgagatattccagacagcctttctggctctttgtcatagtcgcctctctgattatatcaatagcatatttcccatgtcaggccgtggtataccttcaaaagaccaaatatcaaggttaatttctcgcatccaagaggaagttgaagttgtgagaactcatgggcatttgcttgctcgtgttctacaagaaattggaaaagttttgcttctcctagcacaaagagctgaatatcagatctctactggcactgaagcccggcaagttactggcacagtgactccagctcaactgaaaaactttgctctatgtcttcacctccaggatgttcacacacgtatttcaagcattgtgtcaacacttccaaatgttacctctgaaaaactttccaaatcccttgaggccatttatacagtcgcgtgtgattcagtgagccctctattcaaagaaatgtttgatcgtctcggatcatgcattctgaaaatgcacgagcaggactttggaactcatggaatggacgcaacaatggataacaacgcttcagcttacatggaggaactgcagaagtgtgctgtccacttccgtagcgagttcttgtcaaagcttctaccttcatcatcatcccgctcagagaccatctgtaccataatggttagaagtatggcctcaagagtcctcatattgttcataaggcacgcctctctagttaggccactctctgaagccgggaagctgagaatgacaagggacatggccgagctggagctcgctgttggtcagaatctgtttccagtggagcagctaggcgcaccgtaccgggcgctgcgtgcattcaggcctgtcctattcctggagacgtctcagcttgagaaatctccactccttcaggacttgccccctagtgtgatcctccaccacctatattctcgaggacctgatgagttacagtctccattgcagcgtaacaagctcacgccgctgcagtattctctctggcttgattcccagggcgaggatcagatctggaaaggggtgaaagcaaccttggatgactacgagatgaaggtcaggtctcgcggagataaggagttcagccctgtgtaccctctcatgcttcagattggatctgcattgtctcaggccaagggctaaacctgtgttcagttcaacccagcatcacatatgtttgtatcatcatcatgtaggcattgggtacttgagagatcgattgagctttggaatagtttatacaaatgaaatagcatttgcatttgttttttttatggaaataaaggtgttcaaagtacagactctttctcctagctcctattatgttgtgaagtgtgtgatatgattgatcattgtacatctatt

SEQ ID NO: 64484 - DNA, 561 bp, Oryza sativa
  Clone ID: PAT_MRT4530_65623C.1
gcacgaggctctcctctcctagcctcggatcctctcatcctcctcgcgcactagagaagctagagcttcacccactcgtgcttctctcctcgcctcgcctccctcatctcgatcttccaatggcgacgtgacgaggtggttgccctgcgctgcgcttctgaccaccacgtgcatttccatttcccgctgcatccgatccgtttgttgttgttgccgtggcgtgccttgtgaatttgctgctgcgagcgagagcgagccggtggtttggttggttgcagaagctttggcttccgctgaggctgcgctggtgtggccggtggctcacgggtttcaggccgcgcgcgcgctcgcgcggtgctttttttttttttttgcgctcacaaggaaagcgcagacgcgcagtgtaaaacgtcgtggcaacccccaccgtcccaatggcgacgccgcccactgcttcccgcgcgtcgccataaaatctcgtacgcgtacgtgcgcgcgctcgtgtgcgtctctccttctcctctactctctcttcacgcgggctggctggctggctgttga

SEQ ID NO: 64485 - DNA, 582 bp, Oryza sativa
  Clone ID: PAT_MRT4530_65624C.1
atggcgtccagcgcgtcgcggttcatcaagtgcgtcacggtcggggacggcgccgtcggcaagacctgcatgctcatctgctacaccagcaacaagttccccactgattacgtacccactgtttttgacaatttcagtgcaaacgtggtggtcgacggcaccacggtgaatttgggtctctgggatactgcagggcaggaagattacaacagattgaggccgctaagctaccgtggcgccgatgtctttgtgcttgccttctccctatggttaccagagcttcagcattatgcaccaggggtgccaattgtgttggttgggaccaaattggatcttcgtgaagataaacactacttacttgaccatcctagcttggtgcctgtgactacagcacagggagaggaactccgcaagcacattggcgcaacgtgttacatcgaatgcagctcaaagacacagcagaatgtaaaagctgtgtttgatgctgccatcaagctgcaagggtgtcatgtccagaagaaggctagtatgcttcaagtgaacaagaggggttctttgatgagcagagcagaggaaggttaa

SEQ ID NO: 64486 - DNA, 273 bp, Oryza sativa
  Clone ID: PAT_MRT4530_65625C.1
cctacaagaccaaaatttgtgtttacacagagtatcatcttggctgaataaattcataacactgccaacatattctcggagaagtcccaaccatcaccgctgagtacgatcccgattttccacaattttcttgtgaacaacgccacctggccacagcttacatcacagaagtaccccccccccactgattggaaataatcttgagccctttgaaactcttcgtcaagtccacgggaatccccaccacgggtgtatttcacccctggaagaaaa

SEQ ID NO: 64487 - DNA, 1174 bp, Oryza sativa
  Clone ID: PAT_MRT4530_65626C.1
gtgagaacagttcagagaggaagcatgtgacacttccctctgtccctctctctctctctagcctccaaccatcgcttcaccaagaagccatcacctcctcctctctatcaagttctctcccctctcttgctgtctctgcttgctgctgctgctgctcgattcggccggcggccatggcgtccagcgcgtcgcggttcatcaagtgcgtcacggtcggggacggcgccgtcggcaagacctgcatgctcatctgctacaccagcaacaagttccccactgattacgtacccactgtttttgacaatttcagtgcaaacgtggtggtcgacggcaccacggtgaatttgggtctctgggatactgcagggcaggaagattacaacagattgaggccgctaagctaccgtggcgccgatgtctttgtgcttgccttctccctagtgagccgagctagctatgagaatgtcatgaagaagtggttaccagagcttcagcattatgcaccaggggtgccaattgtgttggttgggaccaaattggatcttcgtgaagataaacactacttacttgaccatcctagcttggtgcctgtgactacagcacagggagaggaactccgcaagcacattggcgcaacgtgttacatcgaatgcagctcaaagacacagcagaatgtaaaagctgtgtttgatgctgccatcaaggtagtaatcaagcctccaacaaagcagagggacaggaagaagaagaaaacacggcgcggatgttctttcttctgcaagggtgtcatgtccagaagaaggctagtatgcttcaagtgaacaagaggggttctttgatgagcagagcagaggtctgtgagacaaaatgatgtcttgtgtttgataattgctttatctcaaaagttccagtttgatagttgcatttccaacctatatatatcctgtttggcaattaactactacctccgtcccaaaatataacaacttttggctatgaatctgaacgcacagttatccagattcatagctaaaaatacttatattttgggacggagggagtactagtagtagattactatcctgtccatgtaatgtattaggaaggttaatagcactccctacatctcagaatggaagttgttttggttttaaaaaaaaaaaaaaaaaaaaaa

SEQ ID NO: 64488 - DNA, 762 bp, Oryza sativa
  Clone ID: PAT_MRT4530_65627C.1
atgaaggataggaatgcttctgctgggccagaggtgaagcctgcaggattgtcaccatcaaggtttgtgaaggtcttcatgcatggggaaccctttgagaggaagatcaatttggccatccataacaactatgactctttgtccttcactttaaaaagattgggcaacaactattccatgtcaccatttgaacttgaaggctttgtgaacaatgaagaagatggtgccatagataatgactttgatctcctgtacgatgacatgaatggtgttcgttacttacttggtgaagtcccatgggaggttttcaccattacagtcaaaaggatctacattgttcctgcagaacaacagaatgaaagtgaatatcaggaggaggaagaggacaacgcggctgctgctgctactgctgacgaagatccgccggcggccggcgcggagggctggcggtggcaagcgccggccggcgcggaggcaggcggaggaggcgcggagggccgctccgcggcggctggcagcggagtcgtggagggccgccccgcggcagttgcagagggccgccccggcggcggcaggcagcgcctcgggccgcccggcatggaattttttgcttttttttcttttttccttcttaatgtgatgtggatgactgtaatttgtgcgatcttgaatggagctgctgctgacgatggcgctgctgctgcagttgacaatggagatgaccatggctacacaagcaacgatgacccaagcttcgactaa

SEQ ID NO: 64489 - DNA, 6232 bp, Oryza sativa
  Clone ID: PAT_MRT4530_65628C.1
atggcgcccaagagcaagcgagggaaggccaagggtgagaagaagaagaaagatgagaaagttctccctgtggccattgacatcactgttaacctccctgaccagtctcatgtcattctcaaggggatttcaactgacaggatcattgatgtgaggcggctgctatgcgtaaacaccgcgacgtgcgccatcacaaactactccctctcgcatgagctccgtgatggtcgcttgaaggatggtgccgatattgcaacattgaagccatttacactcaccttggtagaagaggagtacgacgaggagagcgcggtggcgcacgtacggcggctgcttgacatcgtcgcctgcaccgcctccttcggtccgccgcccccgccgccgccgccgccgtcgccgaaggatgcggccgccgaccccgccaaggagccctcgggctccaaggctggctccgccgcggccacgggcgggcgccgcacgggctccccaccgccgtcgcctgctccggtggcgaaggacgcggccaccaaggacgacgccgccgccgctgcggcggctgcggctgccaaggagtcctcggcctccgcggagctggaggccgagatgagcggcgcgtgcccccgcctcggcgccttctatgagttcttctccctcgccaacctcactccgcccctccactttataaggcgagtggcgcagcctcggcaggaggaacagccttcggatgatcatctcttctttcttgaggcatatgaagatcttatgaaggcatttttggaacgtaacaagtttggaaatttcccttatgggtttcgtgcaaacacatggctcgttcccccaattgctgctcaatctccatcaacatttcctcccctcccttctgaggatgaaacctggggtggcaatggaggtggttggggaagggatggcaagagtgacatgttgccatgggcagatgaattcttgtatctcacatccatgccttgcaaaactgctgaggaaagggaaatccgtgacaggagagcattcctacttcacagcttatttgtagatgttgccatctttagagctattgcagctgtaaggcatgtaatggagattaaggatgtatcagcatcagccaatatagatgaagttttgcattctgagacagtgggaaattttagcatcactgtcacaagagattcttcagatgcaagctgcaagttggataccaagatagatggtagccgagccacaggaatggacttcaagcatcttgcggagagaaaccttttgaaaggaataactgctgatgaaaatacagctgcccatgatgtggagagtttgggcattgtcaatcttagatactgtgggtatgttgcagtggcaaaggttaacaatattgagaaagccaaagtgaacacttctattaagccaattgatattacagatcaaccagaagggggtgcacatgcattgaacattaacagtttgaggatgctgctcaatgatgccaattcaactggagagaaaaagacgttgaaccttccacaaaataataagcaggaagaactaattgcagcacattcttttgtggagaacctgttaaaggagagtcttcagaagctcgaagaagaggaaagtgaaaaacagtcctttatgaggtgggaacttggtgcctgctgggttcagcatttacaggatcagaaaaattctgataaggacaaaaagcaaggtggtgagaaggaaaagaaaaaggtggtagataaatctgcgaaggagacaaagattgaaggtcttgggaaacctctgaaagctcttaagcactcaaaaaataatgttgatgtcgctgacaagggatcctcattgggagaaaaaagcatgtgtgatggaacaagttctgcagaaagccaaaaattcaagccatcagctgttcaattgcctcagggagaatctaatgcctcagagaatgaaagcttgctgaaggatttattatctgattctgcctttacaaggttgaaagattcagaaacaggactccaccagaagtcaccgcctgagttgattgagatggctttgaagtactatgatgaagttgctcttcctaagctggttgcagattttggttccctggaactttcacctgttgatggtaggaccttgacagatttcatgcataccagaggcctacagatgcgttcccttggacaagttgtcaagctttcggagaagctttcacatgtacagtccctctgtgtacatgagatgatagtgagggcattcaagcatatcgttcgctctgcaattgctgctacttcagacatgcgacaattagcacttgcaatagctgcagcgctgaatttactgcttggtgttcctgagcctgaggtctttacaagttccgatggtgtgcgcccactagtatggaaatggctagtggccttcttgaaaaagagatatgaatttgagctcactgagcaacattaccatgatgttaggaaatatgctctcctgagaggactatgccataaggttggcattgaactggcaccccgagattttgttatggattctgctttcccatttcaaaaacaagacattattagcttggtaccagtacacaagcaagttgcatgctcatctgctgatggaaggcaactgctggaatcctctaaaactgcccttgacaagggaaaacttgaagatgctgtcaattatgggaccaaggctcttgctaaactcataacagtttgtggtccctatcatcgaatgacagctggagcttatagtctgctagctgttgtattgtatcacactggtgattttaatcaggctacgatctatcagcaaaaggccctagacatcaatgagagggaacttgggctagatcaccctgatacaatgaagagttatggagatcttgctgtgttctactaccgtttacaacatacagaactggctctaaagtatgtcaagcgtgcactatatctactgcatcttacatgcgggccatctcatccaaacacagctgcgacatatatcaacgtagctatgatggaggaaggcttgggtaatgtgcatgtagcacttagatacttgcacaaagccttaaaatgcaaccagagattacttgggcctgaccatatccagactgctgcgagctaccatgccatagccattgctctctcattgatggaagcttattccttgagtgttcagcatgagcaaacaaccttgcaaattcttcgtgcaaagcttgggccagatgacttgcggactcaggacgctgccgcttggcttgaatactttgaatcaaaagttatcgagcaacaggaagctgcacgcaatggaactcggaaacctgatgcatcaattgctagtaaagggcatctaagtgtatctgatcttcttgattatataaatcccaatgaagaaagcaaaggaagagattctgaatcaagtaaaaggaggtactcaagcataaaggtcctgtcaaattcgaatggaggttccaatgtagcaagtcctgaggtatctccaagagactctacttctgcaaatgcagacgaggacaagcaaatcatagagccatcacaagatgatactgttaactttgttgctgaagctgaaattaagcaaaaccttaaatccgtagagtactcagcatcatctgagcaaccagtagagagagctgaggtgattaatgtaccaagggaggttgttcaggaggaactagtagaacctgaagatggttggcagcctgttcaaagacctaaatcggctgcaggttcagggaaacaaatgaagcatttcaatcccaccaccagaaagatgtatgaccctgataatcatgatccacaatatacatctcaatacaaggcacgaaattcctatccaaatagccgttactacttcttaaagaagcggactgttgtacctgcaacgtacacagaccctcatcagcacatgaaagtccagacatccagtgcaaggtttggtcgtaagatatacaaggctgtgacatatcggattaagccagggagtacatccacagaggcgcaagatgcttctgctgaacagatgagtggtaaagcagagtcccagatggcttactcacaagtacacagtactacttctgtagatcataaagaaagtgagccacatggaactttggtgacaagtagtggaaacgcgccatcatacaaagatgttgcattagcacgtccaggtaccattgcaaaagctcaaatacaaaaatcaagagatgatgtagtccagaatcaaccgtcacttggtcaaattattgcacaagaaatgaaggattccttggtagatacacatcaagtggaacaaggatctgtatctgcaaatatcaataatcccaaagaagtaggcaacattccagaagaaattcagcattcagaagacattaaagtgtctgatagagaactggacactggggatattgacacagatggttcaccaaatgatgagaaatccttaaatggcagcaatcttgcaaatgatcacacaagtcaagaaccagtaagttgtagcaatgaaaatgcagccgtcgagtttgcagagtcttctaattctgcaaaagatgaacagagtcggaaatcggatatggagattttcgaagaagctctgcccaccagcattggacctattgcagtttctgcttctacagctaatactgagggccttgcaggtgctggaaatgagaaatcaaagcccaatttgctgctaaatagtattgatttgagagagatgcctaataagaagttgtctgctgctgcaccgccatttaatccctctccgccagctatccttagtcctcttgcggtaagtgtgggtctcccgccaccaggtgctatcccaggagtcgcaccttggcctgtgaatgtacctatgcaccctggacattcaactatggtaccaagtggtcctccattgtgcacctcccctcaccatttataccctccagctcctcggtcacctaatctcttgcatccagtgccatttatttatccaccatatagtcagccgcaggtcattccaagctccacatttcccatgaacactaatatttttcgccctaatcattatggatggcaaccctatatgaatgcaccttcatcagagtttgtgccaggatcagcatggccaagcaaccatccagttgattttacgccaactccacatgttgttaaccctatatcccagtctttagcagacacccacattcagtcggacgcagctgttgttagtataggaccttcactggacagcaatactatggcagtgaaggaggaaatggaggctacattggttggaagtggcaatttgatcagcaacaaacgtcctgcagatgatcaggacaaacaattaaaagatccagttagaattgaactgaatcctgatttgccaggagacaacgcacatggtatatgtgcaacagaccatttgcgaagcaccgtgaagaatgaagatgaaggtagttttaggatatatgtcaaagggaaaagccggcggaaacaaactctcagaatcccaataagtttgcttaataagacatatggatcacgctctttcaagcttgtgtacaacagagtagtcagagaaaatgacatcttcaggccatcgactgtctcctttgctgaagttgtttcctctggcaactaataagtattgcaagtttagccaaagcataatattgacttttccattattacccaaaagaaaatttctatggatctccaactgaaacatgatagaatttcaattgtctgagcttttcgaaagcagagccttgtgtcttcagtgtttcaggttttggtgttttgcacatacgacattcctccatccgacattctgaaaggtcaaatgcatatgttttcagttcaataaggtgttggcaattctgtgtagaattcagaagatttgcagagagttttgggagagtcagaacagatagagggtatcgaagtgttagcaacaatacttgacaaaccgattttttgttcaattttgttagactgaaaggaatattttcttagatttttggggctaaaattttgggtatgaaacttaccacttagttttttttttttttgttggctgcttgcatccaacaattatatctcgtggtttttgtgagaagctaacgttattctttttaagagaacaataataattgccatgctgtgaagcgcttgtgctttaaaaaaaaaaaaaaaaaaaaaaa

SEQ ID NO: 64490 - DNA, 270 bp, Oryza sativa
  Clone ID: PAT_MRT4530_65629C.1
atgaggagtagtactacctttgccaagccagctgtggctatcctctctgctctgcttctcctcttcttccttctttgcaactcttcaacatcatcaccccatgaacaaccttctgttctaaggagtagaaggttgttgtcgcaatgcgatggcacgggttcatgctcgacacgtgtggacgggcttggaaggttcgagaagactccgaaggcggtgtttgagagcttgaagagagttccctcaagcaaatcaaatccatcacataattag

SEQ ID NO: 64491 - DNA, 3540 bp, Oryza sativa
  Clone ID: PAT_MRT4530_6562C.1
atggggatggtacgaaagataggccgagctggtcgtgaggcagacgcctcctcctcccccgagctcctccccggtccagcccagccagccagcctcacgagcgaggacgctttcgttgcacgtactggaaccgcattgaagcacctgaatatcggtgtcgaggacgccgtcgacgccgcccccgcagtcggatccgcggacgggtccgacatccgccgtgcagtgaaccgccggaccctccgcccgcgccgcggcctgtgggtccgctctggtgtagcggccggctccatatcctcccccgacctcagcccagatgtacgagtgcctggggagatagacaatgaccgtgaggccttcgcccaccatggggcgcatcgtcctggactgcctagggtagtgggctctgaatcgggttgtgaggcgtgtgggaggggcggggtagatccaaggaagaggactttctcgagtttacgccgtggtgttttgcttcggcgaggaggcggcggcatgagctttgggggcctctttgacggcggcggcgggggaggcatgcagttccctttcgccagtggcttcgcgtcctcgccggcgctctccctcgcgctggacaacgccggcggtggcatcggcgggcggatgctcggcggcggcgctggcgctggttctagcgcgggcggcgcgatgacgagggacactgaggcggagaacgacagccggtcgggaagcgaccatctcgacgccatctcggccgccggcgaggacgacgtcgaggacgccgagcccagcaactcccgcaagaggaagaagcgataccaccgccacacgccgcagcagatccaagagctcgaagcgctgttcaaggagtgcccccatccggacgagaagcagcgcgccgagctcagcaggaggctctccctcgatgcgcggcaggtcaagttctggttccagaatcgccgcacgcagatgaagacgcaactggagcggcacgagaacgcgcttctcaagcaggagaacgacaagctgcgcgccgagaacatgacgatccgggaggcgatgcgcagcccaatgtgcggcagctgcgggagccccgccatgctcggggaggtgtccctagaggagcagcacctgcgcatcgagaatgcgcgcctcaaggacgagctcaaccgcgtgtgcgccctcgccaccaagttcctaggcaagcccatctccctcctgtcgccgccgcccttgctgcagccgcacctctcgctgcctatgcctaactcgtcgctggagctagcgatcggaggcatcggtggcttagggtctctcggtacactacccggctgtatgaatgagttcgccggaggcgtgtcgagcccgatgggcacggtgatcacgcctgcgcgcgcaaccggggctgctataccatcgctggtgggtaacatcgacaggtccgtgttcttagagcttgcaatcagcgcgatggacgaacttgtcaagatggcacagatggacgatccattgtgggttccggcactgcctggttctcccagcaaggaggtgctcaactttgacccatgcgtccgctccttcctaccgtgcattggcatgaagcctgccggctacgtctctgaggcctcgagggaatccggtctagtcatcatcgacaacagccttgcccttgtagagaccctcatggatgagagacggtggtctgacatgttctcgtgcatgattgctaaggcaacagtgcttgaggaggtgtctaccggcattgcaggaagcagaaatggcgcgttgctgctgatgaaggctgagctacaggtgctctcacctctagtaccaattagggaggttacatttctccggttttgtaagcagctggctgagggtgcatgggcagtagttgatgtgtccattgatggtttagtgagagatcataattctggaacggcacccacaggtggaaatgtgaagtgtaggagggtaccttccggctgtgtgatgcaagacactcccaatgggtattgcaaggtcacatgggttgagcatacggaatacgatgaggcatcagtgcaccagctctaccgtccactccttcggtctggtctcgcctttggcgccaggcgttggcttgcgacgctgcagcgccaatgcgaatgccttgccatcctcatgtcctctgctacagtgacagcaaatgactcgactgctatatcgcaagagggcaaacgaagcatgctgaagctggcacgccggatgacggagaacttctgtgctggggtgagcgcatcgtctgcacgtgaatggagcaagctggatggtgcgaccggtagcatcggggaggacgtgcgcgtgatggcacggaagagcgtgagcgagcctggagagccaccgggcgtggtgctgagcgcggccacctcggtgtgggtgcccgtggctccggagaagctcttcaacttcctgcgcgatgagcagctgcgtgcggagtgggacatcctcagcaatggaggccccatgcaggagatgacccagatcgccaaggggcagcgggatgggaactcggtttcactcctcagggccagtgctgtgagtgccaaccagagcagcatgctgatacttcaggagacgtgcaccgacgcttctggctccattgttgtgtacgctccggtagacatcccggcaatgcagcttgtcatgaatggtggcgactccacctatgttgctctgcttccatccggattcgccatcctgcccgatgggcctcgcatcggcgccaccgggtacgagacgggcggctctctgctcaccgtggcgttccagattcttgtcaacaaccagcccaccgccaagctcaccgtggaatcggtcgagaccgtgaacaatctcatctcctgcaccatcaagaagatcaagacggcgctgcagtgcgacgcctgagtgtttacagtggatttatgtccgcggggatacgccggcggcgacgagcctgagtcaagaacgaaccgcgcgttgaaaaaagaaaataacctttgctaggtgataaggatcttgcttggccggtccttagcacagagcaatggtggtggttcgggtattgactctggcctctaccgtacgccgatctctccccggcagccggtgatcattggatgatacagtaccatgcattttggacatttcttcgaggggttaaacttatgctttagtttcgtcgtcttagggagtcaaacctgtatacttttggcagttggctcatcgttgctctagtgttgtttgttttttgttgtgctatggctgtatgaggtagcctgtactagtagtttctcggaaatgctgggttcatactgtgctagtgtcgtccatacttcatataggttatggtacaagtgtaggatcaaattgaaggtttcagaaagtgtatcagccaataatgtctgtttgacagtggcattgctatggatcagctgaaaattgttttttgcaatacacatgggatcaaagctaaaaaaaaaaaaaaaaaaaaactcgagactagttctctctctctccctcgtg

SEQ ID NO: 64492 - DNA, 425 bp, Oryza sativa
  Clone ID: PAT_MRT4530_65630C.1
gggtgggttttttttttttttttgtttttttttttttttttttttttttttttttttttttttttttttttttttttttccccaagggcaatatttttataaggcgcccccaaaccccccccgggggaccaggtagagggggcttatttcccccgcataaaaatggggcccaaaccccttggatcgatccgcccaattggacccaccccaccctaaacattattgggaaaattttatctataaaaaaaaaaaaatcctgaaaaaaagggggcgggggattgaacatgcaggggaccaccccctccatggatcaaattgggggcttgaccttggtggggacccaaaaagggggggggcccccctttggtggttggcactgacccgaaaaagggcccctttaacaaaataaaaaaccccaggcttgg

SEQ ID NO: 64493 - DNA, 285 bp, Oryza sativa
  Clone ID: PAT_MRT4530_65631C.1
atggcgttggacggggacggaatcggtggcctggagcagcacgtcggggcgattgggcgcggcggtgaagctaatcgaataaacaacccaacccccaccgcttcctcctcctcctcgtgctcgcgggagatggagcacgacgccgaccctgcgcccgcgccggcgccggcgatcacctccctccaacccgccgacgacgactgggcggcccgcgacgacctcgaggaggctccagcgaagccccatccgcattccgcggctcgcgatgacgacgacgcccgatag

SEQ ID NO: 64494 - DNA, 588 bp, Oryza sativa
  Clone ID: PAT_MRT4530_65632C.1
atgtgttgggcggtcagaccgccggttgagggccggtcagaccggcggtgtgtggccggtctgaccggcaggtccgagttcgaccctgtttcgtcggccctccctgttgtcgtcgcccactgctcaccggagccggcggccgccgccgcgagggaggccgctacggtgaggagctcggcggcgagcgtggtgagcgagagggagagcgggagcagggtgcggttgcggcgacatcctccatggccggcagcaagcagatctgctacagcgtcggtgatgaagacctccatggccggcagcagggggtgcgctgagcacgtcgtcgtccacagccggctgaggaggctggggagcgcatggtacaagggtatcacgctgatacccaggtaccaaggtctgatacccaggtaccagctcgatacccagggtaccaggtaccaaggtctgatacctaggtaccagctcgatacccagggtaccaggtaccagccgataccaaggtaccagccgataccagtgtaccaggtacctcctcagtaccttacccaaggggcgacgatgccggcgaggtatcacccgagcacgtga

SEQ ID NO: 64495 - DNA, 485 bp, Oryza sativa
  Clone ID: PAT_MRT4530_65633C.1
tttggtgttttttctttgaatgtgttaaccaagcatcaatattgatcatacaaagttttacgaagacaacagtagataacgacaaagttgtacaatgtgaaagaaacagttcaaaatagaatgtagtaagcatgtgagtacattgtgcaactcattatgaaagcagttaatagtgcacttccctgctggacatttattttaaaaatgatgcaaaattaaccaacatcataagaacattgttaagataagatgccccttcaatttgtaaacatgatgttttagatgttaggtcattcaggtgaaacatcatatatacagcagcgcccacacaagaagctagatcaagagttagcaatttcctttgataagtgaaaactgtgaatatgccgggtccttattcatcttagaaacttattttaaaagcaaagtacatcatctttgaagtctaagataacagtaattaccaggtacaaatatctttgatg

SEQ ID NO: 64496 - DNA, 1542 bp, Oryza sativa
  Clone ID: PAT_MRT4530_65634C.1
atggcccggcatcaagaccaccgacgactcgactaccatgtattccctgatgatcttggcgggctcggcgcggcggccccccgctgcgatctggagcgccgcgtccatggagccgctcttctcggcgccttctcgccatgcttccatggttcctcctcctcccatctgccgccgcagcacagcagcgaagaggtgtctgcggcggcggcgacgcgcgagcaggagcagacgctgcgcttattcctccaagacatcgagagatcaatcgtcttcggaatctgcaagaaccccgaaacaacggagttcttccgggaccaccggcgacggctcgacgactacttcgccgccgccaagaacctgctgcagatgttggagcaccccgtcttggcgtacggtgatctgcacaaccgcgcaaaatccctcctcgtcacggccatgggctcccttgcagtggagttgtgccacctcaagatctggaaacctgacgctctggcaagttatctcggttgcacacctacatctatctgggagctcgcgaggtccagctgccgcggaggcggcgacggttctggctctgcctcgtcagcctcatggatgagtacctctcgctcctgctccggcggtagcagcggcccaaacggtgtgagctttgacggatattacatggcactcagtgaggagagaacagtgcgaagtggccaagcttcgtcagttacggccagtcacattgacctcaagtcagtgtccatcctcaacaagattgctgatttcatgattggggtcggacacgaacagatgctccgaggagctttcgatcaacacagtgagcatctggtcaggtacattgaaattcttgacattgataaaattttgggtaaccacatggaggaatccacagaattgctattgaagcaattgttcgataagttcaattctcgttttgagatgacctacaatgtgcagaagacatggaaggtcacggatcctgtgattcgacagaagctgcgtgagaagatcacccagaaggttatcccattgtaccgaatgtacttggagagctactcggacaagaagcaaaagtctgcgaggttcaatgttgagcaccttgaggctcgattgctggaaatattcgagggtggtgaagccatcgagggtgttgggttggcatggcaccccaatgccaccccaccctggcgggtggtcgacgtccgtggccagacagcatgggtcggctccggcacgatgctcgacgaggtgtactacgccatcgccaacaagacctcccgcctcgggttccccgaaagtgtcagcctgacggccatccgaggcggaggcggcggaaacttcgggatcgtcttgtcctggaagctccggcttgtccccgttccggccaccgtcacgcgcgtggcgccgtcccttcccaacgacaccttcctccgcgtcgttgtgcccctgtacctcggcacacgcgccggcctcgtcgccgccatggccgacaccttcccggagctcaacgtgacggtgagcgactgcaccgagtga

SEQ ID NO: 64497 - DNA, 258 bp, Oryza sativa
  Clone ID: PAT_MRT4530_65635C.1
atggtggcggcgccggcggaggaagctgaggcgcaggtcgtcgccgaggagctcgaggagaggggagaggggtggaagaggaaatcctcgctcggggggcgtcgcctcaagcacccgtacccacgcaacgggtttcttccatcggcacctgggcgaaaaggaggtggggggcgcgtgtcccaactgagggacgcgctctctcgcagagggatgacgccgacggaaaagcggatggccgtcgctaggggcacgggctga

SEQ ID NO: 64498 - DNA, 247 bp, Oryza sativa
  unsure (1)..(247): unsure at all n locations
  Clone ID: PAT_MRT4530_65636C.1
agggggccgtaatacttctcaatgccagtcgngtttaaagcggcttggcaatcccactcaacgcagttcgcttgtaaaggcaacaactccatccacgtcgtcgtcgtacgattctgcgggaacattcagctcgacgctccctgtgtcggtcaggaggcgagtgaacgaattgctcgtcgtgatccctgctcctacgactggttccggcgccgacgacgctgaggctcggttggtgataaactgcatg

SEQ ID NO: 64499 - DNA, 165 bp, Oryza sativa
  Clone ID: PAT_MRT4530_65637C.1
atggcagtatgccagagtccattgtttatcaccaaccgagcctcagcgtcgtcggcgccggaaccagtcgtaggagcagggatcacgacgagcaattcgttcactcgcctcctgaccgacacagggagcgtcgagctgaatgttcccgcttcccacatcgcaggc

SEQ ID NO: 64500 - DNA, 189 bp, Oryza sativa
  Clone ID: PAT_MRT4530_65638C.1
atggccgccgcttgccgccgagcgcgcccacctgatgccgacgtcgggagcgatttcgcttctaccccggcactagcttaccacctacttggctaccggcgtgagctcaaccaccgccaatggaggagctcggggccgcatgccttccacatcttgccaaaggtcggcaagcttcttaatcccttctag

SEQ ID NO: 64501 - DNA, 2432 bp, Oryza sativa
  Clone ID: PAT_MRT4530_65639C.1
gggcccccccccccccccccccccccccccccccccccccccccccccccccccccccccccccccccccccccccccccccccccccccccccccccccccccccccccccccccccccccccccccccccccccccccccccccccccccccccccccccccccccccccccccccccccccccccccccccccccccccccccccccccccccccccccccccccccccccccccccccccccccccccccccccccccccccccccccccccccccccccccccccccccccccccccccccccccccccccccccccccccccccccccccccccccccccccccccccccccccccccccccccccccccccccccccccccccgaacggcgccgtgccccctggcctcaccatgtgtcatgcctccacctgccacccctcctaaactcctaaatccgaacgaatcacccctccccctcccccctcccccgcccccctctacctcgccaactctgcctctagcaccggtgagccctaccatccccctcctttgagtagccccacaccccgccttcttccccatctagcaatttcaccagaaatgtcacaatcaccctcgcctcctaggcactctagatctcacgcctgaccactggccccacccatctccctcctatctcttctttcgaggcagcctcaccaccgtctcacccttgtttgccgcctactgccagtccactgtctccaaacacccacctcctcctccccctcccccccccccaagcatctctcttcttcactagctacttctccaagttgaagagatcaaagctagaatgggcagctgcaagattctcctggtcacagctctcctggtcggcattgcctcccagcagagctctgccaccaggaacctgcacggagatcatcacgtcgcggaaaagaagttcggcggcggcggcggcggctacggtggcggtggcggtggagggtacggtggcggtggcggcggcggcggctactcaccgtcgcccacgaccggtttcaccgggagctgcgatttctggaagagccacccggagaagataatatcgtgcatcgggtcgcctgtcttcttcactagctacttctccaagttgaagagatcaaagctagaatgggcagctgcaagattctcctggtcacagctctcctggtcggcattgcctcccagcagagctctgccaccaggaacctgcacggagatcatcacgtcgcggaaaagaagttcggcggcggcggcggcggctacggtggcggtggcggtggagggtacggtggcggtggcggcggcggcggctactcaccgtcgcccacgaccggtttcaccgggagctgcgatttctggaagagccacccggagaagataatatcgtgcatcgggtcgctggggagcatcgtggggtcgttcggggacgtgtgcagcggcttcttcgggagcaagctgcagacgctgcaggacgcgctgtgcagcacccgcaaggactgctacggcgacctgctccgggagggcgccgccgcgtacatcaactccgtggccgccaagaagcaggccaagttcgcctacaccacgcagcaggtcaagtcctgcatcctcctcggcctcacctccaaggccgccgccatcgagcaggccgccttgttcaagaaggccaacctcgcctgccactacacctagctacccatacctcgccgccggccggccatctctccggccatctctctctcttagctagttggtagctagtgtcgtcatggtgttgatgatgaataagtccttgcatggatgcgtcgtggcaaaccatgcgtatattattcaagaattgtgtgagtgttcagatctgacctcagctgtggcttgtgtgcgtttgcagttaaattgatgaggtgcacggcgccacgacgacgtctcgtcgtcggtgcttagttgcatgctttgtttgcttttcttagtttcttggcgatgtacttattaagagaataagatgagtttgatttggttagaaaaaaaaaaaaaaaaaaaaaaaaaaaaaaaaaaaaaaaaaaaaaaaaaaaccgtcgcccacgaccggttgcaccgggagctgcgatttctggaagagccacccggagaagataatatcgtgcatcgggtcgctggggagcatcgtggggtcgttcggggacgtgtgcagcggcttcttcgggagcaagctgcagacgctgcaggacgcgctgtgcagcacccgcaaggactgctacggcgacctgctccgggagggcgccgccgcgtacatcaactccgtggccgccaagaagcaggccacgttcgcctacaccacgcagcaggtcaagtcctgcatcctcctcggcctcacctccaaggccgccgccatcgagcaggccgc

SEQ ID NO: 64502 - DNA, 551 bp, Oryza sativa
  Clone ID: PAT_MRT4530_6563C.1
tagtggatccccgggctgcaggcccccccccttttttttttttttttttttttttttttttaatgttaatgctgtggtgctattatttgatttacatcatatataatttgcgttccaaccaaggaagattacaacgaaatccacaaccaaggaaaaaaaagacaacatctgaatctgctgaacacatcagtagagagaataaatctccgcccaacacatcagtagagaagtgaaaagaaagtacacctccaactccccaggtgaagcttcgttcttctttatcagaatttcagcatacctgcacggctgcgcacaagaagaaaccagaaaaacattacctttacagatcgagagattacagatccaaactttcgaagaaggtagaaatcagccaacagcccaagtccataaattgtgactctacatgcacatagaagcaatggagctaatatgctcaaagcaatactgcccccaaaggagctaaaatcttcagaaattcaaagtataagtcaaggtataggaggaactccacgtttcatatcacggaaaca

SEQ ID NO: 64503 - DNA, 293 bp, Oryza sativa
  Clone ID: PAT_MRT4530_65640C.1
ggcatctactcctacaatggaacgggagaaaagaactgcatcataaggggaatatgattagtgttagttgacttctaatttcttgagagatattttccgatttatattaattaactgtagcgtaaactcaaagttgcttgtgcatgggtccctgaacttccaagttcttaggataattctcagggtagaccccatcttgtcaccgccctgaatgtttgtgcttaattaattaatggttgaatacaaaacaaaaaacaaaaaaaaaactcgagggggggcccggtacccaattc

SEQ ID NO: 64504 - DNA, 787 bp, Oryza sativa
  Clone ID: PAT_MRT4530_65641C.1
acaagtcatgagtcgcgatcatgtcctgcgtgaggttcgtgctccaccttccaccgcttgctgctcataaacgagttcacgtctttaccatcgtggcaggagctggagcaccaggtgctcatctaccgctacttcgccgcgggcgcgcccgtgccggtgcacctcgtgctccccatctggaagagcgtcgcgtcctcctccttcggcccgcaccgcttcccttcccgtacgtgccaacaagatatttttctttttcttctcattgcgtttggcctgattggtgtcgaggcagcatggagccggacccagggcggtgcaggcgcacggacggcaagaagtggcggtgctcgcgcgacgtggtgccggggcacaagtactgcgagcggcacgtccaccgcggacgcggccgttcaagaaagcctgtggaagcctccgcggccgccaccccggcgaacaacggcggcggcggtggcatcgtctttgatgcctcgcggagaagtatggagaggcagttggaggggaggcacatattcgataggccatgcacaacctgaacatgctaaggacatcacgacgaacatcttggcataggcgaaagatggggcgtgaatggagatagcgggagttataggtgacagcggtacccgagtggccaactatggctcgatggcagtaacctaagacgatggcggtgccagtggcatccaagtattaatactccatccgtcccaaaatataacaacttttagcacttaggatttgtctcaaaatataacaacctctcaac

SEQ ID NO: 64505 - DNA, 310 bp, Oryza sativa
  Clone ID: PAT_MRT4530_65642C.1
tttgttttttttaattgcaagggttgcaactgttaggtcagatccaaccaagatgattattaacgcatatgtcatccggaatacagaagtgatcacaacctccgagtagaacacggtaagaacagacagaaagccttgagaccttcacgaggctaagcttaagaacatgctaacattaaagtggcattaccagcactcgataagctgatgcatgggacaagggaaacaacatccgttctttagaagccctgcaagaagaaggtaataaaaaccggtgctgccgactttgcactatatactgatcacacgg

SEQ ID NO: 64506 - DNA, 624 bp, Oryza sativa
  Clone ID: PAT_MRT4530_65643C.1
attcctcttcccaccagaaccccaaaccttacctccattgagttcgaaaccgaggagcgaggagttacaagccgagttgtcagaatggatgaggagaaggaagccgactcgccgcagccaccgtccaagctgcctcgcctctccggcgctgacccgaatgccggagtggtgaccatggcagcacccccgccgccggtgggtcttgggctggggcttggactcggcggcgacagccgcggcgagcgtgacgtggaagcgtcggcggcggcggcgcacaaggcgacggcgctgacgttcatgcagcagcaggagctggagcaccaggtgctcatctaccgctacttcgccgcgggcgcgcccgtgccggtgcacctcgtgctccccatctggaagagcgtcgcgtcctcctccttcggcccgcaccgcttcccttccctggcagtgatggggttggggaacctgtgcttcgactaccggagcagcatggagccggacccagggcggtgcaggcgcacggacggcaagaagtggcggtgctcgcgcgacgtggtgccggggcacaagtactgcgagcggcacgtccaccgcggacgcggccgttcaagaaagcctgtggaagcctcc

SEQ ID NO: 64507 - DNA, 615 bp, Oryza sativa
  Clone ID: PAT_MRT4530_65644C.1
ttagaccatagcatgttccctctcccacacccttaggttcttgaatttggggtccgtagcaagttcactatgaggatcgtggaactctcctagatggttacagatgtcgcaacgaatgaactggcacaagtccatgcataagttgatcagcgttttctgatcgaaccggattgcgttataagggatgctcgggagcggccagcgtccccttatgtagagtttgtctctatttggattctttccaaacccaccaagtttcctataacggccgtgtgctaagttcagcaagcataggaactccatgtacgcttgcttgtcatagtctgccggatcaagaactacgacggtttggtccgttggatagacgaggaatagtatatagtgattgccaaagtgataggggaccatgatgactcgtttgtcagagtgagagagcattgagtgggccaagtaatttgccacctcggccatctttctcttatgcaaacattcgacgtaatcttttttctcctcgtctatcttattctttagtaccgtactattctccgatatccgcacagtgtgggtcgtctcgcaaaccatcattgggtttacgtatgcaattgaggcccccat

SEQ ID NO: 64508 - DNA, 220 bp, Oryza sativa
  Clone ID: PAT_MRT4530_65645C.1
cagtagccccctcacatgttctttcaacagcgaaatgagtaaagttcatcaccgatctctaaacttgtaccgctgtgttatcccggttcctaaactcgcaaatcgaccgttctgattctcaaacttattcaactgtgtcatcccgatccctaaacttgcagatcactcatttaggtcctccaacttattctgttatgccaccccggcccctaaacagaac

SEQ ID NO: 64509 - DNA, 156 bp, Oryza sativa
  Clone ID: PAT_MRT4530_65646C.1
atggagctcggcgccatgaagctcgctctagacatggaggagacgctggactcagaggtcgcactcgactcagagatgacgctgtgggactcagtcgagatggcgctggactccgtcaaggtggatctggactcagtcgaggtcgcactggactag

SEQ ID NO: 64510 - DNA, 366 bp, Oryza sativa
  Clone ID: PAT_MRT4530_65647C.1
aaaaattgggggatcccatcaaaaaagcatttactactacttggccatttgatcattaagatcgaacaaacccccaatacaataaaaatcctaataataataaggaccgccttaaaactcaaatttaatttaatgggccccacaccaaactttacctaagcattattaatcaagctaccatttattactggatcacaagctaaagaagccttttgttttacgcgccggggccggaaaattgatcggccggggggagctttcgccggggagcgcttcgggggggggggggccgccgccgcccttcaaaaaggggttgccgaaaatgtgccccgccctcgggttcggcccgcgggagaagacccaggg

SEQ ID NO: 64511 - DNA, 193 bp, Oryza sativa
  Clone ID: PAT_MRT4530_65648C.1
tttcttccgacagaagcctcctctcggatgctgcggatcctttttttcgagatagctcgctccttattcaaccatgggtaaggagaagactcacatcaacattgtggagattggccacgtcctctccggcaagtcgaccaccacgggccatctgatctacaagcttggaggtattgacaagcgtgtgattgag

SEQ ID NO: 64512 - DNA, 753 bp, Oryza sativa
  Clone ID: PAT_MRT4530_65649C.1
ccggccggggccgaccgcgccatgggccaccaatggccaccgccaccgccaccgccgccgctctcttctcctcccgcaccctttccccctcctcctccccccggcgacggcgacggcgaggcatccccgccgccgtcaccggcttcctctcccgccgccatgctcccgcgctccaacgccgcctcgcccccctgcacgttgtggatgattccaaggaggtagagacggctgccggagatggtgcggaggagaggtcgcagacggacaagctggtggacgggatggacttcggggagctctgcaacgacttcgagtgcataagcagcccctacgtggaggccaccgcgaggcagctcgcccgcgacatcctcgacctccgcgacgacaaccgcgccttcacctgctacgccgtctccgtcaaatacaaggacccggtcagaacatttgttggacgggagaagtacaagaggccattgtggatcaccaaggcactcgaaaaccctacagtgacagtccaggaaatgtcaatgcaatcgacaagcaacctgaccatcaaatggacattcagaggcaaacctaagaatccaatcttcgcaaccatcggaggagacctgatcgtctctgttacctcacagttcgtattgaaccagattagcggccaagtgctcgaacaggtcgactcatgggacctctctgcctcgtctcctcctgcccaggcctacttttgggttgtccaggagggccttctccact

SEQ ID NO: 64513 - DNA, 2712 bp, Oryza sativa
  Clone ID: PAT_MRT4530_6564C.1
cggcacgaggcctcttccaaaatgtctcccgacgccgacgcggcggcggcggcggcggccggcggcgagggcgcggcggcggcgggggtggggacggcgggtgaagggcggggggtgatccggtgggaccagatcctgccgcggcggtccctccgcgtgctgctcgtcgagcacgacgactccacccgccaggtcgtcaccgcgctcctccgcaagtgcggctaccgcgtggcggcggtggcggacgggatgaaggcgtggggggtgatgcgggagcgggcgtacgccttcgacctcgtgctcacggaggtcactatgcccacgctctccggcatcgagctgctctccaggatcgtcgcctccgacgagtgcaagaacatccccgtcataatgatgtcgtcccaagattctattggcacagtgctcaggtgcatgcagaagggtgcggtggatttccttgtgaaaccagtgagaaagaatgaattgcgtaacttatggcaacatgtatggaggcgacatgcaatgaatagccaaacaaatgcatcggaaaacaatgcggctagcaatcatttaagtgccaatggtggtaatgggtcaaagacaggagaacacagcgatgaggaaagtgatgctcagagttctggtagcaaaagggaggttgaaattcaaagtgctgaaaagttaccagaggttgttgcagatggtggggcaggctcatccagagaacataaaatacagaatggtttcattgatggaatgaacacaaaatcacatgcattaaagggtaatgatgatgctccaagtggaaacgcgtgtggtgatagtgaactacaagtgctttcaactgagaagaatgtgcgttccaaattccttaatggtattacttctgcgaaggttgctggacagataatggataatgccttgaggtttgctgattcaagttcacttcgttcaagtgatcctggaaaagatcttttggttgttgcccagaccacagctgacagaaaatgcaaatcttcagcactggaaaataatgctgtcatggaaaataaccttagtgaaaattcaaaggggactgcaacaggccatgctgaatcttgtccgtctcactttgtggagataaatttagaaaagcaacatcatctcaatggttatacaaaccacaagttgaatgagaaagatatctttaatcactcaaattcctctgccttttcgaggtatggtaataagaggatagaatcatcagctcaacggccatttcccccttccttccgcgtggttcaccaacaacctgtttacgacaagaatccccaatccagccgggtcttgctttcctgtgaacataatacacgcgagagtacagtgcaagctcaggtccctttggacagaagcacagagggtgctgcaatcctgtgttccagtagtgtaagagaagatgctggtacaagcagttcctctcctagaaaggacagtttaactcatccttcttatgggtttatacctgttccaattcctgttggtgctgctataccctaccactacggtgcaattatgcagccaatgtattatccacagggtgcttttatgcattgtgattcagctgccatcaacaagacagcaattcagcatgtctcttgtcaatctaactaccatgaaaatcttggtaaaccgccacagattgatgagcacaagcagccagaagaaaaccatcagttgcatcattcaagacaaattctccgagaatcaggagaaccagttgacttggcgaaggctcatatggagcgtattaaccagagtgctagctgtagccaggatattcgcaaaggaagtggatgcactgggagcggtgaaactgatgcaaatacaaatacggtaattgcactagaaagtggcaatgagagcggtgtccagaactgcagtaataatgtattggatggtgaccggtctcgccgtgaagctgccttgttgaaattccggatgaaaagaaaagatagatgtttcgagaaaaaggtcaggtatcatagcaggaagaagcttgcagaacaaagacccagggttaagggccagtttgtgagccaaaaactgaagtcagctataacaacagaggcagaaactgactagtgacaccgttaactcatactgtacttttgatacttcccttctcagcgaagggcattcgaagtaacccgtgtaagttaaaggctggcaacagttttccttccgtagttagccttttgtacaagtgctctcttcttttgtcggttgtttattggcttccatgccataccttgtaaagacctcaaattgataaaagtgttcagggggtaaagaaattttcaagctggtgctaaaaaaaaaaaaaaaaacggacgagagcgacatgttcccgcctccggaggcgccgacgacgacgaacccgccgccatcaccgccgcctccaccgtcgtcaccaccgccgccgacgacgaagagcagcagcgggtcgacggcgtcgccgccgtcgtcctcgtcccacttctcatcgccgccgtctccgccgtcgtcgtccaacccgtactactacttctacctctccggcagcggcaggcgctgcggcggcggcggcgcggcgagcgtttacacggcgctgatcctagcggcgttgctgcccatcgccacattcctgacgtgacaacgcgcacgaattttagcgcacgatatgatcggaattaa

SEQ ID NO: 64514 - DNA, 475 bp, Oryza sativa
  Clone ID: PAT_MRT4530_65650C.1
agctgtggcataggtcccagatgtagtttaaattttgcattgctatggctgtggcatagaacagcagcagcagctcgtattagacccctggcctgggaacttccatatgccacaggtgtagccctaaaacaaacataaatgagagtaacattaatcaaggaaattaaagaggatttaaagaaatggaaagatattccatgctcctggatgtgaagaattaatattgttaaaatggccatactgcccaaagaaacctacagatttaatacaatccctatcaaattaacaatgacatttttcacaaaactcaaacaaacaatccaaaattttatatggaacaataaaagacccagaattgccaaagcaatcatgggggaggggtggaaacaagcaggaggcatgactctcccagacttctgacaatattagaaagctacagttatcaagacaatgtagtactggtacaaaaacagat

SEQ ID NO: 64515 - DNA, 742 bp, Oryza sativa
  Clone ID: PAT_MRT4530_65651C.1
ccggccgggagccaccgacgcctcgagcacgagcagccgaccgagacccttccgcaagagcaacatggcggcggcggcggtgtacggcggcatgaagggcgggaagctgggcgtcgaggaggcccacgagctgcagctcaaccgcatccgcatcaccctctcgtccaagaacgtcaaaaacctcgagaaagtttgtgcggatctagtgaagggggccaaggacaagcagcttagggtaaaggggccagttaggatccccaccaaggtgctccacatcactacccgcaagtctccctgtggtgaaggaacaaacacctgggatcggtttgagttccgcatccacaagagggtgattgaccttatcagctcccctgatgtggtgaagcagataacctccataacaattgaacctggtgttgaggttgaggtgacaatagcagatgtgtaatgatgcaatgccgagattatttaccttctagttttgtgcgctagaatgtttgttgttgtgtgtcgcgtgttaaattggtccttgtgcaatggcaccttctttgttcaggagtaatctatgttgtttctcaacacacctcgatggagggtgacactctggctcagcttccgtcctgtgctgtcatctatagctgtttggtcgtttacatatcattttcacttttattctttggccccaaatgtgtgtcacgcaggatttcttgattgttaaaaaaaaaaaaaaaaaaaaaaaaaa

SEQ ID NO: 64516 - DNA, 1160 bp, Oryza sativa
  Clone ID: PAT_MRT4530_65652C.1
atggccaccgccaccgccaccgccgccgctctcttctcctcccgcaccctttccccctcctcctccccccggcgacggcgacggcgaggcatccccgccgccgtcaccggcttcctctcccgccgccatgctcccgcgctccaacgccgcctcgcccccctgcacggtgaagatctcatctcaccaatgcgatctcgccgtgcggtccagctcgcacttgtggatgattccaaggaggtagagacggctgccggagatggtgcggaggagaggtcgcagacggacaagctggtggacgggatggacttcggggagctctgcaacgacttcgagtgcataagcagcccctacgtggaggccaccgcgaggcagctcgcccgcgacatcctcgacctccgcgacgacaaccgcgccttcacctgctacgccgtctccgtcaaatacaaggacccggtcagaacatttgttggacgggagaagtacaagaggccattgtggatcaccaaggcactcgaaaaccctacagtgacagtccaggaaatgtcaatgcaatcgacaagcaacctgaccatcaaatggacattcagaggcaaacctaagaatccaatcttcgcaaccatcggaggagacctgatcgtctctgttacctcacagttcgtattgaaccagattagcggccaagtgctcgaacaggtcgactcatgggacctctctgcctcgtctcctcctgcccaggcctacttttggttgtccaggagggccttctccactgttgaagccggaaaggacacaatcgaagctgcaaagggtacagcatctcggctatcatcaaagaaagatgagaacttggaggtttatccagatccctcaggggatcctactaagttcttccaaaggccggatgatggattgaaccaagatgtgtaccagattgcgcttttcctggccgttctctacttcattgtacagtttttgagaacgactctgtgattgtactagctcccacagtcccaactcaacctgatactctggcctgattctccaggtcaagcttttgtgtatcagtgtatgcatatatgtgtgtgtatctatttctaacgaaatcctatcagcggcatgatcgacagttgattcagcatctggctggccggggttttcag

SEQ ID NO: 64517 - DNA, 292 bp, Oryza sativa
  unsure (1)..(292): unsure at all n locations
  Clone ID: PAT_MRT4530_65653C.1
gcgacggagctcagagcgggatggcgacggcggcggcggagtcggggcgggatggcggcggctcgcacgacgacctcgatgacgacgacgacatcagctcgcgacgccgacctcaacgatgccacagttttctcgtcgattccctcgtgtcgtcagtgggtgagcgagcggatctgacgnaggcggaggtagcggtggaaatcggcggcgggaagaagccgagtgacgacggtgacggcgncggcagacctgagcggcgacggcgacgacgacgntgtgccctcgcgcattt

SEQ ID NO: 64518 - DNA, 537 bp, Oryza sativa
  Clone ID: PAT_MRT4530_65654C.1
aactcctccagagctcttgccatggcccccaaaatccccatcttcttcttcctcctcgccctggctgccggcgtgcagggtgagaccggcggtgtcggcggcggcggaggcaacgtggagtacaactgcgtgtacaccgtgttcgtgaggacggggtccgcgtggaagggcggcacggactcgacgatcggcgtggagttcgccggcgcggacgggcgcggcgtgcggatcgccgacctggagcggtggggcggcctgatgggcgccggccacgactactacgagcggggcaacctggacgtgttcagcggccgcggcccgtgcctcccggcggcgccgtgctggatgaacctcacctccgacggcgccggcgcccaccacgggtggtactgcaactacgtcgaggtgacggccaccggcccgcaccgcgggtgcgcgcagcggcggttcgacgtcgagcagtggctcgccaccgacgcctcgccgtaccggctcaccgccgtgcgcgaccagtgccggggccacgccgcggcgtga

SEQ ID NO: 64519 - DNA, 783 bp, Oryza sativa
  Clone ID: PAT_MRT4530_65655C.1
ttcacgcgtccgcctcactccatttcgcagtccatgaccaagtgaagctctcgccgtctcgcggagacgccaccatggcgagggcggcgagggggaaggcgccgaggccgaggccgaggccgccgcgcgggctggcggcgagcctccggcggctcctcgccggggccggcggcgggctgggcgtcgcggcggcggcgtacgtcggggtggactacctgcggtacctctccccggcgtggcacgggcggctgatgccggcgctgtgggcggcgctggcgctcgccgccgcggcgcgggcgccgttctaccgccactggtccgccgagctccgcgccgcgctgccctttctcggctccatcgccttcatgctcggggccttcctctgcgaggccgtctccgtccgcttcgtctccgccgtgatggggctccagtggcacagatctgctgctccacttcctgacactgggcaatggctgcttctagcattgaacgagaagcttcctcaaagtgtggttgatctactgagagcccatgttatcactcttcaccattacttgatgttgtttatcatgctgggtttctcagtgctctttggctgcatcaaagctcctggtcttggaatagccacaagatatatgttcactatggcaattggtcgtttgcttcggacgatgacgtttgtggccacaattcttccatctgcaagaccatggtgtgctgcagctcggtatcaaatacccggccatcctcatccttgggcacaaaatattatgggtcatatgc

SEQ ID NO: 64520 - DNA, 141 bp, Oryza sativa
  Clone ID: PAT_MRT4530_65656C.1
atggtgaaccacaagtttgctatgaaagacctgtgctggcccttccgagcaaaaacatcccacatatctttccatttagggagaccagagctgcagcttcaaaagctcgtgaattgcccagatggcgcctgctgtccatga

SEQ ID NO: 64521 - DNA, 192 bp, Oryza sativa
  Clone ID: PAT_MRT4530_65657C.1
atggcaatgaggacccacgacccgatacccgatgggaaaaatctgcaagcgcacggatataccgatatcttcctccggttcatccaaggacaccaagcaaaggatatgacaggatggagaggatttactggcactggcaacccgctgtttccagatgtcgctctactacgtacccggacagcgagggcttaa

SEQ ID NO: 64522 - DNA, 1164 bp, Oryza sativa
  Clone ID: PAT_MRT4530_65658C.1
atggggacgcgcgagctcctcgtcgttcttgccgtcgtcgtcatggccgccgtcggcgccggcgcgcagtcttcttcggcgtcgccggcgccggcgacgtcgcaggcaccgacggtgcggcagcagacgccgttcgggcggaccatgtcgaccgtcatcacggtgtccatcagcgtgttcttcttcctgctcttcttctgcgcgtacatcaaccagtgtcgcctcgccgaggccggggacgccagggccgcggcggcggcggcggccggcgggggagccggaggagggccgtccaggagagggaagcgcgggctggacccggcggtggtggccacgttcccgatcgtgccgtacagggaggtggtgaagcacaagatcggcaagagcgtgctggagtgcgccgtgtgcctgacgtcgttcgacgacggcgacgacctccggctgctgccgcactgctcgcacgcgttccacccggagtgcatcgacccctggctggagtcccgggtcacgtgcccgctgtgccgcgccaacctcgagaagcctccgccgccgccgccgccgctgccggcggcggcggcggcgtccccttcgccggagcggtcgccgcggtgccagccttcgccgccgccgccgccgccgccgcacgccctggtgataccggtggaggacgaggaagacgacagcgacgaggacgacaggaaggaggaggccgtggagctcgagatgctgcgcagcgagcggcgcgccgcgaggctgccgaggtcgcactcgacggggcactcgctggtcgcgtcggcggccgccgccgccgagtccggcgaccacgagcggttcacgctgcggctgccgcagcacgtgcgggacgaggtgctccggtcgctccgcctccgccacgccgccagcctggtcaacctctcggacatgagctccgaggggagctcgaggggaggacggcgtgcattaggcctcgccttcggcaacggcggcgggagcagccacggcggccgccggtggcaggcgttcttggcgaggacggtgtcatgggcgcgaggcggaggcgacggctcggtgcgcaggggctgggacggctcgacgagaagaggaaaagatgacgccgagtcgagcagaaagggggcgacctcaccggcggccggccggccgtga

SEQ ID NO: 64523 - DNA, 154 bp, Oryza sativa
  Clone ID: PAT_MRT4530_65659C.1
ccgttccaaatcctccaaggcccgttccaataaattcgtgaaggaagtctcttcctacctgaggagggtcggttacaaccttgacaagattcctttcgttcccatttttgggttggagggtgacaccttatttgaaaggtccaccaaccttgac

SEQ ID NO: 64524 - DNA, 329 bp, Oryza sativa
  Clone ID: PAT_MRT4530_6565C.1
atggatgaggggagcacggggtcgtttaaatgggcgcgggggagggagatcgtggccgggatgggcggcaacggggcggcaacggccggcgagatggagtggcgacgtgggcacgtgacgggggcaaaccggcgccgatttccatggggagagtgggggaaaaggtggaggagacgtggagggcgaccgattttatgcggtttgggcgcgagggcgcgagcgggagggccggatttggcgggacgtgggcggcaaccgccggccatggcggctttggcctaggaagccgaaggtaggaggagggcctgacggtggggtccgcggcccac

SEQ ID NO: 64525 - DNA, 489 bp, Oryza sativa
  Clone ID: PAT_MRT4530_65660C.1
atggccgcctccagctcccccatcgtcgtccccgccgccgccgggaccggaagtgggggtggcgccggcggcgagggggttggttggggtttcggggaatcggacaccaccattgcgggtggcgggccgaggacattgctgccccgaggccgtggtacaaaggcagcaagaggcacgtcgggttgcaggcgacgtgcggcggtggaagtgcttggcgcagtcgtcgggcttgtggatgagctcgacgtgggccggcggcagggacggcatccgtccttgcggaggggagacggcttccttcttgggcgtcagttgaaggccagcagtcttgaggccagcgtcggcggtgcactcatcgtaggtcctgaggggagacggcgcttcaagagatctcgtgggcggcggcggcatcgaggagaccagcgcattaggtggcgcgcggaggacggtgaggcggcgcacactgtgttggaggaagcaccaatctaa

SEQ ID NO: 64526 - DNA, 2043 bp, Oryza sativa
  Clone ID: PAT_MRT4530_65661C.1
agcagcagaatgtccacacatgtcagttttacttgcaccgatgagtaattccttctacaaaatttgagtgcacatggaaaatggattgtgatggtcctatacacacacacagcattagcgatcagcatagaaccacatgaaaatatactaggaaattatctttataacacatttgttcacataagaagggaaccccaatggtaaaatctcatgttctgagatggtcggatttcatccccatctcttgaagttgaagttgacattgaggatgtaacgcatccttatctgatccacgttgtaaactatgtactcgttgtacatcaagctaccccttctcgaaggtaccttctcaggtttcccaagtggaataaccataccatcatcagtgatcttggactcagctatgttgggttctgtttggccaactcctttcgtacttagttttccatttggcaggttatcggcaccaaaatctccatatagtagttcattcatttcaccaagtgcaacctcacatagaagcatcacaccagacttgcatgcttctgaagcacaacaatagtttgcactcttggaaaacatatcagcaaagtatacccctttcccgaacatgaatcctgaaataggtgcttcaggaggagcaattcgcaaaccctgagaaagaataccagcccagttggtcagccgagaaccatgccataaaagcatcctattgccagcactagcaaacttctgaaaccgctccatttcaccaagccttgacaccttaaatatttgcactatgtcaacagtataacctgtatgtgtttttccatgggtatttgtcaaatatgtttttatctttctttccctagccatagagtattcttcagaatcaacttccaaaggtgtaaagtcacagcaaaattgcttgtatcgggcatacaatggatgatcctggtcacttgaatcgtcctccagaagcttgattgcaatctcaatctcactaagggcttcaaccatttctagcttagcttttagcttctgaggagtgtcaataatgaattcactcattttcttaaaaccgaagtcatgagggatcacactgtagaattctccagtcaattgttcaagctgtgtcctgtccgtgtctgctcctgaaataacattggaaatccttttcaaaacatcataacccttaagtattgtagatttgcttagctttcccagaggaagcttgtcagcattgtaacctatttccaccatttgctgcttcatcatgcttatatcgcatatgagggatatgaagcttgcagttcgagtttcaagtttcgtttcttctaactgattagtaatggaactggtcttcttattagtttctttatcagcttcaccatagtccatttcaagccaggtgtatttatgtgcataacaatgagatcccttgcgataggaccaatggatatcccgtgtccctaccctcccccatctactgtaaaccatgaagtttccaccagcatcagattctaaggcttggatgatatagaacttattattgttgcctccaacattagtctggttcatggtggcatcatagatctcatcacccacttgcaagacatggtaggccgttttgatgttgtcagggatgtactggtccaacactgcagcacctttcttcgtggccgtgacaatcttctcctttttacactgaactttgtcatcaccatcatcatcttttgcggatttcgtcttgtcctgatcaccaccatccgtgacagcagcagcagcagcagcattagaaggggcagtgtgcagcctccgcacctctaaggattgcagatgcgacgaccgccatggatagatcttcttaggtgcaagcaaagctttgaattgatggatcaacatcccaacacctgacagcgtgcggaggtctccaggtggcgcggcgggtgcgtccaaacctccaccgattggtcgcgtgcagcagcgtcgatgcgccgtgcgaagtatcgcatgcaggtcccgttgctgatgaagcctcctgccggccgccgtccacat

SEQ ID NO: 64527 - DNA, 1841 bp, Oryza sativa
  Clone ID: PAT_MRT4530_65662C.1
atgtcatcctcctccggcgcggctcgccgggcgcgccccgggccatggccccccgcaccgccgccacagccgcaggcgcagcccctctcctgggccaagcgcactggcttccagtcccgcgtctccggcgagtccgtcgccatcgtctccgcctccagctcggggcaggtatcgctgcctcgccccgccgaggcaccttgcgatctggagttcggcacacgggttcactaaagtagggtcatgtatagagatgggcctattacaattattgattgttgttatgtttgcactatacctccgaaaagtaaagttatttggctaccgggtgtttttaatttatgcggttcctcttgctctagggatcacatgggctatcgcttttgttctaacagcaactggagtttatagctacagaggttgtgatgcaaatattcctgcctcaaacaatgtatcagcctattgccggaagcatgtactgaggatgaaatcttgtcgcgtagacacttcacatgccttgcgatcttcaccttggttgagatttccatatccgttgcaatggggcactccaattttcagttggaaaatgggtcttgtgatgtgtgttgcatctgttattgcatcagtcgattcagttggttcctaccatgcatcttctttgtttgtggccacaagaccaccaacagctggggttgttagtaggggcattggtgttgaaggtgtctccacagtcttagctggcttgtggggtacaggagttggatctgcaacaataacagagaatgtacacacaatggcggttactaaaatgggcaatcgaagggcggttgataaatccagttgtcatctcaccaaccgtcgcagctgttggactttcgtttttcagttatgggttcactaaagtagggtcatgtatagagatgggcctattacaattattgattgttgttatgtttgcactatacctccgaaaagtaaagttatttggctaccgggtgtttttaatttatgcggttcctcttgctctagggatcacatgggctatcgcttttgttctaacagcaactggagtttatagctacagaggttgtgatgcaaatattcctgcctcaaacaatgtatcagcctattgccggaagcatgtactgaggatgaaatcttgtcgcgtagacacttcacatgccttgcgatcttcaccttggttgagatttccatatccgttgcaatggggcactccaattttcagttggaaaatgggtcttgtgatgtgtgttgcatctgttattgcatcagtcgattcagttggttcctaccatgcatcttctttgtttgtggccacaagaccaccaacagctggggttgttagtaggggcattggtgttgaaggtgtctccacagtcttagctggcttgtggggtacaggagttggatctgcaacaataacagagaatgtacacacaattgcggttactaaaatgggcaatcgaagggcggttggatttggtgctattgtacttatactactctcttttgttggaaaagttggtgccttcattgcttctattcctgaagttctagttgctgctcttctttgtttcatgtgggccatgctatgtgcccttggcttatccaatcttcggtatagcgccaagggaagctccaggaacagtattgtagttgggctagctttgtttttgtccctgtcagttccatcgtactttcaacagtacagattacagcctaattcaaactcatcagttccaacctacttccagccatacattgttgcatctcatggacctatacacactggatctagtgggagtttcaatggaaatacataa

SEQ ID NO: 64528 - DNA, 852 bp, Oryza sativa
  Clone ID: PAT_MRT4530_65663C.1
ttttatgtgctggtttagcagagtggtaacctgacttgtgtatcaaaattttggcttcgatctgtattatgtgattgcccagtagtagatctagagttcgacacaattagtggctagggatttggttattggcccttgaccagaagtttaatgattgccagtggaatgtcagtagatctagattgggttcttgtgtcaaaccctggctcgcttcatttatcaggtagcaaaccatccatccgttactattgttgccaattactattttttctcagagctctgattcccagacattaagctagacaagttgattcccatattagtctacattgtgtgatttggtccataagagtaatttaatttctataatagagatttaattttcttggattagtcctagcttataatatttattttacatctaaatgatttgtttcttgtatcagccttctaagacaattatgtcaggaccaactaattttcctccctctggccattttgtgaagacctaatgttgtggcaccacaggccatagtttgaatctaaagtgctgcagttaaatatctacagaatgttgcacatcatgaaaatcagggtatgcttctcattcaggccatagcttgaatctaaagtgtatgcagttaattcagaatgttacccaaggttgaagcaccacagaacacggactgttggaagacaattttcttgtacatgtgtttgatgaattgtaactgaacacatttaattttcctatggaccatttgtatatttctaaatccgatttgaatgaatttgttggtactgaacttaaaaaaaaaaaaaaaaaaaaaaaaaaaaaaaactcgagggggg

SEQ ID NO: 64529 - DNA, 1854 bp, Oryza sativa
  Clone ID: PAT_MRT4530_65664C.1
atgtcatcctcctccggcgcggctcgccgggcgcgccccgggccatggccccccgcaccgccgccacagccgcaggcgcagcccctctcctgggccaagcgcactggcttccagtcccgcgtctccggcgagtccgtcgccatcgtctccgcctccagctcggggcaggtatcgctgcctcgccccgccgaggcaccttccgatctggagtccggcccaccggccaggcccaactccgccctcccgccccctcccgccgccgccgcggccaatgcggaggcaaagccgcaaccgccgccgccgccgcctcctgcgaggacgcggaggagggattcggatggcggaaggccgaatgggcaggcggccgcagcgccgcttcctcagctgctggaggaggaggacgacggtgcgccggagcggcccaagtacgagctccgtgacagccccggagtatttccaatagcggtatatggatttcagcattacatctccatgctcggctcaatcatcctgatcccacttttgatggttcctgcaatgggcggttcacctgatgatatggcagcggtggtgtccacggtgttgcttgtctcagggatgaccacattgctgcacacattctgtgggacaaggctgcctcttgtgcagggaccatcctttgtatatcttgcccctgcgcttgcaataatctactcccctgaattctttgggctcaatcacaataactttaagcacatcatgaagcacctgcagggagctatcataataggaggtgcattccaagtgctgttaggatatacaggcctaatgtcactatttctaaggttgataaatccagttgtcatctcaccaaccgtcgcagctgttggactttcgtttttcagttatgggttcactaaagtagggtcatgtatagagatgggcctattacaattattgattgttgttatgtttgcactatacctccgaaaagtaaagttatttggctaccgggtgtttttaatttatgcggttcctcttgctctagggatcacatgggctatcgcttttgttctaacagcaactggagtttatagctacagaggttgtgatgcaaatattcctgcctcaaacaatgtatcagcctattgccggaagcatgtactgaggatgaaatcttgtcgcgtagacacttcacatgccttgcgatcttcaccttggttgagatttccatatccgttgcaatggggcactccaattttcagttggaaaatgggtcttgtgatgtgtgttgcatctgttattgcatcagtcgattcagttggttcctaccatgcatcttctttgtttgtggccacaagaccaccaacagctggggttgttagtaggggcattggtgttgaaggtgtctccacagtcttagctggcttgtggggtacaggagttggatctgcaacaataacagagaatgtacacacaattgcggttactaaaatgggcaatcgaagggcggttggatttggtgctattgtacttatactactctcttttgttgttccatcgtactttcaacagtacagattacagcctaattcaaactcatcagttccaacctacttccagccatacattgttgcatctcatggacctatacacactggatctagtggggtaaactatattctcaacacgttactgtcactcaacatggtcattgcgtttttggttgccctcatacttgacaatactgtccctggtggtcgccaagagcggggtttgtatgtatggtcagaggcggaggcggcaaggagagaatcagctgtcatgaaagactatgaacttcctttcaagattggacacgcattcagatgctag

SEQ ID NO: 64530 - DNA, 1191 bp, Oryza sativa
  Clone ID: PAT_MRT4530_65665C.1
cgggctgcaggaattcggcacgaggcagaaccttgggattcaagaaagcaatagtggtagcgaggaaggagtggaaattgtgtgtttgcagagtgaacagtcatcatctatgttctgttccacaattgatcagttcagtgttgataaatacccatttaaggacttgcgagaggcagttgatgtactcttcctgcatggatcatctgatatggtgattgcaaagcaagcgattttcttgtattatctatttgatcgacactggactataccggattcagaatggaggtatcttgtggatgattttgctgccacctttgggatttctagaagaacattgcttgaatgtctggtattttgtctgttggatgaccattcttcacatgctttggaggaggcatgctctctacttcccaagatttcttgcaaggaaacacatccgaagatagcacaagttcttctggagcgtcataaacctgatgtggcactggttgtgctaaagtgcacagggcgtgataccttctcttctgctgctaacatcgagaaagatgacacagaatctcttagtgaggcagtgactgcagtccgtgtaagaattgagtatggccatctaacagaagcatttatgtaccacaggagctactgctctaaggtaaaagagcaaaggtctgcagatatgtcacatgttgaagatgctaacagttacaaaagctcttggatgtaccatgttgaggtcatgatgaccgagttttgtaatatctgcatcgagaggaactttgttgatagaatgattgatctgccttgggattctgaggaagggaaacatcttcataagtcgctccttgactgtgctcgtgaaatgcccatggagccatgtggtagtctacttgttgttttctacctccagcgttgtcggtatttggaagcatatgaggtcgatcgtagtcttcaaagctttgagcagaatgcattggaaactgctagtgaaaaaaagcatccaaaatcagaacaattgctcagtggagacaaagttggttactaaatgcattgagatgcttcctgaggctgagagggaggatatgagaaccattggcagtgcagagagaaaccaatttgctgtacaaactatgcaaaactcttctccagctaatcacatggtcaaatcaccaaatcctgtcattgcatttagcttat

SEQ ID NO: 64531 - DNA, 379 bp, Oryza sativa
  Clone ID: PAT_MRT4530_65666C.1
aatatatgcgcggtgcgcgaggcgagactcgagaggggggatatgagccacaaatcgggcgctgaacactataattaggcagctatctccgtggaaagagagagtaggctgtcatggacagcttaactgattatgaacagcgggggcgttgccggtggtggtagtggcgcgaggttatcgtcggactcggcattactgtggtgttgctgactaggccatactgcgtggccgaagaaacaccaaggcaggggatctacggtccggctccagcaacgatcctggaggggaaccaccctgagatcaaggacaaggtagtcgccactaacacaccagaggactcaacttggggaactaaggagaccgcctacttctgtggtgg

SEQ ID NO: 64532 - DNA, 696 bp, Oryza sativa
  Clone ID: PAT_MRT4530_65667C.1
atgtccgccgcggcgccggggacgcggctgctgcgcggcgtggtgttcgacatggacgggaccctgacggtgcccgtcatcgacttcccggccatgtaccgcgaggtgctcggcggggacgaggcctacgcggcggcgcgcgcggcgggcgggggctccgtcgacatactccactgcatcgagggctgggcgcccgacgagcagcgccgcgcctacgaggtcatcgcgcggttcgagcaggatggcctcgaccgcctccagatcatgcccggtgcctctgagctctgcgggttcctggacgcaaagcagatcagaagaggtttaatcacccgcaatgtgaagaccgcagttgatttgtttcaccaaaggtttggtatgatgttttctccagccttaagtagagaattccgcccctataagccagatccagctcccctgcttcatatttgctccacttggaatattccaccaaatgaggtggtcatggttggtgatagcctcaaggatgatgtcgtctgtggtaagagagcaggagcttttacttgcttgcttgacgaaacaggacgatacggtccccatgattctttgcctgaaggtgttcgacctgacttcaaggtttcttcgctttccgaagtattctctgtgctggaagagcattttgatttggcaccggtggtttcagagagtagaatctga

SEQ ID NO: 64533 - DNA, 411 bp, Oryza sativa
  Clone ID: PAT_MRT4530_65668C.1
gtgtttatttttggtagaataaccaaaacactagagcggatcataccgtatgttcctagattggacaaatatgttcccaatagaacaggccatggctggggaagcttccgtgtaggcatcggctaaccaagtgtgtaggggaaccaggggaatcttgatgccaaaacccaacaaaatcagaatcaacagaatggtttgggctgactcggtaaaggtctgggtaattactggattgtaatcaaaggaatggctaccacttagtaaactgatgccgagaaaggctgctaacaccaacaaaccaaaaaagggagtgtagagcataaacttcatggaggcataaccccgtttttgcccaccccaaatggccatcattaagtggaagggaattaattctagatcgtacaagaccat

SEQ ID NO: 64534 - DNA, 1842 bp, Oryza sativa
  Clone ID: PAT_MRT4530_65669C.1
gattccagtgccggatgtgcccatggagattacagtggcagatgtactacaagcaacacaatctaatcggtctcctggacctgatggccttaatgttggtttttatagagtttcttggccttggattaaatctgacatcactcaaacggttcaagacttttatgtttcagctgaaagaggaatacgacaaggttgtcctttatctccttatttatttattcttgcattaaatgaactatttgaaatgatatctaatgcaattcaaacaggtcaagtcaaaggagcttctttaactccaaatggtaccattattcactcttcaatgtatgctgacgatcttatgattgtaggtcaagccactcctgaagaagctagaagcatcttccaaattattcaatttttttgccatcaatcaggtcaaactccaggttggaataaatcttctattctgttcagctctcatactcctatcctatcagtgtcactcaagatattttatccattttccctgtctccttaatgaacaacaattccaaacatcttggtcatcctctcattctaaatactaaagccagaaactctgcctacaactttatcattgaaaaattcaaaaccaggctgtcaattattaaagcaaaaactttatcccatgctggtaccaatgatgaagacagtaaaaaaggtatttgttggaaatcttggtctgacatttgtaaaccttttgatcaaggaggtttgggaatcagatatttactaactgttaaaaaaagtcttcttattcaatgtgcttggagaattattgaaaatccaaataacttggtttctaagatcctaaaagaaaagtatttccctcagggctccttttggaaagctttaacaaaaattcctaaatctactttttggagttctattctgaaaatttctcatctctggaatgataggaaagaataggatatttccaaagtgtctcaaatctttgatccccaagtttcaaatgaaattttaaaaactccaattgtgcattctaatactgatgacaaactttactggattcataactcaaaaggtatttgtacttctcaaagtgcttataaagtcttatcaaccaactctatgttacctgctgctaatatgatttggaaagctagaaatgacttctactttaaaaagaaaaactgggaacccattcaggttaattttgcagctcaaatcatgtcttcaaactttatttcttgtcttgatactattgatgaagatcatgaatctcaaaatcatgatgttaacagctggacttctctcaattctgcttcagtaattcgctgttatactgatgcctcctggcaggatggtaatactggtattggaatcttcatccataactctgatactcataaagccctatttattcaagctgcttctaatttcttctcctctcctttacaagctgagcatgcagcaatcatgacagccattttgatttgtcaaaagttaaatattattgatgttactcttcttttagacaatcaggaattagttagccttttgcaggttcaagactattattctcacgaacattattggagcttaaaccctttactttaagatcttatttcccttgcaggaacacaggctcttaacatcaaatggatttcaagacaagttaataagatggctgactttctagcaaaaaaagcaaggaataaatctagacaaaatctgaatcaaatagtttgtcaaaatatttcccacttatgttcccattctgactgtccgactaagacagctttggaatcttctcctaacaaacgaatcaaccaaacatggcccatagctacacttctt

SEQ ID NO: 64535 - DNA, 754 bp, Oryza sativa
  Clone ID: PAT_MRT4530_6566C.1
agaagagggagaaaaaaatatctgaagaaaaaaaaaagaggagaagcggtttgtatttgctggctggtttggtttccacgccctccgatttgattcgctgctgacgtggcacccaccgcgtaaaaaaaaatttgcagatattttcccacctcccccttctcctctctctcttcctcctcctcctctctctcctcttccaaaatgtctcccgacgccgacgcggcggcggcggcggcggccggcggcgagggcgcggcggcggcgggggtggggacggcgggtgaagggcggggggtgatccggtgggaccagatcctgccgcggcggtccctccgcgtgctgctcgtcgagcacgacgactccacccgccaggtcgtcaccgcgctcctccgcaagtgcggctaccgcggtgagtacccctcgctctctccctacctaaaccctaatcgctctcctctcctcgcgattgattgctattgagagttttctgaggagggaattgggggggattggttccctgtttgccctgtgtgctcgttttgatcggaggtgagcagtggcggcggtggcggacgggatgaaggcgtggggggtgatgcgggagcgggcgtacgccttcgacctcgtgctcacggaggtcactatgcccacgctctcccgcatcgagctgctctccaggatcgtcgcctccgaccagtgcaagaacatccccgtcataatgatgtcgtcccaagattctattggcacagtgctc

SEQ ID NO: 64536 - DNA, 340 bp, Oryza sativa
  Clone ID: PAT_MRT4530_65670C.1
gggcaaaaaaattttttggtttttttttggggggggaaccttccaaaacgccccctaaatgggggccggggaaaccttaaaccccccccccggttccttttttggaaaaaaccaccccttttttcaattaaaaggggggggggtttcccccaaagggggggggccgggtttttattatggcgggcattattttccttccaagggggccaccctacccttttgaacaaaaaaggaatttttcctttttttccgggaaaggtgttcccaccctgggcccgcccttggaaccttaaccctgaaaaaattcccgttttttgggggttaaaccctcccggggggg

SEQ ID NO: 64537 - DNA, 222 bp, Oryza sativa
  Clone ID: PAT_MRT4530_65671C.1
atgaactatcatcacaaaaagtacgaggacgcgacctcaggactggctggggagatgggcgcgctccacgggctgttgaagtccgggttccaccaggcccaccactcgccacgtggtcccagctggcgcgacccagttgtctcagacagaagcccggggagctcgggccccgtagatcctttcttgtttaatttgatcccttcctacgtcttgcaccgctaa

SEQ ID NO: 64538 - DNA, 177 bp, Oryza sativa
  Clone ID: PAT_MRT4530_65672C.1
atgggatcgatttcggcactgtgcgagaaaggaatctggtcaggtccggaggaagacgataaagctgggccagtgggcccgacgtgccagtcagagaaagggaggaggcaacccattgaagggtcgaacgcatatgttgggccgagcggtgaaactgcaatggcagaaataatctaa

SEQ ID NO: 64539 - DNA, 1548 bp, Oryza sativa
  Clone ID: PAT_MRT4530_65673C.1
agatgcgagtcgctgttgtttgaaaaagggtgtgcgtgcgaggacagagagagtgcagcggacgatgctcctccaccaccgcctcctacctcgcctcctcctttccccctcgaccccggtcaccaccaccctgctcgtccaccgcacctccctcttcccgacccgccgcatcctctcgccctgctgctccgcgctctcccaagtggcggcggcgccggaaaccgtcgaccactccgacggcgacgagccccagggggatgtgcaggttcagctacctctcgaccggctcttcgtgccgcccggggcgagcgtgtccgcgggggacgccgaggcggtgaccgcgcgggtcctcaagggctccaacatcgtgctgggcccgtacgcgcgcggcgacgcgaacgtgatcgccgcggacttcgtgaagagcagcgtccgccccgatgactgccccagggacgggctaccggagttcgcccttgttggccggtccaacgtcggcaagtcgtcgctgctcaactcgctcgtccggcgcaagcgcctcgcgctcacttccaagaagcctgggaagacacaatgtatcaaccatttcaaaagcttgttcaacaggtatgctgctgcaccacaagaagctcgcacgaattgggatgaatttactagaaattacttcctcggcagggagaatttggtatcagtttttctcctagtagatgcaagtattccagctaagaagattgatcttgactatgctagctggcttggtcaaaacaagtgcaaaatacagaaatcctctcagacaagtaactacgttggaattaacctagtcccggagacaccattaaagacttcttcaaacgtccccatgacgctagtgttcacaaaatgtgacaaacgcaagaagaagaaaaacggtggcaaaagaccggaagaaaatgtagaaaacttccagagcttgatccgtgaatattttgaggcagcacccccttggatcatgacgagcagtgtcaccaatcaaggccgagacgagatacttctgcacatgtctcagctcaggaactattggctcaagcattaagatgaaataaaaatactaatactagaactcaagcagcagcaacgcatgcaaaccctgttgctcattgatgcctcggcaattcagcacctttgcaatcaggccttcaccaactgacttgccttttgagctgttgattgtaaactattgcctctgtacatgattactcaatcaacagattggagaattggggaatacaaacaagctgctacatcaactaccctaggttttctatttgtatatcgtacaatctcagctttttctgtttgttgttttctgattataagctggagcattctgttggttaaaaacaactgctatcagctggtcatgattgggaatcccagtttttgtttgttatgtgctcccttggaccctgcatcacacacatggcaaggagtacatgcatgatgcatttgacatgttaaagaatgatttgtgtgatgtaaaaaaaaaagaaaatgccatattattgggat

SEQ ID NO: 64540 - DNA, 2473 bp, Oryza sativa
  Clone ID: PAT_MRT4530_65674C.1
ccatcttgtaagacgagctagcgcaaatgttgtgagtattatagctaagtacgctgtccctgcaggagaatggcctgagttgttaccttttattttccaatgcagccaaagtccacaggaagatcatagagaagtagctttgatactgttcagttcccttactgaaactatcggaactacttttcaatctcatctgaatgatttgcaacctattttactgaaatgcctgcaagacgaggctagctctcgtgtcagaattgctgccctaaaggctgttggatctttcatagagtatgttaatgatgggggtgatgttgtaaaaatatttcgggattttgttcctagtatcttgaatgtatcaaggcagtgccttgctaatggagaggaagatgttgcttccatcgcttttgaaatatttgatgaactaattgaatcccctgccccacttcttggggactctgtgagatcaattgtacaattttcgcttgaagtttgctcaaaccaagaactggaaataaatattaggcaacaggctatacagataatctcatggcttgtaaaatttaaagcatctttcttgaaaaaacataagctggtaatacctattctacaagttatgtgccccttgcttacagaaacagctgatgaagatggagattctgatctagcagcagatcgttctgctgcagaagtcattgatacaatggctatcaatttaccgagacatgttttcccaccagttcttgagtttgcttctgtgagctttcgtcatattaatcccaagtatcgtgaggctgctgtaacatcattaggtgttgtctcagagggatgttgtgagcatttaaaagataagctagaggactgtctcaaagttgttttagaagctttaaaggaccaagagcaaatggttagaggtgctgcctcatttgcacttggtcaatttgctgaacacttgcagccagaaattttatctcactatgagagtgtccttccttgcatcttaaatgcacttgaagacccatcagatgaagtaaagtctgcaattggctctgtagcagctgctgcagagcaggcttttatgccatatgcagaaaaggttctagagatgatgaaaggctttatggtactcactaatgatgaagatttgtgtgcacgagctagggctactgaggttgttgggatagtggcaatggcagttggcagagcaagaatggaaaccatactgcctccttttattgaagctgctatttctggttttgtattggattatagcgagcttagagaatatactcatggtttttttagtaatgttgctgagattttggatgatagtttcgcacagtatcttcctcatgttgtacctcttgcattttcctcgtgcaacttggatgatggttctgctgtggacatagatgatgctgatagtgttgacaatggattcagtggtgtctcttctgatgatgatgtaaatgatgagccgagggttcgaaatatcagttggttgactattattgcagatatcctaactgcaataagagcaatacctcctgcacatgctgatgtattagagaagcagaaggatattcttgatacagtaatgaacatttatatcaagaccatgagagaggatgatgacaaagaagtagttgctcaagcttgcacgagcttagcagacatcgtgagggattgtggatttgccataattgaaccttatattacacgacttgctgatgcaacactcattcttttgcgtcaagaatcttgttgccagcaagtagagtcggatggtgaagacgacggtgatattgatcatgatgaagtgctgatggatgcagtttcagatcttttgcccgcctttgcaaaagtgatgggatcttattttgatcctatctttacaaaattgtttgattcattgatgaaatttgctaaatctcctcatcctccccaagataagactatggttgttgccactttagctgaggtcgctcagggaatgggagctccaatctctgcttatgttgataagataatgcccttggtgttgaaagaacttgcatcatctgaggcgacaaacaggagaaatgctgctttctgtgttggtgagatgtgcaagaatgggggtgctgcagcactgaaatactacggggatatactccatggtctgcatcgtttgtttgctgattctgaacctgatgacgcagttagagataatgctgccggtgccattgctaggatgataatggtgcagcctcagtcaattccactcaaccagatccttcctctagtccctgatgtgataaatgcctttgcccaagtggtagtctccccaaatgagagtgatgaagtcaaaacagtagttgccaaggccgtttctcatttgatatctgtttatggtcagcaaatgcaacctatattgagtgctctgccacccgctcatgctaatgcattagcatcatttgccaataggagatga

SEQ ID NO: 64541 - DNA, 237 bp, Oryza sativa
  Clone ID: PAT_MRT4530_65675C.1
atggcgaagaagacaggggcggaggatccgccggctcctctaacgtgggtggcggtgacgggaggggcggggagtggacgcggcggcaatgaagtggtggggagggccagcgccgctgttgatgatgatgtttgccagcgatggaccctccagtggactgatcaaatgatgctgaatgttggactggctgatgcggacatgctacgtttccttgtgaaaaatcttgcgacgcactga

SEQ ID NO: 64542 - DNA, 471 bp, Oryza sativa
  Clone ID: PAT_MRT4530_65676C.1
gttctcaagactcctaggaagggaaacacacacacgatagaggctcggtgtacaagacctaacttttgttaagtccaacagatcttacattcctacatgatcctatcatgtcctacacccaagaccacacaaatcaccgtgcacgagccctgttgctccactgccaaattaactcactctgtggcttgcgtagtcaagcatccctgtggggatcagtcaccgatggaagcttcagccactacgaggctgccgggaagcagctcacgggacgccgaaacaaggccacatgaaccccctcgggacgagcttgactgggagctccacttcgatgatgatctcccttatggacggcttattcttgccggttaaggccattaggtagctcctggcgacccagccgatccagacggcgatgtagacgaagagctagcccggggtgatgaactggggccaacgccggtggtcatcggt

SEQ ID NO: 64543 - DNA, 198 bp, Oryza sativa
  Clone ID: PAT_MRT4530_65677C.1
atggcggccggagtcggcacggctatgacggcgagggcttaccacggagtggcgggatggcgaagttcgatggcgcgcggcgcggtgtggccgaaacaggggcagccggcggttggtgactgtcgcaggtttcggttcaatgcactggcgcggcctgattacctattcggtagggtcgcaggagaggggggaagctaa

SEQ ID NO: 64544 - DNA, 597 bp, Oryza sativa
  Clone ID: PAT_MRT4530_65678C.1
atgccgccccataagatattactattggaaaaggaccgccgcgcctccctcccgttgctcgcgctcctcctcaacttccgcgtcctcgccgccgccgcggggtcccacttctcccctgcggtctcccgcatcgcgggccacctctgcctctccccgtccatggccgccgtcacgctcctcgcgctcggaaacgacgcgcccgacgtggcgggcgaacaacgacgcgggagggacggcgaatggcacggcgatgagcgcgacggccccgacgacgaacgcggagacgaacgggcgttggcggccggcgacgggcaacgcggcggcggagacggcggcgaccagcgggtcgggaggaggtcggcggggcgaggagggagaggagaaggtccggcggttgactcgccccgccgccgctccgctccgctggcagcgcgctcgtctgccgccgccggtgctccgctccgccggccgcccgctctctacgcgctcgtcgctgcaaatactggctcagcatcgtccacaacaagaagaacaggctcttctacctgctacgctgttagcacacaagagaacactcttagacgtactcacacctgg

SEQ ID NO: 64545 - DNA, 1497 bp, Oryza sativa
  Clone ID: PAT_MRT4530_65679C.1
atgcggctgcggctgcatgcggcggcgagcgcaagatggttcgcgctaccggagacggagacgacgacgacgacgacgccgccgccgccatcggcggtagaagagcctgttcttgtggttgtggacgatgctgagccagtattggcagcgacgagcgtgcagagagcgcgcggccggcggagcggagcaccggcggcggcagacgagcgcgctgccagcggagcggagcggcggcaagcgaacggccggagcaggcccgcgagcgcgcggcggcaggcggagtggagcggagcggcggcggggcgagtcagccgccggaccttctcctctccctcctcgccacgccgacctcctcccgacccgctggtcgccgccgtctccgccgccgcatcgcccgtcgctggccgccgacgcccgttcatctccgcgttcgtcgtcggggccgtcgcgctcatcgccgtgccgttcgccgtccctcccgcgtcgtcgttcgcccgcgacgtcgggcgcgtcgttgccgagcgcgaggagcgtgacggcggccatggacggggagaggcggaggcgggccgcgaggcgggagaccgcgggggagaagtgggaccctgcgacggcggcgaggacgcggaagttgaggaggagcgccgagcaccgggagggaggcgcggcggtcctgggcagaagaggggaaagagattaagagagagggtggtgacgtggacaccgggacatgggtccatcgagggcgcgtggcagtcagaatttggcaaggcagcgggggccgggggcatggcgctgtggaacaacagcgccaccctatgcagcggaccagtgacactgatacagaagtcgctgtcgagagtcatggtttcgtcgacgcgcacggtccgcgacctccacgacgggacgccggacgcagcggaggcttccgctcgagggaggacacggaggcgggtgggggacggggatggggaagaggagggtggcaatgaagggacctcgctgggaggcgcaggctgcggcggtgacgccgacggcgacgacttgcttcctagcggcgccggcggttgtggctcggaggcggcgtcgatggctgattggctgcaggtcggcgccgccggccgacgggtggggaggagaccgacggtgcgaggtgggagagaaggtccggcggtcggcaacgtggcggcggtggcggcggagacgacgcgggcgcaggggagcaaggcggcggcgagatgcgtggtgtctagattacgggatattgttatttggggttatatgctgcggatgagaggtgtgccgctgatggtgacagctcagtatggcaatgtgccgagggccgagggccgatgcggcggcggtggcgtcaccgatggctgccgtcgaggcggtccgggagaggcggcagaggaaggggagatcgagccatcgaggatgacgacgccgtatcgacggcatgtcccgtttctccctcccgggagaggtcgtaggtag

SEQ ID NO: 64546 - DNA, 1301 bp, Oryza sativa
  Clone ID: PAT_MRT4530_6567C.1
cttctctctctctctctctctctacaacttctcagctaagctaagccaagctagagccatctagctacttttgctgctttctctctcctcctgcaacacacgacctagctgagagctgagctgagttgcgccggccatggcagcatcgcagaggagcaggagcacggcggcgcagctcgacgtcgacgaccaggcggcggccgatcagctgatgacgatgatgcggcggccagcggcggtactacaggatgaggccgccgccgaggaggaggcctccgcggcggcagcggacctgcagctggagctccggcgagggccgtggaccgtcgacgaggacctcaccctcgtcaactacatcgccgaccacggcgagggacgctggaactccctcgcccgcgccgccgggttgaagaggacggggaagagctgcaggctgcggtggctgaactacctccggcccgacgtgaagcgcggcaacttcaccgccgacgagcagctgctcatcctcgacctccactcccgatggggcaaccggtggtcaaagatagcgcagcatttgccagggaggaccgacaacgagatcaagaactactggaggacccgagtgcaaaagcatgccaagcagctgaactgcgatgccaacagtgctaggttcaaggatgctatgagatatctatggatgcctcgcctcgccgatgcaagccagctcggtgatcaccatgggtataatagtaccactgccatgggcgatgctcatgggatgccagtgatgacatcgtcgtcgtcggactcgttcgcgacatcagagtcatacgatgggggcctttatgcaaatgtgcaggacaatgagatggtgaatggtggggactactggatgcagggagcaaataaagggttttgtagtaattatgagtcagagcaacttcatcctcatgagcatagccagtttcaggatccagatcttgttggttgggttcagggcttttctgagggcatttccgagaatttttggagcttggaggacatttggaagatgtagtgaattttgcattaatttgtattgtggctatatatacacatacgtacaggagtatacattttataatattgattgataactcgtggaacaaagattagagtcagcttattctaacttcaaaagttactacgagagaaaaaaagtaaatttcttctttgattttcctttttttttgtatggatgtcgattgacacatatgtatatgttgtcccaacaatgtaaaacatataagaagacgtgattgttactacaacttttgggc

SEQ ID NO: 64547 - DNA, 546 bp, Oryza sativa
  Clone ID: PAT_MRT4530_65680C.1
ggaaatcataaaaggaacctcttcgatcaacttatcttagggctacaggggactcaaaacaacaagatggccctccaactcaaacagggggggggatgggggaaaaaatcttgcctgaaaataaggacaagcaggatgaaaagctcaaaggcgggctagccatccaaaaaaaaaaattcgggggggacaacaccaaaccggggaaatcatgaactgggttgggcggctttttctccttatttgggaaaatcatctcttggaagaaaaaccctgagaggctcctcaaatacggggcatgccctctcaaaatcttgcggccccttacaacaaaagccaaattcgggggggggagtaatacatgcagccggcataggcgcccctctccttggggcactttggggggaagttctttcaacagggcaaaaacccaaggcttgacctgggggcccttttcaaggcacttttgggggtttgggggcccttcttcttgcagttgaggaaggccactttttccggcctgcaccgacgggggatgtgctttgaccc

SEQ ID NO: 64548 - DNA, 108 bp, Oryza sativa
  Clone ID: PAT_MRT4530_65681C.1
atggctggtttggggcctgatcacggatttgtccaagagaccgaggggaactggtcttgggtggtcaaggcgactaattacaacacatcctcgtcggcgcgttttcag

SEQ ID NO: 64549 - DNA, 550 bp, Oryza sativa
  unsure (1)..(550): unsure at all n locations
  Clone ID: PAT_MRT4530_65682C.1
ggtgtggnngtttttggtggggtcgtcgcctgatccctcctccctgcggcgnngatcgatgatggaaggaagagaaggggagcagaggagaggagaggaatctcgtcgtgtctgtcagtacaggagggggagcgatgagacggacgagacgagcgggcgacccccatgatttcacgcgattcaggagcagcagcagaggcaattccttttcgctggctgctgcagccttttgtggcgcagataactagatgactcatgccagtccgtcaacgctcgctaggagaaccaactcctcctccttatgtctggatgtcaaagtttgcccgctgatggaatatgagtcagaattctttggatgcatggttcatgaaatttctttgtgggtctagtttcccaaatatggtaacatgcttatagtatgcttctctacactttctaagctttcaactactttggttcagcaaacccatgcactggaatatactccctccgtattttaatgtatgacgctgttgactttttaacaaatgtttgacctttcgttttattc

SEQ ID NO: 64550 - DNA, 243 bp, Oryza sativa
  Clone ID: PAT_MRT4530_65683C.1
atgggcccgggggagcggccggggggcctcggggtgccacgtcatgcccctcgggccctcgcgctgccttgccccgaggccctcgtccaactgccatgtggcgggggagcgagcggggaggggacccaggctgaaccgctatcaatgcgcgcggcgccccaactgcctctcaccgcatttaatacgagcgtcatccggagttctcccggcgtgaggaagacggccaaggtctccacccattaa

SEQ ID NO: 64551 - DNA, 511 bp, Oryza sativa
  Clone ID: PAT_MRT4530_65684C.1
tcgtctttatattgtgtaactaggtaatagagaagcctaacctcctcttcttcaaggcgatcatcaacttcctgcaagtcctcctgaatttccttctcaaattctttgaagaatatgatctaaaaagaagagaacaaatgtcatagttcacagaaaaaacataaacacgattattaaccctctgaccctcatgcaggtatgaacttgacaagtgcacaagtgcaaaaagggtgtggaagtaacagtagtaaggttaataatcagccttaattatattgttaaattctgctgacatcttccatgaaaaggaaaagcctgaaatttttatcatgaatgatgttcaaacttgccatttcaaaaggtatattcattcttccacaagggtatattatgtgagaataacaagtgtagctgcaagaggtccaagcatatacttaataaatgcaatgcatatgcaagtcgatgaaaaccttacttgatatcgatttttggaggttggataccacgagca

SEQ ID NO: 64552 - DNA, 428 bp, Oryza sativa
  Clone ID: PAT_MRT4530_65685C.1
attttctggatagccaagctgagtacgatgaatcatccggagaggatcaggatgccaaggtttcaccatccgctgaggatgaagaagctggcaagaaagctgaggatggcaggtccaaattgtcagacgaacagaaagtgaaacagcagagaccacataagattcagatatggtcggaaataaggccctccttaggccacattggggagatgatgagcttgcgtgtcaagaagaagcaatcttctgcagataaggagaatgcagcgaatgaactccaatctgcaaataatgaagaaatcaaaccctcagaggactccgatgatgagttctatgatgtagagaaagttgatcccaaccaagaagggcctgtagctgatagtgctgatgctgattcaagcatgaaatgtgatgcgaattcagaagggcat

SEQ ID NO: 64553 - DNA, 396 bp, Oryza sativa
  Clone ID: PAT_MRT4530_65686C.1
atggcggttttacccttcatcatccaggtgttgaagtgttcatgggagcagcaagatccgttttctaccaatcgatttggaaagcgtgggtgccgccgaaatgcaaattcttctcttggcttgctacccagaataggctatggacggctgacagattggggaattgaggctagcgaaatcaaaaggtttgccccctctgccgcacaatcgacgaatcagcggttcaccttctggccaaatgtagagtcactaagaggatttgggcagaaatccaaagatggacacatactgacctccaaatggacaaatggaatgactgcccctcgattgaacattggtggaaccttgtcgtcgaatcccccagcaccccaagagcccctctgcgaacgctactga

SEQ ID NO: 64554 - DNA, 603 bp, Oryza sativa
  Clone ID: PAT_MRT4530_65687C.1
atgatgcttgtagtttacggagatttcgaaggtggtgcagaatgcttttataaggaaaatgcatttagcatgatgcgcactctaaggaaaaggcttgacatggataaaattatgacaaatattttcaatattttaggtgcgccatcagaaatcgccgacagaaaaaagaccaaggagaaattcaatttttctgtcggtttcccgacagaaatgatttttctgtcgggtattcctgtcggttggctcacagaaaatatcaactggcgtcaggaaattgtcttccagcagcaatccaagttctgtggtgcttcaaccttggccatgaaaccaaaaagatatttaactgcggcatttaagctgcaagctaaggtcgacctcgacgacgcggggtggtgtgagggacggcggaccgcttacctcgaggccggatctggagctggtgaagctagggtcgtgggatttggagtacccaaactcgggatggttggatccgcgacctccgagttcagggtgtccggatctggagcacctgagtccatggtggctaggaccggtcaccggaagggggagggtcggcggaggctcgtcgtcgaccggagatga

SEQ ID NO: 64555 - DNA, 295 bp, Oryza sativa
  Clone ID: PAT_MRT4530_65688C.1
cccacgcgtccggggtatccgacatgaagtacaaggattaggcggcattcgtgcacatcggcctcttttttttggccttggaacctttggggccccttgaaaccctggaataccttgggggcgggaaatcgggggggtatgggattttggttggacctttgggaagcctcttacccgttttcgtttacctgagctggtggggccattcagtcgttaaaggctgaaatggaaaggatggggaataataataataactagcatgggggtccgcgcaaatggcgcggttagcatcttt

SEQ ID NO: 64556 - DNA, 402 bp, Oryza sativa
  Clone ID: PAT_MRT4530_65689C.1
ggactagtatctacccatggtataaatatgtacaccgatggtctttgtaatctatctcttgatcaatacaactactctcgacgtatcgccaccctcttttccgaggtttttacttatcaaccggcagaacttggcacgtgacgcgtgttgcatcggctttcgatctctggcgagggggtaagtcctacgttccgccggccctggcaattgtatcggctacattggtgttgttcaaggctgtattgtttcgacctcttagattgctctagtttggttgatatatttgcctaccggtttatcatatatcttagttaatctaatttgattattcaatttacttgtatcgatctgatcttttctagggttttactggtatcggctaaattgtttgtcggtctagat

SEQ ID NO: 64557 - DNA, 575 bp, Oryza sativa
  unsure (1)..(575): unsure at all n locations
  Clone ID: PAT_MRT4530_6568C.1
gagcncactatttcaaaggctgccctnnnnnnnnnntntnngaataagcgggaatataggcatatatatccgaagtttactggggccattgaactaataataaaccgcactaaccagccaaagcaggtaataatgcgcgactgaataatattcgcgggaacctatccagcattcaccctccaagatcctgctcaagcaataagctctcctttttaacaagatgattgaggactgaatagtacgggctgggattatctctcagcatacatagtccacaaactatgggagtcaagtaagtgcagcatcctccatagtagcactgtccttaatccctcgtatcatcttaagcacttgccacatcaccggcctctgctctggcgagggtgcactgcaaataccggcaacctccgggagcatctccaggcggtcggcttcgctgccggcatcgaccctcatcgttctaacccaatcttgcaaatccggtggcgcaagaaaagggcgctgggaagggtgtttgcccgccaaaagccctatcagaagaaccccgaaggcgtacacatcagacctagcagggc

SEQ ID NO: 64558 - DNA, 2709 bp, Oryza sativa
  Clone ID: PAT_MRT4530_65690C.1
atggtcgccaaaacaactccggcggcagcggttacggaaattcgggtggcaacttctaccaacagcagcaggccggtcttcgtcctgccggcccgtggttctgcttcaatccatgggctgcgcaggcctctacatggcgccctcccagcaatcccggcaacagtgctggcctccttggcccgtatcctcaagctcacacagcttttgccggttcctatgtgtctccaccaactccaggatggcctccaatgccgcaagtccagcccaactgggaccaagctgccgcggtatcgttcttcgcttgtcctgtcatacacttctccccaaaatggcaaagccgagcgtgttcttcgcacaatcaacaactccatccgcaccctacttatacaagcttccatgcctccttcctattgggccgaggctctagctactgccacatacctactcaaccggagaccttccacctctgttcgcaattctatcccataccagctcttgcataacaagcttcctgactattccaaccttcgagtctttggttgcctttgttatcccaatcttagtgccacgacacctcacaagctctcccctcgttcagcaccttgtgtctttcttggctacccggcttctcacaaggggtttcgatgcttggacatctctactcgtcgtctctatatttcccgccatgtggtttttgatgataagacgtttccctttgcggctattccccaggatgcctcgtcttttgattttcttttacagggtttctccaccgcggtagctccctcctctgaggttgagcgtccgcgattttcctcggtgactccctcccatgaggttgagcaaccgattcccgacgatgacacctcaggcaccgaacttttccagcttctgcctggacttcggtcttctgctgccggccgtcctcttgtcggcttgcctgttaacgctcgacttccgggcgggtgtgctaatggtgccgctaatggctcttcttcaagcaatccttctccggttatggatcctcctgctgcttctgtcgttcgaccagctccatctgagggaccaaatacatcgctgatttctccttatcggcacacctacgtgcgccgatcacagccggcacctgcagctattcatggcccgattcgctcctctcgagcgttccgtagtgctacagatcaacagcagcagacaggtcacaccatggtgactcgttctcagaccggccatctccgacctatccagcgtttcacttatacagccactcatgatgctgtttcgccggttccttccaactatcgcagtgccctggccgatccaaattggcgtgctgctatggctgacgagtacaaggctcttattgataataacacctggcgattggtacctcgtcctcctggtgccaatgtggttacaggaaaatggattttcaaacataagtttcattctgatggaactcttgctcgtcacaaggcacgctggatgtcaagaatgcttctccatggcaacctcgaggagactgtgtattgtcaacaaccatctggatttgtagatccctctgcacctaatgctgtttgtttgctccagaagtcgctatatggattgaagcaggctcctcgtgcatggtaccagcggtttgcgacatatattcgtcagttgggtttcacatcctcagcttcggacacttctctctttgtttacaaagatggagacaatatcgcatatttgctgctgtatgttgatgacatcattctcacagcttcgtctgctactctacttcatcatattactgctcgtcttcactcggaatttgccatgacagatcttggtgacttacattttttcctgggtatttctgtcacacgatcttctgatggtttattcctttctcagcgacagtatgcagttgatttattgaagcgagctggtatgtctgaatgtcattctactgcgacaccaattgatgctcggtctaaattgtctgctacagatggtgctcctgtttctgatcctacagaatataggagtcttgctggtgctcttcagtatcttactctgactcgccctgagctcacttatgctgttcaacaggtgtgtctattcatgcacgatcctcgtgagcctcatcttgctcttatcaaaaggattttgcgttatattaagggcacacttcacattggtcttcaccttagaactacaccagttaactctctgacagcttactctgatgctgattgggctggatgtcctgattctcgtcgctccacatcaggatattgtgttttcctcggcgacaacttggtctcatggtcatctaagcgtcaaactacagtttcgcgttctagtgctgaggctgaataccgagctgtagcacatgccgttgctgagtgttgttggttacgacaacttctttccgaacttcatatttcgcttacttcggctaccgttgtttattgcgacaatgttagtgctgtctacatgactgcaaatccggttcatcatcgccgaacaaagcatattgaaattgatattcatttcgttcgagaaaaggttgctttgggacaggttgattactttgccaggatctttccaggagtggctcatggctttgcttgcagatataacggcagcaacccgtttgctgtcagaactgctgaacaatctcttgccttaatgcttgactggtttgagaaacacttgaaatga

SEQ ID NO: 64559 - DNA, 1224 bp, Oryza sativa
  Clone ID: PAT_MRT4530_65691C.1
atggcgtccaggagagcagggcgggagcgggacccatgtgcggatggggtatcccgatcccccttcacggatgaggacgtacgagtgtacagcgattctcgtgggtatttctcctccggggggcgcgatgatgatgccgggccattcccaacctccgatgaactctaccaccactatcgcccccggacgacgcccagtgatccagtcccgccgccgctttcttcacagtgctcttatcctgaatctgcacatgcactgcaagaaccagatgttttgtccttgggaaagcttcttgatgctacaacattgaaagaatcaatcacttgcagtccctcttcctccccgcaggccgtatcaaaagacaccatcaactcttcaccatcagtccgttgcctttcctcccctgggtcaatcatttgggttcgggaacctcctgaagaccgccttggggtataccacattcggatggatcgtagtgggtcattccacatgtatcctgatctgggtggtccatttcagagcttgaatgaagctcaagatgctatcagcagccatcttaacaggatttatccaccagtaaagttccaagagcgacctggggagtcatatgtggacaggatgataagggaaaagctttattggcctgatggcactaggaagaaatgttccaaagcacaggcatttgagaatgtcaaaaatatgatgaatcaactagctaaggtgatattagacatgtataatgatgatcaaaattttttggaggatctttcctatgagcttaaagaggtcgttagcttcgaaccaatatttgagagtcataggtggtttgatcatataaatttcactgcaaacactaaaggatctaaagggctagatcgtgaccatctattctttgctgaagcaatgtctctagaaggacaaaaggattatgtggtcacttgctgctctttgataagttctaatgacaatggtaactgctatacctgcaagtttgggaacagaagtatgaagcacccaaatgatgtcaattcatatgttggcggccactgttatatcactgggatatatgacactgaagtgtcgagtgactctgaagaggatgaggatgcagaggaacagaggttaagaaaaatgtatcaggacgaggatgcagaggagcaaaggctaagaaaaatgtatcaggatcttgatgacccaggtgtgtgggaagagctttttggttga

SEQ ID NO: 64560 - DNA, 576 bp, Oryza sativa
  Clone ID: PAT_MRT4530_65692C.1
tgggaggcatcctcaatgccgagttttggtttggaagctgaggtcacagctaccgaccaaaaccgctctaataccattgaactcttcaagcatcatccttgccatgtcgataagcgtcctgatcttcctttctaccacaccgttttgttgtggagtgtagggagcggagaactcttgcttgacaccttcctcctaaagatactcctcaacttgtaggtacttgaattcgcacccgatggggcttcttatctgtttcaccttgagctcaaattcgagttgagccctccttagaaagcgcttgagggtcccttgggtttctggtttatcctgcaaaaagaatacccaagtgaagagggaaaaatcatcaacaattactaaaccatacttacttcccgcgatgctaagataagcaacgggttcgaagaggtccatgtggagaagctctagtggtcttgatattgtcatcacattcttgctgtgatgagagctttccacctgtttccctgcctgacaagctgcacaaggtctatctttctcgaaacatacattggatagtgctaacacatggtctccctt

SEQ ID NO: 64561 - DNA, 201 bp, Oryza sativa
  Clone ID: PAT_MRT4530_65693C.1
accaggcaaaccacaccaatccccctttgattaatttcactgaaaatagcccgggtccattacatcacacaaatttataccttgatacacccatagtccccaaaaccaccaacttcttaattaatcgaaaacacacgggtttaattcaccaataatcagcccacacacaaaccacactcatttggggggtttttattgggg

SEQ ID NO: 64562 - DNA, 375 bp, Oryza sativa
  Clone ID: PAT_MRT4530_65694C.1
aggtggacgattcggaactctgtggtgtgatgacccaaagaaggggcggatgtatgccgatttcattggaagtgctggaagcatcttcgagctcatcactccgctctatcctggatacttcctcccacttgcgtccttggggaatctagcaaaggctgtacgaagaggatttagggatccatccttccgtgttatccaaaatcacttcacggaatctggaaatttatgggaggttgctgcaaaggaggaactatgggaagtaggagctcacttggtaggcctttctatcggtgtatttattatggatacatcaagtataaagtcatcatacccaacacttgctttgacatggcttggtgtccgtcttttacatct

SEQ ID NO: 64563 - DNA, 615 bp, Oryza sativa
  Clone ID: PAT_MRT4530_65695C.1
ttagttggccttctcctcccctttgcgcacgctctctagcagccgactttgtcgtgcgtcgtgtcgccgcgcgtcggctttgaggctgcccgcgcgtggccgactgccttggcgcgccgtcacccgtccgatgctctcagcccaccgccgccgcgccaatcttgacggcgacaaagccaggacgacgaccgccgcacgaaatcgccgctcgatgccgtgcgctcccgtccaagccgccgccgagtgcgatttcgcttccccgagccggccattttcaccctcgccgccgccgcgcgtcatgcccggattggcgccaacacgtcgccagccgattccaaccgtggtcaagtcaaaatccttcgccggtaagtattcgaacgtggcctcccgccactcaaatagatcttgcccgccctctctcagcctctgccacctttgcctcatccaaatctcgagctcctccatggcgatgacggtgcccgagctcatccgctcctccctcgcctgtcggtcgaacaccttgtgcgcgatcgactccacccctctccatccatcttccgcccgtgccaccgccgctctagccgctaggccgtccacacaccaaattagttccat

SEQ ID NO: 64564 - DNA, 1374 bp, Oryza sativa
  Clone ID: PAT_MRT4530_65696C.1
acccttccaaatccactcgctggcgatactgcaggaccggagcatatgctctccgcagccgccgccgccgccgccgacgcgcgcttccatggcggagctccccgacgaagaagaccgcggctacgctcctgcctcgcgtccccgccggcatccggtggaggaggaggagactgccgcgagttggaaaaagcgagacgtttgctcgtggagagataccaggatggggtttccaagaggtatatactggatggaaactctaagctacagattcaccaggagaagaatgaacatatggcgaacacattggaagaagaagaaaaagaagaagcaaattcttcgattccccgtgctattaaggattttgtacttcccgcggggtttccagggtctgtgtcagacgattacctggaatatatgctatggcaattaccaacaaatgtaacaggatggatctgtcacacgctggttacatcaacccttctaaaggctgtaggtgttgggtcctttacaggaacttcagcagctgcttctgctgctgctataagatgggtatcgaaagatggcataggggcttttggacgtcttctaattggtggacgattcggaactctttttgatgatgacccaaagaagtggcggatgtatgccgatttcattggaagtgctggaagcatcttcgagctcatcactccgctctatcctggatacttcctcccacttgcgtccttggggaatctagcaaagaaaatcattgattctggacttcttaagcaggctgtaggaagaggatttagggatccatccttccgtgttatccaaaatcacttcgcggaatctggaaatttaggggaggttgctgcaaaggaggaagtatgggaagtaggagctcagttgttaggcctttctatcggtgtatttattatggatacatcaggtataaagtcatcatacccaacacttgctttgacatggcttggtgtccgtcttctacatctttggtttcgctatcagtccctatcagttctcaaattccgcacagtggatagactattgaagttgtacagaaatgagaaatacatcctctttctcaatccgattggaacaggccgagcagcattttttgttacattcaaggaggctgcaacgagcatgtcagtcctcaggagcctatggcaagcgcattggcttgacaaaaatcagctaaggcaggatgatgttttctcttggctagaggagagcgttcttgcgttggagcacggattccctgacttcctcaaacagatggaaatagctggctgggatcagaaccagatcatactgaaggtgccaaaagaacccatcatggtgatggaacaccctgaccaagaggtgtaa

SEQ ID NO: 64565 - DNA, 390 bp, Oryza sativa
  unsure (1)..(390): unsure at all n locations
  Clone ID: PAT_MRT4530_65697C.1
tagatccgcgagccggccgcccctttnttnatttttttcaatatgaaagacaacttnnaattntatttatatcaccctaacttacggtgatcgccacatcagtgcggaatctggctcacgctcgagcctctgatggccacccaccctccactgagcctggacctccccctaaggccgccggcgaccgcagccccatccctagccaagcccaaggtgcttgacgaggatgacttctttcaccagcagcctcttaagaaagacccacaagttgctgcgctggaggcggagctgcagcggatgggcccggagaaccagcagctgagccaaatgctggcagccgtagcggccaaattcgaggcgcttcaaaacccggtcagcgacatgggcacc

SEQ ID NO: 64566 - DNA, 243 bp, Oryza sativa
  Clone ID: PAT_MRT4530_65698C.1
atgagcgatgcgattttggtcgatatcagacggagcagtggtcctcgtcgccgtcgtcgtctccagccggaggaacacaagtccccgagatcacgcgagatcgatcgatcggagacaaaattacgtgtgcagatcgactacagagagccgggaagacaggcagggcccgagatagatagggacgccgcgccggagccacgaacagggcacatggggacgccgaatcgtctcggcttaatctaa

SEQ ID NO: 64567 - DNA, 386 bp, Oryza sativa
  unsure (1)..(386): unsure at all n locations
  Clone ID: PAT_MRT4530_65699C.1
cggcggcggcggcgcacgagcacnccgcggtggtcgccgtcacggtcccccccgaggaagcccggatgcagggcaaggacgaggcctaggctagacagataggtccnctgatcggtgaaccattgcgtcatttcnccatcttttcttgcctctgttcttccctganatgttgtagtggcncataatgatgtaagcaatggtggtaattaagtagtagtaaattagtaattagtaaagctaatgtggtgtggaanatgaggaggatgcaatcatgcaatcgacgagggagagttttgtaacctctctcgatctggttattcncanatgatttcaggttgggattgttatctcatctaaaaaaaaaaaaaaaaaaaaaaaaaaaaaaa

SEQ ID NO: 64568 - DNA, 619 bp, Oryza sativa
  Clone ID: PAT_MRT4530_6569C.1
cccgcgtccgcttctctgtctctactctctctacaactcctgagctaagctaagccaagctagagccatttacctacttttgctgctttctgtctcctcctgcgacacacgacctagctgagagctgagctgagctgcgccgggcatggcagcatcgcagaggagcaggagcacggaggcgcagctcgacgtcgacgaccaggcgggggacgatcagctgaagacgatgatgcggcagggccgcggcgggactacaggatgaggccgccgccgaggaggaggcctacgcggcggtagcggacctgcagctggagctccggcgagggccggggaccgtagacgaggacctcaccctcgtgaactacatcgcacgaccacggcgagggacgctggaactccctcgcccgcgccgccggcaatataatcaaatcaagttgtagtcaatcagattcgatgtcgatgtgaggcgaattatatatggaatcgatgaaaatagagatgatgatcgtgatcgatcgatcgatgaaggcgtgaagaggacggggaagagctgcaggctgcggtggctgaactacctacggtccgacgtgaaacgcggtaacttcaccgccgacgagca

SEQ ID NO: 64569 - DNA, 442 bp, Oryza sativa
  Clone ID: PAT_MRT4530_656C.1
tttcgtttatacagttcgatgagcccctggttttggttacttagtctcatggggtttgcttagatgacagttggtattcgtattgactgattttagctgagctttcattggtcagggggtatttgattatgaatatctgatgattttagctatgttttacaagagtttgaaagtgagctttcgtggaattttgaattgcaaaaaccgtgtgttgtactgttgtgattgccatcatagtttatccggcactttttgtttctaggacgagtctctacctgcgttacaacatgttcgatagatatgttggcaacttggcatgagcattgaagcccacgtttcccaaccatgcttattgaaataattcagaccacaataataaatggctgctgtatagtgtttcagaccgcttttaacttttacattttctcttgctgaaaacatt

SEQ ID NO: 64570 - DNA, 638 bp, Oryza sativa
  unsure (1)..(638): unsure at all n locations
  Clone ID: PAT_MRT4530_65700C.1
gtaatacgantcactatanggngaattgggtnccgggnccccccncnantttttttttttttttttttttatatanaaagctgctatatnttccaacatncncaacttggantcnaggaaaaagaacatgggcgcctcnatntattganagctcnacccnttattaacatactacttatatatcntganactcnnttatactgttataaccagcacacaganntcgatnatncaacaatcnatatcctaacttccaaagtngctantncatcnatctcnanatnatttgtttatttcncnaaaccgttttttgggtnanacagcttccatagctgtncccaatggccnagccgcgtncatgttntactccccatgcttcaccttgtctaccancgttatctccntactggatgttnaacgaagccgtccacnaaacnaggattttcnttgataaaatcntgcctnanttggctngatcccaaagttggggttttcnaccttggttncttgancncaatttaaaaccntttctgccncacctaaactttcngggntgantcccccgggtgctcccnttnanaacccctggaggttntttttaangggacccttagntccnccnnccccccntcaanctt

SEQ ID NO: 64571 - DNA, 635 bp, Oryza sativa
  Clone ID: PAT_MRT4530_65701C.1
ggccgcaaatttttttttttttcttttgtgcacccaatatattgatatcgctccaatattatgcattattaattctgacatcaccaacgaggattgtaacctcacatgtttttttttcttttttagattcacaattcacggcacataactcaatagcatataattcatccagcagcatcagctaaaaagcattatcacaacaatgctcaggtagaacaaaagatctttccatcatacagaatagcatagaagttccatcattaatgaaactatagtctaaaaggttgctgagttaaaactggcaaaatagacatgcttttccgaaaggacaacttccatcttactcctcggattcagcctcaccactcttcttgttatgcttcctggaatatctctggttcctcaggaactttgggtccatccccttggtggaggtctggcggtggcgcttgggcttcttgatcccgttcttgtgcgccttgtacgactggttgtgcgccgtgtggttcttcgacttggccatctcccccgaatccgaaacgagcgctcgcgagggaggaggagacgagcggttgaacggcggcggcggcggagctagcccggccggcctcgagggtcccaatcgcctataggag

SEQ ID NO: 64572 - DNA, 721 bp, Oryza sativa
  Clone ID: PAT_MRT4530_65702C.1
gccgatcagttggtcgatgctgcttcaggacacaagatattaagttttatggatgacaatgcaggatataatcaaatctttatggcagaagaagatattcataagacagcctctagatgtccttgtgcaatcggcttgtttgaatgggtcgtgatgactttcagtttgaagagtgctggagctacatattagtgggctatgaattacatattccatgatctgatcggctggttggttgaagtttatattgatgatgtggtagtcaagtcaaaagaactagaaaatcacatagccgatttgaggtaagtttttgagagaaccaggaaatatggcttaaagatgaacccaacaaaatgtgcctttggtgtgtcggctggccagtttctgggatttcttgttcatgagagggggattgaggtgactcaaaggagtgttaatgcaattcagaagattcaacctctagaggacaagaagaagttgcaggagttgatcagcaagataaattttgtcagaaggtttatttctaatttatcaggaaagttagaaccctttacacatttgttaagattgaaagccgatcaaaagttcacttggggggcagagcagcagaaggctttgggtaatatcaaggaatatcttagttccccaccggttctgattcctccacagaaaggggtgccgttcagattatatctatcggctggtgacaagtgggggatcc

SEQ ID NO: 64573 - DNA, 3330 bp, Oryza sativa
  Clone ID: PAT_MRT4530_65703C.1
ctgtcgccgtcgacgcaccaccaccagtaatggcggccgccgctgtcgccgacgactggtctgcgctgctcgctttcttgtccaatgtgtcggccgattccggtggtgtcgctctcgccgactggggacgctcgccggagttctgcaactggacgggcgtggtgtgcggcggcggcgagcggcggcgggtcacgcagctggtgctcgccgggcgtgggctccgcggcgtggtgtcgccggcgctggggcggctggagttcgtcacggttcttgatctctcgaacaatggtttctccggcgagataccggcggagctcgcgtcgctgtcgaggctgacgcagctgagcctgacgggcaaccgcctcgagggcgccatccccgccggcatcgggctgctccggcggctctacttcctcgacctcagcggcaaccgcctctccggcggcatcccggcgaccatcgccggcctcgtcaacctcacctacctcaacctctccaataacatgctcaatggctcgatcccgccggagatgtcgcggctgcggcggctcgagcggctttacctctccaacaacctcctcgccggcgagatcccgcgatccatcggcgagatgccgcacctcggcctcgtcgacctctccggcaaccggctcgccggcaccatcccggacacgttctccaacctgacgcagctgaggcggctaatgctgcaccacaaccacctctccggcgatgttccagcgagcctcggcgactgcctgaaccttgagatcttggacctctcctacaatggcttgcaggggcggatccctccgcgcgtcgccgccatacggcgtgtcgtgaagctgatgctacgagaccagaagctctccggtgaggtctctcccgcgctcggcaatctatcccaccttaatatactcaatctctcggggaacctcttcgccgggagagttccgccggagcttgggaatctcttccgactcaccttgcttgacatttcgtcgaacacctttgtcgggagagtcccggctgagcttgggaacctctctagcctaaatacacttgatctctcccgaaacctcttcaccggcgaagtgccgccggagctcggcgacctctctaagcttcagcagctcagccttggtaacaatctcctggagggtaaaattccggtggagctcacgcgcatgtcgaacctgagctacctcaacctcggcgagaacaacctctccggccgcatcccgccggccatcttctgcaacttctcctccttgcagtacattgatctctcctccaactcgctcgacggcgagatccccatagattgcccgctccccaacctgatgttcctcgtcttgtgggcgaacaacctcgtcggcgagatccctcgctcgctgtcgaactcgacgaatctcaaatggcttctgctggagtcgaattacctctccggcgagctccccgccgacatcgccggcatgcggcggctagagcggctgtacctctccgacaacatgctctccggcgagatcccgccgtcgctcggggaggtcccgcggctcgggctcgtcgacctctcgcgcaaccggctcgccggcggcatcccggccgccgcgctctccaacctcacccagctccggtggctcgtcctgcatcacaaccacctcgccggagtcatccctcccggcatcgcgcaatgcgtgaacctccagaatcttgatctctctcacaacatgttgagaggcaagatccctgatgatttgtcggagctgagtgggctgctttatttgaatctttcgagtaatttgttggaagggatgatcccggcgaccatcggcaggatggcgatgctgcaggtgctcaacctgtcgtcgaaccggctctccggcgacatcccgacgcagatcggcggctgcgtcgcgctcgagtacgtcaacgtctccggcaacgcgctggagggcggcctccccgacgccgtcgccgcgctgccgttcttgcaggttcttgacgtgtcctacaatggcctctcgggcgctctgcctccgtcgttgggggcggcggcgtcgctgcggcgggtgaatttctcctacaatgggttctccggcgaggtgccgggtgatggcgccttcgcgagcttccccgacgacgcgttcctcggcgacgatgggctgtgcggggtgaggcctggcatggctcggtgcggcggccgccgcggcgagaagcgccgcgtgctccatgaccggcgcgtgttgctgccgattgttgtcacggtggttggcttcacgctggcgattctcggcgtcgtcgcgtgccgtgcggcggcgagggcggaggtggtgaggcgagacgcgcgccggtcgatgctgctcgccggcggcgcaggcgacgagccgggcgagagggaccacccgaggatctcgcaccgggagctcgccgaggcgacgggcggcttcgatcaggcgagcctgatcggcgccgggcggttcgggcgcgtctacgaggggacgctccgcgacggcacgcgcgtcgccgtgaaggtgctcgacccgaagagcggcggcgaggtgtcccggagcttcaagcgggagtgcgaggtgctccggcggacgcgccaccggaacctggtgcgcgtggtcaccacctgcagccagccggacttccacgcgctcgtgctcccgctgatgcgcaacgggagcctcgagggccgcctctacccgcgagacggccgcgccgggcgcggcctcggcctcgcccagctcgtcgccgtcgccgccgacgtcgccgaggggctcgcctacctgcaccactacgcgccggtgagggtggtgcactgcgacctcaagcccagcaacgtcctcctcgacgacgacatgaccgccgtcgtcgccgactttggcatcgccaagctggtcaagccttgcaactccatcaccggattgttacaaggctcagtcggctacattgcaccagaatatggattaggagggcatccatctacacagggtgacgtgtacagcttcggcgtgatgatactcgagctgatcaccgggaagaggccaactgacgtcatcttccacgagggcctcacgctgcacgactgggtcaggcgacactacccgcacgacgtcgccgccgtggtggcgcggtcgtggctgacggacgccgccgtgggctacgacgtcgtggcggagctgatcaacgtcgggctcgcgtgcacgcagcactcgccgccggcgcggccgaccatggtggaggtgtgccacgagatggcgctcctcaaggaggacctcgccaagcacgggcacggcggcagcggcggcgacgtggtcgccg

SEQ ID NO: 64574 - DNA, 201 bp, Oryza sativa
  Clone ID: PAT_MRT4530_65704C.1
ttatatgaagactcgactcgactgactccgcttttttttttttttttgatcaaagcaaacgagacgagctttcttcttcttgcgatcaaaaacacagatgggcaaccacacagttaacacaaactagatagttcacacaaactacgagtatacgatcgagtagtagtagtatgctgatgatgatgtactgcatagctgact

SEQ ID NO: 64575 - DNA, 827 bp, Oryza sativa
  Clone ID: PAT_MRT4530_65705C.1
atggggcggctgaagttcgtcaaagctgagcctgacgggcaaccgcctcgagggcgccatccccgccggcatcggggctgctcccggcggctctacttcctcgacctcagcggcaaccgcctctccggcggcatcccggcgacgctgttctgcaactgcaccgcgctgcagtacgtcgacctcgccaacaactccctcgccggcgacatcccgtactccggcgagtgccgcctccccagcctccgctacctcctcctctggtcgaacgacctctccggcctgatcccgccggcgctgtcgaactcctccttgctcgagtgggtcgacttcgagtcgaactacctcgccggcgagctgccgccgcaggtgttcgacaggttgccgcggctccagtatctctacctctcgtacaacaacctgtccagccatggcggcaacaccgacctcgcccccttcttccgctccttgacgaattgcacgcgcttgcaggagctcgagctcgccggcaacgacctcggcggcgagctcccggcgttcgtcggcgagctctcgcgcgagttccggcaaatccacctcgaggacaacgccatcacgggcgcgatcccgcccagcatcgccggcctcgtcaacctcacctacctcaacctctccaataacatgctcaatggctcgatcccgccggagatgtcgcggctgcggcggctcgagcggctttacctctccaacaacctcctcgccggcgagatcccgcgatccatcggcgagatgccgcacctcggcctcgtcgacctctccggcaaccggctcgccggcaccatcccggacac

SEQ ID NO: 64576 - DNA, 3183 bp, Oryza sativa
  Clone ID: PAT_MRT4530_65706C.1
atggcgcccgtgcccatctccgtcttcgtcttcgtcttcatcttcattttcttcctcctcgacggctcgataccgactctcgggtcaaatgaccattccgcgcttatgtccttcaagtctggtgtgtctaatgatcctaatggagcactcgccaactggggatccctcaatgtgtgcaattggaccggtgtctcttgcgacgcgtcgagacggcgtgtcgtgaagctgatgctacgagaccagaagctctccggtgaggtctctcccgcgctcggcaatctatcccaccttaatatactcaatctctcggggaacctcttcgccgggagagttccgccggagcttgggaatctcttccgactcaccttgcttgacatttcgtcgaacacctttgtcgggagagtcccggctgagcttgggaacctctctagcctaaatacacttgatctctcccgaaacctcttcaccggcgaagtgccgccggagctcggcgacctctctaagcttcagcagctcagccttggtaacaatctcctggagggtaaaattccggtggagctcacgcgcatgtcgaacctgagctacctcaacctcggcgagaacaacctctccggccgcatcccgccggccatcttctgcaacttctcctccttgcagtacattgatctctcctccaactcgctcgacggcgagatccccatagattgcccgctccccaacctgatgttcctcgtcttgtgggcgaacaacctcgtcggcgagatccctcgctcgctgtcgaactcgacgaatctcaaatggcttctgctggagtcgaattacctctccggcgagctccccgccgacatgttcggcggcatgaggaagttagagctcttgtacctatcgttcaactacctcaggagcccagagaacaacaccaaccttgagcctttctttgcctcgctgaccaactgcaccagcctcaaggagctcggcgtcgccggcaacgagctcgccggcgtgatcccgccgatcgccggccgcctcggcccgggcctcacgcagctccacctcgagtacaacagcatcttcggcgcgatccctgcgaacctctccaacctcaccaacctcacggcgctcaacctgtcgcacaacctcatcaatggctccatcccgccggcggccgtcgccggcatgcggcggctagagcggctgtacctctccgacaacatgctctccggcgagatcccgccgtcgctcggggaggtcccgcggctcgggctcgtcgacctctcgcgcaaccggctcgccggcggcatcccggccgccgcgctctccaacctcacccagctccggtggctcgtcctgcatcacaaccacctcgccggagtcatccctcccggcatcgcgcaatgcgtgaacctccagaatcttgatctctctcacaacatgttgagaggcaagatccctgatgatttgtcggagctgagtgggctgctttatttgaatctttcgagtaatttgttggaagggatgatcccggcgaccatcggcaggatggcgatgctgcaggtgctcaacctgtcgtcgaaccggctctccggcgacatcccgacgcagatcggcggctgcgtcgcgctcgagtacgtcaacgtctccggcaacgcgctggagggcggcctccccgacgccgtcgccgcgctgccgttcttgcaggttcttgacgtgtcctacaatggcctctcgggcgctctgcctccgtcgttgggggcggcggcgtcgctgcggcgggtgaatttctcctacaatgggttctccggcgaggtgccgggtgatggcgccttcgcgagcttccccgacgacgcgttcctcggcgacgatgggctgtgcggggtgaggcctggcatggctcggtgcggcggccgccgcggcgagaagcgccgcgtgctccatgaccggcgcgtgttgctgccgattgttgtcacggtggttggcttcacgctggcgattctcggcgtcgtcgcgtgccgtgcggcggcgagggcggaggtggtgaggcgagacgcgcgccggtcgatgctgctcgccggcggcgcaggcgacgagccgggcgagagggaccacccgaggatctcgcaccgggagctcgccgaggcgacgggcggcttcgatcaggcgagcctgatcggcgccgggcggttcgggcgcgtctacgaggggacgctccgcgacggcacgcgcgtcgccgtgaaggtgctcgacccgaagagcggcggcgaggtgtcccggagcttcaagcgggagtgcgaggtgctccggcggacgcgccaccggaacctggtgcgcgtggtcaccacctgcagccagccggacttccacgcgctcgtgctcccgctgatgcgcaacgggagcctcgagggccgcctctacccgcgagacggccgcgccgggcgcggcctcggcctcgcccagctcgtcgccgtcgccgccgacgtcgccgaggggctcgcctacctgcaccactacgcgccggtgagggtggtgcactgcgacctcaagcccagcaacgtcctcctcgacgacgacatgaccgccgtcgtcgccgactttggcatcgccaagctggtcaagaacgccgacggcgacgtcaccaccaactccggcagcatcgccgccgcctcatctgatccttgcaactccatcaccggattgttacaaggctcagtcggctacattgcaccagaatatggattaggagggcatccatctacacagggtgacgtgtacagcttcggcgtgatgatactcgagctgatcaccgggaagaggccaactgacgtcatcttccacgagggcctcacgctgcacgactgggtcaggcgacactacccgcacgacgtcgccgccgtggtggcgcggtcgtggctgacggacgccgccgtgggctacgacgtcgtggcggagctgatcaacgtcgggctcgcgtgcacgcagcactcgccgccggcgcggccgaccatggtggaggtgtgccacgagatggcgctcctcaaggaggacctcgccaagcacgggcacggcggcagcggcggcgacgtggtcgccgccgcgacggtgatggccgcggcggcgccgccgtcggtggcgatgacggcgagcgagcggtcgtgctccacctcggactcgtctttgagttactag

SEQ ID NO: 64577 - DNA, 245 bp, Oryza sativa
  Clone ID: PAT_MRT4530_65707C.1
ggtagaatacccgtccacagcttgcccacaaccatcggggaacaagataactgttatgtgtatgattctggagaaagccacatgaacgacactgatggaccgattgtggatatcaatgatggaagaaggtaatgaaggcactaatgacgatgttgatattgatgatgaagcccaaatgtaagatactgattttgatattaatgttcgagttgaaaatggagcacctgaaacacgtggcaagtaca

SEQ ID NO: 64578 - DNA, 995 bp, Oryza sativa
  Clone ID: PAT_MRT4530_65708C.1
acgaggggaacccgcgccggccgggaacgagaaatctcccgtcccgtggtctcctgacgagccgcggctgaacaggggaggaggcgccgatctccatccggcgagcagagcagagcaggggatcctgtgacacgtaccaaatacaaagagcccacaaaggcactaatctactggcctaatctatccaatccaggaggcaacccagcctggtaatatattggatcggtgcttgaggttgagggggaagcaaagcacgatcgaccaggaaccaggcaggcagccaaggtgaggaaggagaagaagctgagagcctctccctgcttagacgtccctgtgcagcggcctgggagtttcccagcctgctctcacctggctggctagatccagcggtcatccctgccacgaggaatgggcctgtggacgttgctggagggctttttgcttctcgcaaatgcattagcgatactaaatgaagaccgctttcttggccccagaggatggagcatgtctgaagtctcaggaaatggacaaaccaagtcactgaagggtcagattgtagggctcatctatgccacacagttcttgaggatgccgttgatagcgcttaatgttcttatcattgttgtgaagttggtatctggctgagactgcaggtttcagttctggggtttgatttaatttctgttacagcgtaatgtaaaagtaatcacagtaaagattgctgcagttatgttaatttgtctctaatgtatgctgttactgttctagtaaattaattctgagccgcaaactgtttctttggcacataaacaatgagagtatgtggtctggcgatgtgttgtgagggctccttttccttatttctgttctgaatcaatcacacatttgtttgcttgttggtgtgtgttatgctcaggggttatctgacattcagattttcagccttcaggtgccgtttttaatggaaatattacctactaaaaaaaaaaaaaaaa

SEQ ID NO: 64579 - DNA, 480 bp, Oryza sativa
  Clone ID: PAT_MRT4530_65709C.1
atgggcgtgtacaccttcgtgtgccggagctccggcgacgagtggacggccaagcagctcaagggcgagctggaggcctccgccgccaccccctacgagctgcagcgccgcctcgtcgccgccgcgtccgccgccgactcggccgccggagtccagtcctccttctccatggtctcgcccagctccgccgtcttccagctggatctgaatagcacatttgttccagatatgcgatattttgcattgattggtaggtggatatggttcttggttagatcccagaaaatatctgtgggctttgacacaaagctcaccttagtgatcattggtgccgttggtggtggtgccgcgattggtggaggtgctgctgctggtgccgcctccggtggagctgctgccgaggcccccaaggccgaggagaagaaggaagaagagaaggaggaaagcgaggacgacctcggattctccctcttcgattag

SEQ ID NO: 64580 - DNA, 147 bp, Oryza sativa
  Clone ID: PAT_MRT4530_6570C.1
gttagcacatcatgggcaataggtctcattgttgggccagctatcagtggatatcttgcacaggttcccatattttctaccttgtttatgtatatcgatcttctgcttcgttattcttataagttgcatttggctcccggaaaataa

SEQ ID NO: 64581 - DNA, 153 bp, Oryza sativa
  Clone ID: PAT_MRT4530_65710C.1
aaaaaacatggctaaaattgattaaggggagaccacaggctacaaacaaaagtttaaagggttctccaaaaggggtaatgatacaaatggccccaacccccgaaggacaattttgggaacacaattttttaaggggaacacaaaagggggtat

SEQ ID NO: 64582 - DNA, 662 bp, Oryza sativa
  Clone ID: PAT_MRT4530_65711C.1
ggagagagagagagagaactagtctcgagtttttttttttttttttttatcgcaatttatcaccattattattgcatatttgccttcaattcatacatacaccttctagctctatcataccgttctaccaattgttttcatcaactcgaatttcaacaaaaaattgtttctagctgcagacatgttctatcaaaggcatactacaaccatgaacagcctgggtcttgttaattctccgagtcgataccagtacacacaaacttaaagcgtccagaacatcgaatactaattttctctagtggtatgccattggcattcaagacctccaaaattttgagaataattccatgaacctctttgcatttgatttcaactatttgaagatggctagctgcaaatgattgttccaattgactgtaacttccctcggtttccactaaattgttgggtacctctgaaaccttaagagtaagcctttcaagaagtggtgcatattggagaaaccaagttaatgcactgatgtcaggagccacaaaccatgcattcagaactaaattcttcaacttgctaaatgtagagcaacactttaaatccctgttgaaaagatacacatcagaataagctgacaacttcaagtctttagcttccgtcaagcttcaaga

SEQ ID NO: 64583 - DNA, 359 bp, Oryza sativa
  Clone ID: PAT_MRT4530_65712C.1
atgtggcgcgcaagcttgctgattatgctaaaattgtcacagtatcaactagttctgatgccatcaaagatcaagatcgccccctgagcaccagtgaagtattgtcaccggatagtaaagaggatgtatttgtgccagaagatctgttccttcctgggactctgtattacctcaagagggacattgaggatataaacggtgtagaagatgagtcgtatacactctggagaggtgatgccggggagaattttcagaggatactgttatctggcaatctgatatccgatcacaaatgtgaaagcatatattacgccctgagggatgtgctcaagactctgccgccccaggaatcaggatga

SEQ ID NO: 64584 - DNA, 2034 bp, Oryza sativa
  Clone ID: PAT_MRT4530_65713C.1
atggcgcggccgcggcgcgcgtcgacgatgcagctggggctgttcctcgccgcgcttctcctcctcacgccgtcgcctgccggctctgtggcggcggccaagggtggcggtgccaagagcggcggcggcggcggcaccgtgatcgggatcgacctcggcacgacgtactcgtgcgtcggcgtctaccggaacgaccgtgtcgagatcatcgccaacgaccaggggaaccggatcacgccctcgtgggtcgccttcaccgacggcggcgagcggctcatcggcgaggcagccaagaaccaggcggcggccaacccggagcggaccatctacgacgccaagcggctcatcggccggcagttctccgacgccgaggtgcagcgcgacatgaagctgctgccgttcgccgtcgtcgaccggaacggcaagccgcacgtgcgcgtcgaggtgaaggacggcgacgtgcgcgtgttcagcccggaggaggtgagcgccatggtgctcacccggatgaaggagacggccgaggcctacctcggcgagaaggtcacgcgcgccgtcgtcaccgtcccggcctacttcaacgacgcgcagcggcaggccaccaaggacgccggcgtcatcgccgggctcaccgtcgaccgcatcatcaacgagccgaccgccgccgccatcgcctacggcatcgacaagaagggcgcggagaagaacgtcctcgtcttcgacctcggcggcggcacgttcgacgtcagcatcctcgccatcgacaacggcgtgttcgaggtccttgccaccaacggcgacacccacctcggcggcgaggacttcgaccaacgcctcatggaccacttcgtcaaggtcatccgccggaagcacgggcgcgacatcgccggcgacgcgcgcgcgctgggcaagctccgccgcgagtgcgagcgcgccaagcgcgcgctcagcaaccagcaccaggtgcgcgtcgagatcgagtccctgttcgacggcgtcgacttctcggagccgctctcccgggcgcggttcgaggagctcaacggcgacctcttcaagaagacgatggtgccggtgaggaaggccatggcggacgccgggctgggcaagggcgacatcgacgagatcgtcctcgtcggcggcagcaccaggatccccaaggtgcagcagctgctcaaggactacttcggtggcaaggagcccaaccgcggcgtcaaccccgacgaggccgtggcgtacggcgccgccgtgcaggccagcatcatcagcggccacgtcgacgagaacacggagagcatgatcctcctcgacgtcgcgccgctcaccctcggcctggagacggccggcggcgtgatgaccaagctgatcccgcgcaacacggtggtgccgacgaagaagacgcaggtgttcaccacgtacaaggacaggcagacgacggtgaccatccaggtgttcgagggcgagcggagcatgacgagggacaaccggctgctcggcaagttcgacctcaccggcatcgcgccggcgccgaggggggcgccgcagatcgcggtgacgttcgaggtggacgccaacggcatcctcagcgtgctggccgccgacaaggccaccggcaggtcggagaagatcaccatctccggcgacgaccgcaagatcagccaggaggagatcgaccggatggtgcgcgaggcggaggagttcgccgacgaggaccgccggcacagggagcaggtggacgcccggaacagcctggaggcgtacgtctacaacgtcaagagcacgctcggcggcaagatggcggacgccatggagggggaggagaaggagaaggtggaggaggcggtgagggaggcgcacgagtggctggacggcaacccggacgccggcaaggaggagtacgaggagaagctgcgggagctggaggacgtgtgcaaccccgtcatgtcggcggtgtaccagaggtccggcggcggcggcggcggcgcaccggaagatggcaacgtcgacgacgaggatgaccacgatgagctttag

SEQ ID NO: 64585 - DNA, 437 bp, Oryza sativa
  Clone ID: PAT_MRT4530_65714C.1
tactcgaagataaggattactcggattgtattcatattggtttccctagttctactctgacaaggggacacctatgggtataaatataagatcccctaggaggagaggagagacgaaacaatagatcaacatacaagccaacatacgccaagacaagccgccggatatcaacatcggagataggcctagtagtccccatacggtacctaagatacgactaccgtcaggaggatctagtgttgtctctgatctcgtcgggcacggattcgaggaggaagactactctgttgtcgactacgggatggttttatggctgccaagtcgacaacagatagataggctaccccaaatattgtactgtctcgcatatatcctagtaccaacgatccccatactatgcaaataccatagtcgtgacatcaaacgtcgacaccacc

SEQ ID NO: 64586 - DNA, 496 bp, Oryza sativa
  Clone ID: PAT_MRT4530_65715C.1
cccggtttcaagttggtcaacacacaaatgggaaagccaagtgttcaacggcgagcttcgccgcggacaagctggcttattgatgacccacaacatctaatgccagttgtaaagaaggcacaaagagaaggatggtgcttgacaatgtgcattgcaagaccaatgcctaactctgatgggtaagccacattcgcaggaaagagttccatgctgtgccggctctgcccaaatggatggttctagcaaatgcatatcgcatctcaagagaagaggctcagaggctcaagcataacagaggagatgagttcggtgcattcactccaaatccaatacaagagctaccaagacgtttataatcgccagaatcctcttagtcggcttgcggataaagaataactaaataaataaattccaaccaattttttctgctatgtactgtccagtctttcgactcatgatgataaaccctctctttacccttaaaaaaaaaaaaaaa

SEQ ID NO: 64587 - DNA, 606 bp, Oryza sativa
  Clone ID: PAT_MRT4530_65716C.1
atgaatgatccgtctgtatgccatcgcctgcgacccagtcacccgcctgtgaaaatcatcttgacgaacaaaaaaaattcgccgcaccccacccgcgcctctacccacatccgccgccaccgccgccctccccctccctccgaccagatctgggagggaggggaactaccaccgctgccgctctcccccggcctccctccggccggatctaggagggatgggaactgtcgccaccgctgtcgcccttccctggcctccctccggtcggatctgggagggagggggactgtcgccgctgtcgccgccctcccccggtctccctccggctggatctgggagggagggggactgtcaccgccgccgctgccgcccttccccagcctccctccggccgaatctgggagggaggggaagcgccgccgccgccacctctcgcccccctccccccttcggccggatctgggagagaggggaggggagccgcgccgaccccgctgcctcgccgttgccgccgtcgaccccaccgccttgtcattgtcgccgccgaccccgccgcctcagcgcctcgccgtcgtcggtttccgccgctcccatcaccggtgctga

SEQ ID NO: 64588 - DNA, 506 bp, Oryza sativa
  Clone ID: PAT_MRT4530_65717C.1
tctgttactgctgattctattagtgctagtttgaatttggatcaacactaacttttcatactgctgcttgcagagtagtgatagggcctatgttctatgctttgtggagttcagtgatgcaaaatgtgcaataactgctatggaggctctccaaggttattccggtgtcattgatttatcgcattgatattctcttgacagcttttcatatatcctggcagagtcggttttgctagtatgggattataatcatgttacattacatatagaattgaatggtgtcttgataattgatatgcatggtatccattggctttttttctttcagtagtatttcacagttcacagtgtctgttagattcttgtgacacactgatactaaccatatcttccttcaagagctgtagctatttaaacaataaggcagacagttcgctcatatttcatagcaaacctaaggatagtaggaatcaactttaaacctaaggcttgaacaatgagctttc

SEQ ID NO: 64589 - DNA, 299 bp, Oryza sativa
  unsure (1)..(299): unsure at all n locations
  Clone ID: PAT_MRT4530_65718C.1
cgttggacgagcggcgngangcgtctgtcctcgccatcgtcgccgacttgggggcaagaagatgaagcacatgaaggccatccacagcagcagcgaattggggtggaacatcccgtctctccatcgcggatgccgcagtggtagtcgtcttcgtcagagtccgttgatcaaagccgtggctgtggcccatcaacttcccattcgtggtgctagtcttgcncaaatagaaatcaactgaagccagatgttgatgaanttgatgaaattcatcttatctagtaaaccattgctttgtttac

SEQ ID NO: 64590 - DNA, 493 bp, Oryza sativa
  Clone ID: PAT_MRT4530_65719C.1
cccacgcgtccgtccacacgtccggtgtatgcaccgattactacgaagagaataatataaaaaccgtgactttgtgagcgatttgggagactgttttgttgcttcctcatttgtgactccacacgccacgcctcgcccgcgcgatggcttgagacggcgaccgcgccgcggcggtagcacctctggatatctccggcggaggcggcgacgactgagcgccgccgctgcggtggaatctcccggtgctcgcgccccacgaggttaagcttgcacaattgctgctgagtgaacgacagtcacattgtgtttgaatcactggccggaaccaggtgtctgatgatgacatgaataggaacttatttgaccaggtatgtcgtcttaattcaagctatcctggtggactggcatcgctcatccagaatgctagacagcttttagcagattcaatggcaggataaaatccatatgatggcttgtcaccttatgctccttc

SEQ ID NO: 64591 - DNA, 1385 bp, Oryza sativa
  Clone ID: PAT_MRT4530_6571C.1
atggttctggggaaatccatccgccgctctaacggccacgcctcctcgtcgtcgtccatgctggacggcgatgacaccagcagcgcttgcggtggcggcatgagcatctactaccagaagattaatcagagggtcgccgtgctcgagaaggccgccgtctccgtgcacgagagccgggcgtccacgcgggaggcggcgctggcgtcgctcgtcggcgcgctcgagggcttcgtccccgcccacttcatcgggtggcacctccgcggcgagatcgttcgcggctgctgcgcctccatcaagaagggagccgccgccaaggaggcccgcctcgcgctccgcgccgtcgcgctgctcgccgtcacgctcggcccgggctccaagaggaggatcttgccggcggagacgtacaacccgctcgaacccggccctggctccaagaagatcatggcggagacgttcccgctcgtctcccgcatcctcgaggtgtcaaccgacgcgcccctggtgatcgccgcgctcgagtccctcgccgtcgtcgcgttcgtcgacgtcgccgcggagaacatggacgacacggaggcgtgcatgaaggcgctgtgggggctgatccgcccaagcacggggcccaagctcgccggcgcggcgaggaagacgagccctcatgtcctggccgccgccgtgtcggcgtggacgctcgtgctgaccaccaccgacggctggaagaagaagaaggcggcggcgtcctctcccgccgcgtggcgcgacacggcggcgcacctcgccccgctcctccactccgacagccgcgccgtccggatggccgccggcgaggcgctcgccgtcaccatcgagatgaagctcctgacccgggacagccacggcgccctcatctccggcgtggcggccagagcgtccgagctcgccaacgaggccgccggagcgggcgtcggcaaggccaacttcgtcgagcagaaggagctcttcaagagcatcgcgtcgttcctcgccggcggcaaggcaccggcgagctcggtgcgcgcgtcgtcgtcccaccacgggcggctgacggcgtcgacatggacggacattgtccggctcaacttcctccggcgattcctcggcggcgggttcctgccgcacctccaggggaaggtgctgatgggggaggaggcgccgctgatagggcaggtgttcgtcgtcaaggaggacgacatggccatggatcacaagaagaaggtggacaagcagaggacgctcaacagggagcgccccattgcctctgacctcaagcatggatcttctcatgtatgaaactaggaaaggaattttgggccaagcagagtccagtgcatgtaaagttattatgtagaaaaataattatctga

SEQ ID NO: 64592 - DNA, 2751 bp, Oryza sativa
  unsure (1)..(2751): unsure at all n locations
  Clone ID: PAT_MRT4530_65720C.1
atgctcggccggcgcgtggtgatgctcccgtcggcggcggcggcgctggggctgcgccggggccgggcgcggatgcggctggggtgcgtgctcgagcacgtggccccgcggctcgcggtggcgtcggccgcgctcctgggggccggggaggtcatcgccgcggccgccgcggcggggaaaagcggcggggccgggcacgccgccgtggcgtcgacgctcgcgcagcttacggtcacggccgtggcgatcgcctcgggggcgtgcctgtcgaccaaggtcgacttcctctggcctcgcatcgagcaactgcccgacactcttatatttgaaggagtagaggtgactggatatccaatatttgaggacccaaaggtgcagaaagcaattgtttttgcaagtactgcccacattgggcaatttaggaaaacaggagatccatatgtcacacactgtatacatactgggaaaatcttagctgccttggtcccgtcaactggagaaagggcaatcaatacagttgttgctggtattcttcatgatgttattgatgatacagctgagaacttgaagagcatagaagagcagtttggagatgatgttgctagtttggtatctggtgtttcaaagctaagctacataaatcagctactgcgcaggcatcgacaaaaaaacaccggtggaagcactcttacttcagaagaatatttcagctatgctcttcccattcgcaaagctgaagctgttgctcaagagacattggctgtctggtgctcacttgcttctcgattgggtgtctgggctttgaaagctgagctagaagatttatgctttgctgtccttcaggacttattgcaagctgtattgccatttgacctccttttggatcggaaaagacgatcctacttcctaaataatctccatggcagttctgaaacatctgtaccaaagcctaagattgttgatgacgctgctgttgcattagcatctttagcagcttgtgaggaagaacttgaacaagaattacttatatcgacatcgtatatacctgggatggaagtaactttgtcaagtagactcaagagcttgtatagcatgtactgtaagatgaaaaggaaacatgtaggcattaaacaaatctatgatgctcgtgcattgagggtgatcattggagacaaaaacggtgcattgcatggacctgctgtcaagaattgctacagcgtccttgatatagtaaacaggctatggactccaattgatggggagtttgatgactacattatcaaccctaagggtagtggttaccaatcactccatacggcagttcaggcatcggataactcaccactggaggtccaaataaggacccagcgaatgcatgaatatgcagaatatggactcgctgctcactggctgtataaggagagcaaagttgactacagaagtggcacgagtaacaagataggacaaagtacatcgtacccatcaagttcttcggaagatgaaaactacatacaagatgttatgccctcaaagtacagttctatgaaaatggggcatccagtcctaagaattgagggcagccagttactggcagctgtcattgtcagtatagataaagggggaaaagagttgcttgttgctgtcagttttggccttgaagcttctgaagctgtagctgaacgaagatcttgcttccagttgaaacgctgggaaacttatgctagagtttacaaaaaggtttcagagaaatggtggtgtgcaccaggacatggtgactggtcaacaaacctggagaagtatacattgtgccaggatgggatattccataagcaagaccaatttgggaggcttttgcctacttttattcaacttattgatttgacggaagaggaagaggaagaatattggatggttgtatcagccatatttgagggtaaagaggcctcatctctgactcccgattcaagcaacactgaacgatcgacatctgaacctccaagctctactccattgagtgatcccatcaacaataaggttcatttgctcaggacaatgcttcaatgggaggagcaagttcgacgcggagcatcacttgtggagaaaagcctcagtgtaggcacatgtactgaaccaatccttcgtgaggtggccatcatctgctggccgtacgggaagataatgaggatgagcctaggcagcacagccgctgatgctgctagaagaatgggcgttgaagggaagctgctttgggttaatggccaacttgtgttgccccagaccgagctcaaggatggggatatagttgaagtgaggatgtagctgatgcgccatatctcctctgcccagggttattgataaaattggtttgaggttcaatcaactatgtagggtacattacctgaaaatcaacgaccctagggtcgtaacagactgaagattaagaaaacgtagaaaaccaacagcccaatacctcaattgtacagtccatttgtcgataagaatccaaggatgcgggatttatgtacaggaagtgctatatctgtacataaagctaccaacntgtatgtatcccttgtttatggtntaaaatgtaaatttctgtaagtaaagctgtagtaatattagtcagtagttgacagttttctaggagctgcaattgttctgtacataacggtgaaccgttctatggcttgatcacctgaaccaaaaaaaaaaaaaaaaaaaaaaaaaaaaaaaaaaaaaagggggggg

SEQ ID NO: 64593 - DNA, 792 bp, Oryza sativa
  Clone ID: PAT_MRT4530_65721C.1
atggtctccggcgtcgcccaccgcccggacgacgacggcgggcgcgccgcctcgacgttccagcgcccgccgcagccggccggcgcgcggccgtccctggccacgccgccgccctcgggcggagcgcaatccgcttcgacgagcggcgggagcgcgggctccccgtccagccgcagcgagcagcatgtccccgcagccgcaggcatggcggcgggggcggcggcggcctctactccgattagtgagaataccttcctccgcctcaacgaccttgacatccacggcgacgatgcgccttcctcacaggctccaacgagcaagaagaagaagagaggagcacgagcagttggtcctgacaaaggtggcagggggctgcgccagtttagtatgaaagtttgtgagaaagttgaaagtaaagggagaacaacatacaacgagcaacaatatgacgagaaaaatatacggagaagggtttatgatgctctgaatgttctgatggctatggagattatatctaaagataaaaaggaaattcagtggaaggggttgcctcgaaccagtataaatgatattgaagatttgcagacggaacttgtaggactgaaaagtaggattgagaagaaaaatacatatttgcaggagctgcaagaccaatttgtaggtatgcaaaagttgatacaaagaaatgaacagctatatggttcaggaaacattccctcgggtggagttgcattaccatttatccttgttcagaaggtcctcactggaagggcatcctcttatctcatttaa

SEQ ID NO: 64594 - DNA, 518 bp, Oryza sativa
  Clone ID: PAT_MRT4530_65722C.1
ctcaaattagttggactgatagaaaaatattgcttttcaagattgtaaaataaccaactgactgggaagttgatgtcatatgttggaagcaatctgctaaaatgttaaagaagtgcatctaacttttgtacccagtgaattgcaaatctctatctcgtttttttttgtttacagtttctttggttttaaagtaaaataggttgacatgggaactttactagcagaggaattggcttatattcttggaaaaaatacattttttcatgcagaatgtgattacaataatgatacttgctggcatgatttttatcactcatgcccgcattgtccttgatgtttgtatgcagctgggatattatctttatttactacttttcttctctttctttttattttttctttttatttctttttatttacttttctcttatcatattcctttctttttacctctcttttttttcattttattatatttttcctctactttcttcattttacttatcatattttttctt

SEQ ID NO: 64595 - DNA, 1884 bp, Oryza sativa
  Clone ID: PAT_MRT4530_65723C.1
atggctcgcgacggaagcagctcaccggccaagctcgagcgcgacgagagggctcccgtcgtctccgtcggcgccgccgcctacgagggccccgaccgcatcagctcactcgccgacgcgctgctccaccacatcctcgtcttcctccccgtggtcgaggccatccgcacctgcgtgctctcccgccgctgggcccgcgtctggaccggcctcccgcggctgcggctcgacgacggcgcggcggaggccgttggctccttcccggccctcgtcgacggcgtcctccgccgctacgacgcccgcgtgaacctgcgcgacctcaccgtctcggcgcacgtcggggaggaggaggagctcggcggcctcgagaacgacgacgtcgtctccctcgtcggcgccgccgcccggctcgtcaccggccgcttccgcctcgacgtgtcgcgcgggatcaacatctccgaggactacgacgaggaggccaacctcctcgcgctcccgtgcttcgagagggcgacggagatcgccatctccatcgccgacatggcggtgcagctggcgcccgacgaccaccgcggccgcacgttcgcccacctgacgaagctgcacctgtcgaacaccttcgtcgccgacgagggcgagctcctcagcgaggtcgtctcccatggctgcccgtgcctgaaaaccctcgagctcatcgacatccacgccggcgccagggagctcaccatccacaccacctcgctcctgaccctgtgcgtcgtctcaatcaacgacttgcaactgcttgatgtagacgcagccaatctccgatggatgaaggtgaaggattgcttcgacatcgatgcggcggagacggaggggtcggcgatgtcgctgttgacgccggcgatggaggagttctactggaaggactgctgccccgaggaggttaagctcgtcagggaacctgcaggattcatccacaagatcgcatgcgtcgactctgcttcgacaaatttgtcgttcatcagcggaagccaatcgttttatactaggatcttgcagctgttctcgagcacttgcactgaagttcttcagatcgaatttcctattaaaccgtatgggagcattaatgcattagattattataaagatcgtgcacagagaatgattattataactaaacaagaatcggaggagcaaaagaaatttctacacacagtggatctaccctattgcttggagctagaactcattgtggaaaagaaagaacatactctcgccccaaccattgtacacctcctcaagaaaagcaggtggatcaaaaggttttctctcgaaatatgtccaaagaaaaatcatatccaatgcgagcccaactgcacttgtcgccaaccgccaaattggagggatcaagagatctcattgggttcacttgaagaactaagtatcaatggctttgggggcacgtatgatgagaagcagttggtactatttattgtagaaaactcaaaattacttaggaaggttcaacatgcatgttcaccgaactgcagttgtgattggccaccaaactggagagataataaggacatttcgatgaggtctctcggagaagtagagatcctcaacttcggaggaaaggaacatgagcttgaccttctgagggtcttagtcagggtagcaacagtccttaggaggatcagaataacctgccaccgttcgttgtctgcttgggagagactatctgcagtcatacaaagttttgcaagaccagagatttcagtggaacatttgacattctggaatgccatttttgttagtacggagcagtgtgcccttgttgcttggtcagaactcagaactgaagttaagtgtgagcattggtgcaaagagcagtcctga

SEQ ID NO: 64596 - DNA, 654 bp, Oryza sativa
  Clone ID: PAT_MRT4530_65724C.1
atggccgccggccgccattcccgcctccgttccgccctctcccgtggccggatccctccccgcgcctataaaatggaaccccctctgtgcgttctctcgtttttgcctcttcccgagctcccccgtggccgcaccgcctctccccgccgccctcctctctctcccgtgccgccggccacctccagccgcctccccctcctcacccgtgcacccgtaggctgtgccgtcgccatcctcgacgtcgaagccgcctcctctcccccggcctgccctccgtttcgcgcggtgaccaccggaggcgcgttcccgccggcgtccagtggcgttgccaccactgcaccgtctccggccggctgctgttcgtcgccgccccttccgccgtgcccgtgcgttggccgacgtcgccgtctcctcctccagcgttgcagcggaaaggtcgaccttggcctcgtctcccctccacccgaaccccgccgccccgtagtcgtcttcgtcctcggctccgcgtcgtcaagcgttgcgccggccgtgtctcgccttcgtccaaggatcgccaccgaagtcgttccctcgccgttcgcctccgtcgtccctgagccgtctccgccgcgcccgttcatcgtcatcgtgccgcgcctcgtcgcgtggtggtaa

SEQ ID NO: 64597 - DNA, 187 bp, Oryza sativa
  Clone ID: PAT_MRT4530_65725C.1
aagagcacacgcgatgcacctacgaagctgcacctattagcggcgactcgctccgaggtttgggtcgtgagcgactgcacgcaggctaaccccgtccaagctcacggaggcgacgaaccgcacggcgaggagcctgcccccacggcgataacccacggagccaagaagacgacggtgctaggtcccg

SEQ ID NO: 64598 - DNA, 1075 bp, Oryza sativa
  Clone ID: PAT_MRT4530_65726C.1
ttggtgggaggataagaaaacaaactagagcagcgtggggctgaagaggtctgaatatgatagctgtgtgtatattaaatttgttaatggatcacgcatatatatacttactgttatatattgatgatatgttgattgctgccaagagcaaagaagaaatcactacattgaagaaactgttgagtagtgagtttgatatgaaggatcttggtgctactaagaaaattttaggtatggaaattactagagaccgaaattctggtttgttatttcttagccggcaaagttacattaagaaggttcttcaacgtttcaacatgcatgatgcaaacactgtttgtactcctattgcaccttattttaaattatcagctttacaatgtgctagtattgataaggaggtagaatacatgtcaaggattccatattctagtgctgttgatttttttatgtatgccatggtttgctcttgtccggatttatcttatgctatgagtttggttggtagatacatgactaatcctggtaaaaaacaatggaaggctatttagtggagtttcaggtatcttcgagacacagcaaatgcttgcttgaagtttggcaggactgataagggacttattggctatatggattcagattttgctgctgatttggacaagcgaagatcacttataggttatgcgtttactattggtagttgagccatgagttggaaggcaacattgaagcctgttgttgcccagtctaccactgaaatagaatacaaggctattactgaagcatgtaaggaatcagtttggctgaacggattgtttcctgagcttcatggagttgattcttgcattaacctgttttgtgacggtcaaagtgccatatacctcactaaagatcagatgttccatgagaggataagcacattgatatcaagtaccattatgttcgcgatgtagtcgcacaagggtgaaggtttgatttatgctacaagaaggaatttgtctcaaggtggagtttgttgagttttaatccaaattcatttgcacacgtataaaggctaacttcggacggagcgaag

SEQ ID NO: 64599 - DNA, 1161 bp, Oryza sativa
  Clone ID: PAT_MRT4530_65727C.1
caatcagaagtaaaatagacttattcccagaatgaacaagttcataatttagcaacacctggattcagggcttcaggcccgaacttcactgcgctaacgctggcccaagatcaagcaccatgttcttcaatttcttgggcctcgccgtcatcccaggaacgacgcctccttgccctcagcgaagaacgcaccggtcgggccgccatccggcaggagggccaccgtcacgacgttcctcccgccctcctcgggcgtcaggaatcccgagtcgatggtcatgtccgtcttgacgtagcccgggtgcgcgcagttgacgcgcagctccgggtgcctcctcgccaagatcctcgtgtacgcgttcatggccaccttggccgtcttgtacgccgcgaacgccgtcggccacccgtgcgcctccagcgcgccggcctcgaagtctttcaggaagctgtccagcacctcgtccagccgttcctcggtgaggttatcaacgtcgtccagctccttcctcagatcctcgttgttgacgacctgttccttgttggtatccactccttggacgtactccatcccgccaaccgctgcattattcacctccagctgatggaagacgacactggagaggcccatcccactgagcttctcggcggcctccacgcccctcgtctcgtccctggccgtcagaaccaccgtgatgccgtcggcagccagctgccggcacacctccagtccgatccctttgttgccgccggtgaccacagcaacccttttagtcgggaggctggtgatgtctcgttccatccatatttcaaactttactgttgtggaatcctccaacgccaatgtttgtgacaaaaatgatgcaccaacagtcacctttgaagtggggtcaaactgaccacggacaaagcgaagaacaatgcaacttttcccaacacctgaatctccaagcaataccaacttcactcgcaagttcttcagatcagtaccagaattctcgttgctgatagtacctacccctccagcattattagctggcagagacgaagagcaacccatggccggggggtcaggaggcgccggaggccgagtaaggcggaggagggcaagcggcggcggcggcggcggcaggccggcgacggggtggaggtgggtttccgc

SEQ ID NO: 64600 - DNA, 456 bp, Oryza sativa
  Clone ID: PAT_MRT4530_65728C.1
atggcacgcccctggcctctcccgtcccaaccgcagcggaaaatgccccggcctctcccggcacgacgcgacgtgcacagccacacgcaccgcggccgcgaggcactagctacagccgtcgccggccggcccgcaacattgtacccccggcacacgcgcgtcgatcggttgagacgtccagccaaccagcgcagctacgaaccgatgcctctcgttgatccgatcaagcgagcgcggacgctggacgctggacgccccacctcgcggcgatgcgcggggaaccaacccgcgtcgctcctgccaattcgcgtctccatcaccaccaccacaccaccagatgtcacggatgcccggattctatgcgcaaatcgccgggaaaacgaacggatcagagcagagctagcatgttctggtcggtatcggttcctcgtgtcgacgaagctgaccgtgataact

SEQ ID NO: 64601 - DNA, 1362 bp, Oryza sativa
  Clone ID: PAT_MRT4530_65729C.1
atgacgatagaacatgttttttataacaataagatttttttttggcgatatctcattttctatcgcaacaaaaatactaaataaaaaaacgattgtaaatcgttgcaataaaatatagttatttatcacagaaaaactatcattgctacagtgtaatatattgatactaattattttttattataataatttagtgccaatagctcaattattttgtagtctgtactccgtctccaaagggcctcactttttggcctctccgccgtcatcccaggaacgacgcctccttgccctcagcgaagaacgcaccggtcgggccgccatccggcaggagggccaccgtcacgacgttcctcccgccctcctcgggcgtcaggaatcccgagtcgatggtcaggtccgtcttgacgtagcccgggtgcgcgcagttgatgcgcagcgccgggtgcttcctcgccgagatcctcgtgtacgcgttcatggccaccttggccaccttgtacgccgccgaccccatcggccatccgtgcgcctccagctcgccggcctcgaagtctttcaggaagctggccagcacctcgtccagccgttcctcggtgaggttgtcaatgtcgtccagctccttcctcagatcctcgttgccgaggaatcttagcagtcctaaggcggacgagacattaacaatcttcccctcggaggaggacagcagcagaggcagtaagccttggattacatgcttcgcgccatagtagttcgtctgcacgccgttctttgcagtgtcgtacgtctcccgtccctgttcctcgttgttatctactccttgggcgtactccatcccgccaaccgcggcattattcacctccagctgatggaagacgacgctggagaggcccatccctctgagcctctcggcggcctctacgcccctcgtctcgtccctggccgtcagaacaaccgtgatgccgtcggcggccagctgccggcacacctccagcccgatctctttgttgccgccggtgaccacagcaaccctggcgctttggctcgggaggctggaggtggctccttccattatgtgccgtacaagcagatgcacaaatgcctcgaggcggcctcgctgcggctccatctcgtccccgttgctagcgctaccccgcctcgtcacatcgatctgcatggccagcaccacctcggcccgagccagaaatgaggtggggtctgctggatatgaagaagcaacgatgaggtggcctccccgatagccaacgttgtctagttgatttgaagaagcaatgacaatgacggggagctccgagcttgtcgagcatggaggaccaccatggcgcctcatgacgttgttgg

SEQ ID NO: 64602 - DNA, 1887 bp, Oryza sativa
  Clone ID: PAT_MRT4530_6572C.1
atgactgcgacttacttcgtcctccctcggcgcgataatggcgatggtgatcccatcctttccaggcacagcagcagcagtgatgaccccattctcgctaggatagacgaggaacgtgggctcaacctgctatctggtaacctctatggagccatcctggactcgctcgtcccccacgcccatggacctttcttagcaccgcggcaacaacatcccaaattttgtaagattgacacgatggtcgaagagatgcaaatggatcttcggaccttgcacaggtacggcggcgacggtgatgacgatggtcacggcgacggcgaagatgaggatgacgttcttgatctggaccacatcgagctctgctccttcatggagcagatcaaatcagccgtgcagctggtgcgagcagctctgcaggagaaggtgatgcggatgacgaccaacacccgcggcggcgaagacgacgacggcggcggcgacgaggcgttcccttccggctccggccacctgaagagcgtcttggagtccctggacccgcagctgaagcagtgcgccctttgcctcgccgtgttcccgagcggcaaggcgatcaagaggaggctgctcatccactggtggatcggcgagggcatcgtgcggtcggccgccgccgggaaggcgtgcttccaggacctcctctcccggggcctcctccagccggcgatgctccgcccacactgccacacggcgcactactgcagggtccacccgtcggtccgggacctcctcgtcgcggccgcgcggagcttcagctacttcgccttcgaccgagacggcgaacccaccgacgagtgcctccccggcacgacacggcgcgtcactctgtgcaggacccgtggtagtagccgccatggcggcggcggcggcgagtatgtcacggtgtacaacctgagccagcgatacttggagatggacgaggcgtggctgggcgagcagcgggggatggggactctccagctcgggcggtggcagacgtcaccggagcaccacgtcgagatggtccggccggatggtgtcctgggcgccgcggcggcggcggcgtgccggaacctcaggtaccttagcctccggggcatctcgctcgtcgagtcgctcccggagtccatcggcgacctccgcgacctcgtcgtgctcgacttgagggcgtgccacaacctcgagaccctgccggcgtccatggcgtcgctggggaagctcgagtaccttgacgcgtccgagtgctacctgctcgaccaaatgccccacggcgtctgcaagctccaccggctccaggtcctaaagggcttcgtggtcgccagcgccgccggtggcaagaagatccccccgtgccgcctcgccgacctcgcggcactgccgctgctacggaagctgagcgtcagcacggggcgccagcttcccgtggcgcccgacgacgagctgccgcggctgcacgggttcgcggcattggagtcgctgagcgtgcggtggggcgccgccgcagcccacgccggcggcggcgggaggatggatctgtccctcctcccccgcctcgcgaagctcgacctgcggcgcgtgccggcggaggagctgcaggaggtcgtgcacccggcgcgcggcggcggcctgaggaagctgtgcgtccggggcgggaggctccgcgcgttcggcgacgacgtgacgtgggacgtcgtggagacgttgcgggtgaggttcctggagcgtctggactgtgagtggcggcagctgaggagcacgttcggtaagctccggttcgtcgacaagcggcggtgtcccaagctcagctcatggcggtgcgacgcccagggcatctggagaagggaagaagacgacggaggcgatcgaaactga

SEQ ID NO: 64603 - DNA, 1272 bp, Oryza sativa
  Clone ID: PAT_MRT4530_65730C.1
agtcatgccacaattttttaggcatgtgtttggttcgctgccgcaattgtgttatgccacactttcttaactttgagacccacgtgtcatactctaaaatttagagctaagcatgccacacttgtggccaactatttctaagccacatttgtgccaccatgccacaactaatttaaacttagttataataagattagacatcaaccaaacatcccttagagccataagttgcctatactattaaacttgctttcatccgtcttcaatgggcctcgtttttgagacctctccgccgtcattccaggaatgacgcctccctgccctcgtcgaagtacgcgccggtcgggccgccgtccggcaggagggccaccgtcacgacgttcctcccgccctcctcgggcgtcaggaaccccgagttgatggtcatgtccgtcttgacgtagcccgggtgcacgcagttgacgcgcagctccgggtgcctcctcgccaagatcctcgtgtacgcgttcatggccaccttggccatcttgtacgccacgaacggcgccgtcggccacccgtgcgcctccagcgcgccggcctcgaagtctttcaggaagctgtccagcacctcgtccagccgttcctcggtgaggttatcaacgtcgtccagctccttcctcagatcctcgttgttgacgactcttagtagtccaaagtcggaggagacgttaacgattcttccttcgccggaggattgcaggagcagtggtagcaaggcttggattacaatcttcgtgccgtagtagttcgtctgcacgccgttctttgcggcgtcgtacgtctcccggccttgtttattcaaccatgcaagtctttgtttcttgtccatgctaacgaactgttccttgttggtatccactccttggacgtactccatcccgccaaccgctgcattattcaccagtatatctagcttgccaaaacgagtcttcaagaaatcagccaaccgagcaacgctagaactgtccgtgacctccagatgatggaagacgacactggagaggcccatcccactgagcttctcggcggcctccacgcccctcgtctcgtccctggctgtcagaacaaccgtgatgccgtcggcggccagctgccggcacacctccagcccgatccctttgttgccgccggtgaccacagcaacccttttggtcgggaggctggagatgtctccttccattttttgccgcacaagctaccggacgcgcaccaactttttattcgattagt

SEQ ID NO: 64604 - DNA, 150 bp, Oryza sativa
  Clone ID: PAT_MRT4530_65731C.1
tcacccttctacggtgtcttctccaagcgcccctcttatctctccatgcaacctcttcatgttgcctctccagctctcttgtgtcgacgccacctgcaccgccaccttaccacgcctacatagccatacttgtgccactttcgcccccat

SEQ ID NO: 64605 - DNA, 404 bp, Oryza sativa
  Clone ID: PAT_MRT4530_65732C.1
catgtatgttaataaccttgttcatcaccaatgacttgggaaccctccaagacccaccgaattcagtgctgacagagtcaatcaggtttttttcggccacgaagattgatgctaaacaacgtcgaagacgcgaagcgggtactacgccatccggatggatggatacggaccggaagacagaaggtgttcctcgatatgcagcgtacgctcatcgctctgaggacgagatgccaggttcgacagatggacacggcgtgcacctgacctttatgctatcgtgacatgctttggtccatcttcgatgtgccggagcaccgaactactaccgctgccactctgccgtgccggtggccctgcatcggacgtgacgtgcaccgggcgtgccaaactcgtcgatcgctgct

SEQ ID NO: 64606 - DNA, 228 bp, Oryza sativa
  Clone ID: PAT_MRT4530_65733C.1
gcacgaggctgtcttctgcaaaaggggggacaataatcctgttggaggtggttccgaggctgtgccacggagatggaagaattggcataggaacatattgagcaggacatctctgctgatcagctgctactcacttttaggttgttagtcagatagtgttgcaaagatgtatcattccttcctctgttctttctcgctgaacatgttgaataaacttcaagtatgttt

SEQ ID NO: 64607 - DNA, 473 bp, Oryza sativa
  unsure (1)..(473): unsure at all n locations
  Clone ID: PAT_MRT4530_65734C.1
gcaccgggcgctcggcatcgccattcctggccatggcctcgctgcaggttaaattaacttggtctctgaacatgggggagaactagnaataattgcagctgagttgaaaaaaaaatgctcaatgatttgcacatgcgccgcaaggccatcatcgatttttctagccatgagtgagtaagttgactgtgaatgatagaattgctaaccaagctacgggaagctcagaatcactctagagaatctgagtactagtaaacgaagactgcaacgtcagctgcatgttctttgagccaactagttccatttctccatgtatccgtcatagccgaattgtttgataaccttatgggaaactattctaaacagttattcaaatactcaaatagctattgtaaacagtttatatgtcactcaaatagttatgaaaacaacgaggacatgttcccttgaaaaaaaaaaaaaaaaaanaaaaa

SEQ ID NO: 64608 - DNA, 2320 bp, Oryza sativa
  unsure (1)..(2320): unsure at all n locations
  Clone ID: PAT_MRT4530_65735C.1
atgtccggcgcgcccctcccctcctcccccctgccccccattctctctctttccctctgcgtgtgcgcgtgctcgtgcttccttcgcgatggcggtcggatgcggaggcgttgcgaggggggaagcgcacgagacgttcacagagaggaacttggagcttcaatgggggaacctagtgttgcacgttccaaagactgtgatatggagtatgatgatagttcttctagacaaagtggcgagcctttgtgggaacatgcggaaggtgtggaacgatctgtcgattattcagatggcttgccccctacaagcaagggattatccttaaaggccgcgacggacccattctttaagagcgcattctctcgtgccacctccatgcctggtttcacggctgaagaggatgagcatcaagatgaccagccttccctagttacacaaatgttcttttccataggtttgtcccccactattacaaggaacccatattatcggggttcattcgctatggtcgcgttgttccagattcctggatatgttcctcctggggtcgaccagctgaagacaactctcttgcagaaagaaagggctgacattgaaaacatgctgcagaccataaaaaacacgtggaggaaagcaggtgtgacgattgtttctgatgggtggtcagattttaaaaggcgacctatcatcaatatcatagctgtcaatgaagctgggccagtttttttgcaagcaattaacaatgaagatgggtggatgtggatgatggatgactacattgcagagaagctcattgctgcaattgaagacgttggatcagaaaatgttgtccaagtgatcacagacaatgatcctttttgcagagctgctggggtgctgattgaacagaagtacagtcacatccaatggacgccaagtgttgctcattctttaagtcttgccttggagaatatttgtgctgctaagaatgccgaaaatgttgtcttcaaagactgccactggatttcagaagttataggggatgcaaaaatgataaatgattttataagtaatcattctatgagaaggtgttacgccgatagttggattgatgaaggcgctaatcgtcaacccccacatagtgatgctgagattaatgaaatggcaaatgactgcttgaagaaattatttcctgctgcagatgacttgacggcgattaaagcagagtatgcaaagttttctcttttgagcacggagtttgcttcctcaggtacaggatgctttaacttgaattccatcactgatagggatgttcttgacccaaaaacatggtgggtgacccatggcagtccaacacctaagttgcaggagctagccctcacgattcttggccatcctgcctcggcatcctgcttttgcggctttggacaagaaccacagttttactatagtgatccagagtcaatgttttgggacattgggggtaacgccgatattcttgcaagcttagtccctgctgatttacttgagtttgctgacttctcactcgacgaacctgagttcgagcttgccattcttgaagggctggaaggtgatgatttggcatgaagatggaggtggattggtggaagactttctagaancctagctcaatctgtgaatggcctgatgccacctttcctatcaggctgtcactcgggtctaccttgtcttttggggaaagggctggctgttcggtgtgtgcctttctggcctctctgccagcctgcttcaccttcctgctgccagtgctactgccgccctcccgattcttttcccctcttcgcgacggacctgctcccgcctgtctgggcccatagcttggtttgcgtgcacttcgagtcgcggcgtctatctagtagtgctggtgatggtctggcggtccgcggggcgcgtcattgcgatggcttggaaggcaacgttgtggcattggggggatgcggcgccctggtgtatgcttacccctctcttgatgaaccgtagttcgagcttgccatgatagaaaacatcgtgtgatgaagaaaaccaaatggaaatcaagacagaagcttagcttagctaagctacccatgcttcaacttgtctggcgttttgaactcccagataacccctgtaatcgagtatgttttggctaagaacatgcaagactagagctaggtagacttatgggatgtttggctgtgtaagctggatggtgctgttgatcaatgttggtggagggcaattgaactttctttacctggctaaaaaaaaaataatatgcaaaaaatttgcaacaaaaaaaaaaaaaaaaaaaaaaaaa

SEQ ID NO: 64609 - DNA, 243 bp, Oryza sativa
  Clone ID: PAT_MRT4530_65736C.1
gtggtctcccacgagctaagtaggcggtgcaaggctttttgaacatagaattgaagccacacccacttaatgaggtggatacgctctccatggacctggaggacccgctgacatggcgcacggacctgtgcgagatgttgaatatgcagctctaaaaggtgaacccaatgtttatgcagatcgttgagaacttcgttaagagacaggaggatactctgggactgaaaaaaggggctgccccca

SEQ ID NO: 64610 - DNA, 3110 bp, Oryza sativa
  Clone ID: PAT_MRT4530_65737C.1
gcggcagtgcatacagtaaaaacgacagcaacgcaaaaactccgggctccctcttccaagatcccaaaaccacaaaccgatcaaaacccacacaaaaaaccgatcaaacggagatcaaaaaacgaaaccaaaaaagagaaaaattcccaccgaaaaaggagaaaaaaaaaaccgccgtcatcatggcgcgcttcttccgcgactccacctcctcgtcccgctctagcagtgacctcgccgccggggccgacgccttcgcctccgccgccaccaccgccgcctcgtcgcgcacgccgccgctcccctccccgtttcccgacctcggggtgcccctctccgccgcggaactccgcgccaccgcctacgaggtcctcgtcgccgcctcccgcgccaccggcgccaagcccctcacctacatcacgcagtccgcagcctccgccgcctccgccgccgcacccgccccttcattgtcgtcctccatccaccgctcgctggcgtcgacggcggcggcgagcagcagcaaggtgaagaaggcgctcgggctgaggaggtcctcggcgtcgtcgtcctccaagcggcgcggggcgcggcggccggcgacggtggcggagctggtgcgggtgcagctcggggtgacggagcaggccgacgcgaggatccgccgcgcgctgctgcgcatcgccgccggccagcttggtaaacatgcagaatctttggttttgcccttggagttcctgcagcagtttaaagcatcagatttccttgatccgcatgagtacgaggcctggcagctgaggtacctgaagcttctagaggctggtttactgttccacccacttgttcccttaaaaaaatcagacatttctgcactacgactgcgccaagtaatacatggagcttatgataaaccagttgaaactgagaagaactccaaactcttggtggagctgtgcagtgctgccagggcgcttgctggcagatcccttattgaaacttttgatgaatgccactgggccgatggctttcctttgaatctccatatctaccaaatgctgatagaagcttgctttgatagtgaggatggtgctgtggttgatgagattgatgaagtggtggagatgttgacgaagacttggcctattctcggaattaatcaaatgtttcacaatctctgctttgcgtgggcactgtttaaccattttgtcatgtcaggccaagcagatatcgagttgctgtctggtgcaggaattcaattgactgaagttgtaaaagatgcaaaaactacaaaagatccagattactgtgatgttttaatctccactataaactcaataatgggttggacagagaaaagattgcttgcttaccatgaaacattcagtgctagtaatattgattcaatgcaaggtattgtctcaataggtgtctcaactgcaaagattcttgccgaagatatatctcatgaataccaccggaaaaggaagcaagagactgacgtagtagtacacagcaagatagaaacctatataaggtcctcactccgtactgcttttgctcaaaaaatggaagaggctgattcaaagcggtcatcaaggcaccctgtgccagttttgtcaatccttgcaaaggcaattggtgaccttgctaccaaggaaaaaactgtttacagtccagtactcaagaaatggcacccacttgctacaagtgttgcagttgcaacccttcattcttgttttgggaatgagataaagcaatttatagctgggctaacagatctgacaccagatgcagctcaagtgcttaaggcagctgacaagttagagaaggatctggttaatattgctgtcgaagattctgtgaatattgatgatgatggcaaattacttatcagagaaatgctaccatatgaagctgaaaatgtaatggcaaacctggtgaaagcatgggtaaaagaacgcgtggacagactaaaaggatggattgacaaaaatttgcagcatgagacttggaatccaaaggctaatggagagaactttgctccttcctcgatgaagatgatgcagataattgatgacacattacaggcgttttttcagtttcccttaactatgcactccactcttcattctgatctagcaaccggactggacagaaatattcagtattatgtctctaaatcaaaagctggctgtggaacccagagtactcttattccccaactacctcatttaacaagatgtgatgttggatccaaattattcatgaaaaaggagaagccacaggtacttatgaagcgtggatcacaagttggatcaaccacaaatggtgcgtcagttatccctgaactctgcgttcgaattaatacactctatcatgtccaaactgagttggagagcttggagaagaagattaaaacatacttccgaaatgttgaatcaattgaccgtagcacagatgagctgaatatccactttaagctctctcagtcagcctgccaagaaggcatccgacagctctgtgagacatttgcatacaaggtgatatacaatgatttgagccatgtccttttggattcactgtatgctggtgatactgcatcaaacagggtggagcctttgttgagagagcttgatcctatccttaggatggtatctggcatactgcataatggtgtgcggaaccgtgttataacatcattgatgaaaggttccttcgatggattcctgttggtgcttctggctggtggacctacccgtgctttcacccttcaggactctcagatgattgagaatgatttcagagccctccggagcttgtatatagccaatggccgtggcctgccagaggaattagtcgacaaggcgtcctcagaggtgaagaacattctgccactcctacgaacagacacaggaacgcttattgagcggttcaagcaagcaatctctgaatcttgtggatctacagccaaatctgggttcccaatgcctccagtacccgcccactggagcccaagcaacccgaacacaattttgcgagttttgtgctaccgaaatgatgaggcggctacaaagttcctcaagaaagcatacaatctaccaaagaaactttga

SEQ ID NO: 64611 - DNA, 768 bp, Oryza sativa
  unsure (1)..(768): unsure at all n locations
  Clone ID: PAT_MRT4530_65738C.1
ggcttatggcgccgagccgcttcatctcggcctcgaacgcgtccttggtggcgcggttcatgtcgcgcgcgcgcttcaccaccacggccacgccgttcgccatcaccgccttgtacgccgacccgtgcccgccgctgccgatcacctccgccgccgccttcatcaggtcggtcagcccgaacacgcccttgcagttgttcacgatgacgaggtcaccggcgccgccgcccagctcgtccgccttcgcggccgacgcggcgcgccgatgcccgcggagcgacgaccccgtcctcttccccagccacgacgcgctccgcttccccgtcgtcgagaactgcttcaccatgtacaccggcggcctctcgtcgagaccgtcgccgccgcggtgggcggggtcgaagtcgtggacgcggctcgaccggttgcagcacaggcaaagcacgagcgccaccacgacgaccgagacgagcagcgtgacgaacgccatgggcgacctcttggacgagctcgccgccgccgcctgcacacgcttgcnacggccggtcggaggtcggcacgtagcagaggtacctggttgccgccgaacctgccggcgtcgaacttccggaaagcctccgggacgacgcccttcgagggtcgttccaggagaatgtcgaacanccttgagcgccggcggcggcagcggcgggagctcgccggagaaaggcgttgtgcgcgaaggtggagctcaagaagcgacgtggcctgcgcgatggacgccgggatggc

SEQ ID NO: 64612 - DNA, 351 bp, Oryza sativa
  Clone ID: PAT_MRT4530_65739C.1
atgacggcgacgagcgtccgtcggccggccgtgcgcctccggtcttccccagccgtcgcccgtcttcgcccaacgacctcctccgacacgtcggccagccaacagaggagaaaaccttgcagggtgatggagtacagctactacggcaactacttgagcggcggcggcgccaacatggcgaaggagaagaggccaccgctgaagagggggcaggtcaagcgcaggatcgtgaggagcatcagcaacctcatggccaacaacgctgctgctgatgacgactccaactcggcccaggctgcagatcatcgcaacagcttcatcaggagagaagcaagctacaataataactag

SEQ ID NO: 64613 - DNA, 442 bp, Oryza sativa
  unsure (1)..(442): unsure at all n locations
  Clone ID: PAT_MRT4530_6573C.1
taggtatatggccatggctgccacgtcccgcgcgccggccacgctggcacccggcgtgggtctccgccgccggcggcagcaggaggcggcgccggtgcccgaatcccagggtgcgggtgggggtgggggtgcngttctctcctctgcagccacgactcgttacttgggctgaatacggtgagaggggttgtgatctccatatgccgagcagagcagaggatcggaggtgatcctggttgtaatagacgcacatgttttcatatgatgctgcctggtgcagctcatcctttatgagtatgtagaagagcctagactgatgatgacaggatgattgcaatggctcttctggttgattatgttgggttggattgtgtttcgccaagtggttctcgatttatcatctattcctgacgttccctgatcaacatatacttgttgacat

SEQ ID NO: 64614 - DNA, 252 bp, Oryza sativa
  Clone ID: PAT_MRT4530_65740C.1
atggcgttcgtcacgctgctcgtctcggccgtcgtggtggcgctcgtgctgtgcctgtgctgcaaccggtcgagccgcgtccgcgacttcgacctcgcccatgcggtggtggcggcgacggtctcgacgacggggaagcggagcgcgtcgtggctggggaagaggacggggtcgtctctccgcgggcaccggcgcgccgcgggaggaaaaggaggggaaagacatgtgggacccacgtgggtcccgcgctga

SEQ ID NO: 64615 - DNA, 704 bp, Oryza sativa
  Clone ID: PAT_MRT4530_65741C.1
atgctgacgtcatccatggccggccggctagggttagcaagctcgccggagataggacggtcggccggggatttggaggacatctacgcgtagaggacgacgagacgaacccgatggtactcaccacaacggcaaacgacgaacgacgacggccggcgacgaggaagacggcggcggcggctcgggttaacggcgacggcggagctccggtggtcggcggcgaagggggacgggcggccgaggttctcctcaccacggcgcacctaacggcgacgagaaaaggcggcggcgacggcggaatcgacggcgcgacgacgccggaagatggccggcgacggcggcgacttggagctcgatgcggcgacgctacggggcactagagagctcgggatagggggcaaacgaaagaggacgacgaggtggtcctatttatagccttggattgaagagatcggactccaaacgagaggaatcgactcgggaaaaatccaaactcggttttagggataaaatcgaaacgaactcgattcggataaaatcctcaacgatttgctccgaaacttgggggaaaagatagaggagaacgagaggatcaaaacccctcaatcaatcggactcaaggaggccggattgaggcggatttggagggagaaggaggcggctcgggcggcttgagccggcggctggaggttagggatggatcc

SEQ ID NO: 64616 - DNA, 597 bp, Oryza sativa
  Clone ID: PAT_MRT4530_65742C.1
cccaggaggaacctcattttttgggggacccccgttaataaaaaataaagggggtatttaaccgggtcccaaaattttttaaggggaaaaaatacaaagcccaaaagggggaccgggccccaaaattccaaaaatttccccggtttaataaacgggggggataaaaagctgaacccccccctttccgggggggccccggaacccgtgtttttcttgcccccgggggaaccacaaaaattttttggcaaaaatcccctaataaataaaggggggggctttcggggggcgccaaaatttttaattgttgggcaaaagtcccccggggggggggggggggaggccctcacaacctgggaaaggggcggccaaggccctcgcctcaggaaaaaatagggccccgcttaaatccccaaagaaagggcaccccgctgggccccagggggggcctaaaccccccccgaataaccgggagaaggtttttcaccgggggctccccttccgggggagggggaaaaaccacggctcccaaaaaaaaaccccgggggccccaggggcaaaccccttaaaaaactggggccccggggggccccccccccc

SEQ ID NO: 64617 - DNA, 1512 bp, Oryza sativa
  Clone ID: PAT_MRT4530_65743C.1
atgggtcagctcgacgccttatctgtggtgcgagcagatcaagtccactttgactccctcaaatatagaggtgacgacgttggctcaccacctttgtcggagacctctggagatcagttgcgaacaggatatacgtcgagcaacgccatgccacgcaacaccgccaccttcactagagacctatggagatcgagctcctcgaccttacacaccatacagagtgcatccagagcaagcacctcgatcccctatcgcttgcatcggttcttcaccgacgtcgtcgagtcttccttgtcgatgcagcttgacatcgggggagctgggaggttgtcaatgccgctcctgatgagcttccactttggaagggtcggtcttgatgtgttctcgtcgacgtcgacctttgtcgccgccaactccgacctatcccagaagcggtgtgagagcatcatatatagcaagaccataattgccaagttgagccgcctacgtacgtctgtgagagttgcagttgtgttgtacaacaactacaagcctctcactgcttcacgtcatgcatcacgggctcattgtaacatcgcctgcctgcctgattttcgcctggctcgacatccacacacccatctcaactggaccccttgtgtcccactcgatcgatatgattcaggtagcctcagccagccagccaatcagccagccgccgtagcgcccaacactgcagatttccactgtgctaccacatatcgttggcaacttggtactaggaatgctgctaggatcactgtgctcattgcgtccgattattgctttcgttgccatcaacagaggccaaacactgtcgactacagtctgaatgtcgacacccccctgatcatggattcaaagctagctagctacatgatgcacgcatactcctttggcccaggcctgaatttgtccaaagctcaacctctgcagctagctaccgctgcattactgcgcaccataaagttgcacttgtacgaccatccaatcagcttctctcaactggcattggaatcagccgtcatcgtggtcctttggattctttggacggtgcagattggatttgattggtcgagtatcctgttgacactggtcaatgcagagcacgccagttccaattgccaaaaggtcccctacggttgtgcctcctccactgctgataccgagttgcaagcgggctggagcctagaacttgtggccttttttgaaatatcagacaaaaactctttgccagaacttctggctacatcagctgctatacataacacttcaaatggatacccaacccctttgaacttccgaccaaccctgtcaaccccgaaagttggataccaaaataacgtgaaatttgcccaaagacactccaaaatcttcttcaagcaacatgcatcaacggtgaagctgctgtggcagctagagggcatccaaatccggttgaccgtgcatgctcaccccgtcatgaagtcactgccaccaggcgctgaaacccga

SEQ ID NO: 64618 - DNA, 512 bp, Oryza sativa
  Clone ID: PAT_MRT4530_65744C.1
cagaaccctcctggtttaaatgcctcacagattagacagcacacaacagagtcctttagattcagatactattgcttcttctgtgttgtgactatacactctcggcagttctgcttctcgcaaagttctgcccacactctcagtcactcaagtcacttgttgacctccataagacctctagtctcacctcgcatacgagtgtatatcctatctatactgggcgacaagcacaattacccccaccccacggagactgacacttggatttagtacggtatgcatactcatattcagagcatatgttccccctgtcgttgcgttacccagccctgttgtgttaggagtccgtggaaagtatcttgtcctactatggttaggaatgttgggaacatcttctaacaaggagctccctcacacgcgatccacgagatctatagacttaatctaagagatatttactataacttgaatctatttctactaaaaaaaattgcattaaaaaaaaaaaaaaa

SEQ ID NO: 64619 - DNA, 2967 bp, Oryza sativa
  Clone ID: PAT_MRT4530_65745C.1
atgcaggattttgataggaatatagagagttccaagaggcagttccccactcgccggtcgcggctctcccccgcacggccgcaccggcgctcgcggttgcgactcagggagccgagccgcagctgttgttggacgatgacaagaacgtggatgaaacaagtcagggaggtagcatttgatgctgaggattgtattgacacattctggtgctacattggccatcattatggtgccaggggagtccgctgttattgtgtaccaaaggtagtctacaccttgaagacgttgaaagtgaggaacaacctggccatcaaaatccaaagtctcaggactcgtgtgcagagagtgagtgagcggaggctgagatacatgctcaacccaacaggatctctgtcttcttcaaactacattgatcaagagcgccgattatctgcactaaacatcgacgaatcacgacttgttggaatggctgataagacagaagaagtcaccaagctgctagacgaaggtcatgtgcctaatcttaaagtagtctccgttgttggctttggtggactaggaaaaaccacccttgcaatgactgtttacaagagcccagcagtgaaagggatccagagccgtgcttttgtggcagtgtcccaaaactatgatccccgagcacttctggaatctttactgaagcagcttatccaaagaccctttctcagagagccaaggagtgtggatgaagaaactagtactgaagaccccctcaaaggcatcgaaacctgggacatatgccaactcattaataggtgcagaaattacttggagaacaaaaggtacttcattgttcttcatgacctttggaggccagaagcatggatgactttgaagatagcctttcctgataatgataaacggagtagaatactaattactacaaggaatcaccttgtagctcaaatttgctgctattatccccatgactgtatttacagcatggagcccttacccagtgaagaatccagacatttattcttcaagagagtgttcaaattggacaaatgtccttcacagtaccaagatttggtggatatctccgatgccatattaagaaaatgtaatggcttgcctctagccattgtgagcataggaggaatgctagctcgaatgaaaaacaagacatatgcagaatggcagaaggtgtgtgacagattggactgtgggttagagataaataatactgtagggggaatgagaaagatactctctcttggctacaatgatttgccctaccatctgaaggcttgcttcttgtatcttagtgtttttcccgaggattttgagatcaaaagaggacccttgattagaagatgggcagcagagggtttcattggtagagtgcgtggatcaaatttggaagaaattgctgataagtattttgatgaatttatcagtagaaacatcgttacacctattcggattgatagcagcggcgaggtccggagttgtagggttcatgacatcatgctggaagtaatcagtgccatatctgtccaagaaaacttcatctcactcctagggaattacagttacagcataacagggcatgacaaaattcggcggctttccatccatgtaggtggtggtaaggagcaagatttctcatgtaggaacttatcccatctacgttctttgacaatcctaggctgcaaggagaaaccaatacctatcgctttggctgatctaacacttctaagggtgttagaccttgaaggttgcggctggttaagtgattcagatttgaaagatatttgcaagctgtatctgttgaggtatgtaagtcttcgaagcacaaatatttcaaagctaccaagggcagtggggaacctgaaagaacttttgacattggatgtaagaagcacttacattagggagttacctgcaactatcactcagctccggtgtctcaaacatcttcttgcaggccgttacaagtactatacaaggacacatcatgtgaaacattttgcttcaaaggaagctgtgactatacctgctgggttgaaaaatatgagtgcccttcagagcattgctcctgtaaacatctcatcaagcttccgtgcaatgcatgaactgggagagctgtctcagttgaccaagctttgtgctatcaacagaaagggagtagagaaatggagacctttcgctacctcattaagtaaactgagcaattcccttcgccacctatcagtaattcatatcgacaaaatggaacatgggcttgagttcttaatggacctaagctcgccgcctctcttcctgaaaaagctctacttttggggaagagtgagtgctctgcctccatggatttcatctctcagcaacttagtcaggctatcgctccgagaaaactatctggagagtgaattggtcaagatactagggaaacttcatagtcttttgtccctcaaactgtatgttaactcatatctagggacagaactatgctttgagcataatctttttccgagactcaaacaacttatgatagataatttaaaaaatcttgatgagcttagctttaagggaggagcgcctgatcttgagagactcacgttggcttttgtaaaagcacccgaaagaggcatttctggcatagagaatcttccaaaactaaaagaagttgagttcttcgggattattgttgactctgttgtcgagggggtgatagctgctgccaagattcatccaaatcatccaagagtttacagagacgagacaatcgacccaaggagccttactacagcatgtaggagccaggaatacattcaatctcctgctaggcaggcggttcagggccaacgactaagtaataatgccaaggaatctaccgtagtgactagcaaggaggatggacggtcattggcaaaagctggtaggaaggctggagtaactggttgcactggacgtgagggatactag

SEQ ID NO: 64620 - DNA, 1305 bp, Oryza sativa
  Clone ID: PAT_MRT4530_65746C.1
atgaaggccgagcggaataacactgtcctttttgaaataaaatttgggagatacaatttcaatggggttgttattggactagttgttggtactggagttctagccctttcattagtcctaactatattactgcgaaggtggaagcgaggtattcaaaagaaaattcgaagggcatacttccgaaaaaacaaaggtcttgtcctggaacgactaatatcatcagatgaaagtgtggcacatagtacaaaaatattttctttggaggagttagaaagagcacctgaccattttaattccacacgcattcttggaaggggaggccatggaatagtttataagggtatattatcagatcagcgtgttgtagccataaaaaggtctaaaattgtagagcaaggtgagattgatcaatttgtcaatgaagtggctatcttatcccaaatcattcatcgcaatgtagttaagcttttcggttgttgttttgaatccgaggtacctttgctcgtgtatgagttcatctctaatgggacactttatgacattctacatggcgatatgagcactgaatgctcattgaaatgggatgatcgggttagaatttctctagaaactgcaagcgcccttgcttatctccattgtgctgcttcaattccaatatttcacaaagatgtcaaatctgccaatatactcttaaatgacaatttcactacaaaggtttccgattttggtgcttcaaggtctatttccattgatgaaacccatgttgtcaccattgtgcaaggtacatttgggtacttggatcccgaatactatcacacaggccagttaactgcaaagagtgatgtctatagttttggtgtaatactagttgagctcctaacaaggaagaaaccaatctttctcaattgctctggtgaaaagcaaaatctgtgtcattacttccttcaaagtttacgggataagacaacaactgatatgttggattctcaggtagttgaggaaggaaacctaggagaaattgatgagtttgtatcacttgctgaggcttgcttgagacttagaggggaagacagaccgaccatgaaagaagtggagtcaagattacagctcctaagagccaatattacaaagaagattcaagatgagtcacaaaagaacgtggaagcgatgcaattgtttccttccgtttatgactctacttctttcactcagaatgttgacatcggaatggatgctgattcattaactcagcttgcctctacatgccataccatggaacaagaacttgtttccttgactcgttaa

SEQ ID NO: 64621 - DNA, 1433 bp, Oryza sativa
  Clone ID: PAT_MRT4530_65747C.1
ccgggctgcaggaatcggcacgcggcgcgcgatcgggcctcgtggtttttttttttttttttttttttttttttttttttttttgttgggtaatgaaccatccactggaattgtagggataatatatgaacatgtcccattggggcattcaacaatcggcaatgttcgacaagactaaccagaatattcaacaaaagtaacaacactgaaaccatcagatggtagcaattgtacacttgtatgagactctgtttctgctagcagaggaattttacaacgatgcaggagatgtcgtctttgcttttccggttcacggcctgctccgtcagatgcttcgcagctgcctgagcatccttgaagtccttgatttcatccaccgcctcttggttggacatcaccttccataatccatcacttgcaagaattagaaaatcagtattctcgtctataggttcctccaccacatctggctctgagctgaggtgcttctttaggctccggtctccaaatgcccttgcaaccgcaagctgaccatcaacacgcggtacatctcctggtaagtttgaaacaaagccaccttttttctcgattgaatgccgctccttgtttggttcatgatcaaccgaaagctgttttgctacaccactcttgctaataactgctcgtgaatctccaacatttgcaactactaggttcacagaattttcactgcttattaatatggcagtaacagcagtggagcctcctctgcccaactcagctgcgctttccaatatttttgcatccgtaagttgatatgcatttcgaattgcagcttgtgggttgctcaagaattctggctgctttaagatattatcaaagagatgtgagcgcaggaagtctggaacagtgtggcccaaatgcccatcaaatattgcaaacagccccagatcatgctctccttcttgcctgtactctgccactagatagtcctccatcggatgatttgattttcccttcacaagatggtaaccatgcttgacacgcttgcctgacaattttgtttttcctttccctgtttctggtcctgacgaactaaaagcatctttcaccttgtccttcatcttgtggtagatttccttgccagccattgtttccctcttacaaaacctccaattccgacttctttagcctcaaattcaacaagcaccaacccggacagcagcagcagcagaaagatggtccctttcttgaaaattcagagccctccctcccccttctgcacctctctgcaccacaaccaaacttccctttcttggatcagtctgaagcaatcagcagtagttgtaggcttataattgagggaagggggttggtggggagtggggcttgattgggtttggatggagctgcttttgggaagaagattgggggggaaatgaggctcgagaaag

SEQ ID NO: 64622 - DNA, 418 bp, Oryza sativa
  Clone ID: PAT_MRT4530_65748C.1
ccactggaattgtagggataatatatgaacatgtcccattggggcattcaacaatctgcaatgttcgacaagacttgatccatttgcggacttttattcccaacaagaaaagattaaccagaatattcaacaaaagtaacaacactgaaaccatcagatggtagcaattgtacacttgtatgagactctgtttctgctagcagaggaattttacaacgatgcaggagatgtcgtctttgcttttccggttcacggcctgctccgttagatgcttcgcagctgcctgagcatccttgaagtccttgatttcatccaccgcctcttggttggacatcaccttccataatccatcacttgcaagaattagaaaatcagtattctcgtctataggttcctccaccacatctggctctgagct

SEQ ID NO: 64623 - DNA, 233 bp, Oryza sativa
  Clone ID: PAT_MRT4530_65749C.1
tttgtatcagatgcaggccacatgttggatccatacgctagtacaaggattggagggtgtcggtatttcttaacgtcatgactagaaatataattcccagtaatggcgcagaaatacttctgatatattatggttacagagttcatccacaagcgcacggatataccattgtagcatttcacccgagagtattccaagggtgtcgtatttattttattccgtgggaagatcat

SEQ ID NO: 64624 - DNA, 375 bp, Oryza sativa
  Clone ID: PAT_MRT4530_6574C.1
atggagaggatggacaacagcctccgtggagaggatggagctgcagatgagcaacacagctcatcagcaatgacaaagaagcggatcccgcagcacgttggaaggcgtcgtctgccgccgccaccactatcgctgcctgcctcctaccgccgcacgttgctgtcgtcatctcccctcccgccggatctggcggaggggagggcaccacccaaaacgctgtcgcctctcctcccgccgcaacacgccattgccgccgcctacctcctgtcgccacacgtagctgccgtcgcatctcctcccattggatttggcggagggggtggcgccgccagccactgccgcctctcctcccattgccgttgttgttgcgactaa

SEQ ID NO: 64625 - DNA, 177 bp, Oryza sativa
  Clone ID: PAT_MRT4530_65750C.1
atggcgactttcaggcctgggaatgatgtggagaccatatttcgctcggcggctgttaacagtgaaatttggatcgtaatgcaagaatttttcaacatgtgcccaagacaccggaataacttgcggaggatattgaagaggaaattgctgtctggagggtggctgtttcgcgagtaa

SEQ ID NO: 64626 - DNA, 2163 bp, Oryza sativa
  Clone ID: PAT_MRT4530_65751C.1
atgccgtcatcgctgaaatcgctgcttccgggtgggaaagatgacaagaggaggaccctaatgcaccaggtctccacacttggggagagggtgtcggagttggagaacaaaaatgcccagctgcttgacgagaagggtaaagtggagaagcaattggaggagacaaagcaggaagctcaggtcatctcaaggcagaaagaggaggtggagagtagcttgaagggtcaaaatgaaatgcttgggttgaaggttttgaatgtggaggaaaaatataatcatatggtcgagaagctccagatggaattatgtgcattggtgaaggaaaaagaaaaaatgatgatggagtcagaggatcttaagaggaggttggaggaaatccaggcgaagaaggatttgatggagagtgaaaaggatatgcttcggtcggaggctatgattacaaagcaaaaacagatcatgtttgaagcagagattgagaggctcaatatggaattggttgtattgacggaggcgaagaaggctgctgcaaaggcatgtgaagctcaaaatgatgaaatcatgaaggaactggaggatcttaagaggaagtttgaggaactgcaaacaaataaggatttagtgcaagctaaaaatgatgaacttctgtcaaatgttttggcaataaaggagaaatatggccagtcagaagcagaggttaagaagctccagatggaattaagtgcattggtgatggaaaaagaggtagctgttaagacatttgatgacgagaaagacaaaatgatgatggaatcagcggatcttaagaggaggttggaggaaatccaggccaataaggatttggtggagagtgaaaatgataggcttcggtcggaagctctgattacaaagcaaaaacaaatcatgtttgaagcaaagattgagacactcaatatggaattggttgcattgacggaggcgaaggaggctgctgcgaaggcatgtgaagctcaaaatgatgaaatcacaaaggaactagaggatcttaagaggaagtttgaggaactgcaaacaaataaggatttagtggaaggtgaaaatgataagcttcagtcagaggttttggcaatagaggagaaatatggccagtctgaagcaaaagttaagtggcttaatcagatattgagagtagtggtggaggcgaaggatgcagctgcaaaggcatgtgaagctgagaaggtagaaatcttgaaggaatcaggaaatcttaagaggagggtagaggaaattctggttaacaaggatttggttgagagtgaaaatgacgtgcttcggtcagatattctgacattgaagcagaaatacaatcaatttgaagtagaggttaagagcctcaagaatgaattggaagcattcgaggaggagaaggaggttactgcaaaggcgtttaatgttgagaagacagaaatcctaaaggaattggaggatctaaagatgaaggtactggaaatccaggccaagaaggatttggtggagagtgaaaataacgtgcttcagttagatattgtgacaacgaagcagaaatataatcaatttgaagtagagattaagagcctgaagaatgaattgaaagcattagaggaggaaaaggaggttactgcaaaggcgtttaatgttgagaaggcagaaatcttaaaggaattggaggatcttaagaggaaggtgcaggaaatccaggccaacaagtatttagtggagggtgaaaatgataaacttcggttggatgtttctactgcagaacagaaagaaagcatatctgaagcagaggttaagcgtctctggaagatattggatgctttgatggaggcaaaggaggtgactacgaaggcatttgatgctgagaaagaaaaaatcatgaaggaattggaggatcttaagaggaaggtggaggaaatccaggctagcaaggatttggcggaaagtgaaaaggataagcttcggatggtagaggaaatccaagttggcaagaaagcggctgagaaagccgtgcatgacaaggatgctgaggcccataggctaagagacgagttggtgaagatccgtgtttctttatcagagttgcaagcatcatacaatgaacttgatgccaagtatccgtgcctgaatgatgagaagaattcagtctag

SEQ ID NO: 64627 - DNA, 432 bp, Oryza sativa
  Clone ID: PAT_MRT4530_65752C.1
gagcgtgaaggatcccatatatcgcaagtcaagacatacgctaacgcccgttcggtcagcccaccttgcagggaagaaactcaggtattccgtgcccatgcacacgttgagtgtagtgcgctaatgcgtatcgcatctcatagggagcaagcccgaagcccgtcaagaacaccaggggagaagagccaccggttcccgttcacgtcctagatgttcaacaacaaagtacgtacccaggagttatgtcgaatgaggtccgaaagccgagacgttcagcaggtaagtggtaagttgagaacctaggtagtcggccgttagaggtataaagttaaacacccccaagtaggacccttggtggtgattctattcgatatcagtactaaataaaggttacaaaatttcttaactctccaaaaaaaaaaaaaaaaaaaa

SEQ ID NO: 64628 - DNA, 335 bp, Oryza sativa
  Clone ID: PAT_MRT4530_65753C.1
gctaaagaacaatcatcatactaaaccttttatttatcactttgggggtggatcacactgaaactttgtaacatttacatttgactaatgacataaacagttccattttaacttttatacaaacaaaaatttctcctacaacatacacatttattggcatctaacaacacacacaagaactattcatcaaagattacatactcatcattctaaacttaacatcttatatttcacccggctctcggtaacattttactctcattactttctacccattcttatattctggatccactaaaacggttgaatcatatacaatcacgccttctccatct

SEQ ID NO: 64629 - DNA, 1449 bp, Oryza sativa
  Clone ID: PAT_MRT4530_65754C.1
gcacgagggtcgccttccttctctttccgcccgccacttcataccgccctctactcttgttgcttagctacctagctagctagctttcctctccactccatccacccacgcacctcaatcgatcgatcctccatggcggcggcggtgctggcggtgctgtgggcgtgcatgatgatgatgagcctagctccggcgagcttggcggcgtcggggttcgaggaggtgccgacgatcgcgttcgacgaggggttctcgccgctgttcggggaggacaacatggtgaagtcggccgacgggcgcacggtgagcatcaccctcaaccgctacaccggctccggcttcatctcctccgactactaccaccatggcttcttcagcgcctccatcaagctccccaaggaccacaccgccggcgtagtcgtcgccttctacctgtctaatggagatgtgttcgagaagacgcacgacgagctggacttcgagttcttgggcaacaggtacaggcacgagtggaagatgcagacgaacgtgtacggcaatggcagcacggaccgtgggcgggaggagaggtatctgatgccgttcgacccaaccgccgacgcccaccgcttctccatcctctggcactcccgcctcatcgtcttctacgtcgacggcgtccccatccgcgaggtcccgcgcaccgccgccatgggcgccgactacccctccaagcccatggcgctctacgtcaccatctgggacggctccacctgggccaccgacaacggcaagtacaaggtcaactacaagcgcgggcccttcaccgccgtcttctccgacctcgtcctccgcggctgcaccgcccgctccgacatccgcctcgccaccaccgccgacgaccaggacaggtgcgccgcggcggaggaggacctcatggagagcgacgagtactcctcgaccatggccatgacggcgaggaagcggatggcgatgcggcggttcaggcagcggcagatgctctacaccgtgtgctacgacaccaacaggtacccggagccgttcccggagtgcgacgtcaacatggcggagcggcagatgtactggcagtggggggagtccaaggtggttcgcccccgcgtccgaccacgacccggccgccgctccaagcgccgcccctcgccggaggccacggccatcccgccgcccgtgctcgtctccttgcagcaagctgactagtctttgattagaatattctattctatgatgaggctctagctccatcataattctttgattaattttgcttccttcacatgcgtacatcgatcatactgtaattagtaccccctgatgatagagattaatttattgttgacacactatcaaggatgagggttttgcttcattgtagaaaggaaacaatgacaaagagaatcagaaacttacccacccaagcatttttgcatg

SEQ ID NO: 64630 - DNA, 808 bp, Oryza sativa
  unsure (1)..(808): unsure at all n locations
  Clone ID: PAT_MRT4530_65755C.1
caaaacccaattccatgttctcccagatttggattttttnaatgggattantttagaacttttgagaatccacacgtaccgaacctggaggaatgccagttccctgtgnaaanactagtatctgatttcgaanttaaatgcccaaggaagctttgncagaggttgattacattacancattctacttctaacaccaggncactggaaaaagccccacttgatgcccacnttgttcgccaaccgcagcntctgctggctncggctncgagaaggagacgtcgctctattggatgcgcgacgctgcaaagccctgcgccctggttggtccaaggcatggtaccgtgagggcgcggccctcagtctcctgaagaactacagtagaagcggcggcggctttccacggaagcgctgaaacttgaccctgagaactacgagatcaagatcgcgttaagagaggcgttggagtgtcggaagagagctgcacgctctgaagaagataagaacccttgagctgctgctgctgctgcatcagtgcatcacccttttgacctcacctttcagactgccacatctctgatctcacattctctctacgtgtaactaccaacggcctgtttcccaaactatctaaactgtttagctgatcaccatgcatctgtgtcctttggtcgaaaaaaaaaacgtagtaactaggagtagttcgctgggaagggacatcccttgagagatcaaaatagtttcctgttagtttcctgtagtttgatagattattgtcgatacatattgcaaaaaaaaaaaaaaaaaaaaa

SEQ ID NO: 64631 - DNA, 426 bp, Oryza sativa
  Clone ID: PAT_MRT4530_65756C.1
atggaggaatcacggcctgatggaggaggagatacggggaggataaggcgcagcttcgataaaattggctatcgaaggaagaagggaggtagagaggtggcaccaaccggatctgggctagggaggttattggagaagaagccgctcggcaaccccgccgtctctgccgcggctactccacccggtgaccgccgcactgctcctctgtccgcgaccttatcgcctgcgccgccggtcctcctccgcccggcgaccgcccgcaaccccgctgttccttcgcccgatgaccgcacgtcgcccctcctcgtcctcctcatcggtagaatagaagagatgatgaggggtagaatagaagagaggaagataaataccggtcttctgaagtttggggaggtgtctctcttggtcttggtcacagtcctctga

SEQ ID NO: 64632 - DNA, 830 bp, Oryza sativa
  Clone ID: PAT_MRT4530_65757C.1
ccggccggggaaatcccccagccgacacgccgccgccgccgccgcctactccgacgaactcgacgccgctcggagctgcctccggcgagcctccgccccgtacctagctcttctcgcccccccaccccccaaagctcgcctcctccgtctccggagcggtcctctcttaccgcttttgactccacctcctctgacctgcgcgccgactcctcctgagtccggtgtgccgtcgggaaggtccctacctgtgcgccgccttctccaagtccgtcgcaagtgacccgcccgcgctctcgatggctgggaggcacaccattattctgatgcaaccatcccaaaacagggcttctagaacatttatggattataattcaattaaccatgcattggatggactgtgtggtctttatgaaaggaaaattagggacataaacccaatggtaccaaacataacatatgatatcactgacctctataacttcattgatggcctagctgacatcagtgcactagtttatgatcactcaattcaggcatttctgccatatgatcgacagtggataaagcaaaagttgttccaacacttgaagaagctagctcagcggtagtgagtggtttcagttcgatatctctcaccagcgagaagagatgtggccatggttgtcagaggtgttacctgtaaaacaatgagagtttcacattgtgtgctcatattctgacaaaacttaaatttcaatgggttgcctctggtacccaatatatcagttaaacttatctgctgtgtctctttgtgaataaaagaaggatttggctgttaaaaataaaacaat

SEQ ID NO: 64633 - DNA, 588 bp, Oryza sativa
  Clone ID: PAT_MRT4530_65758C.1
atggatgagctgtttctggctggcagtggccgtgaaggaggtgaaagggaagcggccggaggtggacccgtggagggggagacagagtgtagtggaggggaggacgagtggagcacgcggatggccgaggccgaggtagttgtggatgactggaaatttgcagcggatcagctcgtgaggtggagtgatcgtgcacgggttttagctgatcgtgtgccatccaccgcaaagcagctaacgcgagaccacaccgtcttccatagagaaggctttttgatgaagatggctaaccccacaccaccggtcgatgctacgccattgtgcagcacgtcacactatgggccgagcctcattcgcttccctcagacctctaaactagatatgaaggatccctcaactattgaaatgcaacgtgatacgctcaacctgtggaacataaaggccatgtacatcaccatcaccatggacatcaaggagaagcaagtgaggcacgtcaagcacaacatatttcctcatggtacacaacaacatcatctggcgaggccatgtaccactgacctgtcctccagaccttcttgtcattgctaa

SEQ ID NO: 64634 - DNA, 228 bp, Oryza sativa
  Clone ID: PAT_MRT4530_65759C.1
atggcgtcagagtggagcaaagaggagaacaagctgttcgagcaggccattgcctactacggcgagggcgcgcctgatctctggcacaaggtgtcccgcgccatggggggcaccaagacagccgacgaggtgcgcctccacttcgagatcctcgtggacgatatcaagctgattgaggcaaggcgagtcccgttccccaagtacaatacacagggagcatggaactga

SEQ ID NO: 64635 - DNA, 598 bp, Oryza sativa
  Clone ID: PAT_MRT4530_65760C.1
atgaccaatgggaccaagggtgtcaggcgcacttccacgcatatcaggcggcgtgcagcctgtcctgtcccatcagatcgtgatgatgaggggtttagccagcccctcatcatcacagctagagtcgggtatcctcaatccgggccatatccatacccacctccatcaggtgctgtgtaccctcctcagggttaccctagctcccatggtgtgtaccctccaccacaggggccttaccccccacctcaccagcctccaccaccagggtaccagggctacttcaatcagggccagcaaccttactacccgccgccaccactgccatatgaccactgccaccaccactgtggtgatgagggttctggagctgggtttctcaaaggatgtttggccgctctttgctgctgttgcctgctggaggagtgctgcttctaaggagaagaattattttgctctgtgcagcagtagtatgtgataagaggctattgtttctagcatttgtgtaaacatcagtatatttgattgtttttttttccagaaatccgcaaaatatttgttactctcaggaactgaaataaataagttgtattgttctagt

SEQ ID NO: 64636 - DNA, 321 bp, Oryza sativa
  Clone ID: PAT_MRT4530_65761C.1
atggggggccgaaagccggttgggcccaaaaaccggggcccgtggcccgcacgccggtgggccccagagacccaaccatggggccccccaaggcgggttggccccgaccaccgcaacccggggccccccacgccggccggggcccccacgccgccggggcccccacgccgccgccggccgaccggggcccgcacgccgccggggccggcccacgggcgccccgacgccgccgccactgcacgccacttccgcgcgcgcccgaacgtgaccgaacgcgaagaacagaagacgtcggcgtcgtccctcaagccgaagtggtag

SEQ ID NO: 64637 - DNA, 1470 bp, Oryza sativa
  Clone ID: PAT_MRT4530_65762C.1
gccgtcgcaaccgaatcgcatcgcatcgcatcggtccaaactcccaaccggcgacggcgaggccgacgaaacccaaacccagctaagcttccctcttcgattccccccatggacgacgacggcgacgccgtcctctccgacgtcgacgaggaggaccctctcccgcccccgccccctccctccacctacttctaccaaaaatccccatctccttcacaaccccaaccccaaccccatgcgcaggcgcagcgcctgcacgacctggccgccgagctggaggaggagcgccgcctccgccgcaaggccgaggaatccctcgccgaggccgagaagcgctccgaacgcgtcaaggccttagcgcagaacgtcctccgcaagcacgacgacctcaagaccgaggcctccaccgcctcctccatgctcacttccggcttcgagaggatctccgccaaggcctccccctccgccgccgcttcgcccgcgccgctccccacttcccaaaagtactcctccggcctccccgccatcgcttacggcgtcctcaagcgcgccaacgacatcgtcgatgacctcctctcccagatcgacgccgccaaccgcgaccgcgacagggcgcgcgagcagatggagcaccgcaactaccagatcgccatcgaggtctccgagctcgaggcgtccctcgcgtccaggtccgcccactgcgactccctctccaagtccctctccgacaaggacgccgagatctcggacctccggaacaacctcgccttcctggagaccaagctggacgcgcagaggcccgtgctcgccgaccagatcgcctgcgcctccaaggtgtacgacgagatacgtgaggtggtcaagctagtggacgcggatgccgcgagcgcgctctctgactcggtgttcgtctggaaggagaccgacgtggaggagagcctcaaggtgtccctggaagggaccaagatggcgtacgatctcgctaccactgccctgcacaaggttggggcatgggttgataaaaaggaaagcaaagtgagggatttggaagcgagggtggatgagctattgcgggagaaagagcacattggggtgttgctccgcagcgcgctgcaatcaaacaccagcgaggtgctcaaggttgctgaggatggactaagggaggccggaattgaggttgggctcaaagagcgcagggagcacaggccagggagcatggagaaagatgaagtctataccctagttcatggaccacttaatacggcaggggaattggagaatagcatgaaggagtcccaagttaagattgttgagctgcaacatcttgttgaagcactaagggcggagtctggtctacttcggacaagactggaagggcaagaaaaagagattgcccagctacggaagcaaataaagcatcttgaagagaaggaaagggtggcaaatgaaagtgtaattttctactactga

SEQ ID NO: 64638 - DNA, 614 bp, Oryza sativa
  Clone ID: PAT_MRT4530_65763C.1
gcacgagggtccctgcgccggctgcagcaatgccgccgagtgccaccagaaggagaagcaactgatcaagcaagaggcagaggacgccgccgccatcgtcacgaagaaggaagaagagcacgacgccggcgacgaggcgacgccggaggaggagtacggcggcgtcgccaagtacgttcgcggcgggcggtgcgtggaggcggaggtcgccgcggcggcggcggcgaggcgcggcaagaagtgggagccggagcaggctgccccattctgggtggccacctcctgaaccacttttaagatgacggacacatcaacatcatcatcacatcaactactaatcaatcaatttctaggctaaattaagcttaattaattaatcaccttgatccatctctacctaggagatggtatccataactacgtgattgatcgaacacttttgatctctggcatctcacagtgcctctttcgatctatatttttctctcaccttatagcttcttgattgatcatcagtcaagaacggtatatgactccgttatatcattggtgattgaggtgtaattagtagccgttatcaatattattgattggcttgcatatgtatgcatgga

SEQ ID NO: 64639 - DNA, 1143 bp, Oryza sativa
  Clone ID: PAT_MRT4530_65764C.1
atggagagcttgatcaggcgccatggggggcgccgtgccgtttccccgtcatcgtcggcggcggcggcatcgttcatcctcctcctctgcgccgtcgtccttctcaacactcacgtggcgctgtgcggctgctacaagcgcatcttcagcttcggtgactccatcatcgacaccggcaacttcgtgtaccttaccggcaacggcccgtcccagttcaaggagctcccctatggcatgacctacttcaaccgcccctccggccgcatctgcgacggccgcgtcctcgtcgacttctacgcgcaagcgctcaacctgtcgctgctaccaccgagcataccggaggaggggtcagggcagttcgagaacggcgccaacttcgccgtgctggcgtcgacggcgctggggccggactacttcaagaccaagtacaacttcagcctgcccgtgccttactgcctcgacaaccagctcgcctcgttcaagaaagtgctcggtcggatagctcctggagtcgatgccaccaagagcctgctaggcgagtcgctgatcgtgatgggcgagatcggcggcaacgactacaacttctggttcaccgcgcggcagccacgcgagacggcgaggcagtacctccccgacgtcatcggccgcatcggcgccgccgtccaggaggtgatcaacctcggcgcgaagaccgtgctggtcccgggcaacttcccgttcgggtgcgccccggagtacctccagggcttccagagcagcaacacctccgactacgacgccaccgggtgcatcgcgtggttcaacgacttctcaaggcagcacaaccaggcgctggtgcaggaggtcgcccgcctcaggtcgcagaaccccggcgtgaggctcatctacgccgactactacggcgccgccttggagttcttcaagaaccccaagaactacggtatcggtgaccctctgctggagtgctgcggcggcgacggcccgtaccacaccggcatgacgtgcaacaagacagccaaggtttgggggtccccggccaacttcgccagctgggacggcgtccacatgacggagaaggcctacagcatcatcgccgacggggtgttgagcaagcgttacgccgacgctccgttgctctgctag

SEQ ID NO: 64640 - DNA, 459 bp, Oryza sativa
  Clone ID: PAT_MRT4530_65765C.1
atgcacctagcacgacaatggttgtgtcctccaccaaggcaccgtcgacaccctccgctgctctctcgcctccgcaagttctccatcaactctgtggatgcgctctggcgccacttccgagcaggtgaagcagcagccagccagctcccgcgtgagaaggtggcggagcccgtcggcctcttcaccttcctgctgtcatcaaccatggaagcgttacccatcttcatgcaggaacaggagatcctggccaaggagatatcgttgggcatatacagcatgacatcatccacggtggtgttccttccgttccaactggcgctgaccgtggagttcacagtggtggtgtactggatggcggggcttcgaagcaaaacgttcgggtattttgtggtgctagtgtggctgatgttgtacaaggtgaactcggaggggattgcggtgaagagatacgtcgggtga

SEQ ID NO: 64641 - DNA, 165 bp, Oryza sativa
  Clone ID: PAT_MRT4530_65766C.1
agattacttaagcacttaagaattgactccatcgggcaggaaactaatttcaaacaagtccagaagctctgcatgcctttcatcaagtagacaaaggatgaggccaatagtgacgaggacgtatgctttaaatctgaagcttccatttggtgaatgaatattctc

SEQ ID NO: 64642 - DNA, 457 bp, Oryza sativa
  Clone ID: PAT_MRT4530_65767C.1
aaaaacccagtctctttagggggtgtttggaaactagggactaaatttagtccctctcataaaaacataagtcctgagagggactaaagtttaaccccactttagtccctccaaccaaacacctccttagtaccatcatcagttggctcctccagcctccaggtacgcctctgcagtcacggtcagcaaactgcctatgccggccgtcggcttgctgccccctgccctgtttttgacggtgattgtcactgggcgtcacgttaccctgcccatggcacggctgctgctactgtcgcacgcggccgtggtgggatcgatctggcctgccctgcctcctgcgtgctgtgccaatgccactccgagcgcagcgcagcgcgcgcgcccacggcgtcggcgtcggcgtcggcgccgcgcgccaccggtggatggaccacccgcgcgcgagatgggcgtacca

SEQ ID NO: 64643 - DNA, 574 bp, Oryza sativa
  Clone ID: PAT_MRT4530_65768C.1
ctgctccgcgtcccctcctccccccatgcctccgcctcctactacgcccatctgcgccgcctccgccttcctctctccaccgccgccgccgccaccgcgacccccttctccgccgaggactacctcgtcgccacctgcggcctcaccggcgaccaggcgctcaaggcgtccaagaagatctcccacctcaggtccgccgccaacccggacgccgtgctcgccgtcctctccggcgtcggcctctcccgcgccgacctcgccgccgtcgtcgcctccgacccgcacctcctctgcgccaggcccgcccgcgccgccacccatctccccacctcctctctggacctcagccgccgccgccgcctcctcctctccaccgccgccagatccgccgccgcgacccccctctcccacctcaggtcgcccgccaagcccgacgccgtgctcgccgtcctctccggcgtcggcctctcccgcgccgacctcgccgccgtcgtcgcctccgacccccacttgttcaggtagttctggtacttgcgcaaatcaaatacaatgaaaaggtatagctgcactttaa

SEQ ID NO: 64644 - DNA, 439 bp, Oryza sativa
  Clone ID: PAT_MRT4530_65769C.1
cagaggcaagaacatcaagtccaaatggccccaaacccccatgaagtgatgcttctgcttttcggcaatgcttttcggtgtccaaaagccaggaagggtctaaaaggatcagcagcatctatggatgtcagctcgaaatctatctccacatcggcctgcttcaaaaaaatggtgtgccatattagctacagtgtttgcaaaaaaaaacataaaacttttgttgaggtaaattggaactagcctgtaaagtatcagttcccttgatctcaaacagatcaccctttttgagttttaagccttgaaggctgacttcgttttttcgaagcgattcgacctttttagttggccattgcagcaatcgcttgccatcaccatctaaccaaattgtcctggggattgcctttatgaaatgacaaatgaggatcagtatgttacactg

SEQ ID NO: 64645 - DNA, 1261 bp, Oryza sativa
  Clone ID: PAT_MRT4530_6576C.1
gaaacaagaacctgaaatgtgcactgcgatatatataggattatgagtataaagtgggtttacaacatttgctatatatgaactgaattggaaatattgtcttgcatcttattctataacagtactataactgcctattattaattatctagagtcattcatctgcaacagccaccaacaacttgcccacattcctcccagaaaacatgccaatgagagcctccgatgccttctcgatgcccttgacaacatcctgcaggacggtcaccttaccttcctttaggtacctagccatctcatcctcaaacctcgggtataagccgaagtggttgaatacggcaaatccctccacccggatggtcttggataggatctgtatcacgttgtgcatcccttcgggctcctgcaggttgtactgtgagatcatcccacacaccaccactcgaccaccacgccgcatgttgaccagcgccgcatccagcgtcgcaccgccgacattgtcaaagtagatgtcgattccatctgggaagcaccgccggagagcaccagtaaggtcgttgccctctttcttgtagttgaatgcatcgtgaaagccaaacttggtcttgagaagggtaaccttctcgtcggagccagcgcttccaaccacatagcagccggcaatctttgcaagctgcccaacaatctggccgacagcaccagatgccgccgacacaaagacggtctctcctttcttgggcttgccgacctcaaagaatgcggcatatgctgttagaccagtcacaccgagaacaccggtgtagtaggagagtggtagatcaggatggttgatcttgtgcagtgtctccggttgggtgatgaggctgtactcctcccaaccacacagtccccacacgaggtcgccagcagcgaacaccgggtgcgttgagtcgaccaccttgctcacaccgaaattaaccatggcctctcctaacacgaagtcttcggctatctccgcggtagcatcgtcgtgcttagtcatacgaccgcgcatccacgggtcgcatgaaaggtagatgttcttcaccatcaccgctggtgccattgttccaagaggcacgcgtggcatcatggtggaggataccacctccatatcatctactgtagggtacccagccgtcacgtacctccttagcaccaccttcctgttcctcaccatctccatcccatagccatcgacgcctcctccatccattgccggtttagattcttgtaaaaccag

SEQ ID NO: 64646 - DNA, 2787 bp, Oryza sativa
  Clone ID: PAT_MRT4530_65770C.1
atggcgtataccacaaaacccgccttcacgtctcctaccctagcactctcccagacctcgccggagaacacttcgccccccgactgcgatggcggcggcggcggaaacgccggggtcgtcggcctcccctcatcaggagaggctccttcaatccctctccgcccgcgggccgtggagaccgagctcgtcgacgtggacctgaggctcttcggcggcaagtcgctccctgaccgcgccgccgccgccgccacggggaggcggctttcctacctccatggccccatcgtcctacaggtagtatcagtaagagatatatatagaagcatcattgatgcgtcctttaagaacccacagcaacaccgccttctgcgctttgttctgactgatggaatttctgaagcagtagcgatagagtttttcccaatcccgtttatcattgaagatattgctccaggtactaagatttgtcttgagaacaagattccaatacataatggcatattgtgcttaagtgcgaagaatataagtatcatggggggagttgtccaatcattgtatgaagagtggcagatgaaccagaaattctcagggttatctcgttcatccttgaggttgtctcaaaatgatgatggagttggacctccaccatttgagaagttagatgttgaagcacgtcctagtaggacatcccgttctcaaacctattctgcagataataaggctaggaaaccggaagtcggtcgtcagaatgtgtcagttagttccagtggcaaaccagtcaatgagagttcaagtgatgagaacaaagagtctgcagttgaacccaaacaatctatttcagatggcagaccaaaagaggtcagtgaagctattcctgttcaaaaccaagccactgcacagaagcttctgcagaaaatgacccaggctgcgcccgaagacagatatggtcggggccatagattcaagggtaaaggcaggcaagaagatactccagtatttaccctcgatgaatgggagaagcgaaaatccgctggtttgaagtccacagcacaaagctacatcgacgataccagccgagacgaggagctggcaaggcagctccaggagcaactagatcttgaagactcctatgtcgcggtcctgaagaaacgggaggcgggagaagagattttcgagggcgaggacgggggagaggaaggggccgaggacgagggcgagggcgaggcaggggaagattttagcccaatccaaacatccaatggcagtggcaatagcagttgtgatctcacgcttatttcttctctcctacctccgcttcaccttcacctgcgcgattccggcgagcccaccgccgccggctcgccggcgatcctcccgaagcatctggtcggccgccaatttctacaccggagcacgcgccttcgcctcgaggcggaaaaaggcttcgtatcttttgcgggcgtcagtagtagtagtagcgtgtgtcggctgcactggcttggagttggaggaggagaggaggagatccatatccgttccgttcgcgagtggtttgatcgattcctttttggtgttcttcgctgctgtgcgcgatccggtttggtgaggtggaggtcgccggcaatggatcacggcggcggaggaggcggaggagtttggatccgggcggcggtggcggtggcggcgggcggcgccatcgcggcgcgcgcggtgcggcgcaagtccgtcgactccaccgcggtgttcgtcggcgttccggccatggtggcccacaccgtcgctgggtacaggttcgcggggatgctgctggtgttcttcttcacggcgtcgcggatgacgagggtcggcgagaagaggaagcgcgcgcttgatcccgacttcaaggaaggagggcagcgcaactggaagcaagttttgtcaaacagtggcattgcaagtgtcttggtagttttgatagcacttgtcacaggagggagcgataggtgcttggatacgagagaatctagtcttgtaactgccctcattggtggtgttattggacattatgcttgctgcaatggtgatacatggtcttctgagctcggcattctcagcaaagcggaaccacgaattatcacaacattcaagagagtacggaagggtaccaatggcggggtaaccattgatggacttctcgcagcagcggctgctggattctcgattgggcttacatttgtgctactaggattcttaaccactcagtgttcttctgatgtattctggaggcagctgctggttatacccttagctacagcagctggcctatgtggaagtctgatcgattcgttgctgggcgcaacactccagtacagtgggtactgtagtcttcgtaaaaaggtggttggagtagacggtccgacggtcaccaggatttcaggacggaatatactggacaacaatggtgtcaatgtagtttctgtgttcttgactactctgatcactgcattggcgagatcagcagcagcagaggcattcgaggcagcactcgcaggtctcgtagcagcagaagcagcagcagagggtgaacaggctgcaacaaaaagggaaagagatcacagattagaagagcatgacagaagaagaggatcaccatgcatagaggcagcctttgtcctcatggcgcttcttgacatggtcggagtaggacatctcctgcgccgccggagggttgtacatcgccgcccgtgccgcggccgccggagacgaagtcgacgacgcagaagaggaggaagaaaccagcaaggggga

SEQ ID NO: 64647 - DNA, 522 bp, Oryza sativa
  Clone ID: PAT_MRT4530_65771C.1
gcgttggttgtggcggcggaaacgccggggtcgtgggcgcgggtctcatcaagagaggctgggggaatccctctccgcccgcgggtggtgcttccgtgaccccagcaacgagatcatccaggagctactccacgcctccccctcgccgtcgccggaggccgtggagaccgagctcgtcgacgtggacctgaggctcttcggcggcaagtcgctccctgaccgcgccgccgccgtcgccacggggaggcggctttcctacctccatggccccatcgtcctacaggtagtatcagtaagagatatatatagaagcatcattgatgcgtcctttaagaacccacagcaacaccgccttctgcgctttgttctgactgatggaatttctgaagcagtagcgatagagtttttcccaatcccgtttatcattgaagatattgctccaggtactaagatttgtcttgagaacaagattccaatacataatggcatattgggctaacgtgcgaagaatataagtatcat

SEQ ID NO: 64648 - DNA, 8352 bp, Oryza sativa
  Clone ID: PAT_MRT4530_65772C.1
atggacttcgccagccgccacgccgcctccgccccgccgccggcgcccgacgcgtcttccccttcctcgccccgcgcctcctctgcctcctcctcctcctccgccgccgccgaggagcccgagtacctcgccaggtacttcgtcgtcaagcactcgtggaggggcaggtacaggcggatcctctgcatcgcctcctccggcctcgtcaccctcgacccggccaccctcgccgtcaccaactcctacgacgcctcctacggcttcgaccgcgccgcgcccgagggcaacgccaccgagttcacgctcaccctccgcaccgacgcccgcggcaagttcaaggccctgcgcttctcctcgccgctccgtgccgggatcctcaccgagctccaccgcctgcgccccgtccaccccgtcctcgacttccccgtcctccacctccgccgccgcacccacgagtgggcgcccttcaaactcaaggttacttcagtgggcattgagctccttgaaggacattctggtgatctgcgctggtgcttggactttagagatatggattctcctgctatcattctcttgggggatagctatgggaagaggactgctgaaggaggaggttttgtgctatgccccctttatgggaggaagtccaaagcatttatggctgcttcaggcagtacaaacactctgattatatcatatttgacaaaaacagccaactcgatggttggagtatcactacatgtggacaattcacagtcaatgacagctactgacttcatagcaaagagagcaaacgaggctgttggagctgctgaaactcggcatggagaatggtcagtaacaagattgcgtcctgctgcacatggcactgctagcattgagagcttgagcttgggtattggaccaagggggggacttggagatcatggtgattccgtttctcgacagcttgttcttacaaacacttcacttgtcgaaagacgaccggagaattatgaggtagatgttggcttcttttcacctgttctcatacaaactattcgtaaaatttcgattacatatgaacatgcatcaactttctacaccccttgccaaatcaacttactagtaattgtagtttcaagggatgaggcccatgggccatgggctatcattgttcgacctctctcaacagtaagtgcccttgtgcgatttgcagaagaaccgcagatgtttgcattcgaattcaatgatggttgcccgattcatgtatatgcaagtacatcccgtgatagtttacttgcaacagttcttgatgttttacaaaaccagagccagtgtgccattccagtgctaccaaggttgaccatgcctggtcatcgcatagatccaccctgtggagtagcccgtgttcacatatcccatcacactgttgatatggaagctgctagcatgcacataaaacatttagctactgttgctaaagaggctgtagtttcatccgacactgttcctggagcaaaaatcagattgtggcgtagaataagggagttcaatgcatgcataccctatactggagtgcccgtcaatattgaagtacctgaagtggtcctaatggctctaattagtcttctcccagctacaccgcagaaccttcctgctgatgctcctcctcttccacctccatcaccaaaagcagcagcgacaataatgggatttgtcgcatgcttacggaggctcctcacatcaagaagtgtgtcagcacacgtgatggcatttcctgtggctgtagggagaataatgggtttgcttagaaatggttcagagggagtagcagctgaggctgctggacttgtggctatgctaattggtggtggtcctggtgatacatccatgttaacggatacaaggggagagtcacatgctacttacatgcatgcaaagtctgtactgttctcacaaccagtctatgttccaatccttgttaacagattaaggccactatcagtttcaccattactgtcattgtccattgtggaagtccttgaagctatgctttgtgaaccccatggtgaaacaacccaacatgctacatttgttgagctactacgtcaagtcgctggtttgcgccgtcgtttgtttgcattatttgcccatcctgctgaaagtgtgagggagactgtttctgttattatgcgtacaattgctgaagaagatgcaatagcagcagagtccatgcgtgatgctgccttgaaggatggtgctcttctgaggcatttactgaatgctttcttctaccctgctggtgagcgacgtgatgttagtcgacagcttgttgctctctgggctgattcttatcaacctgcactggatttgctgtcaagaatacttccccctggacttgttgcttatcttcacacacgatcagatgaagattctcagaaccagtatgatgaagtaccattaagcagaaggcagaaacggatacttcagcagaggaggtcccgtggtggcaagagtatggctgtaccagaacaagggatgccctcaaataacaatgaaggggatttttttgggcacaccaatgttggtccctttggagcagatgtccatcagaggcatgctaatcagtaccctactgcatataccccttctccaggcataagtattgatccttctcaggcagttccacatggttttgtacctgaggccttctatgaaaataatcatcaaactggggcaccacagctggattcacatgcttatttagtggactccaatggcaatggtgaccttgctaactctgcacatttagatttttcagtccctgcacaggttgtggtggaaaacacacctgttggatctggcaggctactgtgcaactggtatggattttggagagcattcagtcttgatcacaatagagcagacttgatatggaatgaacgcactagacaagaattaagggaggcattgcaagctgaagttcatagccttgatgttgagaaagaacgaactgatgacattgtccctggaagttcagtcactgaggatgccagtgatagtgaaaccttaccacgaatttcatggaattatgttgagttttcagttagctaccctagcttgtccaaagaagtctgtgtgggccaatactatctgcggcttcttcttgaaagtggaagcaattaccgagcacaggatttcccactgcgtgatcctgttgccttttttagagctctgtatcaccgcttcttgtgcgatgcagacattggtcttactgtggatggtgcagtccctgatgaactgggttcatctgatgattggtgtgacttgggaagattggatggttttggtgggggaggaggttcttctgtaagagaactttgttcaagggcaatggctatagtttatgaacaacataacaaagttattggacctttcgatggcacagcacatattactgttctcttggacagaacagatgatagggcattaagacatcgcttgctactactgttaaaggccttgatgaacgacctttcaaatgttgaagtgtgtgttttggttggaggatgtgttttggctgttgatatgttaactgtcgctcatgaagcatctgagcggacagctattcctttgcagtctaacctgatcgcggcaactgcatttatggaacctctgaaagagtggatgtatattgacaaagacggtaaacaagttggccctctagaaaaggatgctatcagaaggctatggtcaaagaagtcaattgattggaccaccaaatgttgggcttctggtatgtctgactggaaaagattacgtgatatccgggaactccgttgggcacttgctgttaaagtgcctgttcttactcctagtcagattggggatgctgcattgtctatattacacagtatggcatctgcacattctgatcttgatgatgcaggagagatagtgacaccaactcctagggtgaaacgtatattgtcaagtccaagatgccttcctcatgttgctcaggctatgcttactggggaaccaagcattgttgaagcagctgcctcattacttaaggctattgtcacaagaaaccccaaagctatgattcgactatatagtaccggtgccttttactttgcattggcatatcccggttcaaatctcctatcgatcgcacaactcttttcagccacacatactcatcaggcatttcatggtggtgaagaggcagcagtatcttcatcattgcctttggcaaagcgcagtgtactaggtggactgctcccagaatcattgttgtatgtcttagaacgcagtggaccttcagcttttgctgccgcaatggtgtctgattctgacacgccagagattatatggacccacaagatgcgggcggagcatctaattcgtcaggtcctgcagcatctcggtgactttcctcagaaattggctcaacattgtcattcattgtatgattatgctcctatgccacctgtgacctacccgaatctgaaagatgagatgtggtgccaccgatactacctccggaacctatgtgacgagattaggtttcctaactggcccattgttgaacatgtagagtttttgcagtcattgttggcaatgtggcgtgaagagttaactcgtcgtccaatggatctatctgaagaagatgcttgtaagatactggagatctctcttgatgatcttgtccttggtgagaacggcagtagcaagcagtcatctgagttaagttcgggcaatttgacaaacaacattgaaaacattgacgaagagaagcttaagcgccaataccgtaagctggcaataaaataccatccagataagaatcctgagggaagagaaaagtttgttgctgtgcaaaaggcttacgaacgattgcaggcaagtatgcagggactgcagggaccacaagtttggaggctgctactcttactcagggcacagtgcatcttgtacaagagatatggacatgtcttggaaccattcaagtatgctggttatccaatgttgctaaatgcagtcactgtagataaggatgatagcaattttctttcatctgagagagcccctcttttgatagctgcttcagagctaatttggctgacatgcgcatcatcttcattaaatggcgaagagctcatacgggatggtggtatcccattgttggcaacacttctttctcgttgcatgtgcattgttcagcccacaaccccagcaaatgaaccggcagcaagaatagtcaccaacataatgcatacatttgcggttctcagccagtttgagtcaggaagggctgagattcttaagtttggtggccttgttgaggatattgtgcacagtacagaacttgaatttgttccatcggctgtggatgctgcactgcaaacagctgctaatatatcagtgtcatcagaattgcaaagttctctgctcgcggctggatttttatggtatgtgttgcctctattgcttcagtacgattcaacagcagaagagaatgcaacaagtgaagcacatggtgttggtgcaagggtgcagattgctaaaaatctgcatgctgtacatgcaactcaggctctgtcaaggctttgtggtcttggtggtgatggaataagcccatctaatcaatctgcttttgatgcactaagagcgcttcttactccgaagcttgctgatatgctgagaaaccacccacctaaagaactgttgtcaaatctgaatgcaaatttggagtcaccagagatcatatggaattcttccaccagaggcgagctcctcaaatttgtagaccagcagcgtgctagccaaggacctgatggttcatatgatttgacggaatcacattgtttcacataccaagctttatcaaaagaactgaatgttggtaatgtgtacttgagagtttacaacaaccaaccagattatgaaataagtgaccaggaaggtttttgcatcgcgctgcttaaatttatagcagagctagtacagaagtggaattcattaagtttggatgaaaatatgatgcatcaatgtggtacagctattgagacatcagtcactgaaaatggtgatatcagtggttcaacgaatgaaggaaaagaagaagattcattggaaaaacacaatagaggagtaacagatggagattctgaagtgattatgaacctccgaagtgggctaacatcactacagaatcttctaaccagtaatccaggattggctgctgtttttgcttccaaggaacggttgacacctctttttgaatgtcttgcgctacctgttcctcctgaaagcaacatcccacaaatttgcctaagcgttctttctctcctgacgaagcatgcgccttgtttggaagccatggttgcagaaagaacaagtctcattttgcttttccagatactgcactgcaatcgttcttgcagggatggagcccttactgtcctctattctttagccagcacaccggagctggcctgggctgctgccaagcatggtggtgtagtgtacattctagaacttatgttaccacttgaagaggaaatccctatgcagcaaagagctgcagctgcatcattattgggcaaacttgttgggcagccaatgcatggtcccagggtggcaatcacacttgctagattcttacctgatggtttggtttctgcaattagagatgggcctggtgaagctgttgtttcatgtcttgaacagaccacagaaacccctgaacttgtatggacacccgcaatggcagcttctctttctgcgcagttgtcaaccatggccacagacctctaccaagagcagatgaaagggcgtgttgttgattgggatgtgcctgaacaagcatctggccagcatgtaatgaaggatgagccacaggttggaggtatttatgtgagactcttcctaaaggatcccaagtttccattgagaaaccctaaaaggttcctagaagggctgctagatcagtatgtctcatcagttgctgccacacactatgaggcgaatgctgttgatccagagcttccgttgctgctttctgctgcattggtttcattgttgcgtgttcatccagcccttgcagaccatgttggttacctaggttatgttccaaagctggtttcagctatggcatatgagggtagacgggacactatggcatccggacaaaccacaagtaggttgcaagcggaacctagcaatcaagagaactcggcggactctaccgtgcagactccacaagaacgtgtccggcttagttgtttgcgagtgctgcatcagctggcttccagcactacttgtgcagaagctatggcagccacaagtgcaggaactcctcaggttgttccattgcttatgaaagcaattggatggcaaggtggaagtatactggcactagagacactaaagcgtgttgttggtgctggcaatcgggctagagatgcacttgttgcacaggggctaaaggttggccttgttgaagtactgcttggtattcttgattggcgagctggtggcaggcagggactgtgtaaccaaatgaagtggaatgaatcagaggcttcaattgggcgtgttttggcagtggaggtgcttcatgcttttgcaacggaaggcgcacactgtgctaaagttcgtgaaattctgaattcttctgatgtatggagtgcttacaaggaccagaagcacgatttattcctcccatccaatgcacagtcttctgctgctggagttgcagggctcattgagagctcatcgtcaagactgacctacgcccttactgcaccaccacctcagcctgccttggtccggctaccttctacagctccagcgctaccatcggctcctgcaaatcccagtgggcggcattcttatcagcattcatagcgtgcgaaatgaacctcgttaagctcagatcattaccggtgtgatcatttcaagttctattctttggcttggttggcctagcaatttcgcacacaggccagagcgccacaaaggggacttgctacaacagcaaaatacagtttcacccatacattactcgcaacttggggcaggaggcctgcgttgaagtgccagtacatagcctgtacagttttccattacataaaggtcgagttcatgctagtttcttgagaatgtaaagcatattgttgttttgtttttttttacactgtaacatacctgtccatagaatatgcaagctgaaaatgtgtatcgattcattttgggtgcggtttgccttctccgttttagaggtggggaaggtatcgttggaggcccttccagtaaaagaaagagcagacgggcgcaagcttattccctttagtgcggggt

SEQ ID NO: 64649 - DNA, 580 bp, Oryza sativa
  Clone ID: PAT_MRT4530_65773C.1
ggagaagcgaaaatccgctggtttgaagtccacagcacaaagctacatcgacgataccagccgagacgaggagctggcaaggcagctccaggagcaactagatcttgaagactcctatggagtgccagagagttcagacgcagatcgtttgcggatgagcatgttcagcttcagcggtcctgaagaaacgggaggcgggagaagagattttcgagggcgaggacgggggagaggaaggggccgaggacgagggcgagggcgaggcaggggaagattttagcccaatccaaacatccaatggcagtggcaatagcagttgtggtagaccaagtcatgttctttcctctggttcccttcagatgatgcttagctaaaagctaatgtctcaattcagaaacaacatgtactgtacactatcctggatagatttttagttttttgttcacagatgcatggaatcagcatatgattaggcccttttttgacatagctatggattctttttttttttttgagcttggtattcctaactccacaaatttatagatctagacctgtgatctcgttgataacatttgga

SEQ ID NO: 64650 - DNA, 1746 bp, Oryza sativa
  Clone ID: PAT_MRT4530_65774C.1
atggaagggggtgcaactctagctgataaggctgaatttaaggaatgtctgcggctgacctggagccagccttacattcttcagcttgttttctctgccggcatcggtggtcttcttttcggatatgatacaggtgtcatatctggagcacttctgtatattcgagatgattttactgcggtcgaaaagagcactgtacttagggaaacgatagtgagtatggctgtagctggagccatagttggagcaggatttggtggctggatgaacgacaagtttggaaggaagccttccatcttgatcgccgattccctgttcctcgcaggtgccttgatcatggcccttgccccaacaccgtttgtcatcattattgggaggatctttgttggtcttggggttggaatggcttccatgacagcacctttgtacatttctgaagcctctccagctagaatcagaggtgcacttgtgagcacaaatggacttcttattaccggagggcagttcatggcatacctcattaatctggccttcactaaggtaaagggaacatggaggtggatgcttggcattgcaggtcttcctgcttttattcagttcatattgatgtgtatgctacctgaatcaccaaggtggctatacagacaggataggaaagaggaggctgaagccatattaaggaagatttaccccgcggctgaggttgaagaagagatcgattcgatgcgccgatcaattgaacatgagaaacaactggagggctccatcggcgagcagagtctggttggcaagctgacgaaggcactgagcagcaaggtcgtccgccgtgggctcatggccggcgtcatcgcgcaggtcgcccagcagttcgtcggcatcaacaccgtcatgtactacagcccgacgatcgtccagctggccggcttcgcgtcgaacaacacggccatggcgctgtccctcatcacctcgggcctcaacgccatcgggtccatcgtcagcatgttcttcgtggacagggccggccgccgtcgcctgatgatcatcagcctcgtcggcatcgtcctgtggctcgccgtgctcggcggcacgttcctcggcgccgcgcaccacgcgccgccggtcagcgacctggagacgcgggtgttcgccaaccagacgtgcccggagtacagcccgagcgcccgctggaactgcatgaactgcctcaaggcccagtccacctgcggcttctgcgcccacggaggaaacaagctcctccccggcgcgtgcctggcggcgggcgaagcgtcgcggcggacgtgccacgcggggaaccgggagttctacacggaagggtgccccaacaacttcgggtggctggcgctggtggcgctcggcgcgtacatcgtctcctactccccgggcatgggcaccgtgccatggatcgtcaactcggagatctacccgctgcggttcaggggcgtctgcggcggcatcgcggcggtggccaactgggtgtccaacctcatcgtcacgcagacgttcctgagcctcaccaaggcgctgggcacgtcggccaccttcttcctcttctgcgccgtctccttcttcgcgctcgtcgtcgtcttcttcaccgtgccggagaccaagggactgcagttcgaggaggtggagaagatgctcggggagaaggactacaagccgtggaagagataccgtcccgacgtgtcgtccaaagggcgcgacatcggcctctctgttccatga

SEQ ID NO: 64651 - DNA, 267 bp, Oryza sativa
  Clone ID: PAT_MRT4530_65775C.1
tgggcatgtaatttcctaataccgtttgttgattaggctatatatatatatataaggctgagtgtggattcaggtcgtgggctggtgacaacttagcaagtttaatgtagtagattaaggagcacggcaggtttctaaatttgtttgcatgtacctatgcctttatattcgtcagtttctgtaggctagtgatgatgccacgtttgcatctgtatgataatgtcacatcagcgtcacgtaggatctcgaaaaaaaaaaaaaaaaaaa

SEQ ID NO: 64652 - DNA, 320 bp, Oryza sativa
  Clone ID: PAT_MRT4530_65776C.1
gggcccgggaaaaaggcccccctttcaaaaggggacaaagcccgggcctgaacccccccccaaaaaaacccaggggggggaaaatttcaacccggcctaaatttgggggcccccggatgggcctgtccacatcattaacccctaaggccggtttggggggcaccttagcccaatgaagcttctttttttttccaaaggggatcttttaaccatggaagaacggggccccccatttttttaaaagacacatcagaccaacccggggggaacaaaaaaagaagtcggcaaccttatttttccccaactgggggggaaccccc

SEQ ID NO: 64653 - DNA, 322 bp, Oryza sativa
  Clone ID: PAT_MRT4530_65777C.1
aagggttaacagcaagagcgatattgattcatcattatcgagcgtgtgctggctggatcaccactaaaactaaccactgtgccctgctaacgctcggtcgaatgatgacatcaggatgacaagcagttcatgcattgcttacttgctctcaagaggtcattgtcagcaatatcgcttagagaattaccaaacgtgcagatcatgactgacgactgaacccgatcctaggtgaaccttacagagacgctgtcaggggaaggcacggtaatactgctccaggaatgatgtgcctcgaccccaggcatagagagggtctgcatac

SEQ ID NO: 64654 - DNA, 846 bp, Oryza sativa
  Clone ID: PAT_MRT4530_65778C.1
atggatatcaagcaatttccatttaggctgatattatctactcctgaggctttgatgtatgaggcatgttttactatggagaatgtggtggaaatgggctggtttaaaggacaacagcttgaaaaacagcatgacataaaggcaaacattgaagacaaggaagatcagaatcaaatccaatgtcccagtatagagcaggttgagttgttggctgaggaggataagaacaaggctttgcagattatacaagacagggagttggcactggtgctgcaagagaaggaagcaagaggtcagttcagtggggataaagctgctgaagataacatacctgaacacctcatgttggagtttgagaaggcctccaagtctgctccacatgacgtgtcagtagctcgagagacacaagaaggacagtttgctagcaattgtgaggatggtgtggaagtggaaggtgatgaggaagggaagctgcagctaggagacagtgaagagctttttgattcacaagattccgaggatgcctttgccaaaagcttgggagtgcggttggcggcgggaggagaggcggcggtggcgggcggcgcccttccctccgccagatctggcgggaggggaggtggtgtcagcagcccgacggcagaaggggatgcggcggcggtgggtcagcggcaggaggggaggcggcggcggtccaacagcggcgccctcccctccgctagatctggtgggagggaaggtggcgacggtggctcggcggcaggaggtggcgacggccgcttcctcggtagctgcagcggtggtggcagcgccctcctcctctccatccggaagtggcggtggtga

SEQ ID NO: 64655 - DNA, 398 bp, Oryza sativa
  Clone ID: PAT_MRT4530_65779C.1
tcaagagctaactgtgcggcgtgcaatggaggtcgaggggatagtgaagctccgaccgatgtacgcatcaaggcgtggggtgccaggagcagcacttcgaccttgggtttggtttatgccgggctttacaaccaacggtccgacgttgaggtccgtagaccgtgaacgtccccatggaaggcgtaaagttccaaccggcggctttttagtggctgtcaagacctgcccttcttctcttcttcttttgttcttcttcttcttcttgccggcaacagaaaggaaggagggaggtggggcgccagtgctccgtgaggcggaattggtggcgcaagggtttggctttgcaagctccggtgagggaaattggccaatggcaaccatgggccggacatgggaga

SEQ ID NO: 64656 - DNA, 732 bp, Oryza sativa
  Clone ID: PAT_MRT4530_6577C.1
ctatatgacattttctttgctcgctacgactatggcaggagcggggatgtcaagtggagtggtgatggaaagggttgccatggcatctactactggggtgttgttgattggaaccaaatgtgcctttgtggatgccttggccttcgatttgcccttgctttcatgtgctttttgggctaccttgtcatgggactcaaacatctgcgtgatgttgattatctcatcatacttcttgcatgtcatccgcctcaagtgtgcccactcttgctctgcttggggcaaggtggtgtttttccgcttctcgaaccactcctttagtgtggtccaaagagtgagcagacccttcgttgccatgtgttcattcttgagtgtggcacaaaggtggtgtcgcaggaagtacatcgcctgatcgttctcatcaggtgtcggcataggttcttgtactgtgcccatcccaaatgtcttgaggagctttttggccccaaggacaatctggacattggatgcccaggtcaggtagttctggtcatacggggccagttcagcgaactccttgttcgtgattactaacattaattcaggggcccttttgcaaaatcgccaatctctttccatctttcttctctttctattcttcttcccgtgaatggtgcgcccggtcggcagccatgcgtggcagcggtgtccatgcggggcacgggcggtgcgcgagcacggctcggccggcggcat

SEQ ID NO: 64657 - DNA, 3213 bp, Oryza sativa
  Clone ID: PAT_MRT4530_65780C.1
atggatggtgctgttcgagggcagggatgcgtggggaggctcaggagcttcaacaaaacgaaaaagaagaaccggaactgcagtgatgacatgcgaaatggtgatgacgaagagaagaagtacagtcatcacgacatgaagaacaacttgcgaaatgatgccaacgaagagaagaggaagagcagcgatgacatgcgagatggtgatttcgaagagaagaagaagtgcagtcgtcacgacatgaagaagaacttgcgaaatgatgccaacgaagagaagaggaagagcagcgatgacatgcgagatggtgatgacgaagagaagaagtgcagtcgtcaagacatgaagaagaacctgcgaaatgatgccgacgaagagaagaggaagagcagtgatgacatgcgagatggtgatgacgaagagaagaagaagcgcagtcgtcatgacatgaagaagaactcgcgaaatgatgccgatgaagagaagaggaagaggaagaggaagtgcagtgatgacctgaagaagagtgtggtaaacgatgccagcaaagaggcgacgtcacacagtgactggagaaagaataggaaggctggaagcgatgctgagcaaagggggaagaagttgttgaatggcgacaagaaggctaagagtaggaaggtgaccactccattctttgaaaagatgcggaaaataaaaatgcagcgcacgagcaaccagaatggtgagaagaatatgaagagtgacggtgacagctataagaagacagtgccgctctcagtcaacaagggtaagatggagaaagatggaacgaacaagaggactttgtctaatacacttgttgcaaaggagaggaaaatgcgacctagtgacagtatggagatgaagatgaagaaaaagaagcgggatgcatcattcgttcaacctgatgagaggacagctcagacatttagcactaaaaacaaggaaaagaagaggaaggcgccatctacaccattgaagagggagcagaaggagcgagtggctagcagtgacaataaaaaggagacgaagaaggcttgtattgttgctataggaaatgagaaaaaaaattgtagggatggcaagaagaagaaaaggaaagcagccttcgcattcttcaaatttgtgcgcgacgagttcgaggaattactgttcataccaccagcagttgcacccagccttaaggatttaattgatcgccatgtatatcttgaagactcagaggggaagtgttcaaagatcaggctatcggtggtggatggttccctagctttttatgagggatggaacagtttcgtttcagaacattgtattaagtggggtgaatttctattatttgagtacacaccagaatcaacattttctgtgcgggtgtttggtattgattcttgtgaaagactacatttcagtgtcaaaagcggaggaaaaggtgctgtgaagaaaaggaaagaaaggcatacattatctgatgatttgatatcacattataatggtcagtatcaggactctgaagacatacacgatggccccaatgtttctggtgaatctcctaggagcaaagagcccaaaataacagttgatgctgagattggtaccaggaatctagttgctaaatctataaatgcagcttccgaaacacaagactctgaaagagttgaaagtgggattggatatggatccttaggggcactaggtaataaggttagaaatttaagcaatggggagtgtgatacaaggagtgactctgtgttctgtatccaagaaaaaacaagaagatctgaggttattataataagtgatgaagcttattcaacacaagtagacgaggataccatgaagcaaacagcaccaagtgaagcttcagaaatacatcatgtgactatcaatacacaaaaagaccttgaaagagttgtagatggtgtttgttgtgaatcctcagtagcactaaacaataagatgggaaatttgatccttggagagcccaaaaacaagaatatttcaccagcatgtagcacagaaaaaacaaatggatctgaaataactccaaccaccggtgtaattcctttaacacaagaaaatattgatacggtgaagttaaatacactttcttgcttcgaggaagacagaagcacaacaagagaatctgaacttgctgctgctattccaacaacatcagaaactcatgattcagataaagatttaggacagaaacatcaaaggaattccgttcaagtaaattctatcatagctgttgataaatatcctaatgatagtgagatgaatattagtggaaatattttcagaatatatgaagctccagcgggtactcggtgcttggagaagtggaaaaggggtattgtgaacggtcgagcagctcttgatgacattggacaggttagacctgaaaaaacacaaaaagctggagagaagttagttggtaattgtggtgcaatgggagaaagtccagttgatctacggatagagtctgatgttactgatacctgcctcaaaccaattctcaacatacctattgaagaactctcgattcttgatagcgtatcaatatccaaatgcggacgtagcaggacagaggtcaaccatttgttcaatcaaaaaggagctactgttcaactgcaaacaaaaaaggagccattgaaaccaactggtagcagcggaaatagaaagggggacaaaattgcagtgtctgtcaaccgtgtatttgctcatcaatcagaacttcagatcccccagcaggaaaatggaaattttaccagttgtgtaaccccagtggctctgctgcctgctaaggctgaactcctggatctggatgatcattcccttcaattctgcatcccttctaccattcagaaatggcttgttttcagctacagtgttgtgcaatggatgcaatttgttgagttcatgctgattgcagtgagggcggagttgcccaaatcgcttccaatcacttgtcggcaaaaaggaaggtatgaccggaacgtcgtaatcctcaaggatcccatgaggaggctatggccggtcttctaccatgacaaaccggtcttcgtaggcttcaccgcgggctggaaaccttttgctgcagcaaacaacctccaggctggggatgtctgcaagtttgtgaaagagatggacgaagatgagcttgcgttccaggtttatatcacaagaaagtga

SEQ ID NO: 64658 - DNA, 432 bp, Oryza sativa
  Clone ID: PAT_MRT4530_65781C.1
tccccgggctgaggaattcggcacgaggggacgaataggctcagttggatcagttgaatataaagaagtgtgcgattagtttttttggtaaatagctcaagttagttttcttccttgtaggatagttacaaaaaaataaggtaaacttgcatttcttgcatgagcaaagttcattacaacctatctaagtataatttcctgaagagtgtttatagctgaagttgtttcttctaattttgctgaggttaaccctcctatggcatgcatccttctaaattttgctgaggtaaaccctcctgaaattagtagggtgcacgaaatactactgtttttttaatttttgtacagtggcattgaacatggttttgctctttgagatatgatgcttccctcatgatcaatgaagatttgcattactttaggtgatctgct

SEQ ID NO: 64659 - DNA, 1377 bp, Oryza sativa
  Clone ID: PAT_MRT4530_65782C.1
atggacgacgcgaaactcgaccaggaagtcgttgtgcttgtacctccagccagcggcgtggacgaacgcgcctcgtcgccatggccggacctcctaccggagctggcgggcatggtcttctgccgtctcctgtcctacagagaccgcctccgcttccaagccgtgtgccgttcgtggcgcctcgccgcgccgcggcagcacccgctgccgccgccgctgccctggctcagcttggaccgcgccacctaccagagcctccccgacggcgaggtgcaccgcctcgtccccgaccccgacgacgacgaacttcccggcaccgtctgccgcggctccttcgatggctggctcctctaccaccggccgccggagcagccgccgccgcagccgcagcgccaacccgagtgctttctgaggaaccctctctccatggccaagattgctctgcccaaccacgctcccgtcgggctctgccccggcggctgctacgacgccatgtgcttccccaagcccgaggaattcatgcgcaagatcatcgtgcgctcgccggaccacgtcgccgccatgactgactatttcatcctcctccaccttccgcccaagccgccgcagttgccgtactggtcattcacggccgccaccatctccatcgacgacggcggcctctttacctcgcaccactgctggcgcgacatggccttgtaccacggcaagctctactccatcagcaccggcgaggagctcttcgtccacgagttcagcagcagcgaggccgtctcgtcgccgtcatcgtcgacgacgacggcaacgcagcatagacctcgctactgccgcggcgaggtcgtgatcgacacagctcctcctctcgacgacgaagaacacggttactattgggtgcgcaacctccacctcgtcgagtcgtgcaccggcgacaagccgctgctgatggtccggtggcggtggcgcctccccgccgtctacgattaccgccattggtgcgccgacgagctgagcaaggagatcaagctggacgtgttcgaggcggacatggagaatcgccggtggtcggaggtggaggagataggtgaccaggcaatcttcctcggcaacaccaactccaaggcagtcccgacattgccggatcatgggagctccatattcttcttgggatccattgttactgactactgcttggatgggatcatcgatggcatcggcgactgcgcctacggtgtgtataacatgaagaacggcactttcaggttcgataatccggtgtccataaagagggatagggtgcctttagggttagatgatgatggatacccacctaaacgatggagacctcgatggatagctgattggttcttcccgtcttaa

SEQ ID NO: 64660 - DNA, 417 bp, Oryza sativa
  Clone ID: PAT_MRT4530_65783C.1
aaacaaaaaaaagatgggggggaattaaagccggtgctccaatttaccatacccagctttgggttccggggatcccaaaaaactcctcccgggggcggggtttattttttaaaaagccccggttcaaatttttgggacaaaagtttttgaccccccaaagatggggcccttggttgccaacccccccttaaaaccctaaatttgcatccgggggggggccaatggggtcttcagcccccccccgggggggatcagtccttgggggccttggcggggggggttttagggggccccttggcggggccagaaaacccctggtttggcccaaggggagccccaaaggtggccctgcccccgggggagaagggcttttgggccttaccacattttcggtttgccccccaggccttggggggg

SEQ ID NO: 64661 - DNA, 618 bp, Oryza sativa
  Clone ID: PAT_MRT4530_65784C.1
cgcgattgaaccctctggatgtgccctattctaattgtatgttttcttgtagtgagaacggtgtctactcaaccaaattagcatacattacaattcattggggcagcgggctcgatcttcaaccagacaatctcaaaatgttgggtgccactaagtgcgcgcaagttcttttcttggctcataatccaaaacagagtctggataatagacaggctccaaaagagagacaggacaaaccaacacaattgcccaatgtgccgagcttctacagaatcggtcctacacctcctagccaactgcagactgtcgagaaggatatggacaaaacttcaaagatggataaatatcgacctccaaataaatgagtgggcaaactgcgccaatgtagaagaatggtggtacaaactgtcacgtataccccatgtgccgagaaagacactaaaattggtgatcatccttgtggcctcgaagctttggtgcgagcgaaataccaggatctttatacacatagctaccacaatggctacaattatcaccaagatcaaagagaatgcgcgagcgtggatcaaggcgggaggcacatgaatcatagagatcatcccctcgaagaatagccct

SEQ ID NO: 64662 - DNA, 226 bp, Oryza sativa
  Clone ID: PAT_MRT4530_65785C.1
acgcatctgaktgctcttcacctcacttagatatcaacaactagacctacctaggcttmtcaaatgagtccgragaacsaggactcaagagtgatgtactaatgaaatagtataggtgtatcacaagaaacatctaatgccaacaagtatgtgaacktatgtggcgagttctgttctcaagtttgatgaagcactaataaatatgctactactggtttgcttcaaa

SEQ ID NO: 64663 - DNA, 428 bp, Oryza sativa
  unsure (1)..(428): unsure at all n locations
  Clone ID: PAT_MRT4530_65786C.1
aacttccaatcactggaactaaactttgacccacactgggctcaggtgggaaaaaacaaccttgctttttaaattaccctggaaaccaattccattttttagggaaatcccatgggcccctaaagcatcattcactagctggataacccacactactacaggtctatatattcttgcccctaaagcatgccacatgcatttggaggtgggcccgcccccaattcgaattccatttttttttacggggccgggaaacacaagaaccagaggctggcctagctttatatatatatatatatatatatatatatatatatatagggnaagggaaaacatttttcatcatagaagggggggtagccccagcagtagctgttgcagtagcaggcaaacattgctcaaaagcctggttgcttggccccagcctt

SEQ ID NO: 64664 - DNA, 1256 bp, Oryza sativa
  Clone ID: PAT_MRT4530_65787C.1
tttgtatttcagcaatgcattcttacactatttcagacgctatacacattgtatgcagatttgacttgtgttcctgcaatataataatgagaagataaggtagacctacctgatctccagatcactcccaggccccagatcactcccagacctccctgcggttttcactgagaaatgatgtttgccaacgtaacatcaagaaacaaagtagtgaaaagctatagcatgttgccgtggcactgagagagggtgttcgcctcccgaacttcttgtttctttgttgtgaaaagctatagcatgttgcaaagtcaattagttttcagctgtcaaggatccaccaggcaatttaaaacaggtttcacacagaggaatcaatcagcacagatagtacttcatactaagtacagaagcaaccagtggtattagactattagttacaagctaatggtcaatagtagtccatggtactcacggccggtcgcagttgggtcggtcgggaggcgggcaggttcattcatttgcatgctgtaataaggttgggtaaggatgccgacatggtcattcatttgcatgctccctacatagtccctggtttcactttgagttcagttgagtctactcttctcttgctgcaggagccattcctgcagaagggctgtctgcgaagtactcaggatgtttcaagttcacaccgtgctcttgcaaggccttggaaagatcatccattgttaacacaagacgcctatccttaggttgcttgctcttgttatctttgataggtgctgctaccctggctttgcagtgctgaagagagtcgcttgcaatgtccgaaatgaacttttgggtggctacagcaaccagcctcgttaggcggaggtcggggcagtagaagccgctgcggccaaggtagtgctccaccagctcgtcgggaatcgtaggggtgtagtccatgagggaggagaggaactcggtgaggaccgcctcgtcgtcgtgccgcccgtctccgccgccgccgccgccggcggcggctgcccccatgggccctcctccccccatgccccccggaaccatggcgccaccgccgcctccgcctgcgctgttgctccccatcatcctctggtcccccgccttcgccggaggagctagtggggtttgagatctggcacgtcggcggggaagttcgccgccgatggaccaggaagagcggcgggagtcgtcgtcgtcgccggaggctcgagaaggaggggggaagaggg

SEQ ID NO: 64665 - DNA, 489 bp, Oryza sativa
  Clone ID: PAT_MRT4530_65788C.1
gaggcgcggttgcactcgccttgcctccacagcgcgcacagcttcgtcttgtacgccgggccgcggcggggaggacccatcatctccctcatctctctttcaccaacccaacccttctcccgcggcggcggcggcggcggcgaggaggaggaggagacgagacgtggcggcggccagtggggagacgagaagagcaaagcacgagtgccgcacggcgagttcgggagacgggacgacgacgacgacgacgacgaaatgggcctcatagcaaagtccggcccatgtggcccggcaaatcaggcccatgaaggcatctcaacaccacgaacacagcattccatgcgagataggactggcacgattcaggaagactccacgcatgttgaagcctcggagacgctccaggttcatcacgtcggagtgatccacgaacagattcacctacattcacaacgcaacacgttagatacacctggaaatgcctcatga

SEQ ID NO: 64666 - DNA, 602 bp, Oryza sativa
  Clone ID: PAT_MRT4530_65789C.1
aaaaagggaaaaaggagggggcgaaaaaaattggttcttttgttcaaaagccaaaaaaaaattccttttttcatgacccggggaaagccctgccccccctttttttggacccacaaggggggggggtggggaaaaaaattatcgacaaaaggtggatttccgggccccccttgtaacctttttttgggggggggggggaatttttgggaaaaaaaggacccccccccctgggaaaaaaaaaaaattttttcccccccaaattgaccacccgggggggggggaaatacggggagggtcttcccccccccgggaaatttttgaagagggtcttccccccaaaagggggggtttttttttcccgggggaacccccggcgcttttgggggccttttttttttcggggggctcggggaaagggaaacccccggggcccacccgcgcgggggcccgaaattctcggggaaattttgggcggggggcggtttcgggggccttttttgccttggggtttttaaaaaaggaaaaagcctcccggggaaaagggccccccccctctcccaaagggaccactttggggccttgggaccccgtttttcctcccc

SEQ ID NO: 64667 - DNA, 666 bp, Oryza sativa
  Clone ID: PAT_MRT4530_6578C.1
atgaggtatacctttgcattcctcggtatttcaccctcctccggtgcattatattcaggactaagacggagtctggggaagcctccatctttgcaaactcttctcctatatgacattttctttgctcgctacgactatggcaggagcggggatgtcaagtggagtggtgatggaaagggttgccatggcatctactactggggtgttgttgattggaaccaaatgtgcctttgtggatgccttggccttcgatttgcccttgctttcatgtgctttttgggctacctgggcatctggagttccttcatgcatattcttaggtgctttcttcccaccttgcttgcccctcttcttttagatgggcttgtgattcttgtaactgctagtatcgaccttaaggtcaatacttttgttggatggatgggaaatgaagttcttgcaaagaaccttgtcatgggactcaaacatctgcgtgatgttgattatctcatcatacttcttgcatgtcatccgcctgtggttacgagtgctatgcatagcgctgaggtggaaggtggagagcgttttctcaatcttctccttgtccgtgactactttgccactcagggagaggttgatacatatctgatgcaaggcggagttgtattcggtaacgcttttatatag

SEQ ID NO: 64668 - DNA, 208 bp, Oryza sativa
  Clone ID: PAT_MRT4530_65790C.1
gagcatccggaccaaggtgcccaatggttagcaccaagggattccccagcaagcaaaagttgagcccaagggagcccttcttatatcattcaggggcgcattttggcactagcgtatcatcattagcccgagtccatcattgggcacattattgcgccatatccccaagacaaggttattcccccaattggggttgttagtcaccgga

SEQ ID NO: 64669 - DNA, 550 bp, Oryza sativa
  unsure (1)..(550): unsure at all n locations
  Clone ID: PAT_MRT4530_65791C.1
cccccccccatttngggncaattngganaaaaantcngntgggggggcgtttaaggggttttggcgggnnnnggcccnaaaannancccttntttttttngggntttttgggcccnaanggganccggccnagggtttttgggggggggatccgggtttnggggtcccaaaaaaggccccccaancccccggggantttggggntttttttttncggaancannnntgnaattngnnggggncccaagtttaannngggggggntttttttttttngggnanaaanggttaannnntttggttttggatcccctncnaaattttttngggggggggggggaatnaaaananttgggggggggtncccctccccnggnaaaggaagnnanttcnaaggntgggnatnaanttttnntancccnccccannntngggnnccnaaannnggggggnttggnggggaaaaaaaaaaaaaaaaaaaaaaaaaaaaaaaaaaaaaaaaaaaaaaaaaaaaaaaaaaaaaaaaaaaaaaaaaaaaaaaaaaaaaaaa

SEQ ID NO: 64670 - DNA, 470 bp, Oryza sativa
  unsure (1)..(470): unsure at all n locations
  Clone ID: PAT_MRT4530_65792C.1
agagccccggctcccaaccgcctccccacaatactggatcccccgggctgcaagaattccgcaccaaaaatggtaaagtccaactcattcgtgaaccaatgattacatctacatcactttttgactcgcacaacaacctatcaactacactcacatcgccgtgcaggcacatgatatctcgaaaaattttttttcacctctacggtcgttctaaacaaatcccactccgtcacatcatccaatccattaagacccctacctcccctcaggtactgacaaaatcgatccggtcagcgtcactccatcccacaccttaacgagttactacccaaaatctcgaaccacgagtccgtttccggggtatgatatcccccaaagacccccctgagttggactctcctcctcatgaccccccgacctcggatctcaccatccccctctccgacccccctccccccctccaaancntg

SEQ ID NO: 64671 - DNA, 801 bp, Oryza sativa
  unsure (1)..(801): unsure at all n locations
  Clone ID: PAT_MRT4530_65793C.1
ccggccgggacagtccccacaaccccacatgcgcgtgcagatgcaccgcctcttactcgctctttctcctcctcctccccgcctcctctccgctttctcctcctcgcaccgctcctctccgccttcttctcgcgtcgcgccgccgccttcctcgcaccgtgcctctccgtcttctcctcgcgccgtgccgccttctcctcctcgcgccatgtcgccaccctctacccacacatctgcgcgcccacgacctgactcctgaggcctcgatgacggaaggctaatgggagacacaagatggatgggatctggaccgtggagtggttgagatcgacgggatcaatggctggattgatttgcttgatttgattttttttccatgaatcatgctctacttgctacttgttgtggcatcatcaaattttagtccttcatcccagttgctttttcattcatcatgtacagagttctttttttgcaattattttttgggctgagttcggtctttgaccgagaccaaaccgaattaaccgaagaccgaaatactctatcttgagttttcttgaagaccgatcagtcttgtgatcgtaaagaccgaatttttcaaaagactgaagaacctaaccgaaatttcgtttaagaaacccgaatggccacccctaccctccccctctggtcgacctcccccatgcctgccctactgcagacctgngaagaaagagaagggaaggagaagaaagggaaagaagggaagcgagggaatcgagtgagatggaaaatgaagggtttgatttacgctgccca

SEQ ID NO: 64672 - DNA, 237 bp, Oryza sativa
  Clone ID: PAT_MRT4530_65794C.1
atgaaggcgacgtcaccactgctcaccagcgaggacgagcttccggcggtctccaggagaaacggaggcgaggctggggaagaggaggttgctgcgaagcggatggtggcgatgctgggctccgaggaggccgcggtggacgaggcggctggccggggagaggaggagaacggccggagagttcgccgggctgccatcaatggcggcagttcattggagactaaatttgatgattaa

SEQ ID NO: 64673 - DNA, 369 bp, Oryza sativa
  Clone ID: PAT_MRT4530_65795C.1
atggtggcgagctcgcgccaacgatggcggcctcggggagacatatccatcgtcggtgggctcgggggaggcggatccattgccggtgggctcaggggtgcggcggaggctgccgacgacgatgacgacgacgaggcaacgcggcggccgttgccgccgacgacgacgaggaggcggtggccgggagcagcaccgccgctgcctccacttgaccactcttcccctcctcccaacgctcgcgcaaggcgtccgggagcggcgccgccctccccactcccggatccggtggcggcggctaccccacgccggatccagtggcggtgggagccggcgcggcagtggcggcagggtgccccgatctatggttag

SEQ ID NO: 64674 - DNA, 465 bp, Oryza sativa
  Clone ID: PAT_MRT4530_65796C.1
tcatgactggcgatgccgctcctcctctgttgccttctctccgctgctccccctcccccaccatcgtcgcatgcccctctctccatggtctgagctcaacgggggcgttggatctggtgccctcggtcctccgctcaccacggagatcccatccgccggtggctcattctcgtacctccatgttgagctcagcgacatcgcggtgttcctcgccaccgggaacataccactagaggccgttgtcggggcggtgcgcgctgtggcatggctgctgctcgcggcgtacctgcagttcacgtttgggtggcgccgtgaggagtggttccccgcgccgctgcagctctggtggtcgcgccgccgcttgcgggttgaatgcctcgccggagaagagagaagagagaaaggagggagagagaggggaagagaggagaggaagaggaagatgaagaggggcaattcggtcat

SEQ ID NO: 64675 - DNA, 348 bp, Oryza sativa
  Clone ID: PAT_MRT4530_65797C.1
atggcgtacttcggggtcgccatcaccatcaccaccgcgcccatgacagagacggagacggagacgaaggggagggcagcaagcggcgacgacaaggaggaggcgttgcggccgacgagcgccgcgtcggcagtagaagggtgcagtggcgaacgtcgcggcggcgaacgcggcaacggttacaacgacgatgagaacccggtgacgacgacgacgatgcgggcggcgagcgccgcgtcgacgggaggaggcggggcgggaggaagcagcggcgggaagaggcgagcggcggccgacaggaggaggcggtcggcgggaggagaaggcggcaacgcctgcggcagatga

SEQ ID NO: 64676 - DNA, 444 bp, Oryza sativa
  Clone ID: PAT_MRT4530_65798C.1
aactaaggttgctgcgtacggtcgtgcggctgcggcggcacacatgtcggggggttgcggcagtggtgagaaggcgtgcggggtgcaggtcgggcagccggtgctgcctcggggaagggggaggaggcgtcgaccgtgtggtcgtggccgggtgggactcccagactaaggggacggcgccggtgtcgtggccgtcctatgcgtgaactagcgcgtcttccctggagagcatcgtccttggttgagccgacgtgcgtagatctcgatgtcgtgcgtagatagcgcagcgggcatctggggtttgcttcgccagtctctcccactatctcactctcattgtgtacggttgtgagtaatcatgggcactatatggtgtgtagtgtggaggaggggatcgcgctcgtgccgaatacgtaatcatgtcatagactgtatcctgtgttg

SEQ ID NO: 64677 - DNA, 437 bp, Oryza sativa
  unsure (1)..(437): unsure at all n locations
  Clone ID: PAT_MRT4530_65799C.1
gagagcttggtgagctgcaaagagtgggacggcggcatgagtggagaggacggccaccaccgtctctcccttccagagggctcaagtgcaccgacagcatgcccgtcgcccgncgntccnncgactccagcttcngcatcgtcagcaatggcggcaggatcaggtgcatgcannnnanatcagattgagggcatcaagaattgtgagaccctctcctacctgccaccgctcaccgtggaggacctcctgaagcanatcaggtaccgtgtccagtccaagtggagtgccctgcctcgagttcagacaaggtcggattcgtctaccgtgagaaccacagatcccccggatactacgatggcaggtactggaccatgtagaagctgtccatgttcgggtgcacnnacgccacccaagtgctcaaggagctcgaggaggcc

SEQ ID NO: 64678 - DNA, 998 bp, Oryza sativa
  Clone ID: PAT_MRT4530_6579C.1
atgaccgcgacgtcgcgtcgcggagccagcgcccgcgtcgtccgcgcgtctagaagagcgcgggggcgtcgtcgtcccgaggtcggtccaagtggcggtgggggcttgacttcctcggatcggttcgctggcttcgcgggcgtcgagaagggagaacatgggtggagtcaagcgcgtgcgtgggcggtgggcgggcgcgctgtgccgacgtcgccggcggcgtggactccagttgcactagcatcaaccgtcggtcacatgaacgtaactgtcaaattatgtccgagcctgcattaccagctgtcttggatatgcctactgaaagagccagagggtgcatcctctgagaggactgcaccacagaattttggtatcagggggtttgaagtgatagatgatgctaagtcccagttggaagccgtatgctccggggtgaccttaataactgaatttcttgttttgtacttactgcaagaccggtgggccaagctgaggcaaaaatttgcagctcaaggcctgacggaccgtgagctcgtaacactagttggtgctcacaccatcgggcagacggactgcatctttttccggtaccggctctacaacttcacggcgacggggaacgcggacccgacgatcagcccgtcggcgctgccgcagctgcgggcgctgtgcccgcccgccggcgacggctcccggcgcgtggcgctggacctgggcagcccgggggcgttcgacgtgagcttcttcaagaacgtcagggacggcggcgccgtgctggagtccgaccagcggctgtggggcgacgccgcgacgcaggccgccgtgcagagcttcgccggcaacgtcagggggctcttcggcctccggttcagctacgagttccccaaggccatggtcaggatgagcagcatcgccgtcaagaccggcagccagggcgagatcaggaggaagtgctccaagttcaactaggtgcagtagcccagtcgacagtgaatttt

SEQ ID NO: 64679 - DNA, 3249 bp, Oryza sativa
  Clone ID: PAT_MRT4530_657C.1
atgaccggaggccgccgatggaatggcagatcccgtcgatatcgacaaggagttagcactatctcacaaatctcatcatttaaagcatcactatctgggcaggcacttattgctttaaagaaaggcacccaactgcttaaatatggtcgcaaggggaagccaaaatttactcccttcagactatcaaatgatgaatcaacactaatttgggtctcaaataacaaagagaaaagtttgaagctatcatctgtgtctagagttctctcgggacaaagaacattggtttttcaacgttttctgctccctgagaaggaccatttatccttctcactcatatataatgatggcaagcggtctcttgatctgatctgcaaggataaagttgaggcagaagtatggtttgcaggccttaatgtattgatatctcctggacagcatggatcccaacaccaacacattgatggaatacgcaacggtgccctgtcttttgagtgtggcagagatagtagcctaagcagtagctctgcttatacaacggattcctttgagaataagttgagctcagcgaattctgccaaggatcgttcttcaggagaatttacatattcagaaaggacagatgtgtcagatatgcaagtgaaaggtgcttcttcagacattcgaatcagtgtttccagtgctctcagcacatccagccatggttctggagatgattctgaatcttttggagatgtttatgtatggggggaagtcatgtgtgacactacttgtaggcaaggatctgacagtaatgcttactctgctactgcagctactgatattcttgtaccgaagcccttagagtcaaatgtaatgcttgatgtcagttatgtggcttgtggtgtgaagcacgcggcactggttactcgacaggcagaggtatttacatggggagaagaatgcagtggccgtcttggtcatggggccggcacaagcatttttcaaccacgtcttgttgagtcattgtctatctgcaatgtcgaaacaattgcctgtggtgaattccatacttgtgctatcactgcaactggtgacctttacacctggggagatggtacccacaacgctggactccttggtcatggaagcaacgtgagccactggattccaaaaagagtttcaggtcctttggagggccttcaggtgtcagctgtttcttgtggcacatggcatactgctttgataaccagttctggaaaattgtacacgtttggtgatggcacatttggagtcttaggtcatggaaatagagaaactatttcatacccgaaagaagtggagtcattgaagggtttgaggacaatttctgtttcatgtggggtgtggcatactgctgctgttgttgaggttatcatggcacagtcaaatacttcatctggaaagctatttacatggggtgatggagataaatatcgccttgggcatggtgacaggtcttcaaaactgaaaccaacctgtgtgccttcattaatagattacaatttccataaggctgtgtgtggtcatactctaacaattggattgactacttcaggccatatatttactgctgggagctctgtgtatggacagcttggcaatcccaataatgatggaaggtatccacgcctagttgaagagaagcttggtggtggtggtgttgtggaagttgcgtgtggagcttatcatgttgcggtattgacacagagcggtgaagtctacacatggggtaagggtgcaaatggaagattgggtcatggtgatattgcagatcgtaagacacctacatttgttgaggctttaagggataggtctgtaaaacgcatcgcttgtggatcaggcttcacagctgcaatttgtcaacataaatcggtgtctgggatggagcagtctcagtgctcatcatgcagacagccatttgggttcacccgaaagaggcacaactgttataactgtggattagtacactgccattcctgcagttcaaaaaaggctctaagagcagcattgtcccctaatcctggaaagccatatcgcgtatgtgattcatgttacctgaaactaagtaaagttttggattctggaatcggtcataacaagaacaatacgcctcgcataccaggtgattccaaggctgataaaatggactcaaagggaaacagagttgcatccgctaatagctcagatatgatcaagaacttggatgtgaaggcagcaaagcagacaaagaagtatgactatccaccacagttccctgcgattttgcagctgaaggacatccctttcattggggctgctgaccagcaacctaatgactccacatatagttcacctttgttgaggctgccaaatctgaattcttctagttccttgtcctcagaaagctttgatattcttagagatgcaaatgaacttctgaagcaagaggttcaaaaactaaaagaagaggttaacagcttgaggcagcaacgtgaacagcaagatgcagatttgcagaaatcagaggcaaaagctcatgaggccatgaccctggcctctgaagaagcatccaaatcgaaggctgcaaaggatgttattaaatcactaacagcacagctaaaagaaatggctgaaaggcttcctccagcatcatgtgacacgaagcaaacacggcagccttatctacctggtggtgcagtttctcctgatacagggagagaaaaccaaaagagatatgagccaggcagcttccagtacccacaaacacctacttctgttgcatcggcccggtttaatgggttccttgctcaagcccatcaaataagtgaacccaatggtaacacgatggttccacatgacagcaggcatgaaaacaatggcaacactaaggagttcccagttgcgcagcagatgaccaatggtgggatgacggggtatcgcccaagaacagaagatcatgatcggcgggaaacagaaaggttccaaataaacctccatggtttcaacatgagaggttctagctcacccagcaaccaagtcgaagctgaatggatagaacaatacgaaccaggggtatacttaacactagtttctcttcgtgatggaaccaaggagctgaaaagagtgcggttcagccggagaagatttggagagcatcaggcggaatcatggtggaatgacaaccgtgaaaaagtgtacgacaaatacaacgtgcggggaactgatcggatttcttcagtgatgacagcgtag

SEQ ID NO: 64680 - DNA, 409 bp, Oryza sativa
  unsure (1)..(409): unsure at all n locations
  Clone ID: PAT_MRT4530_65800C.1
aaatggctgccgtccaagcagcaatatccacctgctgctcttcgtcttgcctgnnccggccgccaccgccgttcgcgaggaggcggcgcttcaaggtacacgcccatgggcnnctcagagagaaggtagcacaggcgacggcgagaagtggtccgatgcagtggttcggggcggggatatttggtggaggagcagcgaggtaagtggtaggtaggacgtgcttcaagaagctggagaggcggaagttgctgagcacggtggagacggccgggctgctgtccagggcggaggagctcggcgtcacgctctcctcgctcgaggagctcggcctccactccaaggccgaggcctcgcctcctcagcctcgcgagccgccgccgccgctccccgagcctgctcgttgtccgtc

SEQ ID NO: 64681 - DNA, 245 bp, Oryza sativa
  Clone ID: PAT_MRT4530_65801C.1
atgtggcgggggaagaaggtagttccccaaggcttagagggatgggcgtgggcagcggtgggcggcaacagccgatgatgccgtatctggcgaccgggagccaccagagacggggaagacggcgaaacaagggactcggcgacgttgccttgggaaagagagaggaggagggggagaaggccgaccaaggtgggagagggggctcatcggtgctgttgaccccttctgaccagctggagaggtag

SEQ ID NO: 64682 - DNA, 206 bp, Oryza sativa
  Clone ID: PAT_MRT4530_65802C.1
atgccggttcgaaatgttggaatttgataaggatttttgcttgtgggaatggaaatgccaaatgatggagatacttgtttctgagaaaatgatgggaccacatggaagtttaacccctaaggaagccctttatgaggcttctcgtgaatgttgatggatgttatttgcttgccctgtgcttgcacacccgaggaagaggggactgc

SEQ ID NO: 64683 - DNA, 648 bp, Oryza sativa
  Clone ID: PAT_MRT4530_65803C.1
atggcgagctcggaggcgctctgtgctgccgccgtgcgcatcatcgccgcgtggctggagcggtctgagctgccgctagggcgggaggtggtgcgccacatgctcgacgtcgacgggcacacgtggagcgtgcatcgcgccaaggcgaactggttccgcatcatgggggtgctcacctgggccgtcgggctcgcgcggtggctcgacggcgtgcagcggtggcgcagcccgtgctcgatgtggttccgtagccctgcccctcctccgtcgcctgcccctagccgccccgagccgcgccgacgtcgccatcgccgcctgctgccgcgcgccatcgccgtcgcgtcgtcgcctcacgccccgcgcccctgccccgccgcgcgcccgtcccatctcccctaccgcgcgtgcctcgcgccccgagccgccgcgccgccatcccgccaccccgcgcgcccacgcgccccgtcaccgctcatcccatcgccgcgcgtgttccatcgccgcctcgagcccgcgccgctgtcgccgtcgccatcccatcgccgtgcgctgagtcccgcgccgcgccgcgccgtcccatcaccgcgcgccgagccccgtgccgccccgagccccgcgcgccgccccgagcccccgcgccgccgtcgt

SEQ ID NO: 64684 - DNA, 600 bp, Oryza sativa
  Clone ID: PAT_MRT4530_65804C.1
atggcgagctcggaggcgctctgtgctgccgccgtgcgcatcatcgccgcgtggctggagcggtctgagctgccgctagggcgggaggtggtgcgccacatgctcgacgtcgacgggcacacgtggagcgtgcatcgcgccaaggcgaactggttccgcatcatgggggtgctcacctgggccgtcgggctcgcgcggtggctcgacggcgtgcagcggtggcgcagcccgttaaataaggataaaatgaaaactagcactgttcattgcgcggaaggtgctcgatgtggttccgtagccctgcccctcctccgtcgcctgcccctagccgccccgagccgcgccgacgtcgccatcgccgcctgctgccgcgcgccatcgccgtcgcgtcgtcgcctcacgccccgcgcccctgccccgccgcgcgcccgtcccatctcccctaccgcgcgtgcctcgcgccccgagccgccgcgccgccatcccgccaccccgcgcgcccacgcgccccgtcaccgctcatcccatcgccgcgcgtgttccatcgccgcctcgagcccgcgccgctgtcgccgtcgccatcccatcgccgtgcgctga

SEQ ID NO: 64685 - DNA, 759 bp, Oryza sativa
  Clone ID: PAT_MRT4530_65805C.1
agatcaaagatggtgatgtacacctaattcattgaatatttgcaaaaattacacagttcattcattagtgtgtgttatacatttttttgtctttttaccaaatcagagtatcggaaaaactaatatgtacactagatttacagttggtcttttgactaatggggtaattataaactaaataaaatttctgaaaaactagttcaaatcaatgccttcatccagtgctgtggaactcatcatgacatttgaatcaatctgtttgtcaaattttttccttcggcgtgcctcaaattccgtaaagccatccatttgttgaaactggtccatcgagattggattgtcatgcaacgatatgttctgaagagccttgcagtctttcagtaggttttggggaagctgacgaatcttattcccgttcaatgatagggatttgaggcaaacaaggttacagattgatgaaggcacgtcttcaattgaatttccaagtgcctgcaattcttccagggaactgcaacctccaattgattcaggaagtgcaattagtttgttgtcagatacattgagtagcaacatattgcgcaaatctcctacactcttaggcaggcgtgataaagaattctgagaaatagagagttgttgaagatttgatagagaacccaattcttcaggtaagacagagatcttatttctgtcaagtgtgaggattttaagattccgcagatatccaatgttagaaaggatgaattcaaccgaattacc

SEQ ID NO: 64686 - DNA, 909 bp, Oryza sativa
  Clone ID: PAT_MRT4530_65806C.1
atgggctgctgcagcagccggagcgcggactcgccggccagccgcgtcacgcgctggcgctccaccgggatcgtcgccctccgcgacgccagattgaaggtagtaccaaatgaagttctacaagtagggaattccctgaggattctggatttgactaacaataagatagctgagattccccaggaagttggcacactcgtgaatatgcaaagacttgttttggctggtaatttggttgaaagcatcccagctaacattggatatctgcggaatcttaaaatcctcacacttgacagaaataagatctctgtcttacctgaagaattgggttctctatcaaatcttcaacaactctctatttctcagaattctttatcacgcctgcctaagagtgtaggagatttgcgcaatatgttgctactcaatgtatctgacaacaaactaattgcacttcctgaatcaattggaggttgcagttccctggaagaattgcaggcaaatggaaattcaattgaagacgtgccttcatcaatctgtaaccttgtttgcctcaaatccctatcattgaacgggaataagattcgtcagatggatggctttacggaatttgaggcacgccgaaggaaaaaatttgacaaacagattgattcaaatgtcatgatgagttccacagcacttgatgaaggcattgatttgaactagtttttcagaaattttatttagtttataattaccccattagtcaaaagaccaactgtaaatctagtgtacatattagtttttccgatactctgatttggtaaaaagacaaaaaaatgtataacacactaatgaatgaactgtgtaattttccaaatattcaatgaattaggtgtacatcaccatctttgatctaaaaaaaaaaaaaaa

SEQ ID NO: 64687 - DNA, 147 bp, Oryza sativa
  Clone ID: PAT_MRT4530_65807C.1
cctctagatcgagagcttccgcccttttggttcttccccctcctgaacggtgtaagtttcagggaacaaatcgcgctaaaggcgattctttgccaaactttttaacatgttgagtttcaatgtaaagataaactccccccaacactg

SEQ ID NO: 64688 - DNA, 1278 bp, Oryza sativa
  Clone ID: PAT_MRT4530_65808C.1
ggccgccccttttttttttttttttttcttttttttttttttttttttttttttttttttagtagatcaaagatggggatgtacacctaattcattgaatttttgcaaaaattacacagttcattcattagtgggggttatacctttttttgtctttttaccaaatcagagtatcggaaaaactaatatgtacactagatttacagttggtcttttgactaatggggtaattataaactaaataaaatttctgaaaaactagttcaaatcaatgccttcatccagtgctggggaactcatcatgacatttgaatcaatctgtttgtcaaattttttccttcggcgtgcctcaaattccgtaaagccatccatttgttgaaactggtccatcgagattggattgtcatgcaacgatatgttctgaagagccttgcagtctttcagtaggttttggggaagctgacgaaccatattcccgttaaatgatgtctttttgtgttcacgagtgtgccaaattcctggggactctcagctattttgaatttccacttttcctgaatcctcatggaaatgggcaaaaagaaaaatcaatcaacaggaaccttcaatctggcgtcgcggagggcgacgatcccggtggagcgccagcgcgtgacgcggctggccggcgaggaggaagaagagcttggtcgtctcgtcgactttggtttgacgagggcgctgtcccgggggcgacgcggggcccccgcccttctcctcctctccccagcatcgccgtcgcccgagccaccgtcggcgaagccaggcggctgcaaggacggcggcggcggggctccctctccctcgctcgtggtcaaaccgtacgggacgccggcaagacaggagctcaggcttggtgccggcgacgaggagaagcgcccggcggcggccagatccggcgccgtggaggccgaatccggtcctccatggcgggatctgctcggcggcggggttggaaggtgggtcgggggcggcgacgacctggagtgctcggcggcagggtttggcgacgggtccggggcggcggcgacctggcgtagctggcgacgggtcgttgccggcgctggctcccctagctgcgcacggacgctgtcgagatggcgactggcggtggggagggcgacggcaatggcggcggggagggcgacggtgaaggcaggggcgcgcggcgccggggccccggtggttgactccaccgcgccggcgccagttcagcgagctgcccctctgtgcttctga

SEQ ID NO: 64689 - DNA, 238 bp, Oryza sativa
  Clone ID: PAT_MRT4530_65809C.1
gtctcgacggcgccagcgcgaaccccggcgacccgccctcgccggcctcggcgaggtcggggcagcggaagcacgtccccgactggctcaacagcccgatctggtccgcgcctccccctcccgcgcgccaccgcgccccgtcccctcctcgcccgcccctgcttcccagttcgttcacgcatggcctacatcacactgagccgcccgacacgagctgaccaggccgaggctattacca

SEQ ID NO: 64690 - DNA, 767 bp, Oryza sativa
  unsure (1)..(767): unsure at all n locations
  Clone ID: PAT_MRT4530_6580C.1
atgatagcgtcgaggacgcccgtctcgctccacagcctcctcgtcgccggcggccacggaaagcgatgcgtcgccggcgccggcggcaggaagcgcggccgggtgcagcgccgccacctcacgcaggcgctcgagagcttctggaggcacgctccccgccccgctcctcccgccgccgctgcccgcggcgaggccaaccgctcgtggcagccgccacccctcgagaaccctgcctttgaggagtattacaaggagcaacgaattgttcgcgaggaggagtgggatgacttcatcagtgtgctgcggaaaccattgccagcgacttttaggatcaatgccagctcccagttttttaaggatatttgctcaaagttagagaatgacttcaagagatatttggagagtgaggttagtgatgagtatggagaagatgctatcaggcccttgccttggtatccaggggaatcttgcatggcatttgaacttctctcgaaagcaactgaggaaaaatcaagctcttgagagtttccatgagtttttgaaacatgagagtgaggctggtaatataaccagacaggaggctgttancatggtgccaccattgtttctgaatntacaacctgatcaccatgttcttgacagtatgttactgtaatactgcataacttctatccattatcttaaacatccatgtgctcatantttgatantagtcactccgtgtcaaaatgtcnttggatgctggatgggtttgattgggaattttg

SEQ ID NO: 64691 - DNA, 559 bp, Oryza sativa
  Clone ID: PAT_MRT4530_65810C.1
cacgactccacccacctttttatgccctccaaaccctagcccataacccctcccgcctcgctgccatgccagatctgagcaccgtctgcctccccctctcgccgcaacccccctccaccgccgccgccgccggcggggagctagcaggcgagcagcccgccgccgtcgccgtcaccaccgccgcggcggcggtgtctgcgtcggcagaggcggaggcggcgggggaagcagaatccgcctccggtggcgacggcgcgcccgttctcccggtggaatgccgatggagcggccgagttcgcagcttcgcgggcgctggcgagggcgcgggcgcggccgctgtccccgcgtgccccgccccgcgccgcgggggcgggaaaaagccgtcctccgcgccgtcgccttcgtccacggtggcgaccgcgccggctcattcatcgggtcggccgttcgaggagtacgttaaggagtggaaggcgaagaaggcggcgctcggcgtgccggtcggacgctgcgagctgccttttctaaccggcacgcctaagcgggtgaatgtcattat

SEQ ID NO: 64692 - DNA, 537 bp, Oryza sativa
  Clone ID: PAT_MRT4530_65811C.1
gcccgttcactaacttatattgatcctgccacggaaatttatttagcacgtattacaaaggaggaacctcccaagctccatcaccactagtctagcgtctcaagagtttcactgatgtcggatcgagcatccctaagtgatactaccatcgaatccggtagccccaagcttcacaagtaccagatcggggcatccgcatgccccaacttgcgactgccgccattgctcatcattgtcataggcactactttgtgagaagctcgtcatcatagctgcaatagccacctcaagctcgtcactagtagttattgccaccgtcgttatagttatgtgttgtagccgcatgagcaaccttgccagaatagggatgaagacttccatgagaagagagaagggatcagaggtgaagagagagaaaagatagcggagaaatggctgacatgatgcgtgtatttttttttctctttgaaacgaaccacacaagataggtgtgagatttcattttaatgtagcatttaaaaaaaaaaaaaaaaaaaa

SEQ ID NO: 64693 - DNA, 277 bp, Oryza sativa
  Clone ID: PAT_MRT4530_65812C.1
aggagaggagcggcagcaacgggcgccccttcccccagccgtcaacgcgcaggggacggccctcccccgcccggtggtggaggcgaggagcggctgcggcgggtggcggggtggcaagccatcccccgtgtggatccggtggcggtggctcttccgtgcctggatctggcggcagcagcgacaggaggacgacgccaacgatggtggcggcagtgatgggaggatgaggaggatagcagtggcgatgatgagaggatttggattttttttttcttga

SEQ ID NO: 64694 - DNA, 330 bp, Oryza sativa
  Clone ID: PAT_MRT4530_65813C.1
aatattagttagtactgctgtctgtggactgtggttggatgatgagcaaatagatagtacaatcaagtactacaatgtggctaatctgtcgacagttttcccctgtttaagcttgttttgattgatgtatgtttgctttggtcagcattggtgttaactatcttctttcacttaattaaaatataaggagtgagaaattttaacaatgttggcttgtaatttacttaatctgatgttaataattagtagtgcaagcactacaattttctgtgactctttttacttattgcggcgttttgcttcattcggaattcagtttgctattacatt

SEQ ID NO: 64695 - DNA, 1375 bp, Oryza sativa
  Clone ID: PAT_MRT4530_65814C.1
gagccaacatgatataactattattaatcaaagaccacccaagggcaagttttattttgtttatttcatccacatccacaaactcagaaacaaaatcatagtataaaagctacacctaatataataaccaagacaaggtccaagggggagagcctcatcagcttgatttaatttctttctaggccgagccattgttgtgggtaggcttgctgctgctccggagttgcttgctgatgtcgtcggcgatgtgctccgcgtcctcgtagctgccgtagattcccctcctcaccatcccggcgcagtacagcccgttctcccccttccagtgatccgggtagctccgccccgccatcccgtcgtcgccgatcagcccgtcatcactcttgagccagtgcttggtggtgctccggtagccggtggcgaagacgacggcgtcgaaggcgtggcgctggccgtcggcgaactcgacgtcgcggccgcggacgcccttgatggcggccgggaggacgcggatctcgccggacctgatcttggcgaaggtgccgacgtccacgaccgggtacatcgtggtggtggccttcatggtgaagggcccgacggccggccgccggaggccgtagcgggcggtgtcgccgaacacggcggcgcacatgagcagcaccaccttgtcgatcacccacaccggcaggtacctgtacagcgtcatcgccaagttccatatctccttgctcaccaggtgcagctcgctgcggatgacgatggaggtggcggcgccgccgacggcgaggtcgtaggcgatctccatgccggagttgccgccgccgacgacgagcacggacttccccttgaacccctccgcgctccggtagtcggcggcgtgcaccaccttcccggggaacgtctccatcccgggcacctcgggcaccaccctctcgtcgttctcgcccgcggcggcgaccaggtgcctcgccgcgtaccgctccgcgcgtcccgtggcgaggtcgacggcgtcgacgagccaccgggcgcgggcggcgtcgtagcgcgccgagcggacctcgcggcggaggcgggcgcggacgccgaagcgggaggcgtaggcgtcgaggtagcggaggaagtcgtcgcgggggaggtaggtcggcgacgcctcgccgtgcggcgcgtgcgggagcgcgcagtagcgcttggcgaggtggaggcggacgcggtcgtaggtgcggtggcgccacagcgacgccacgcagtcgtcgcgctccaggacgaggcagcccgtcacgccgcgcaccgacaggcacgccgccgccgcgagccccgacggccccgccccgacgatgatcacctcctcctcctgatcctgctccaccgccgccat

SEQ ID NO: 64696 - DNA, 852 bp, Oryza sativa
  Clone ID: PAT_MRT4530_65815C.1
atgggaagtgattggaactctctggtgagaaacccacaggtgccaccaccgttcaccggcgtcaatggctcctcccccaattttcccggccatcggccgcttcaccgccgggtagctatcgtcacgggcggcgccggcggcattggcgccgcggtcaccgcgcacctcgtgtccctcggagcccgcgtcgtggtcggctacgtcggcgacccagcccccgccgagcagctcgtcgcgtcgctcaacgactccgcgacggcgccgcgcgccgtcgcggtggccgcggacgtgtcggaccacgcgcaggtgtcgcgcctgttcgacgcggcgcgggaggcgttcggcccggacctgcacgtcctggtggccgccgccggcgtgcaggacggcgcgtacccgcgcatcgcggacacgtcgccggagcagtgggaccgcgcgttcgccgtgaacgcgcgcggcacgttcctgtgctgccgcgaggcggcgcggcggctggcgcgcggcggcggcgggcgcgtcgtcaccttctcgtcgtccaacgtggggtccctccggcccgggtacggcgcgtacgtggcgacgaaggcggcggtggaggcgatgacgaaggtgctggccaaggagctcgccgggacggggatcacggcgaacagcgtggcgccggggccggtcgcgacgccgatgttctacgccggcaagagcgaggagcgcgtcgctgccgtcgccggcgagtgcccgatggggcggatcggcgagccgatggacgtggcgccggtggtgggcttcctctgcaccgacgccgccgggtggatcaacggccaagtcattcgtgtcaatggcggctacatctaa

SEQ ID NO: 64697 - DNA, 450 bp, Oryza sativa
  Clone ID: PAT_MRT4530_65816C.1
atggtgcgtggatccatcgttgccggggaggaaggcgcgtggatccgtcgtcaccggggaggattccacgtggatccatcgtcgctgccgccccccgtgccgttgccgtcctccccgcctcgcaccgtcgccgatctccccgcctcacgtcgtcgtcgtcacgacctcctccgcctcgcaccgtcgccggccggaagcagcagatccggtgccatcgttgccgccgggaggaaggcgcgtggatccgtcgtcaccggggaggacggcaaccggcgggcacccattgctgatgctctaaagctcaactcccaaagaaaaacttgcttacaaatcatggcagtgacaccgtcggagtacactggaaagaatcgtactcgtgtagcttcatcggggaactggccgataaatgctcgcgaaggggataacatgccgtggtggaccggcgactag

SEQ ID NO: 64698 - DNA, 108 bp, Oryza sativa
  Clone ID: PAT_MRT4530_65817C.1
atggccgaatttgatggcgatttcaggtgccgcgcctaccggcctagcaagggaataagttcatctgagattaggtccctcagcggttttgagggcggttttggctaa

SEQ ID NO: 64699 - DNA, 323 bp, Oryza sativa
  Clone ID: PAT_MRT4530_65818C.1
tttaatggtaaacttatgtatatgttgattactatgcaagcatagaaataaccaagctaaggctgtaaggcataactaattcccatgaagtcatgattatggtgaacatcccggtcataattagctcccatacagccatgctcatgtccagttcttttctttgaggcatgactcatgatgtgccatcatgtgatgttgttataagaggcagttcaactctaggatattatttccgatgttactatgaggtgatataagttgcttagataatgtcaaactaattaatgcaaaaaaaaacttctgcaccttgctttgcctacaag

SEQ ID NO: 64700 - DNA, 164 bp, Oryza sativa
  Clone ID: PAT_MRT4530_65819C.1
gaattccaagcagaatgtgtattaaaatccccgtccaggaccggccgaggtacacaaatgacaatgaacaccactccacaggcatcctcgacggcacggacaaagcctactcctcggagaaaccaccatctgacacatactcggaattatcaaaggagagctaa

SEQ ID NO: 64701 - DNA, 1873 bp, Oryza sativa
  Clone ID: PAT_MRT4530_6581C.1
gatggaacagttacaaaaatcagtgtgtatatgtacgcaatagagtacaaaagttccatataacaacagtaactcattgatacatttgagtatacatatccagggaaaaaattgctttatactagtatcgtatctggggattcatgtggaatttgcctatccaaaaaatgttgtgccacactcgttaggccacagctgacaaccctccctatcacaaaagataataaaaatgacaaaggggaaaaatacatcgatgtttctttctttgcctttacagtgtacaatagtttatttcactcgccacgctatataaactctgctgcctccaagttggatggcaaaaagaattgtcctctacactacctcaaaaaaatacttcatgttggcaatagtggttgcctctcatcagttccaatcctatggctggcatcttcagcagcgccagcagtcatatttacaaaagaagattcagatgaccgatgattctgtgtatcttccaactctaacaattcagctggtttgtcatctttggctttagcgagtggagagaagaactggtgcattgaaataaacacaactgatatgcccagtagaaaattaatggtcagggtatgccccaagaaggcagcagaagctagaccagtaaaaattgttgcaacagttgacgaatacttcttcaaaattgtgtctgcatacttgaagaagaatgaagaaagaatgccttgcgcagcattattacatatgagaaacatcgtagcccttgaatgtcctcgaagaatattgaaactctctggcccttggaataaggcagtcccaagaatgccaaggaagttgaatattgcaccatatccatataaaaacaaattctgaagatatatactagtatcatattggcttttcaaggcatattcattgtagacagaagccaatgatggaacagttacaaaaatcagtgtgtatatgtacgcaatagcagtgacaggaaggccaaatgcagtattgcccgctggtacagtacgaagttgattgatgctgattccaataagaagtagagcaagagcttcccactcagtaacatagtgagttacaagtaatccagattgaagattatggtcatcaacattaaatgataaaacatggcaattctgaattacggagaatctccttttcattataaatttcagaagaacagcaatgaccagcacctttaggttgcttagcattttcacagttgacggattgaagtacagctgcatgataaattttaggtaattgttgatggcatacagaagggccggaaccgctagtagtgcattattacgggctgcctggatgaaggttgaacgtgccagaagtggtttttcgccaaccttttgctttctagactggattattagcatcacgatagcaaagacaacttttgtaacctccgtcaaaaagttaacgctgatgggactgaactgaaacttcccatcaacctttgacatgaacactaggatgggctggaggccgacaaggatgcagtccccgacgacgagcaggacgttgagcgcgcggaacttggacgatatcttgctgcggtgcttgtcgtacgccctggacacgctccgcgggctcggcaccaccagccgcgaccggcacacgctgcattccaccaccccgttccgctgcatcttccttccccgaccacctctccgcagcacctcacgccgccgccgccgacgacgaggtttgcctccctcccactacccgcgggccgcggcgaccgagtcccgaggatcacggactcacctaagcatacctacggcagcagcagcagcaacaacaccaccaccattccagatctgggggatctggcgtgacgcctcgggga

SEQ ID NO: 64702 - DNA, 266 bp, Oryza sativa
  Clone ID: PAT_MRT4530_65820C.1
aacaaaaaacccacggaccccaaaggttttcattgtttgatagcgtttccatagaaccggcgccccgatttaagttttaaacccacccccaagagggatcggagacccacctcccccgaatggacccaagaactccgcctaatccaaccaaaccttgggggatcttttttaaccaacacgacaggaacttataaaaagattaacccccccccccccttttttttttttggggcctccgcgacttaagaaaactgtttctggcaaaa

SEQ ID NO: 64703 - DNA, 618 bp, Oryza sativa
  unsure (1)..(618): unsure at all n locations
  Clone ID: PAT_MRT4530_65821C.1
atggctgaaggcggcgggaaggcactcctcgaggaggaccttgtaggacgctcctcgaggagtgtggctcaagcttgctcaggggacatccgtggaggcggtgactcgtccaacattatggtctggtacatcgaagcttggggcggcagctcgtcgaagctttggggtgatgaagcacggatttacccgatgggtaacgggtggcagggaggcagcaccgatcactggtcttcagtgtcgaggtcgcactgctctaatggttgttgcaccacccaaaagccaagttcccgccgtgtcttgccccctcccaatccaagctcatccagccaatatctcttaggcatccccatcgccgcgagtagatgcatggccaccaacgaagaagcaaggaggagatggtggagaggccgccagccggccggcgctaataggagcagaataaggagggctctcggagctagccttttggcacgtagggtctattttataggtctctttgtcaccaacccatctacttctnccctggtccaggggcgaggagtcagtgttagtgtcatcaatgctcagacctgggacatggtgaaaggtcactggcaactaggaaaatatcattcctaa

SEQ ID NO: 64704 - DNA, 200 bp, Oryza sativa
  Clone ID: PAT_MRT4530_65822C.1
atattctaacatgcatcctaactggccaaattaccagcttgtgacattgcattgataagtagcactagcagtgctaatcctgaaaaggcctctgccattcagacagcagcatgccctacgctacaaatgcagaacagcacaaacctgtataatccataagatcgggtactacctccctgctttagatggctgccttacat

SEQ ID NO: 64705 - DNA, 555 bp, Oryza sativa
  Clone ID: PAT_MRT4530_65823C.1
atatttattttttttttttttttttttttttttttttttttttttttttttttttttttttttatctttttttttttttttttttcatttttttttttttttttgtacaccaccgggggcgacctgggcggcggcaaagtccacaaagaggggagtcaaaagaaaacgggggtaaaaaaaaaccctttatccaaccattgcatgtggctcctggggccgcaccgacaagggggggaaaataaagaacagaaccctgggctgaaaactgcctgcacaaggcgcaaaaaaaaaccctgggggggaccaccccggttgaccaaagggcgacgacagaagaaaaagaccccgtttttatgcggggggactggaccgagggaatgaggaagccctggggggccccggggggaaacaaaaataaggggtgtttctatccaaccgctactgaatctgtgcggagaccacaaactgtatcttgaacagggagcttgaggcaaaaaagatcgtgcaagagcttttgccccaaaacccccgattcaagaaccagatgctgtactg

SEQ ID NO: 64706 - DNA, 190 bp, Oryza sativa
  Clone ID: PAT_MRT4530_65824C.1
ggaaaagagggtgaaacagcaaaaaaatcaaacaaaaagaaaaaatattccccatctgtgaaattcgcaaaaccctagcgcggcgcgatgtcgaacacgagggtgttcttcgacatgaccgtcggcggagtccggcgggcgatcgtgatggagctgtactcgaaggacgtgccgcggacgcgagaacttc

SEQ ID NO: 64707 - DNA, 621 bp, Oryza sativa
  unsure (1)..(621): unsure at all n locations
  Clone ID: PAT_MRT4530_65825C.1
cccacgcgtccgcccacgcgtccggccccggcggcggcggcggcggcggggctgaacgcgacgacggcncnngcgacgtcggggcaggaccaggtgatacaggccacgctgcggtcgatgaagagccccgttcgcctcctcgacatctcggcgctgtcggcgctgcgcaaggacgcgcacccgtcggtgtacagcggcgacctctcgccggcgcagcgcgccaaccccggcggcggctcggcggactgcagccactggtgcctccccggcctgccggacacgtggaaccagctcttctatgcgcttctcttctaccaatagctgtagcctgtaggcagttaatttcgtttttttttatatcgctcggtgtaacaatcttcagagtgaaggtgaggaggcgtggtgacagtaggcacacatggatgagactctgagaagaatcaagaatgtacattgattgatcatgcgctgccaaattgcagttgcagtgtacacggttgtactatgatctgtctgtgatctgtcgctaaatactctgataattgtgactctggtacccacatctaaacatctttgataaaaaaaaaaaaaaaaaaaactcgagactagttctctctctcc

SEQ ID NO: 64708 - DNA, 1424 bp, Oryza sativa
  Clone ID: PAT_MRT4530_65826C.1
atggagcaaactttggacgtacctagatcgttgagactactggcgccaaaagctcaacaacaaatggatgaattttggagggatcgacaaaaggagattgaaacaacaaaggactttagcgagcatgcgatccctatggcccgcttgaagaagatcgtatcttctcaaaagggtaacatgatgatgacctttgacatgccagcattcttatcgaagatgtgtgagctcttcgtacaagaacttgctgtgcgtgcatgggcatctgctcaatcccataatcgttgcatcatactagacacggatattgctaaagccattgcctccacagagtcttatgactttcttgttgatatcctccataatcatcgtgtgaaacacaaatccactccttgttctacacttactacaaagcgttgtaggttagtcgatcaaccttccacatctcacatgccctaccaacatcagctgccacaatttgctcctacatatactccggccatccctattactcctagtttaatgccaccaatttctcactatataccgttccaatatccatccttatcacaagaagtgtccccgatgatggcttctgcacccatagtgaatagatcaatgttgctcattcacaacatagcaaggggtctaggcttacaaggaaacaatatcagcacgttcgccaacaataatatcccagacaatattgttggttgtagtagccccacagttcttgcaagtatgatgagtcctgctttactagaagttgcagggacatcactaaatccaccaaactctcattccatctgcacaatgaacatgatcaactcgagtgatcctagtggatctagtattggtgacattaatgttgcaaatcaagcaagtcttgctccctctggacgttttaaccctgctatccttcgagagtcatcatgtccttcgttcttatatagtaacaatgacacaattgttgctataccggagggtgtagatattagtggcaccatggatgttgctagtgatgttgctgctatagttatcaatggtcaagaagaacatgagagggaaacaaatgttgagcatcatcagcaaaatgagatatatgaaagcattgatataggaataatcaatgcaagtgttgcggatgataataaatatagtattagctgggatgaattgggaatggctgatgattcattgctagacaaatttttggaggagtttcaagtaagaaatgacggtgttttgcgcactgggattgagttgcatgaagacccattccttggtgacgtgatgttagcaaacccaagtacaagcaatgccaataagtaatttagttggcaagttttgtttatatctcttttgtaagaatgaggttgtaactttttcttgttgaatataatgttgtttgtttgcagaggcggacc

SEQ ID NO: 64709 - DNA, 956 bp, Oryza sativa
  Clone ID: PAT_MRT4530_65827C.1
ccggccgggctcgcccgccctaccaacatcagctgccactgtttgctcctacatatactccagccatccctattactcctagtttaatgccaccaatttctcactatataccgttccaatatccatccttatcacaagaagtgtccacgatgatggcttccgcacccatagtgaatagatcaatgttgctcattcacaacatagcaaggggtctaggcttacaaggaaacaatatcagcacattcgccaacaataatatcccagacaatattattggttgtagtagccccgcggttcttgcaagtatgatgagtcctgctttactagacgttgcaggggcatcactaaatccgccaaactctcactccatctgcacgatgaacatgatcaactcgagtgatcccagtggatctagcattggtgacattaatgttgcaaatcaagcaagtcttgctccctctgaacattttaaccctgctatccttcaagagtcctcatgtccttcgttcttatataataacaacaatgacacgattgttgttgtaccggagggtgtagatattagtggcaccatggatgttgctggtttagttatcaatggtcaagaagaagaacatgagaggaaaacaaatgttgagcaaaatgagatatatgaaagcattgatataggaataatcaatgcaagtgttgcggatggtaataaatgcagtattaggtgggatgaattaggaacggccgatgattcattgctagataaatttttggaggagtttcagcaagaaacgacggtgttttgcacagcgggattgtgttgcatgaagaccattcctaggtgacgtgattttagcaaacccaagtagtagcaatgccaatataagtaattgagttggcaagttttgtttatgtcttttgtaagaatgaggttgtaactctttttcttgttgaatataatggtg

SEQ ID NO: 64710 - DNA, 397 bp, Oryza sativa
  Clone ID: PAT_MRT4530_65828C.1
tttggtgtttttttttttttgggtgtttttttttttttttttttttttttttttttttttttggggaggcgggcctcgttgcttatcgtccctaaattaaatgggggttccggcttaacccctgaaacctccctcgttttaaaaaccgattccaaacccctgggtgttcacttcaccccccccacaagctggggggggagcctcttctgaaacaaaaccacccgcggggaactttatttttttgaaaaagggggaatcttaacccgggaaaactcatcatcatggccaattgctttatcaaccccttccagcccttatcccccaacaatgggtggtcaaactcctttgaattaacccgttgctcccgaaggagccccgggcttttatggcccccccc

SEQ ID NO: 64711 - DNA, 571 bp, Oryza sativa
  Clone ID: PAT_MRT4530_65829C.1
gtctcttcgttcgttcgtcgtcagtggcgattccccctccctccggccgccaaaggtcagtgacgatttccctcccttctctccctctcctccgccatcgtccccgccgacgatccgtgcacgccacggcccaacacatacggccaaaccctagcaatgccaatgcaaactctcgacaaaaccaatgctgtgaaagctgttcattctgaagataatggtgaaagaacagatatatcagagtcatcagatgcagttgagtgggacccatgggaccccccggatcctcctcgtcctccttttccacccacagcagactttacgagcaaggttcaagatcaaacagtatggatttcaagtacgggctgcacttgctgcctccaggtccacaaatataattgccccagaccgtactcctcaggaggtgctctttaaattttgtcaaatatccagtgaactgggtctcatccttaaaagagatagtgttcggagcttcctcagactgtatggggaaaatttggattgcatggcttggggtttgatcatcacccctcaaacattcgacttcattgtt

SEQ ID NO: 64712 - DNA, 408 bp, Oryza sativa
  Clone ID: PAT_MRT4530_6582C.1
aaaaaaaaaacccctcaataaaaaaattttaaaagggcttttgcaaagaaaaaaaatattacccctccattatggacttattttaaaaaaagtgtttttaaacttttttttaatttttaaaaaccaactccaaaaattttaaaccccctttttttttgcaaaaaaaaaattcattatccatgaattccttctaaaatggggtaaaacccatttaaaattataccttcattgacgggaattgttttaccaataatttaagttgaaccaggcatacaaaggaaggcaactaaccatgaaatttttttttgttctccaacacccctaaaaagagtccggtttttaaaaaaacccttaaaatttttgtttgccaaaatttttttttaaaacgaaattaaaaattaccctggg

SEQ ID NO: 64713 - DNA, 357 bp, Oryza sativa
  Clone ID: PAT_MRT4530_65830C.1
atggcggcgggggcgacttggaagaagcaaggtatgtctacaatgtatcatcagcagccggtactcgtaggtatcatgcctgatacctatggtatcgcggaccggtaccccgtatcatgcctggtatcaggcctgatacctgtaggtatcaggcttggtacctgggtttcatggttaggtgttagacctggtactcgtaggtatcagacctgctacctgattagcgacttaactttcaccgagaggtggatagcaattggtagtgaccggtggatggcggcagcgatggcgaggcgaagtccgccagaggacgaggactacaatggaggcggccaagccaccgagttcgacgactag

SEQ ID NO: 64714 - DNA, 155 bp, Oryza sativa
  Clone ID: PAT_MRT4530_65831C.1
cccacgcgtacgatcaccgatctagcagtagtagtggtagtagttaacagcgtcagcatagcaaggggttgtgagaatggccttgacgtcagagcctggaccgaagctgtagatggcttattgttgcaatggcccagagcgagttcagccaccac

SEQ ID NO: 64715 - DNA, 667 bp, Oryza sativa
  unsure (1)..(667): unsure at all n locations
  Clone ID: PAT_MRT4530_65832C.1
agatgctttcttccatgattgtgacattccatatattcagctcctaaatggctaaattcgttagaaatcgggttgaatgatccttcacaaaatgattgggttccttcatacaatttacatgatcactgagagtatcttaataaatatcctacttgttagttactcattaacttggttaatgttcactagctaatcaaacctttctatttattattgttttttattttttgattattagtggttagtctgcagatctagtactagtatatatgcaaaacctcttttgcaactgttggtggacagccttgtttggtctaattaggtggaattcacagctattctttgatagtgcatttcataattagctacagtcacaaatattggaccagtagaggatctgaaatcgagtgatgcttctgatttggatgagtagtcattgtctgcatgaggtgctcaaacatcttctgtttggtttgttgaggcttaatgtaccacaaaggatgtagaacctttgattcaatagttccacatgttattgcctccttaattggtccacaggaatatatagagaatgtttcactgtgcttcatgantaagcccaaaatgacattnntgattcacacacatgttcaattcagtaagttttcacttgaaatattaccccctt

SEQ ID NO: 64716 - DNA, 133 bp, Oryza sativa
  Clone ID: PAT_MRT4530_65833C.1
ccaccatcttccagcatcatcccgcctgcgcctgccacctgacgacgagcctggcaaacaatggtgtgtgttggctcaccgagttcccttggccggtgccaaagatttgtcaacaaggagctgaacaatggcg

SEQ ID NO: 64717 - DNA, 246 bp, Oryza sativa
  Clone ID: PAT_MRT4530_65834C.1
atggcttttgtcacaaggaagagaccattcaacatttgttttttcaatgtcgtgtttctcgcttgcatctctttgttggtccatatggctaagcagaaacgaggttactactttagtcacccggtggctacgctcctgggccatcctccacaaacagggacttcgggatactattgcggtggtatcgcaacgtttggattaggtggcacaggagttttttacccaggagcatgggtggcgatctag

SEQ ID NO: 64718 - DNA, 227 bp, Oryza sativa
  unsure (1)..(227): unsure at all n locations
  Clone ID: PAT_MRT4530_65835C.1
acaacaccaatcagcttgaaacccaggcaaaaggagttcctattanccggcaacaacaatcnnnctcagcaacaacaagtatatggtnnctcaattgacaacactctgagcaaaacatattcancggattccgggcttgcagatgctagtgagtctttaggcatcaatcagtagcagcaaagagnctacagagcaaaatgatcaagaggagagatcatactgtgaag

SEQ ID NO: 64719 - DNA, 198 bp, Oryza sativa
  Clone ID: PAT_MRT4530_65836C.1
cccctacaacgaggacaagaagccgaaggctggcaatctgtggaccggggccttccagtccatggacgccgcaattgcttagcggcttccggaccggcccgaggttactcctcatatactcgaaaggatcgaacgggggacccctcggaaaaaggttattggggtgaaccttttgggctctagagaagttttttttaa

SEQ ID NO: 64720 - DNA, 480 bp, Oryza sativa
  Clone ID: PAT_MRT4530_65837C.1
atggggccggctggaagagccacgctcgtcaagtcagtcttaacggcccaaccaatctacctcctcaccgcccttagagtttcaaaggaagctcttgggcaactggacaagcaacgacgccgctttctctgggccggcacaggtgacatcacaggaggaaagtgcaagatcaattggacaaaaacgtgcatgccgacttgtcatggaggtctcggggtacttaatttggaaaagttcacgagggcactacgtttacggtggctatggcatgaatggaaggacccaagcaaaccttgggcgggcctagaaacgtcgtgcgatgaagtagacaaggttctcttcgctgcgtcaacaaagataaccgttggagacggaaacacaacacgcttttggtattccgcgtggatagatgggcgcagaccaaaggacctcatgccactggtctatgcaatctcgaagaaaaaaggcaagtccctatga

SEQ ID NO: 64721 - DNA, 1134 bp, Oryza sativa
  Clone ID: PAT_MRT4530_65838C.1
atggattacttcactaagtgggccgaagccgtgccgctcgagaatattacttgtacggagcaagacgacttgtcagttaaagattacaagaccttgatgggagacaattttgaagatgtcatcgacaagcgtttgaagactttgaaagagatggagacacttcaagatgaagtcccgtggccggtaattggattatcgtcctcagacaacatgttctatgcttttagattcacgatgttcattataaagggccggtcagaccacgggtgtgtgggtggtctgaccggtctagtagggccggtcagaccgccagggttcgagtccaaggagtcgatctcagccgtccaggagaaccttggatcaaatggtgccgcggaagtcttggacgtccgccacacaatcgacatgatgcacctcactaagaacctttgcgtaaacctgctggaattcctaggtgtatatgggaagtcaaaagatacaatggaagcacgtaatgatctgaagcatatggaacaacacgacgaccttcccttggaaccaaaggagaaacgaagccattacttgagtccagccagctacactcttagcaaggcacagaaggaaaatatgtttgaatgcttggagaacatcaaggaggaacatatcagatcggtggcagcaggaaccaaacacacagcagcaagaactcaccgggaagaagaaaaacagaaagggatcaccgtggtgacggatgacgatggttgcggtgaccggctgcagcggcggcgtagaagcggcgccggcgacagggagagcagcagcggcgacacgggcacaggaacagtgccggctagggctatggctagggctagggctaactccgattactataaacttatagtctattttgcactactcggcgagctctacgcattcacggacatgtctagcaaaggaaagaaggggaaagggcccgacgagccgaagcgccacgtggttctcctaggcaaaagaaaaatcgtcggagtcgaggataagactgacgaggattatgatcaatttgacgggcaacctccgttcgcggtgacggttgaccctagcatcctcctatcaaatgaaaacaccccttactcacgcagcgataataaggaatga

SEQ ID NO: 64722 - DNA, 1042 bp, Oryza sativa
  Clone ID: PAT_MRT4530_65839C.1
atggggctcgggctcgggcccaggcgtggggttttggcgccgaacgccgcggcggaggaggcagaggcagatgtggccgttgccatcctgcccacgccgctgccgatggtggcattgttgccgccggcgagagctaatgatgacggcgccgccggccgatgggtggggaggaagccggtgacggggaagcaaggcaacctcctctctgtgctcgccgacgaggaggagcggcgggcgaccgcggcggcggagctggagccacacgcgcggcaggcggaggtcagtgagctccttccaagtccaaatacggcgatgaggcgggaggaacgcggcgagaatagctggaagcggcggcgagcgccggccggtcgccggcggaggagttggtgtggagagggcggggagatggttgtccggatcaggctggcgcggttcggctgccggaacaggcccttctaccggctcatggccgccgacagccgctccccgcgcgacggcaagcacctcgaggtcctcggctactacgacccgctccccgggaaggatggtggcaagagaatggggttaaaattcgaccgggtgaagtattggctatcagttggtgcacagccatcggatcctgtgcagcgcatcctttttcgagctggaattctacctccacctccaatgctagctatggcccacaagggtgggcctcgcgacagacgtcctattgatcccatgactgggcgccccttagaccttgagggtgtcacagttgttgatgattctcatactcccaagagtggtgatggagcacctaacgaggagacagcatagatgaggcatgatgatatatctgttttagcatattgtgtggttttgcaagattaaaaagtactgtttgtggcctttctgatgggtgtttgagcctgtgactagtatgttgtgacctttcttgctgaccggctttattgatctatgctcctgtcatctattctcaggaacacgaacctggaaacatgagttgttctttttgataaaatttgtatgttgtgttccc

SEQ ID NO: 64723 - DNA, 821 bp, Oryza sativa
  Clone ID: PAT_MRT4530_6583C.1
atgggtgagtgcagctacaacagcatgagcccatcgacgccgctgccgccgccgccatcggcggcggcggcgaagaagggctcgccggaggcggcggcggcgcacaaggagaggcccaagataaggatcatccacatcattgcgccagagatcatcaagaccgacgtcgccaacttccgggacctcgtgcagcgcctcaccggcaagcagcagcagcagcagcaagaatcggcagaaacgacgttgccgccgccatcgccggtggcggtgctcgacgaaaagaaggagaaggtcaccaccaagaagaggccggcgccggcggaggacgagagcatgatgaggaagaagaagaagaagaagatcaagtgcgaggtgaaggtggaggaaggccatggatttggctacgatcatcccgatcacaccgacctgtggatggatctgaatccgggagggttcttgagcttcttggaggaggaggacgtgttccaaggcatggctgccgacctgttccaatcgcctcttggttcatcgaggatggatttcgttggtgaaatgtacgcatcttaattagtatttgggattagaaggttcaatttccttttgggtttactttgtgagaatttttccattttggttgagaggtttggatggtcttccaaaaagaaaaagagagagagagagagagagagaaggggataaacacaatggtgatgatggttaagtaagtattgcacccatggttgcaataattggtgatgtgtatgcaagggttattgctgggatatttatagaaggaatgatcaaatttgggtgtttaaaaa

SEQ ID NO: 64724 - DNA, 684 bp, Oryza sativa
  unsure (1)..(684): unsure at all n locations
  Clone ID: PAT_MRT4530_65840C.1
tttggtttnatnccctggntgtgtgctaattgctgtgggttaangtctntttggtgaatgggacccctgagttaccgggttacttttccttggaatgatattttatgtatactccctcagggtggtgtgtctgcgttctgggcggccccccttgccccccgtccgctccttcctgccaacttttgttcccgcccctctcggtcggtcctcccggccccgtccccccgtccccctgcgggccatcgctaccagtgggcatccccggtacctcgggggttccccccgggtggccctcgtgcctcgtgtcctgggccagctccgggcccgcccacctcgcccgtgcccgcgcccccggctcttgtggaggcccaccccagtagtgtggcgttagcaccaccacggaatatgaaccccttgagatgttgttgggaccctcggttgaagtggaataaaccacggaagaagaggctgtagtaaaatgggaacccccgttgtgttcggttggaagttgtggtaaatggtgaaccctgtgattggtaccacgccggcttgggtggttgggtcgtccatagatgagagattctatattccaattattgataaaggctctcccattttgcgaccccaaaaaaaaaaaaaaaaaaaaaaaataaacccccccctaaaaaaaaaaaaaaaaaaaaa

SEQ ID NO: 64725 - DNA, 180 bp, Oryza sativa
  Clone ID: PAT_MRT4530_65841C.1
cataaagaggtgtaacatttttagcataatacactgatgcgatttcaccagattattggacacgatcgagatgtatcctacgtgtcaagccacgtagacacgcagcttacatgtgtaataaaggttttataagatagtaacatgcattatgcatgacgacgacgccgccggacgcgtggg

SEQ ID NO: 64726 - DNA, 429 bp, Oryza sativa
  Clone ID: PAT_MRT4530_65842C.1
atgtccaatgccgggagggctttcagtctcagggcgcacggcgacgcggcgtgtctgccaatcgcgtggacctccagggagccacgcatgaaaaaatggccgtcggccaccggctccggccgcccgcgcgtccctccctttcttaccgtccaaaccaatcgctcccttcttcctcctcctcgtccgtcaagtcgcgagcagacgacgacgatgaacgagatgcgagaagccgccgggaaatttacaggggaaaaaaatcgtgagaagaagaagaacaggcgacagaggagggaggaggaagacggagaggagggcagcaatggcgatgggaagcagagtcggggtccaaatagaggctttatcttttccgttcttcccgttttgccccccgccacgggtggcaattcaccgttctgccaccgcttctga

SEQ ID NO: 64727 - DNA, 477 bp, Oryza sativa
  Clone ID: PAT_MRT4530_65843C.1
atggcggcgccgttcgtccgccgcccgaccgatgacggcaccagcggcaccagagaagatattataaagagccttgatatggggaaaggaaaggcccgagatgcagtcttagctcgtaaaaaggatgggattgggttgctgcatgccgcagcatgccagggccatctgactgtttgcaagttcttgatggaggaattggggggatttatagctcatctcattcacgctcaggatgctgctggtgctgatgttaataacaagggtacaggtataactcccttaatgtttgccgcgttgcaagggtgttatacttacttcatcaagattctcctggagactggagcaatccctaatattcccaatgttttgggttggttgccagtagagcatgttgcatcatgtgattgcagggaaggagttgaaatgctatttccattcacatccccaaattccaaatgtcccaaactggagtgttga

SEQ ID NO: 64728 - DNA, 2097 bp, Oryza sativa
  Clone ID: PAT_MRT4530_65844C.1
gagggctcgctgtctcatcactctgtaaccgataaggctgccgccattgctgctgctgctgctggtgcttccgccgcgtcgccttctccggcgatggaggcggcggcggcgattggaggggcgcggtccccgctctccttctcctccagcctctgcaatgcaaaagtatcctgtggtttagctcttcacaatgtgaagatcaagagcagtcgaaggcttgaggtggtttgccatggaatgttgacaaccagaaagttcatgcagaagaagaagaaagaggaggtatataaggatgctgctgatgaagcagagcagaagaattggaggatgatgatgagggagatagaagagtcaggatcagctgtctccattctgaagactcagcgaagcaagaaagaaccactgccaagggatgctgttcttggaactcttatgcggttcaaacagctcaagaaatggaacctggtcagcgagattcttgaatggctacgcacacaacattggtggaacttcagtgagatggactttttgatgcttgttacggcctatggaaaattaggagattttagcagagcggagagggtcctgaagtatatgaacaagaaaggttacaaaccaagcgtgatatctcagactgcactgatggaagcatatggaagagccaagcagtatcgtaaggctgaagcagtgtttcgcaggatgcaaacatcaggccctgagccatcagctgtgacatatcaaatcattttgaaatcttttgttgagggtgacaaatacaaggaagctgaagctatttttgaggaccttcttaatgagaaaagagcttcttttaagcctgaccagaagatgtttcatatgatgatttatatgtacaagaaagctggcgactatgcccaggctcggaaactatttgctcagatgtcagagagaggaatccctctatcaacagtcacctttaatagtttgatgtcatttgaaacaaattacaaggaagtttcaagtatttatgatcagatgcaaagaactgcgctaaaaccagatgttgtgagctactccctgctcatcaaagcttatggaaaagctagaagggaagaagaagcattagcagtttttgaagagatgcttgatgcaggagtcaggccaacacgcaagtcgtataacattttgattgatgcatttgcaatatctggattggtagaagaagctcatacagttttcaaggccatgagaagacacagggttgagcctgatctctgttcttacacaacaatggtcttagcttatgtgaatgcttctgacatggatggggctgagaaattcttccgccggattaaagaggacggtttgaagccaaatgttgttgtttatggaactttgatgaagggctactcgaaattaaataatgttgagagagtaatgagagtgtacgagagaatgcggatgcagggtgttgaacccaatcagactatttatactaccatcatggatgtgcatggaaggaactctgattttggaaatgctgtcatctggttcaaagaaatggaggctcgtgggtacccagcagacaagaaagcaaagaatatccttctttctcttgccaaaactcctgaagaacaagaagaagcgaatgaattgacagggaattgtgcaattcagctggaagcaaaacccgatggaacaacatatggtttagaaataaatggtactggaaatgagtataaacatggacaaaatgatgctgggcatgacagtttgttagatggcgcatgcaccacaagtaatcgaaatggtaaagtcgaggctgggaaaggtcattttgaggaggttaatgacgatgatgatgatgatgatgacgatgattacgatgaagagttaaattttgtttctttcaaagataagcgagaactaaattttgccacttgatgttttgattaatgtatatctttatattccaaacttgtgatggcatttcctatacaaaggtatccatgctgtttgtgaaatgtcaaatatagctatttttatgataaaaaaaaaaaaaccttgtctgtttccaaggaatgaggctaaaaggtccaaaaaaaaaaaaaaaaaaaa

SEQ ID NO: 64729 - DNA, 1376 bp, Oryza sativa
  Clone ID: PAT_MRT4530_65845C.1
cccacgcgtcccagcaacacaagccaaccacaaagaattctcatttccggtaacttttctcaagcctttttggcgctctgagaatcatcacacggaagtcaagcctttgttgttgtcgtgattagtttagtttagtcaccgagatgagctcccgaatggccggagcgacgctgctgcgccacctgggcccccgcctgttcgccgccgagcctgtgtactccgggctcgccgcgagcgccaggggcgtcatgcccgccgccgcgaggattttccccgcgcggatggccagcaccagcagcgccggcgcggacgtcaaagaaggcgcagccgagaagctgccggagccggcggcaacggcggcggcggcggcgaccgacccgcagaacaagaaggccgtcgtgagctactggggcatccagccgccgaagctcgtgaaggaggacggcacggaatggaagtggctcagttttaggccatgggacacgtacacgtcggacacgtcgatcgacgtgacgaagcaccacgagccgaagggcctcccggacaagctggcgtactggacggtgaggtcgctggcggtgcccagggacctcttcttccagcggcggcacgcgagccacgcgctgctgctggagacggtggccggggtgcccgggatggtgggcggcatgctgctccacctgcgctccctccgccgcttcgagcagagcggcggctggatccgcgcgctgctggaggaggccgagaacgagcggatgcacctgatgaccttcctggaggtgatgcagccacggtggtgggagcgcgccctcgtgctcgccgcgcagggcgtcttcttcaacgcctacttcgtcggctacctcgtctcccccaagttcgcgcaccgcttcgtcggctacctcgaggaggaggccgtgagctcgtacaccgagtacctcaaggacctcgaggccggcaagatcgagaacacgccggcgccggccatcgccatcgactactggcgcctccccgccgacgccacgctcaaggacgtcgtcaccgtcatccgcgccgacgaggcgcaccaccgcgacctcaaccatttcgcatcggacatccagcaacaggggatgaagctgaaggatacgcctgcgcctatcgggtatcactgatcatcattcatcaacgggcgatgcctgctcagttcatcaccatcactgctactacatgcgtattttacatcctatttgggataaactttgttctgtgtatatatgtaaataagctattgtcactccgttttatgcctgtacctatatgcatgctgagattatgcaaattgtgaataacaatatagtaagattttttttggagtaaaaaaaaaaaaaaaaaaaaaa

SEQ ID NO: 64730 - DNA, 456 bp, Oryza sativa
  Clone ID: PAT_MRT4530_65846C.1
atggcggccggccgtgcggggtggcacgtgcctgagcacatgatgaaggtgaagctgctcaccatgttccaggatgtggccatcgtcgacaaggtcaccgtcatcaaggacaaggcctcttgtggcatggtacctaagtacccgatacctgctacccaggtatcatacactcgataccaaggtctggtctggtatcccagcagcacggcgccgctggaaaaccgccttcgccgcctcggcctcgagcgcgtcccgggcgtggtcctcctcgagctccgcgaggccggcatcgtcgcccgcgtcctctgccccgtcgctgtgggggaggagaggaggaggaggagggtgggggtggtgcgctccgccgtgcccgggatcgccgcggcggggctgcacaactacgtcgccggctgcgacgaccccaccaaactggagagcagcgaggtggaggccatc

SEQ ID NO: 64731 - DNA, 401 bp, Oryza sativa
  Clone ID: PAT_MRT4530_65847C.1
aagtgtcaatgcatgaggatcaaggcttgacgttttgtcccgactccgagctgtacttgtaaaaagatcagttgatgcaggcctacaaccttctcagggatcaagtgttcgctcatacgcgagcatacgacccggagctgcttgctaaaataggtatgaatgttgattctgctactgtgtggaaagcaatatgttgggatgatttcgcgctagtagatgactctggttcacgttttcttaccgtacgatttctctgtatgttgcgatacgtgtgggaaggtattacgttccgattcttcgggacggaatactatctcacacgaaaggatcttagtactcatatgggattcaacataagatgttttgttgatttggagtcagtgactccagatttcaataga

SEQ ID NO: 64732 - DNA, 453 bp, Oryza sativa
  unsure (1)..(453): unsure at all n locations
  Clone ID: PAT_MRT4530_65848C.1
gccacactgccccaacagacgtatgaggaaaaaatacatatacacttctagtgcatgtctgatctgccattactggctcgcatggtcatcccatataatgagggcgctcatggccgccatggcggtcatgtacgcacctcatttcaaccagttgcatatgaactgcaaaaccacgcagtgtcacagcaacgcacgctacaggcccatcaacccgactaccaggacactaaaccggtacatgacctagcgcaacaggtacaactccatgatcctgcgaccgtgcacactgaccctgatgatgctcagcctcaagcactggcgggacttaacccgccatttacatatggcctgcacccttgcgcctatagtgcactacaaggcataaccacccttgcccctgtatcgaagtgtatcntcacaatatgtgtgagtactacgggaaaaaatgagctc

SEQ ID NO: 64733 - DNA, 452 bp, Oryza sativa
  Clone ID: PAT_MRT4530_65849C.1
ccgggctgcaggctttcgtccttttacctcataggatatagagattggctcgacatagtactctacactacccaagtagcagcatgtcatttcttaaggacaacaggccaattaccctgttggaccaataaaagaattgggcttgtcatatacactctgagaaatgtaacatggtatatactaggagtgaagccattgtggattccaaacttacactgggacaaaccatctttcctgtcctataagaaagagctaagcaatatcaaggtccacctaaggcaaagtaacaaacaattcaaaaaaatcgatatgcgtcattgtcaataaaatgttgcctggtactttcttgtaataattgttgtaaggaatggcatgctgcattcacatttttttttctgggttcagtctttgttgtcagtctttattgtgtgctacaaccatgaattttcata

SEQ ID NO: 64734 - DNA, 999 bp, Oryza sativa
  Clone ID: PAT_MRT4530_6584C.1
atggccattggttcttggcgaaaaagaggacgaatgaagctgggagacgacgctgctttcgcgtcgtggagcgagtggcatcgccctccttcccatgccagccgtcgccctccagccagccgcctagcccgccgtcgctgtccgcagccgtcgagctcgttctcgtccctgccatcggagctcgccggccacaccacccccgatccgctcaacccgaagctcgccggccactccgtcgctcgattcacgccggtcggaggagagccagaggagaggggtcgccgccgtgggagccgaggtcgccggccgcgccgcccttgcagggccggaagaggaggaggaggggaggcgctcgagcctccggttgcgagtggcattggagtgagcggcgccagcggtcgtgggggacaggaagggcgtgtcgcctccgcgtcgctcggagctcgctggccgctccgaggtcgccccgtaccgccagatccgcgttgccggcctgaggaggagggcagcgcggcgacgaccatggtggcggcgacgaaactacggccgcagccatcctcgcgccgcgcccggacgagccgtcgccactggatctggcgagctgccacgccgtcgtcgagactcgtcgctgccacgccgtcttcgagactcgtccccgccatgcgagagcaggggaggccaagaagttcgccgccgtcgagcgccaagcccgccgccccgccaagaccgccgccgccgtcgcctccttgctgccgagcgagtggcctccatgccaagaccgccgccgtcgtctcctccttgccgccaccgccgtcgtccccagatccaccgacgctccgcccggccaccccagcgccgtctccgctcgccactgctccgcccggccccgtcgccgtcgaggccgccgctccgctcgaacgcctcagtgccggctccgctcgagcctggtgcctctcagtgttcctcagcatatgtggcagctcaggtccggcattttag

SEQ ID NO: 64735 - DNA, 179 bp, Oryza sativa
  Clone ID: PAT_MRT4530_65850C.1
atgacgagcacattgctatctactgccaacgagcaccatgcgccccctcttcaagctcccgcctgcgacaaaggcttgggcaggctaatcaacgagcacctcggccctcgcgctaaaccctgggatattgttctaaaaggcaagttggaagaactgaagaagaccgcagaatcaatcat

SEQ ID NO: 64736 - DNA, 249 bp, Oryza sativa
  Clone ID: PAT_MRT4530_65851C.1
atggccaccgccacctacgccgacagcgagctcgtcgtcaccgtccccaaggacgccgcccctgacgacgacggcgatggcgatggcgccgcccgcagccgtggttggaggctccgcccggcacagcccatcgtgcttcgtgccaaaatgggccgtgctcgtcgtgccgtaccgtgccagcacggcccagaacatgtggagccgggagcagctcgcgcggaccgcgccgcgaaggcacgccggggatga

SEQ ID NO: 64737 - DNA, 717 bp, Oryza sativa
  Clone ID: PAT_MRT4530_65852C.1
atgggtggccaaggtggactcccgctgatcttgcaggcgcactcgctcctccagctcccgggcccgctgcgcctgttcttcaccgcgcgcattttgctcgcgctggtttcgatcgaggacctagatccgccgacggattgtggcttcgaactcctgtgcggagcgggcacgatcatccaaggccctgcgttcagcctcgagtgccgtcgtccaggcccgcagcgaggcgtcggcctccgatgcccgccgcccgtgggcagcggctgcgtcgaggatgccgcgtgcgtccctgatcctcttcgccaagtcctcggcgtgagcctcgtactgaaggtggatatcgcccagcgcttcatccaggacgctcgaggcgatcagcgccgcctgccgctcctcctccgcctcccgcatgacggagtccagtgcctcctcgcgcgcctagattttgaagtggctccatactcgtcggagtcggggaggaaaaggccgtggtccgtccccgggacgacgggcctcggcctcggcctcgggctcgggaccgtccccggcctcggcctcggcctcaggctcgggaccacctccggcttcggctcccaggccgcgacctccctcaccccccgatccagggtggtgctccgcgtggaccctggtcccggagccgcccccgggaggagcgtcgccacccctgtcgcccgcagcaggacgggtcccgcctga

SEQ ID NO: 64738 - DNA, 534 bp, Oryza sativa
  Clone ID: PAT_MRT4530_65853C.1
atcaaggccgtcctcctcaacgaccaagaaaagtcggaggcgacgttgctcgagctgctccggcttctgcaacagctggagttcacggtggacaccttgacggttactgagattgggattcatgtagccgtaagaaactataaaaccagccatctccttgcttagcacaacatattgcttttctcctaagcataggtggcctaaagatgtagcttgccatccagatggttaattaatttttgctgtgtacagtgctgataacggcgactctcaagtttcagtgatgaatcgtagcatatcaggacaaaaggctagcatgattggtaggaaggaaagaaaaaagggagtgcaggctagaatgctagattattcagtactaatgtttaaacatcaccacccagtcttctctggggtgtacatgtggtcgtcagattgctcatcacattattatagttccatgatacatgccggttatctttgttgttatagtgagtgtaaaggtgtgcaaacgggaaatgagaagcgctgtcagca

SEQ ID NO: 64739 - DNA, 256 bp, Oryza sativa
  Clone ID: PAT_MRT4530_65854C.1
ttcgaaaccagtcatcaagcaagtcatgaaatcatgtacatacgcatctgaggttataaagtcaatacaacctacgggaaaaacataacttttcattcttagctagataaccccaattttacattccctcatttaaatctgtaagagagagaagaaaattaaaaagtcttaacatttcatataccaaccctatgctgactatttggcatattgaaaagattcttccgttgatgagggagtaaaggttttttttttt

SEQ ID NO: 64740 - DNA, 2121 bp, Oryza sativa
  Clone ID: PAT_MRT4530_65855C.1
ctagtcgtcatcgccgtcgtcacccccgcttccgttttcctcgtccgcggtaagcccggaggtgaaccggggggccgacccctcgaagcttgagacaatcgcgttagccgcctcccggacttgctcccgggcccttgcctcggtacccgggggaaaatcctcgagcgcatgccacggcatgaattcggggtcgcgcgcttggtggctcgcgaggaccagctccaccgcagcccgtgccaaagaaactgacgaagactttatggtctcgccgacctcctcctccagcctttccaggtccaccgccagcccgtccagccgaagcgcgagtgctggctgtgtgggcgggagtttgctgtcccgacgcacagagatgccgactcggcgccccgcgtgctccagccagtcgacggtgtcggagagttgcccgggcccgagctcgttggtgaggcggagggccgcaatttccccagcctgatcctgcaccaggcgttccaagtcggcgagggtactctgagccatggcgagctggctcgccaaacccgcgccgccgggcggcccgcctgctaccaagtccttctcccgggcctccagctcggagaccttcgctgatattgccgcacgctcagcgcgggcgctctccagatgacgagcctcgcgcccggcaacggcctcctctcgtttcgcgagttgctcgcctagccggcgcaaggctacctcgcggcgattcacctcggcttcgcgctcggcgagtgcggcatcccgttcccggcatgcctcttcccgcagccgtagctcttccgcgcggcggtccgcggaagctttcgcggcgagggtgatccggtcacgctcggccgcggcttcttcacggaggcgaagggaagcctccacctctgccgccgtttcctccagctcccgggcccgccgtgcctgttcttcaccgcacgcgttttgctcgcgctggtttcgatcgaggacctcgatccgccgacggattgtggcttcaaactcctgtgcagagcgggcacgatcatccaaggccctgcgttcagcctcgagtgccatcgtccgcgcccgcagcgaggcgtcggcctccgatgcccgccgctcgtgggcagcggctgcgtcgaggatgccgcgcgcgtccctaatcctcttcgccaagtcctcggcgtgagcctcgtactgaaggcggatatcgccccgcgcttcatccaggacgctcgaggcgatcagcgccgcctgccgctcctcctccgcctcccgcatgacggagtccagtgcctcctcgcgcgccatgtcgtccacggcgcgacgcccctcgtcgactcgcgcgcggtccgcggcgagctgttcccactctgcatccagggccgcccgctcttccgctagggcttgaacttgggtgttcaacccctctcgtacagtgtagtcggcggcggcgagcacctgcagaagtggctccatactcgccggagttggggaggaaaaggccgcggtccgcccccgggacgacggggtactgctggatcccccgcgagactgggggctgctctcggccccccttctgcgagaccagcctcgagggcgccccaagcgcaagggggaacggctgtccctctcaccccccgcttcgggtcctcgggtggattcagcctcggcctcgggctcgggctcgggaccgcccccggcctcagcctcggcctcagcctcgggaccgcccccagcctcaacctcaagctcgggaccacctccggcttcggctcccaggccgcgacctccctcatcccccgatccttggtggtgctccgcgtggaccctggtcccggagccgcccccgggaggagcgtcgccacccctgccacccacagtaggacgggtcccgcctgagggtcgctcgggatcgggcccagtgcgtgtcctctgggtcccgccacgaggctgcgaaaaccccggccttggtttggccgggctcggactgccccaaccgttcagatttcgtcccttgcggggggtctgaccctgagattccctgagaaggaatctcgctacaagagaacctacggggagggcggttgaaggtccactttgggggctcgatgaaaccccccccccccccggcat

SEQ ID NO: 64741 - DNA, 149 bp, Oryza sativa
  unsure (1)..(149): unsure at all n locations
  Clone ID: PAT_MRT4530_65856C.1
catttcatatggaaatggagtnataatgntccagctactacngtagnctncccatgtaattaanatttgcatatgcatggatgtttgcnctggccagacaaagttctttgggataanacttgtgntttncnnnngnnnnnnaaaaaaaa

SEQ ID NO: 64742 - DNA, 327 bp, Oryza sativa
  Clone ID: PAT_MRT4530_65857C.1
atgtcaaccccttcctctcctcccatcttcttcgtgcgccgcatcgtttgcgctgatgacgcccttgttgcggtgctgttgccgcgctgcttccgctggatagtggcctacgccccggcccctccttgctcggcgcgttgctgctgccacactcattgcgccattgcggccaccggcctctgccccccatccttatcgggctactgttgttgccgcacttttgtcgcgctgctgctagcctcggcctccatccctgcagtgatggaggctcgggaccggggcgtggtggcctgggagttcgaggaggaccacagaggagctcgatga

SEQ ID NO: 64743 - DNA, 447 bp, Oryza sativa
  unsure (1)..(447): unsure at all n locations
  Clone ID: PAT_MRT4530_65858C.1
ttgtttttttttaaattatttttttttttttttttttttttttttttttttttattttttttttttttttttttttttttttttttttncaactttcacacattataatttttaactttttttttaacattccatttttttttttnggacgtgttgttcccccacccctttaacagtttttttttttccgggaccccttttggaggnaggggaaataccaaatttggttttcaagttgaaggtcaacaaaatttgggttttaattttaattttatcaaagtaaaccccccttaattttttcanttttagcttttgcaaaatccttttaacaattcttatttttttttaagaaaatttttttccttccacccttaacttttggcaaaactttttcttcataacttggttttttattaattgaaacctantttttttccaaaaaggggt

SEQ ID NO: 64744 - DNA, 541 bp, Oryza sativa
  unsure (1)..(541): unsure at all n locations
  Clone ID: PAT_MRT4530_65859C.1
attgacgccgacgtcgctcccagttcgtgctcccctcggcggcgccgacgccgcctcggctcttcggagatcttctgtgaccttccgtcaacatgatagaaaacacgcggtatgggagctgggggaatgctcaagacccaccggaggaaccaaagatggtcagacaaggcctactagaaaagacacttgggtaatgagtgtaacaaagcctttgttgcgtcatctcatgccaagggcatcgctctggagaagatcgttattgaggccaaatagcccaactctgccatctgtaagtgtgctcgtgtgcagcttgtgcagaatgcgaagaagattgctgcctttgtgtccgatgacggatgcctgaacttcattgaggaacatgatgaggtggtgattgatggatttgatcgcaagggccatgctgtgacagatattcctggcgtccgattcaaggtggncaaggcctctggtgtgtctctccttgctctcttcaaggagaacaaggagaagacaacgtcttagattactggtacatcttggc

SEQ ID NO: 64745 - DNA, 503 bp, Oryza sativa
  Clone ID: PAT_MRT4530_6585C.1
cgttccgcggaccccgtgggccggaccccgtgggccggaccccgtgggccgggcctaccccatttcgttccgaccccaggaatttcttcccaagggccgggaattgggcgggttggggtcggccggcccccgccggcccgaaaatggcttttggcggccaaccccggattttccgcggcggccggcggcccaaggtattccggttccggaagcaccattccggttttttccgcaagtggcttaaggccgggcctgaacccccggaattcaatggtgggcttggcccggccaatggccgtggcccccattggttgaaggacctgatgccaaattggccaaaccaggtccaaaccacaacagccagcagcagcagcaggacaccaccgcaacgccaccacagggggattatgtcgaacagggcgtggaaggatctgattctagctaagggctggaacttaacttgggactttgaaatggattatggatccaaggaccgcccttcc

SEQ ID NO: 64746 - DNA, 342 bp, Oryza sativa
  Clone ID: PAT_MRT4530_65860C.1
atggcatggagtcctcgcttttcaaactaccagagtacctctctctctccagtctctactgttccatttcacggcctggcccggtatgtttttgccgccaagggagttgggctgtacaaggatcagatcatcagagttcataggatcagacttctttccctttctttccttgttcatgttgtcaccagacaccagggtccacagcagaagcagagtgcacggattgtcatcttcacccaacgtaggctatgtactgcaactactacttcgatggcgaggtcagcagcagattccaaccatccgattaaagaacatgctcttgctgacgaaaatggaagctaa

SEQ ID NO: 64747 - DNA, 369 bp, Oryza sativa
  Clone ID: PAT_MRT4530_65861C.1
gaatgcaatgatgagattgttgtaaccagtgattttatgaacagtaatctgttttttgtctagtttcgatgctaatcctcttcctttctggaaaccagaaggactcgcagtaaattggaaattgtaacactacgagcagttgcaccatcgaaaccaatcgacagggcagtcgcacctgtgccgtagtcgcggagtcgagaggactccgtgacttgctcgcttcgtcgcaagcccattggttgcaccacaaaacgaaactgccgacaagaacaattgggtcatccaccacgacctcactgaaggaacccttaattaagccccacttagactgaagacagacttcacatgcgggttgaaatgacctattca

SEQ ID NO: 64748 - DNA, 280 bp, Oryza sativa
  Clone ID: PAT_MRT4530_65862C.1
ggtttggtggtctctactttgatcggaatctggctcaagctcaagctctatgggcttttaacgtcccatctagatatgggtatctacccctaggtactatggtccacccagtaccattgaccaccccttgccgtgtcttgtaatggagttttaccagtatagtgggttcggaagttaaaaataagctcagatatcatcatgatggtggacatgtgaaactttggggtgaatataaatgagaaataaagttgtgctgtgtcatgatgttaaatgaaaaaaa

SEQ ID NO: 64749 - DNA, 792 bp, Oryza sativa
  Clone ID: PAT_MRT4530_65863C.1
atggcgctaacgaccagattaatggcactcaccggcttgccgctagacatggacatggagaccaaatctgcgagtgcaattcacgcatgtgctatagatctacggaaaggtcctctctttgcaactccatctgcttcgttggtcttgcgagaactagttcatgagcaagcaaatgacctaaatgatgatgacatggatactactgaagctgggattggtgatgaaaatgaggctttcatagatgacaaaaatgaaaattatatggatttcgagtacatttgtcaccaattgctagcccaaggccaaaaacatgttataagaacacaatgtaaatctaaagaaaatcacgtaaaagagaacatcaaacaatacaaagaaaaccacgcaaaagtgacacaaataagaacatgtaacgctggtaccaggttgtacatccttgcgatggacggccttcctaaactaactgcaaaggaattaaaaagtcagcgagcccgagagcggtacacggcactcagcgttgaggagaaggctgcgctggttcaaaggaaccgtgaaaacagggagaggaagaattctgcatctacatcgggcacagaggtgagaaactccctgttcaaagaaccagtcctgcatgacgccattaagattggtgtgaactttaggaaccaagagctactgcaaccggcagaacaaaataatgctccaggagaaccagaagtggtgatagttgaagatgatgaagtggtgattgagccattgccaaaaaagaagcgcactggcgacaagggataa

SEQ ID NO: 64750 - DNA, 459 bp, Oryza sativa
  Clone ID: PAT_MRT4530_65864C.1
atggacggcctttctaaactaactgcgaatgaattaaaaagtcagcgagcccgagagcggtacacggcactcagcgttgaggagaagggtgcgctggttcaaaggaaccctgaaaacagggagaggaagaattctgcatctacatcgggcacagatgttgctgccattgtgtctgatgtcggtcctatagaccattatgcaaattttccaaacagtgttagaaagcatattttgtttgtaatctttgttctaatggatgcagaggtgagaaactccctgttcaaagaaccagtcctgcatgacgccattaagattggtgtgaactttaggaaccaagagctgctgcaaccggcagaacaaaataatgctccaggagaaccagaagtggtgatagttgaagatgatgaagtggtgattgagccattgccaaaaaaggagcgcactggcaacaagggataa

SEQ ID NO: 64751 - DNA, 1243 bp, Oryza sativa
  Clone ID: PAT_MRT4530_65865C.1
agaactagtggatccccgggctgcaggagtcaaactcaaaagtgtatcaaggataagcagccgaggaaaaggtatttgacggaagcctgcgatgtctgcggcgccggctgcgagcggctggttgcggccgtccgcgaccgcgcggctctgcgaggcggggttcttcaccgattacgccaaccccgccactacgcggatctgcatcggccggaggcggagcggtgcgccgagaaacattgcagggcttcaagttgcatcatccaatttgggccgatgcaaaattgctcatgttaaaagtggagatgctgatggttacccaacgactgaagatttgtcaattgacgaggaaaccctgcagcgtaatttacagacagccatccaggaagaagattattcccgggctgcaaagataagggatgatctgcgcatcctccatgaagataccaaagcttccctccttgcagcaaacacacggttttacaatgctttcaagaatggcgatcttgcagcgatgtactctttatgggctaagggtgaccatgtatatgttatccatcctgctgcgggtcggatatcaggttatgacgtggtcatgcaaagctgggagatgatatagccaacaagttatgagtagcgcaacaaactcgccaacccgcgccgcgtctcctcctcgtcgtcgcaacccgcagcgcgagcgcctcccaccgatcatacgaaccccaccgccacgtctactccctcgccgcagcgcgagcgcgcacggagaagaagcaagcagagagagagagagggagagggaggggtggcgctgcggcgagaagtgatggtgctgccattggtgaagctcgggtcgctcgcgttccggacgctgagcaagcccatcgcggcccgcctcaagcacaacgccgggatccaccccaagttccgcggcttcatcatcggcctcgcccaggtcgctggtactgcaatcatctacgaggtgcagagaagtgctagggcagaagccagaaaagaggagatccgtaagcaggaaatcgaggcgagaaagcagaggatagaggagctagccagtgaggtgcagatgatgaagaagaggatcagtgagatcgagcggcagcaggacgagagacgggcccttccgaactcccgcggctccaccactgccactccgatgcaggcagcttcggcggcagcggcagcagcagcaaaggcaaagcatcagcagcccacggccgctgctgct

SEQ ID NO: 64752 - DNA, 354 bp, Oryza sativa
  Clone ID: PAT_MRT4530_65866C.1
atgtggtcggagagaggagggatgccggccgccgtctgggagaaggtggatgacgatcggcccggggtggtaatcgaagtcaactttgatcaatggcgaggatcgggactatgctcaggaaggagcagaggtcttgcacggtccagaagctgtgacaagatcaggactaaactcagtgaggagttgagatccagaacgataaggaagtcgtgtgacaaggttgagatcaaggtgacacacggtggacaaacaccgtgtcgggaggttatcgcaacgggcttcgcaaaatcaactgcaagcgttgaaattcgcaaagaaattggaattaagacgtattttgtgtgcagcgtataa

SEQ ID NO: 64753 - DNA, 1959 bp, Oryza sativa
  Clone ID: PAT_MRT4530_65867C.1
atgcacgccgggatcaggcggtcgcggtccgagccgcacctccggtgctctcgccgcgggggtgcggccggcgcggcgctcaccacgagccggtccatcggcgtgttcccgttccagttcggcgccgcgccgctgcgcacgccgccgctccccgacggcggcggcgacgggtcgcggctgctcaccgtcgccgggcccgacgacgagcccgacgacgcccccgggccggaaatgccggcggccaggcggcggcccgacgcccactggctcgaccgcctcctcgagctccggtcgcgcttccacgacccgaccaagcgccactcctccgacaacaatggcctcatcttccaagacgacgacgacgacgacgacgtctaccacctcgacggcgacgacggctgcggcgtgaactacgaggacgacgacgagcaagtggatgacaggtgggaccgggagtccttcagcaagctgctggcgcgggccccactcggcgaggcacggctgttcgcgcagctggccttcctctgcaacatggcttacgtcatcccggagatcaaggttgaggagctgaagaaatactacggattgcggttcgtcacgtcgtcgctggagaagaaggccgaggccggcgagatccgctccaagctggacgtcgactccacgcggccgcgcgccgcgccggcgtgcgaggcggcggcggcgaccacctcggggccgcagccgcggcggccgatccggtcgcacctggcctacgaggtggccgcgtcggccgcgtcgtacgtgcacgcgcgcgcgcgcggcctgctctcgttcggcggcgccggcgggcagcagccgcgggcggaggaaggagggcacggccggctttacaactccggcgtggcggcgtacgtggcggcgtcgacggtgacggcggtggtggccgccgaggacgaggcgcggcaggaggccgcgcgcgacctgcgctcgccgctgtcctcgccgtgcgagtggttcgtttgcgacgaggccgacgcgcgcacccgctgcttcgtcatccagggctccgactcgctcgcatcatggcaagccaacctcctcttcgagcccaccatgttcgaggagacaggggtgctggtgcacaggggcatctacgaggcggcgaagggcatctacgagcagctgatgccggagatcgcggcgcacctggcggcgcacggcgagcgggcgcggctgcggctgaccggccactccctcggcggcagcctggcgcttctggtgagcctgatgctggtggcgcgcggggtggtcggcccggaggcgctgctccccgtggtcacgttcggcgcgccgtccgtgttctgcggcgggcagcgcgtgctggacgcgctcggcgtcggcgagggccacgttcgctccgtcgccatgcaccgcgacatcgtgccacgggccttctcctgccgctaccccggccacgccgtcgcgctcctcaagcgcctcaacggcgtgctccgcaaccacccctgcctcaacaaccagaggatgctgtacacgccgatgggcacgacgtacatcctgcagccggacggcgcggcgtcgccgccgcacccgttcctgccggagggggcggcgctgttccggctggacccggaggggcgagccgagcggccggcgaggcacgtggtggcgagcgcgctgcgggcgttcctcaactcgccgcacccgctggagacgctgagcgacctgtcggcgtacggctccgagggcgccatcctccgcgaccacgagtccagcaactacttccgggcgctcaacgcgctcaccagggtgccgcgccgccggaagcagccggagatcgtgtggcagctgcccggcgtcgagcggctgcagcagtattggtggccggggatcgccggcaccgtgttcccggcggcgccgccggtgtcggtccggaacaaggagctggtctccgaggcctga

SEQ ID NO: 64754 - DNA, 333 bp, Oryza sativa
  Clone ID: PAT_MRT4530_65868C.1
atggcgagaaagggcagccggaggcgacgaggggtggcggagctcacctcacgggaagcggatggattcccgacgtcaattggggacgatgaaggggcggctaaggtgcagttcaacactgctgagtcgtgggaggggttggagaggatcggcgtggccttaatcgctagtggcgagcggctggtggtagcaatggcggtggcttgggagtgtggggaaaagggcgacccgacgacaattgtaggaaatggagtggtggacggggatcctcttgtggcagcgaggctagtagcggtgtctgcacggtgcggcggcggcagcggctacggctag

SEQ ID NO: 64755 - DNA, 530 bp, Oryza sativa
  Clone ID: PAT_MRT4530_65869C.1
ctgatatttatggaggcgtctgcaaaaaccgcgcagaatgttgaggaggcttttgtcaagactgctggagcaatatacaagagaattcaagatggtgtctttgatttatctaatgaggtaaagttttttaggaatgtatgtaatgtattgaggtaaatttacaaacacaaatcatattgttcttctgagcatgtctgatgtgaactagatcattatttatacaacataagtgtattcttaattaacatatgccctgcaaaactttcctgagaggaataactgaataagtagtagataacagagtctgtaattaacttatgcactgcaaaaactttaacatggccctagaagcacacacaaaaaaaaactgtgtatacattttcaggtcaatgtttcctgtaattgaatggaataactgaacttgaaactgagtctgtaattaaaccgaaaatgatcgagggaccaaaaatggtcattttgcctcttttaatggcaaccaagcagatgtattacataatgcctatcctccc

SEQ ID NO: 64756 - DNA, 322 bp, Oryza sativa
  Clone ID: PAT_MRT4530_6586C.1
ctgctgtttcctgcaatgaaaagttaaatgtcaccagaaattgagccagaaagccttccgtctggaggctacctggctggtcacatctcaaaagttacttgtacacttttgtctcaaaccaccctctagttttcaaaaggggtcatggtttgacatctgcatttattatttcgtctattctgaatccttctaagcaagagcaccctctataaagttgccggctttgatttgtgaagattgaaggtggccgtatgactaggcggaaaccggacgacttctgctaaaaacaattacttccaaggtctgattcggtttaaataca

SEQ ID NO: 64757 - DNA, 798 bp, Oryza sativa
  Clone ID: PAT_MRT4530_65870C.1
atgggcgagagctgctacgtcaggaggctctcggacctgctccaggagcagcaggagcccttcctcctcgccggcggagcttccctcgccgacgcatgcaggcgccgcctgctcgccttctgccaccgccgcgccgccgtcagcaacaagagccgcgcattggggggcttgggcgccgccgtcttctgtggcgccgccgtcaggagggctctcctcgccggctgcttctcctgcggcgcccgccagagcttccgccggctgcgccacgccggcgccggcgacattgctgctggctgcgacgtcgacgacgacgaggaggaggaatgtgcgaggcagctcagcccgatgtccgtactcgacctcgatattaactccgacgacgaatcgtcctccatgctcggcgtcggccaccgtgagaaggacgacgagtcgccgtcgacttcagggaagagctcgccgccgccgccaccggagcagaatccgctcgacgccgccgccgctccatgcttcaccttctacgaggccggcaagaattgcaaagcggagacaggagacgaagaagagtacgagacgacgaggtccaagctggaggagcagatgatcatctcctcctgggagaggatctccggcgacatctcgaggatccccgcgctggtggagctcgacctcaccggctcactgcagcaatggaggcggctcagggaggaggaagcatcgcaggtaggggcaagcatagaggccatgatcttcgaggagatgagagtggaggctgtgcgtgacatgatgcttgttgcctga

SEQ ID NO: 64758 - DNA, 852 bp, Oryza sativa
  Clone ID: PAT_MRT4530_65871C.1
atggggttcatcagcggcgaggagctcgccgtgacgctggcgccggtggccgtgtactggctctactcggggatctacgaggcgttggggagcgtcagggctctggacaggtacaggctgcactcgaggagggacgaggagagcaataacatggcgtccaagaaggaggtggtgaagggcgtgctgctgcagcaggccatccaggtcgccatctcacttgccgtgctcaagctgacaagtgagaaagacggtggcgccggcgacgtcaaggccggtcacgcgagcgccccggcagcggcgccatcgtcgtcgtcggcggcggcggcgctactggacgtggcggcgcggttcggggtggccatgttcgtgctggacgcgtggcagtacttcgcgcaccggctgatgcactcgagccggtacatgtaccgtcggttccactcgtggcaccaccgcgtcgtggccccctacgcgttcgcggcgcagtacggccaccccgtggacggcgtgctcacggaggcgctctccggcgccgccgcgtacctcgcctcgggcctgcccccccgcgccgcggccttcttcctcgcgttcgccaccgtcaaggggatcgacgaccactgcggcctcctggtgccctggaacccgctgcacgccgcgttcgccaacaacacggcctaccacgacgtgcaccaccagctcagcggcggccggcgcaacttctcgcagccgttcttcgtggtctgggaccgtctgctcggcacgcacgccggctacaccgtcaccgcgcgggagaggaacaacggcggcggcctcgaggccaagccgatctgcaacgatcgccacgttctcctgtaa

SEQ ID NO: 64759 - DNA, 646 bp, Oryza sativa
  Clone ID: PAT_MRT4530_65872C.1
gcaatagttgaaatccccaatttctatcttctctccaaaagtgacatggtatcagagcaagggagcaaaccctagccgtcgatccaagtccacgccggcacgccggcggcggctcgccgccggcaagcccaactaacccgtccacatcctcattgagtagtagtaagtgcaacagcaccgttgtcagctcagtttcgtccccaatcagcaaaggttctagcagcagcaccacttcctcgttctcctgtcatcaagtccatcgacagcccatcgcggcggaagtcgcggtcatcgccgccggtcgcgcgccatccgtgccgcccagatctgggccgccgcccgccgcatcaaaggcagtcgtcatcactgattgttgctttctcctcttcaagcggcagcagcagcgagcctgtcgttctccagttcatctccaatgagcaaacaaacaggagcagcaatcagccaatcagtgcccccgtcgtgggtgctcgtcctccgccggccaggccctcgtcgtccattgcggcaagccgctgccgtccacccatcgagccggccagccgccgatgctcatcgtcatcatcttctcatcgtcccaggctattcctgaacttcagatccacatcaacccctctcttcgtctttg

SEQ ID NO: 64760 - DNA, 1080 bp, Oryza sativa
  Clone ID: PAT_MRT4530_65873C.1
gccgtcgagcccgagaagccggcgtcggaggtcgaggcggaggtcgtggggcggtggagcaggcgagagcgcgatgacggcggcgaggaggcggcggtctcgcggaagccgttggcagcagcgccggtggtcgtggatgaggaggtgacgcccctgcagctgctggcgcgtggcgcgcggagctcgagcgcggcgaggcgcgtcgtgcaggaggagccgcaggtggtggaggctgtggcggcgaggccgtcgagccggcggtcgagacgggaaggcaatggggacgccggtgtgaaggccgttgtgccggacgcggcggcggaggtggagccggagatcgctgggcggtggagcagccggcgaagcgaggatggcagtgaggaggcggcggcggttttgcctaagccgttggccgcgatcgtcaccggagctcggagcaggagcaactcaccggcgataagtaatgtcaacgacgatagctttcttttgttggttcaagcaattggtcggaatggtgtggacactggtgcagcaaatcgccctccatcaactggaaggtcaacttttgcaccacctgttggggttaatatcagacctctacaagcggtggaaatgccaaatgggacccctcgggaaagaagggcaatctatccagatcccacttttgctcagtcgacacggtcacgagactcacatgacagttcaacaataacagaagagcttgagatgctaaaagatgaaaatgtaaaccttttggagaagcttggactagctgaagagagatttagacaatctgaagcccggacaagggagctcgagaaacaggttgctaatctcggtgatgggttatctatggaagttaagcttatgaaaaggagggaggagatgctcgtaagaaaggagcaagaaataagaaaagcacttatatcgaagaatgataaaagcgaggaaattgccactcttcaaaaacagctgcagtctgcaagagaaaaggaggctgctgctgttcagaaactccaagaagcagagtctgaaacaatatcaggagaaacaaaatcacacaacgggatgagtctatga

SEQ ID NO: 64761 - DNA, 4359 bp, Oryza sativa
  Clone ID: PAT_MRT4530_65874C.1
tgttcttagggtcccacccgcatcctcggcgctttcactgggccttcctgcagatgcaggtacctcactcaacctggatattagactctggagcatctagacatgtaacaggtatgccaagtgagtttgtgtcatttactccatatccacccacatataaagaaactgttcagactgccgatggtacttcacagcctatcaaaggtgtgggaagagtacagtgcactccatccattacattatcatcagtgttatatgctccctcctttccagttaatttggtatcaataagttctttggttgaccatatggattgtcgggttactcttgatcgagaaaattgcctaatagaagagagaagaacaggaaggaagcttgggattggcattaggcagaacggattgtggtacttagatagaagcggaacaaataaagcactatgtagtgcattggcagttggtacaagtgaagaggaagctagattgattctccagcattgtcgattgggccatatgtgttttgaaactatgaggaagatatatcctgatgagatgagtaaggtggacagaagcaaactagtatgtgatgcatgtgaatatggaaagcatacaagagctacatatataagcagaggacttcggagcatatcaccctttatgttaatccactctgatgtgtggacttcccctattgtctcggtgagtggaatgaagtactttgtgacttttattgattgttactcccgaatgacctggatatatcttatgaaacataaaaataaagtactaaaatgcttcaaggacttctacgcatttgttagaaaccaattcaacacatgtgtcaaaattatcagaactgataatgggaaagagtatgtgaacaacgaatttggtagttttctttcgatagaagggatactacatcaaacttcttgtcctgacacaccaccgcagaatggggtggctgagagaaagaatcgccatatcttggaggtggcacgttcactcatgtatactatgaatgtaccaaagttcctctggagtgcggcggtcatgacagctacatatcttatcaatcgtacaccatcgagaatacttgggatgaaggctccatatgagatggtatttggatgtaatgaatttattgttccaccaaaggtgtttggatgcgtatgctttgttcgagatcatagaccttctgtgggaaaattggatcccagagctatcaagtgcatatttataggttactcatctggtcagaaaggatacaaatgttggagtccatctgagaggcaaacatttgtaagtatggatgtcacctttagagagtctattcctttctatggagaaatgacagatttgagttatttgttttctgatcttgacaatccaatcatgagtgaagttaggtatgaaggggtgaatgaatcactaggaatggaagaaggggatgaatcaaagaggacgaaggttgttattgggtcaatcccatgccctatgggcaaactcccacatgagcagaattggaggaaaccacatgaagaagaaaatctacaggtttacacaaggagaaagccaaggtccttggagacacaacaggaaataaatgatcaatcttcttatcagtcagatcctatacaagagaataccgagacagggggagaggagagtgaaatatcaggagaggaatctaacttgcctattgctaataggaaagggataagaagcacggcaggaaagccccctataagatatggctttgaggaggttgaggaggaaaatgggaatgacatagctaattatgtgtcatattcatctttatctcctgcctatagggcttttattgcatcattacaatccatagtgatcccaaaggattggagagaagcgaagaatgatccaaagtggcatgaggcaatgatggaggagatgtcagcacttgagaagaacaagacctgggagcttgtaccttttccaacaggtaagaaggtggttagttgcaagtgggtgtatgctgtaaaacaagatccacttgggaaagtagaaaggtacaaggcaaggcttgtggcaaaagggtacagtcaaacatatggaatcgattatgatgaaacctttgcacctgttgcaaagatgagcacagtgagaaccttgatatcatgtgcagctaactttgattggccactataccaactagatgttaagaatgcatttttgcatggagatcttcaagaggaagtttatatggagattccaccgggtttttccacctctcaaactaaaggaaaggtattgagattgaagaaatccttgtatggccttaagcagtcaccaagggcttggtttgatagatttagacgtgcaatgtgtggcatgggctacaaacagtgcaatggagaccatacattgttttatcgtcaccgtggaaagaagattgccatcctggctgtatatgtggatgacataattattacaggagatgacactcaagaaatagctcagttaaaagagaatataagcaaagaatttgaagtcaaagatcttggtcagctcaaatattttttgggcattgagattgcaagatctcctagagggatagttctttcacaacgaaagtatgtattggatctactttgtgacacaggtatgctcggttgccgacctgcctctacaccaattgagcaaaatcataagttatgtgctgaattaggagatccagtgaataaagaaagatatcaaagacttgtgggacgactgatatatttgtgtcataccagacctgacataacttatgctgtgactgttgttagtcgatacatgcatgaccctcgaagtggtcacatggacgcagtatatagaatcctgagatatttaaaagggagcccaggaaaaggcttatggttcaagaaaaatggacatctaggtgtggagggctactgtgatgcggactgggctagcagccttgatgataggaggtcaacctctggttactgcgtatttgttggtggcaatttggtctcttggaggagcaagaaacaaccggtagtgtctcgctcaactgctgaggcagaatacagggcaatgtcagtgagtttaagtgagctgttatggttgagaaatcttctttctgagttaaagttgctaatgaatattcccatgaagttgtggtgtgacaataagtcggctattagcatcgctaacaatccagttcagcatgatcgaacaaaacatgtggagatagatcgtttttttatcaaggaaaaactagatgaagggattttgaagctaggttttgttatgtcgggggaacaagtagctgactgtttaacaaaagctttaagtgttggggagtgtacttcatcgtgtaacaagatgggcatgatagatatctatcgcccatctattcaacaaattaaaaggatatgcattggagtattggacttggatggacttgatatgaaatatagtaaattgatgaccaagacatgaaattgatttgaaggcttatcgatagtagtggctgcaaaaagaacaatgacagtagcaggaacccattcttcaatcactaattagctgtaacccagctgcataaccaaagagtccaagagcctcaaatctgctcctatctatcctgttgctacttgaccatgagcatacacgcaacagaaaaacaaagacggagagaggggttgatgtggatctgaagttcaggaatagcctgggacgatgagaagatgatgacgatgagcatcggcggctggccggctcgatgggtggacggcagcggcttgccgcaatggacgacgagggcctggccggcggaggacgagcacccacgacgggggcactgattggctgattgctgctcctgtttgtttgctcattggagatgaactggagaacgacaagctcgctgctgctgccgcttgaagacgagaaagcaacaatcagcgatgacgactgcctttgatgcggcgggcggcggcccagatctgggcgggacggatggcgccgcgaccggcggcgatgaccgcgacttccgccgcgatgggctgtcgatggacttgatgacaggagaacgaggaagtggtgctgctgctagaacctttgctgctgcttttgcttcttctgcttcgcttgctgcttgacgagggatgaatgggactgagctgacgacggtgctgttgcacttactactactcaatgaggatgtggacgggttagttgggctcgccggcggcgagccgccgccggcgtgccggcgtggactcggatcgacggctagggtttgctcccttgctctgataccatgtcacttttggagagaagatagaaattggggatttcaactattcccggccgg

SEQ ID NO: 64762 - DNA, 216 bp, Oryza sativa
  Clone ID: PAT_MRT4530_65875C.1
atggcggaacgtgaccggaagacgaggccggacgtggccaaaggcgaccagagagatcggaggggaggccagcaagctgactgtgtggtggttccgttggtcgtcaagctgagcatgcggatcaaagcgaggagtccagtgaaagatgttatagggatagcggagtctcttgatagtggcgggtctagcgcagacttgtcgggcggcttgcagtga

SEQ ID NO: 64763 - DNA, 348 bp, Oryza sativa
  Clone ID: PAT_MRT4530_65876C.1
tcagacagcagtgccgctcctcatggtgcccagtggatggtatattcgagcttcttcagcatcctccttgtggctatgtccattcatagtagggatggcgatatccccatagggggcagggttactttttgtcccatgggtgtggtggttggaggcccaactagtagcaagggctgaacctaactccgtaaatccacagctcccacagatcttcacactgtcacccccaacagatgcaaaggaggcggcgcagcctcttccaccatgctgcatgaacgatgtggcagcatgccgttctcctatcgccagtccatcccccatggctggtgccccgtaccagtgcaccat

SEQ ID NO: 64764 - DNA, 183 bp, Oryza sativa
  Clone ID: PAT_MRT4530_65877C.1
atggatcgttcccgccagataccggacgattctcttcacagctgccaggtgttcgtccgttggtctctccatgaaccagcttacatatccaacggcgaacgcaagatcggccgtggctccatgggtgtagcacaaggattgcatcccacaaggccagccttctccacgatcttcgtcgcatag

SEQ ID NO: 64765 - DNA, 352 bp, Oryza sativa
  unsure (1)..(352): unsure at all n locations
  Clone ID: PAT_MRT4530_65878C.1
tttgttttttttattttttggggttttactttttttttttttttttttttttttttttttggaacctccaaaatcaatttttcccttgggtgttacaaacactcaaaccggtttagctcacaggggcagctgatgcaatgcttgcccggcccccatacatattgaacccaacaacggccccggaaataacttaccgggaacaggagtcggccccccccattgggaaccacaactgggaaaccgacccctacccccctattgcaaggaacctcatcgccatcctcattctcgtcggactccaccttgcaacacccgccccaggaaattcggccttacttangatcctcggttt

SEQ ID NO: 64766 - DNA, 1902 bp, Oryza sativa
  Clone ID: PAT_MRT4530_65879C.1
acccaaaggggctactaagtttatacaacgctgcacacctcctcattcatggcgagccagaacttgaagaagcaatctcatttgcacgaaaacaccttgaattgatgagtcaagacagtgttctcaaccctccaatatatcgacgaccggaaccatcctatgattttcgtggggtaagaacctaggtcgaaggcatagcgtgcctatgacccgggaacacggcgcgtgcacatctcccgcgacgtcatgttcgatgaggcttcacagtggaggtgggatggcgagacggcgtctgacctctacaccgactttgtcatcgagtacaacacggtgtaccacccaagcgctaaggctggacaacatcaaggccacaatggatcacccacgccggccgcgacctcgtcacggacgacatcaagctcaccagcacgcggttgaacaccttcggtgcacagagatgcatctgaggtggaatttgtgtcgccaccacttggagctaaagagaacctcgacgctgatcatgatgacgtgctgctccgttaccgcaccatcgagaatgtgttgggatcagccgcgccgctggggctcgcatgacgggaagttctggaagaactgatgttggtgagcggagaagagcatgtgtccttcaggcaggctgagcaagaggaggcttcgcgtcgcgccatgctcgacgaaattgcttcaattgaagaaaacaagacctggagactggttgatctaccgcctggacatcgaccgatcaggttgaagtgggtgtacaaattgaagaaagacgctcgaggggtcgtcatcaagcacaaggcgcgactggtggccaaaggctatgtgcagtgagccggaattgattttgatgaggtattcgctctagttactcgtctcgattctttacgcctgttgcttgcccttgccgcgcaggaaggtggaatgttcatcacatggacgtgaaatcagctttcttgaatggggagctagctgaggaggtatatgttgcccaaccaccgggattcgaagttgagggggaagaaaccaaagtgtactggctggtcaaggcactgtacgggctacgacaagtgccccgagcttggaataccaagctggactgtactctgaagaagctaggctttgtgcaaagcccgctggagcatggtttatatgcacgcggtgctggcggttcgagactgctggttagtgtttacgttgatgacttggtgatctttggagcagatgatgccatgattggtgattttaacaagcagatgatggttgaattcaagatgagttatcttggccctttaagtttttatctggggattcaggtgattcagaagggggtgccatcagtctgaaccaggcagcctatgcgacgaagatcgtggagaaggctggccttgtgggatgcaatccttgtgctacacccatggagccacggctgcggcttagcaaggaaagtacaacgccattggtagatgccactgaatatagaagtttggttgggagtctatgctatctagtgaacactagacccgatcttgcgttcgccgttggatatgtaagctggttcatggagagaccaacggacgaacacctggcagctgtgaagagaatcgtccggtatctggcgggaacgatccatctgggatgtcgctacacaaaaggtggggagaagaagctgcaaggctatagtgacagtgacatggctagcgacattgacactcgcaagagcattaccgtaccggcgtgctattctttcttggtgaaaatttgatcagctggcagtcacagaaacaacgggttaacactctcatcatatgagtctgaatacattgcaacaggaaccccctctagcaatggatttattttcagtcagaacatggctttgtt

SEQ ID NO: 64767 - DNA, 149 bp, Oryza sativa
  Clone ID: PAT_MRT4530_6587C.1
tttggtgtttgctcgcgactcctccccactagggggagctcatttccacagcgggaccccggctaatggcctacagcattggctctcgccatctacatcgatgcaacacgactgtaggtctcatcaggagttaatcacatggcatgaac

SEQ ID NO: 64768 - DNA, 711 bp, Oryza sativa
  Clone ID: PAT_MRT4530_65880C.1
atgcgtaaggagaaaataccgcatcaggcgccattcgccattcaggctgcgcaactgttgggaagggcgatcggtgcgggcctcttcgctattacgccagctggcgaaagggggatgtgctgcaaggcgattatggtgggaaaccccaatccgcaaacaatcatcgacatgaaggcattggttgaggagtaccacatctcaatggtgaagagaggcattcgcaacgtcgacagttcccagtacacccaagactcgatcctcgtcggcccctaccaccgcaatcccgaccagcggatggaacccgtgaagcttgcggcgctccacggcgccctccccggcgacgagcaggagcagcggtccacgctgcaccgctacctgggtgagatcgccgccgccaacttccttgccgaagtgaggagatactacgcagacggcgccaataagttcgacgacctgacgccgtcgaaactgttgttggtcgatgggttctacatcctccattgctttggtatcggcagattcgggggaggaagcagctcctccggcggcgagatgtgcgcgcaggacaacatcgagcacatccgtgacgtgttctacctcctggagaaccatatacccttcttcgtccttgtgaagatccacgacctgttcttcccgccggaaacatccccgatcaagtctaccgccgagattgtgctcgacaacctgtag

SEQ ID NO: 64769 - DNA, 414 bp, Oryza sativa
  Clone ID: PAT_MRT4530_65881C.1
cccacgcttccggcctatcgagcgcctatcaccctagagcgccgtcgccgtgcgcccgccatggacagagctaaaccactatactgccacgtggtgcgcatgcacagccacgagaaggatatctcggattaggcgctacagaacaagaagactccaccgagctggctaaagacctccgcctaaaatggggaggagataaacatgaaggcagcgaaaaaaggtcagatgccctcgcatatcggtgtagtgctccgagaccagcacggaataccccacgtcaagagcatgatcgagtagaatgatcctacgcatcactcagggcccacggtcttgccccgaaaataccggaagacctctacttactgatcaagaaggctgtgggtaataggaagcactcggagaggaacaggaaag

SEQ ID NO: 64770 - DNA, 273 bp, Oryza sativa
  Clone ID: PAT_MRT4530_65882C.1
atggctggagcggcggcgacgacggcggctcgaggttacacggcgctagggcgcttccgacggcaagagacgaaggcgagggtggcggcgggatgtgacatatttggtccctcagctgcggcggtgagctttgagcaggcgacggcggggctgcgagcttggaagcggcgatggggtgacgcggacgaggccacgcagaacaaggcggcgtctcgcgccctcgccctgtcgcctggtcgattggatctgagaggagggggatgggaagactga

SEQ ID NO: 64771 - DNA, 1478 bp, Oryza sativa
  Clone ID: PAT_MRT4530_65883C.1
cctccctccgcaccacgcttcgatctcacaatctccttggtcgcggaaccgaaaatgcagtcgaggcacagggtgttcgcggaggacctgctcctgccgcgggaggcggaaggggaggaccacttcgaccgcgtcccggactcgctcgtgctcctcatcttcaaccgcctcgccgacgcgcgctcgctggggcggtgctcggccgtgtccaagcggttcaactcgctcgtgccgctcgtggacgacgcctgcctccgcatcgaccgcgtcatcaccgacgcggccgacgccgacgacgcgctcggcctcgccggcccgcgccccgccggccgcggggtgctgtcgcacctcctcaaggcgatgctgctcgccgtgctcaagccgttcgggcactgcgacgccggggtcaggggcggcggtggtggggagcgcgcggggaagcacggcggcggcggcggcggctgcggcgcgcagcagcaccactcgccggcgcaggtgctgaagaacttcagcagcatccggaacctccggatggagctccccgtctccgacgtcggcaccgacgacggggtgctgctcaggtggaaggccgtgttcgggagcaccctccagagctgcgtcatcctcggcggcaccagggtggaccgggccgccgcccccgccgcggcggcggcgaccgccaccgccgccggggacagcgaggcctcgcagggtgacgacaccgggagcatcccggagtcgttctacaccaacggcgggctcaagctgcgcgtggtgtggaccatcagctccctcatcgccgcggccacaaggcactacctcctccgcgagatcgtcaaggagcaccccacgctggagcgggtggcgctcacggacgcgcacggccagggcacgctcagcatggggcgcgaccagatcagggagttccgcgacaagccgctcgccgccgccgccgcggccaaccgcacccaggtccccgcctgcaacatgaagctccggtacgcgccgatgctcgagctctccgacggcacgcggatccagggcgccacgctcgtcgtcatcaagcccgtcggcgaggccggcggaatcggcggcggcaggaaggagctcgacgagttcgtcgccgacgcattcgacggcccgtacagggaggccgtcagcgcgctcagcaagcgccgcacctacctgctagagatgaacggcttctgagagcgtagagttgagaacttgagatcgccacccaccaccatggacccgtgcagagatcgctctgctctcttcgcttcagctgatcagctattcagctcagctcgattcagtggcacaccgaggtgttcgtccatgttgtaacagcgatcgtgtgtctcctcgacttttcgatactgccttagcatcatcctcgcaacaaataatggaattagaaatttggaatgcttcaaaaaaaaaaaaaaaaaactcgagactagttctctctctcc

SEQ ID NO: 64772 - DNA, 200 bp, Oryza sativa
  unsure (1)..(200): unsure at all n locations
  Clone ID: PAT_MRT4530_65884C.1
gggggancntccngggtttttgaacngngncnntcccaancggggnngggggggttngttnnngcttgnnaaaannnggttntnacttnggttnntgnncttngttggcnttgtttgngggggggtncnnaaaanantaagggtttccttttggttggaaannntntnngggggnannaaannanaanntccannntnct

SEQ ID NO: 64773 - DNA, 319 bp, Oryza sativa
  Clone ID: PAT_MRT4530_65885C.1
taaccccacattccaggaaagagtccatcttccgtgctctcccaactgatgttctaccaaatccatatcccatctcaagagaagagctcagaggctcaaccatacacagaggagatgattcggtccattcactcccctccaatacagagctcaccagacgtttataatgtgccggaatcctcttaagttgccatccagataaagaataactaaataaataaataaataaattcccaccattccgttcctcctatgtactgtaaaagtttcttataataccgttctgaatctaaggacatccctcagatgtctttctatt

SEQ ID NO: 64774 - DNA, 548 bp, Oryza sativa
  Clone ID: PAT_MRT4530_65886C.1
gtttgttaatacaattttatttatatattgcatcacacaagctagcagtgtacacgatgtatatacggcgggtatcgatcggcgctactttagttacctgggcgaccagttaccgccgtcatccctgtccctgcaggccagctgccggcctgcgcctgcgccggcgccggcaagcaccggcggtaaccacagcttgggaagacttagtacggtggcggaggcggcgccagcattgcccatgcggcggcgccggatttgaagcccttgtggaattttctgccagccttgacgccggcggcaaaatccttcatcgccggcctcttccggccgacagattcgacgccggcagcaacggcaccaccgacgaccttcttgatgggctcggccaagccctctccggcggcttccaagccctccaaggacggcacggccgtgacacgatcggcgccgtggagggcggcggcgacggcgaggaggaggatggtgagagggaggagaccactcttcgccatgctttgctttgcttatacccttagctcgcctcgtgc

SEQ ID NO: 64775 - DNA, 496 bp, Oryza sativa
  unsure (1)..(496): unsure at all n locations
  Clone ID: PAT_MRT4530_65887C.1
cgccgcaggatccgtccgatcccggtcgaccacgcgtccaggggggaagaatggcgtcgcgcctcctcgcccgatccaaagccctagcgctcgccctgtcccgcgccgacgcggcggngccggngcccgccgacggagtgcaatggctgacgactctgtcgctcctcacctgggactcctcctcactgcccgatctgtactgcacccctcacagaagtaggtgagagctcgtcctgcccggtatggccggggacttcagcctgagcgccagcctgtcggcctgtacgctgctctacgagggggccgtggagcccatgcagatcgacgtggacccccaggaagacccgcagaatgcacctgacgtaaactacgtggtggaaaaccccagcctgaatctggaacagtacacggtcagctacagcgacctgatgcacatggaacgggtgcgaataattggtaatgactgccccacactggaaagtgaaggacctgaaaa

SEQ ID NO: 64776 - DNA, 1207 bp, Oryza sativa
  Clone ID: PAT_MRT4530_65888C.1
gcgccggtcccggagcgcgttggcggtcgttccggcgacgccgtcgccgccgtcgccgccgcagttgacgtcgttgctggcgctgctggcgtcgtcggtgtcgctcgccctcaggttcgcgtcggaccgggacctgctgctgcacccgtcgcagacgctcgagctcgatccgctcgtcctcgccgcggcgcgcggcgtgtcccgcctgctcgcgatgctcccgctccacctccacctcgtggttcctccgtctcctctcggagtcgcactccctcccggactccgcctggcgcgacgcgttccgcatgtccaggccggccttctttcagctcctccactccctcgcgctctccgaccccgccgccctcggcgccgcgctcttccgcctcgcccacgccgcgcccgcccgcgccgtggcgcgccggttcggcctcccttccccggccgtcgccgcgcgcgcattctacgaggtctgccgcacgatcgccgaccgcctcgccatcctgctcgacctcggcgcgcccgaccgcatcgcccgcgccgtccccggattctgcgcgctctccctgcccaactgctgcggcgcgctcggctacgcgcggatcggggacgccgtcatcgcgcaggccctggtggacgccgagggccgctttctcgacgtctccgtcgggtgggacaccgcgatggcgccggcggaaatcctcccacggacgaagctgtacagctctcagtcactggtgctcgcgaacgctcctcacggcgagctcatcggcggctcagtgccgcgctacttcttggggccagcatgctgcccaatgctcccatggctcgtgacgccgtataatgacatggacgccaagaatggcatgtccaaagagagcatcttcaacaatgtgcattcacacgggatgcggctggtgaggaatgcatttgggcatgtgcgatcacggtggcggcttcttgacgaatgctggaagggtgagtgccaagaggcactgccgtatgttgtggttgctggctgtcttctccataattttctcatcaaatgcgtcgaaccggatcctgaggaaattcaggaaggtgccgctgcggaactattttcggactttgaaggagagaaggacaaggaaggagagaggatcagggatgatggagaagactgcacgggaaaaaaaaaagaagccaagatcagttgcaagtgaagctt

SEQ ID NO: 64777 - DNA, 739 bp, Oryza sativa
  Clone ID: PAT_MRT4530_65889C.1
attcggctcgagaaacaatgaaatttgaagactatctcaaggactctagcctttctgagcctcacaatagacaaaaccttgagaaagaggttgtccaattgcaagcacacttgaaatgtgaagaggcgctcaatagggtcttacgttgtgcacttcatggaccagttttctctcttccactcattcccccactatttccacctcaggttcgtgggcttcttgaagaattggcaatggttgaggaagagatcatcaagcttgaaaaaaaagttaaggaactggaacttagattgttccaggagagataccagaacatagacttggaaatacaccataggagacagtctaaactatataaacatttccgaggatcatcgaggtatggttcaatgattactgagcagaagtcaagttcactccattatgaagtaattagtaaaggaagaaagacaagcaatagaagggcctctctaggttctgcactggatttccatagcctattttccacaccaagaaggtcaacagaatatgaagtgccaagaaggagcagtgggaagatagcaagagaataccctatgcatatagaagatgccattgagaaaccaaatgaactgtcagaggaactgctcaagtgtctgataggcatttttctggaattgaacagggcatcattggacagagaagaatcagaaactgtccctagactcactcttccatgcatgaagtccaccggcttgat

SEQ ID NO: 64778 - DNA, 318 bp, Oryza sativa
  Clone ID: PAT_MRT4530_6588C.1
atggggtcgggggacggcggctgccagcctaagcccctgagcccaatggcggaggggctgcgacacggcccggtaaaggcagtgctgcacctgccggcagaggaggcgctgcgcaatgcggaggcgagcggcggcggcggcagcgggagaggcgtcggaggctgcgagggtggtggaggcggcaagtgcgaagaggaagggggacgggtggtggaggtggcgatggagtggcacgagcggcagagacgtgggaagcgattggggccggcggcaaaatacgatcatacccctccgcacattattttctatggacaataa

SEQ ID NO: 64779 - DNA, 377 bp, Oryza sativa
  Clone ID: PAT_MRT4530_65890C.1
gaatgatgaactctgtatgcagggcttgatgcaagaaaatgccacatcaaatgagggtaatcaaacactaggcctcgcatggatcattacaaagtacgcaaatgtgcaaattaaaacataaaaagcgttaactaagcttaaagcaccagttgacacataaaccgcaaaccccaacttttttgagcatgtgaaaaccggatggatcatataacattcatcagagcatcatacaatatgtgcaagcattgcttcatcgagcgatcgaaagagagagtggtctacaatggctgctgggccattcacgagcccagggtgaacttggtgacttagacccatgctttaaaggcgactgggtactccagggggtatagctggtt

SEQ ID NO: 64780 - DNA, 1308 bp, Oryza sativa
  Clone ID: PAT_MRT4530_65891C.1
atggtggccgccggccgcaagcgccggtcccggagcgcgttggcggtcgttccggcgacgccgtcgccgccgtcgccgccgcagttgacgtcgttgctggcgctgctggcgtcgtcggtgtcgctcgccctcaggttcgcgtcggaccgggacctgctgctgcacccgtcgcagacgctcgagctcgatccgctcgtcctcgccgcggcgcgcggcgtgtcccgcctgctcgcgatgctcccgctccacctccagaccctcacgctcacctccatgtcgctgtcgccgccggccccgtcgccgccgctcccatcctcgtggttcctccgtctcctctcggagtcgcactccctcccggactccgcctggcgcgacgcgttccgcatgtccaggccggccttctttcagctcctccactccctcgcgctctccgaccccgccgccgcctcctcctcctccctcgcgctgccgcccgaccacaagctcggcgccgcgctcttccgcctcgcccacgccgcgcccgcccgcgccgtggcgcgccggttcggcctcccttccccggccgtcgccgcgcgcgcattctacgaggtctgccgcacgatcgccgaccgcctcgccatcctgctcgacctcggcgcgcccgaccgcatcgcccgcgccgtccccggattctgcgcgctctccctgcccaactgctgcggcgcgctcggctacgcgcggatcggggacgccgtcatcgcgcaggccctggtggacgccgagggccgctttctcgacgtctccgtcgggtgggacaccgcgatggcgccggcggaaatcctcccacggacgaagctgtacagctctcagtcactggtgctcgcgaacgctcctcacggcgagctcatcggcggctcagtgccgcgctacttcttggggccagcatgctgcccaatgctcccatggctcgtgacgccgtataatgacatggacgccaagaatggcatgtccaaagagagcatcttcaacaatgtgcattcacacgggatgcggctggtgaggaatgcatttgggcatgtgcgatcacggtggcggcttcttgacgaatgctggaagggtgagtgccaagaggcactgccgtatgttgtggttgctggctgtcttctccataattttctcatcaaatgcggcgaaccggatcctgaggaaattcaggaaggtgccgctgcggaactattttcggactttgaaggagagaaggacaaggaaggagagaggatcagggatgttctcgccgtgcacttaagcctggtaagccgaaaccagtga

SEQ ID NO: 64781 - DNA, 378 bp, Oryza sativa
  Clone ID: PAT_MRT4530_65892C.1
atgggcaggggagccgccgctgtgatgggccgccaccgcgacgggaagcggagcagccgccgctgcaatgggcaggggagacgccgccacgacgagagccggagcagcagccgccgctacgacgggcaggggagatgccgctgcaatgagccgccgccgggacgggaagcggagctgccgccgccgccgccgcccactggatacggatcccgccgccgccgcccaccggatgcagaccccaccgctaccactgaccggaatcggatgcatccctacacgaaaagacaaaattacccatccacccctctatctattccgggacttggcgacaaatccaactcgctcttaggaccgagggtccagcatcttcagacgtag

SEQ ID NO: 64782 - DNA, 807 bp, Oryza sativa
  Clone ID: PAT_MRT4530_65893C.1
acttgagcccccaatactctttatgttagatgcatacaaatatacagtagtaggagctcatagaagatcaagcacagatctatatctactactacgtttaaacaaggtccgccatagaaaaaaaaacacgatggcataactgttaaagtaactctttgtttatttttttttttttttttttttttttttttttttttagtgaagagtgatgttgcaacataacatattgactgaacacaggcagcaaatccacacaagattaatatcgttgcacaagaggttgatagagcattacatatttagatgaggcacacaaccaaagaagcagcagcagctgaccaaagtttagacccatacatagggcaaccagtcattgcatacaagatgatactagtggattatggcagcttctctttttctcttctgattgagcagagagatgccaccgccattatttcttgaggtgagggaagcacgcggtgaggtcgctcttcggatgcttcgcctcagcatgctctttgcacttggtctcagaggtggtgcagatgaaagtctgcatgcatatcttgcactggatgttcatggccttcttgttggcctcaagctggctccccttggcgcccttgttcttctccatgttcctctccctcgccatcttcgacttctgcccattgccgccgcccatctcgtcgacctcgaccttcctctcccccttcgccgcaacaagagaagagaagagaagaaaagaaaacgagtttttttttttcttttttggaagtgatgaagggaagcgtggggccggcggcc

SEQ ID NO: 64783 - DNA, 675 bp, Oryza sativa
  Clone ID: PAT_MRT4530_65894C.1
atgcccaccgacgccgccgccgccgccgccgcctcgtcgccgtcgccgctccttcctccggcgccaccttccgccgctcgccgccggcgccgtcgcctcctcacgtccccgaacccctcggtctcctcgacctcgacgtcgtcgtcatcgtcgtcgtcgtcgtcgtcgtcgtccagcctctccttcccgttcgctcccttctcgccggcgccctcgccgttccaccaccgcttcctctccccgctccgcgcctccgccgtgcccttctcctgggagcaccgcccaggcatccccaagacgcccgcgcgccagcaccagcaccaccgcggcggctgcggcggcgggaaggtctactccacgccgctgcccctcccgccgtccctcctctccagcaaggtggtggtcgccgacgaagaccgcggcggcgccgaccgcctcgccgtctccgacgacgacgacgacgcgaaggccgcgaggaggaggagtcggcggcggcataggcggaggctgctgcagcggccgcggcggccggcggcgctggccgccgccctgacggactggctcgccgtgctgagcctgtaccggtcgtgcacgaggtttttagaagttgtagttgtagaagccaagagttgggttttccggcttctccagattttcaccaactgtttttcataa

SEQ ID NO: 64784 - DNA, 636 bp, Oryza sativa
  Clone ID: PAT_MRT4530_65895C.1
atggcgagctggctgttctgctccgggaaggcggcggcgcggggcgagttcgtgaagctggtgttccccggcggccacgtcgagctgctcgaccgggcggtgccggcgtcggaggtgatggcgcggcacccgcggttctgcgtggcgcgacccgacgtgttccgggaccccgccgccgccggcgccgtcgccgcgccggacgccgtgctggcgctcgggcgcaagtactacgtcgtgcccaggagcaccgtgcggcggctgcagatcatgcacgcgtcgtcctcctcctccccgcacgccggcggcggcgtgtcgctgaagaggcacctcgctggcgccggcggccacgagaggggttacaaggtcgtcggccgccgcaagagctggctcaggttactggtcggcggcggcgggaagccgcagccgagtatgccccgcgatgggggcgtcagccacggcggcaaagacgaggcggccgtcgtcggagaggtcggctacgtgagggagaccaaagagaacggaaagccaccgaggaacggtggatcgccagcgcggcggcggcggcgcctcgcgtcgccggcgagctcggcgtcctactcttggcagccgagccttcacagcataaccgaagagtaa

SEQ ID NO: 64785 - DNA, 645 bp, Oryza sativa
  Clone ID: PAT_MRT4530_65896C.1
atgtggagcccacatatcatcccctctctcttctccttcctcctccatctctcccttctctcttttatctctcatggcgcaatcggcggtctgggcggcgacggtgggtgggagttggagcgggcggcggtggtgggcaagggttccccacctgcgagcggagcagcagaagcaaagcagagcggagcgcgtacgaagaagccaccgccaccactggcggccgccgccttcctcggccccgactcccccatccaggagacctcccagacggcctacatctcgccgactcctcaagatcctcgtccacacggcgcgggagtcgccgtggcgccgatgggggtgatcctgggcaaggaggtggacggattctcgccacctcctttagtattgccgaaatcttgtttcgacacggtgcgtgtcgtcgacgccttcccgctgccgcgttgcgccggtggcgccttcatccaggccatcgacctccgctacatcgagggcatgctcgccatgctcaacaaaaccgacagatatgggatatccataatctccacagtagcccccgagacctttgcagtcaaccatcagagccttctcaaagataataatccgagtgcttcaaaacttatcatgccaaggcctgccgagtag

SEQ ID NO: 64786 - DNA, 406 bp, Oryza sativa
  Clone ID: PAT_MRT4530_65897C.1
tcgtccacgcgtacgcgcacgcattcgggtcgagctctggatcgggatttgccgtcgacatggcgtacggagatcacatagagcttctccagaagcgccatgtgcgccgcctggactacaacgagcgcatgcgcagagcgggcggagcgcgaggcgcacaagcgacacatggatgcgacgagagttgcttggagctaaggataggatgttattcaagacttacactgccgagacagcacagatgcagacgaccttgtatatgcacgacgagtcaactgcttagttaacggatgctgatgttcaagagggtgctactcactccatatttactgaacctgaatcaaacactacgtgccatggttctaacgcccacagttgagcacatgaggacgttaaaggctgtctt

SEQ ID NO: 64787 - DNA, 925 bp, Oryza sativa
  Clone ID: PAT_MRT4530_65898C.1
cggacgcgtgagcgccaagtccaacaaaaagaagagaaagaggcgtcatcaactttagtagaatctccagttccaattttccatggcgaccttggcgcgcgtctccctcccctctgtcctcctcacgctgcggcatggcgcaaccacccagggcttcgcggcggcgaggccggcggcggtagtggcaaagaggttgctcggatccgtcagatgcggcggcgccgccgaggccttgggcgcggacatggcggtgccgcggtcggtgccggtgcgcgtcgcccacgagctgcagcaggccggacaccgctatctcgacgtcagaaccgagggtgagtttgcaggtgggcatccagttggagctgtaaacatcccatatatgtacaaaaccggctcaggactgacaaaaaacacacattttcttgagaaagtgtcgactacctttgggaaggaggatgagatcatcgttggatgccaaagtggcaagagatccctcatggcagcatctgaactctgctctgctggttttactgctgtcaccgacatcgccggtggattttctgcctggaaggagaatgaactcccaaccaacaagtgacgttggcctgaaagattttctgcgtttctgaaacctaataatctgcagatgacttcacgctccacggctgtacgcctgtacactatgtggtcttctcaaatgtgaggcatcagaagaatactgaataaatggattttgaagggatgaatggtgctagtttagagactagggttttattatgtttaatttgctgtcctgtcaccccttccatgttacctttcatgttaataaactttcttggcaacatgacaatggcaccttgcagtgactgcagatgtatgatgaaaatactgttgcagattcctttcccaaaaaaaaaaaaaaaaaaaa

SEQ ID NO: 64788 - DNA, 222 bp, Oryza sativa
  Clone ID: PAT_MRT4530_65899C.1
atggaggtagaaggagggggaacagggagtttccctagacttaaagggatggcgcctaaggaagacggcggcctggcaatgggcgtcagcgaggcgccggtagcaacactgaagccactgggatggaggagggtcactaacaaggtggatgctggggtgaaaggaggaggtggcaacgacattttacacaagcacgcacacatcggggaggagaggcattag

SEQ ID NO: 64789 - DNA, 942 bp, Oryza sativa
  Clone ID: PAT_MRT4530_6589C.1
cgccaaccattccgcggccaccacgtagagagagagagagagagagagagagcgcggcggcggcggaggaggaggaggaggagaagtcatggcgcttgtggcgcaggacatctacaccctcgaggagctcaagtccatcatcggctccggcgtggcgtaccgcgttcgtctgcatggggtcgagtccctcgaggaggccatcaccatgtaccgtacgctggacgacgccgtgcagttccgcggttgggcgtgcccccaactgaacaagctggccctcgtcgccggcatcgccgcggaggtggaccgcgtcatcgacgagttggttcccagcctcctggaggacgacgagaacagggtcctgatgcttctcctgaagaatgcggcctggtctatccggaacaacggcaagttggtcgacgcggacgccggaggcatcttccgcgtcaggatgcaccccatcgccaaccgcatcctcaaggccgtacgcctcttcctcaccgcgcgctccaccccaaccggtcgccgtgatcgcctccacgccatcgtctatgatctcaagatcttccgcgagtcctactacctaccaatcccatagatccactcaccggtacatgcgcccccccccccccacccacacgacttggttttcagcgctgcgagttttggtggtcatattgatgctgtccatagcctgtagtttgcttcaaatcgtggtgttcctctccaaagctgtacgtacctgatggaggttttgaacgccatgggttgatgggttacgaaagtgagatttgagattctgttagtgtttcctcttgctgctttgagatttgaggatgagatagttcttgctgctttgtgaattgggatacgattgtttctgattagtattgtgcagttacaatacaatgtcatatggtggatatattagctgaaatcaattgc

SEQ ID NO: 64790 - DNA, 1798 bp, Oryza sativa
  Clone ID: PAT_MRT4530_658C.1
acaaatttcaaaagttctcaccacctaatccgatccaagctccgcgctaatcgcgcaaaggggaaggaatccgctcgaatcaaccgaccgattgatcaatcgatcgattcgatccaggaggaggaggcgaagggggttcgtcggcggaggcgatggaggaggacccgctcatcccgctggtccacgtctggaacaacgccgccttcgacgactcctcgtgttccagatcggcttggctcccccaaagccccgccgtcgcggccgtccgcaagggcgacaaggagaatcaccgccccgaggttgttgatgtcgccgccggctacgacgtcgaggccgagatcggccacatcgaggcggagatcctgcgcctctcgtcccggctccaccatctccgcgtctccaagcagccggagcccaaccgcgacgacgctccgatgggggagatggtcgcgaaggtgaggccccggccgaggggcctcagcctcgggcccctggatgtgatctccatcgtcaatcgtgagaagcatccgctgcgcaccaagaagcctccggcgacgcggggcagggggctcagcctcgggcccatggagatcgccgcggcgaaccctagggtgcccgcggcggcgcagcatcagcaacagcaacgcgctggcacggcgcggatcctgaagccaatcaaggagcctccggtgcagcgtcgcaggggcgtcagcctcgggccgttggagatccaccacggcgtcggcagcaaggcaccagcggcggcgcgagccaagccgttcaccaccaagctcaacgccattcgagaagaaacccgaccctccaagcaattcgccgtccccgccaagccatggccgtcgagcaatacaaggcagacactggactcgaggcaaggaacagcagcaagtcgagcgaaggcgaggagcccgagccccaggcccaggaggcaatccaatggcaaggctactgacacaaggggaggcaacaaggtggtggatgagctcaagcccaaaggtgcgtcgtcaagtcagagcggcagcgccgccgccgccgccactgccaagaggatggcggggagctccaagatgagggtcatcccgagccgctacagcctcactcctggcgcttcccttggaagcagtggagcacaggagaggcgacgcaagcagtctctcccaggatcatcaggggatgcgaaccagaatgaggaaatcagagcgaaggtcatcgagccttccaatgatccactctctcctcaaacgatatccaaggttgctgaaatgctcccaaagatcaggaccatgccgcctcctgacgagagccctcgcgattccggatgcgccaagcgggttgccgaattggtcgggaagcgctcgttcttcacggctgcagccgaggacgggcgggcgctcgacgtcgaagcacccgaggcggtcgcagaagcttgagatgaacccccatggtttgatccgttccttccatcagctcagctccgtctttttcttgagtgttcaaggtgcctgcttatcttgagctagcattcgagtgaggcttttctttttgcaggggcgtgttgcataaatggtccggctactgttacattcatatctcatggtctggttcctctttctttcttttttttttgtttcttttgtcaaggccttcctatgctagtcaatgtgtgaaaagagatagtagtagtgatgagtccattctatggtttcttgttttggaattgtaagtgtgctctttggtttgagacttcgagtaagtacaggattcatggtgtggttaagtc

SEQ ID NO: 64791 - DNA, 762 bp, Oryza sativa
  Clone ID: PAT_MRT4530_65900C.1
cggacgcgtgggagaagatttcctggagaggagctcatttttctggagaggagctctcccaaacagcccctatatcagtggcgccaaatccagctcctggcggcaaattacctctgcgccaaattttcattgtttggcgcgcgaaatctctctcatggcgcgcctaatctctcctcaatgtgaactcgccaccctcccgcctcgcgcagatcggggggagtggggcagcatggaggagctcgcggagctcgacagcggcgaccacggcgggtagcttggtggcggcgccagatccatcctcgagttcgccgctcctccccacctcgcgcagatcggcaggcatggagctcggcggcgcagcttggaggagctcgatgtcccctgcgcagacgcagcccctcatctccctcctgacttccccaccatcggcctcaactgccccgggctccggcaatctccggggtcagcggcggcccggtgcccccccaccttcttctccaccccccagcccccgacgccggtggaccccttcccccttcttctccctgtcctgtaggttgcagcagcgctagcaacatccgccatgctagcagcagtggacacatcgccaagatgaaggccctcttaagtccaagccaggtatgctggccagcgtcatccagcagacgcacgaactcctcatcttcgtcgacctccactctggatcacgcggtgttgttgatatgaggagcttatgaagtacagtaatgcatcacaaatggc

SEQ ID NO: 64792 - DNA, 522 bp, Oryza sativa
  Clone ID: PAT_MRT4530_65901C.1
atgaggtggttcgacgtgccgggctgcttctgcttccacatctggaacgcctgggacgaacccgccgtcgtcatcgtctgctcctgtatcacgccgcccgacgcgctcttgtcctccgtgcgcgccgtcctgtccgaggtccggctcgacctccggacggggcggtacagccggcgcgagctcgtgccagggctcaacctcgaggccggcacggtgaaccggtcgctgctcggccgccgcactcgcttcacctacctcgccgtcgccgagccgtggccgcggtgccgcggcgtggccaaggtggaccttggcaccggcgagctcgcggccgtgcacgagtacggcgagggacggttcagcggcgagcccacgttcgtgccggcgacgtcggcgacgtccggcaccggcaccggaggcagggaggacgacgggcacgtggtggtgatggtccacgacgaggcggcgggcacggcggagctggtggtgctcgacgccgggaagatggaggtggcggcgacgtag

SEQ ID NO: 64793 - DNA, 653 bp, Oryza sativa
  Clone ID: PAT_MRT4530_65902C.1
agacacacgcagacgaacgccatcgaattcaggcccactcacttacacatacctagtcgtcacaaactcatcttaatcttctatatctcccaatccgatcgcgcataggagagtagaaaccaagccgacgacgatgacgaggagactgaagcttcgagaatgttactgaaccaggacgacaccgacgagaccactggcagcccggctgggccacgtgttacaggtgcgagaacgacatgatggtcgggaagaacgactccgtcttcgtcgacctctgctcgcacacacacaccgtcctcgtcggcgcgaacaaggacgactgcgagatgtcctcccacgcatggaaagcgtttccgagtcggagaccacgctgggctcgagcatgaacatgctaaaccttgacaatgcgtggaatcataaaaatgattgaataataacttatactgcactatttggagaactacgagctcatcaaggacaacaggatcgcactactgcttgctctttcaggaactggtgcatgacagctattatgagatatgcaaaatcgtttcttgccacattcacagatttatatacccacacctacatgatccatccatcacattatttggagggatgcataattaccacaaaagacattcacctattac

SEQ ID NO: 64794 - DNA, 900 bp, Oryza sativa
  unsure (1)..(900): unsure at all n locations
  Clone ID: PAT_MRT4530_65903C.1
caagggggaggtcaagaggggcccgaggaaggtggtggcgagcgggttcgaagagaaggggggaaccgacggcagagcgcggccgtgtgccgcggtggtgaatcgggcggcacgacgtgggaacaagaaagaaggccggcggctagggcggcggttcggggagagtcaagggggctccaggagggtggtgacgagaggatacggcgaggggatggccgacggcggcgcgcggtcatgcgtggcggcagcgaatcgggcagagcgactgtttggggtggttcaagggagctcaaggcgggtggtggcgcggacagtccccgagagggtggccaacggtggcgctcagccgagcgcggcgtcggcgggaacagagcacggcggggtggggaaggggacggggagctcaccaatcggtgaggaatggtgtcggcggcgatttgaggatgggaatgggaggaaggccgttggcgttgggcggcgaggccgacggcggcgcgcggtcatgcgcggcggcggcgaatcgggcagagcgactgtttggggtggttcaagggagctcaaggcgggtggtggcgcgggaactcccaaaaaggaagcccaccgccggcgttcacccgagcgcggcgccggcgggaccaagagcacgccgggcgggaagaaagcccgttgncggcgcacggggacgaacgtgacgccgaagcgggcgcaccagggaaggaagggacgcggggtggaacggtttggtgacggcgcggcgttcttgcccgtggcgacgaagaaggcggcggtgctccggggcaagggggagatcacagacgagctggcgctcggctggcggtggggcgatggtttcgtgggcgacccgaaaacggcaacggcgaggatgcgttgggcggcgag

SEQ ID NO: 64795 - DNA, 1482 bp, Oryza sativa
  Clone ID: PAT_MRT4530_65904C.1
atgaggagttatggcatggagcaggacgattccagcggcggagacaaagatggcatggtggaaggcattgggggagatggggagcatgctccaagccgccactcctcgtcccggctccgcatcgtcgatggagggagttacacctggtctggtcattcctgcgctatacccgctgcgctgactttgcgcactgcagatagccacggcttcctgtccacgctcgtcgcggctgaggtggcgtccacgtggacgccacgtcggacagggaagggagaggaggccgggcggctcatcggacggccgacggcgctcggcgcgctccggcgaacggcggcgaatcggagtgggcggcaggcactggaagcgagaggaggaggcggggaatcggttccacggatcagatcggagagaaggggcgcgacggcggccggcgacggtggcgaagctcgccggattgccgacgtggatacgcgatgggagggaaaaagagggcgcgggctatggttcgatcgaatcggtgtggtgttgcgacgcacacgcattgggcgcggaggccgatggtcgccggtgttgctcgcgcggcggcgctgcgcggcggcgaaaagggcggcgcggcgcgagagctggaggggaggccggcggccacggggcagcaagggagaggtcaagaggggcccgaggaaggtggtggcgagcaggagggtggagacgagaggatacggcgaggggatggccgacggcggcgcgcggtcatgcgcggcggcggcaaatcgggcgacatggtgccggagttggaggggaggccagcggccggagcgactgtttggggtggttcaagggagctcaaggcgggcggtggcgcggggagtcgccgagagggaggccaatggcggcgctcagccgagcgcagcggcggcgggaacagagcatgacggggcgggcgatggcgagaagagtgaaaacgagaccgaagcaacacggcgtacggcaaggggaaggggacggggagctcaccaatcggcgaggaatggcgtcggcggcgatttgaggatgggaaggggaggaaggccgttggcggcgcacggggacgaatgcgacgccgaagcgggcgcaccagggaaggaggggacgtggggtggaacggcttggtgtcggcgcggcgttcttgtccgtggcgacgaaggaggcggcggcaagggggagatcgcacacgagctggcgctcggctggcggtggggcgacggtttcgtaggcgacccgaaaatggcgacggcgaggatgcgttgggcggcggggtcggtggatcgagcggtcgaatttgaacgcggagcgcgggccggcgcggtcaaagtgggggccgcgagctggcgcaccggcgtcagcggctctctgcctccacgtgcaaagagacgaggacagagggagagcggtcgagctcgggaaggaaaaagggaggacgaggcagtggaaagggggggctga

SEQ ID NO: 64796 - DNA, 1714 bp, Oryza sativa
  Clone ID: PAT_MRT4530_65905C.1
aggagatatgatttattgcatttatggaaatgaatattctcaagaatacccttttatcactcattgacatgtggggccaacatatggtgagagagagaggtgaattgggagggagcatatatagacttttggtcattgtgtttggcggagggagtaaaaatggacttcctttgtttcaatgggccgaggagggggagctggtcgatgggccaggcccacgaacggggagagagaaggggggtggctgactgggcaggggttgacttggtctggtggggtcagcggctgaggtggcgtccacgtggacgccacgtcggacagggaagggagaggaggccgggcggctcatcggacggccgacggcgctcggcgcgctccggcgaacggcggcgaatcggagtgggcggcaggcactggaagcgagaggaggaggcggggaatcggttccacggatcagatcggaaagaaggggcgcgacggcggccggcgacggtggcgaagctcgccggattgccgacgtggatacgcgatgggagggaaaaagagggcgcgggctatggttcgatcgaatcggtgtggtgttgcgacgcacacgcattgggcgcggaggccgatggtcgccggtgttgctcgcgcggcggcgctgcgcggcggcgaaaagggcggcgcggcgcgagagctggaggggaggccggcggccacggggcagcaagggagaggtcaagaggggcccgaggaaggtggtggcgagcaggttcgaagagagggggggggggggggggaaccgacggcagagcgtggccgtgtgccgcggtggtgaatcgggcggcacgacgcgggaacaagagagaaggccggcggctagggcggcggttcggggagagtcgagggggctccaggagggtggagacgagaggatacggcgaggggatggccgacggcggcgcgcggtcatgcgcggcggcggcaaatcgggcgacatggtgccggagttggaggggaggccagcggccggagcgacaatcggcgaggaatggcgtcggcggcgatttgaggatgggaaggggaggaaggccgttggcggcgcacggggacgaatgcgacgccgaagcgggcgcaccagggaaggaggggacgtggggtggaacggcttggtgtcggcgcggcgttcttgtccgtggcgacgaaggaggcggcggtgctccggggttgaccgcgcgacggcgaccgaggttgagggaggatttggggctcggtgggtaggatttataggcaagggggagatcgcacacgagctggcgctcggctggcggtggggcgacggtttcgtaggcgacccgaaaatggcgacggcgaggatgcgttgggcggcggggtcggtggatcgagcggtcgaatttgaacgcggagcgcgggccggcgcggtcaaagtgggggccgcgagctggcgcaccggcgtcagcggctctctgcctccacgtgcaaagagacgaggacagagggagagcggtcgagccgcgcgccggaaggagggaaaagaaaatgcggcggcgagtcgttgcccgagctcgtcaatggtggacaatggaggtggatttggcgaaaacccgtcgccgacgtcagcgcctaattcctccacccaccttttgcagtgtaggggagagaaagagaggaggggtggagggaagagggaggatgacatgtgggaccacat

SEQ ID NO: 64797 - DNA, 216 bp, Oryza sativa
  Clone ID: PAT_MRT4530_65906C.1
atggctgcccatctcctccttctcacttctccctcgtgcatggtcaccatgacaactgctagtgcgggtgctcttcctgcagttggccacttggccaccgcccggtcaacctggcatatttcttttccttcctttggctttgctcgcctagcagaaaaaaaggatcaaaaggcaaaaacaggtctcatcgatcgcaaccgatcactccacttttaa

SEQ ID NO: 64798 - DNA, 711 bp, Oryza sativa
  unsure (1)..(711): unsure at all n locations
  Clone ID: PAT_MRT4530_65907C.1
cggcaacgaaaagggcggcgcggcgcgaaanctgaagggagcccggtggccacggggcagcaagggggaggtcaagaggggcccgaggaaggtggtggcgagcgggttcgaagagaaggggggaaccgacggcagagcgcgcccgtgtgccgcggtggtgaatcgggcggcacgacgtgggaaaaagaaagaaggccggcggctagggcggcggttcgggaagagtcgagggggctccaggagggtggagacgagaggatacggcgaggggatggccgacggcggcgcgcggtcatgcgtggcggcagcgaatcgggcagagcgactgtttggggtggttcaagggagctcaaggcgggtggtggcgcggggagtcgccgagagggtggccaacggtggcgctcagccgagcgcggcgtcggcgggaacagagcacggcggggtgcgagctggttcggcgtacggggaggaaggccgttggcggcgcacggggacgaacgtgacgccgaagcgggcgcaccagggaaggaagggacgcggggtgggacggtttggtgacggcgcggcgttcttggccgtggcgacgaaggaggcggcggtgctccggggcaagggggagatcacagacgagctggcgctcggctggcggtggggcgatggtttcgtgggcgacccgaaaacggcaacggcgaggatgcgttgggcggcgag

SEQ ID NO: 64799 - DNA, 333 bp, Oryza sativa
  Clone ID: PAT_MRT4530_65908C.1
atggactcgagatgggagcagccgggattatgcatttttgccaaccaccgtccgccggcattgggcggagccgcgctcctcgccgacacgcgaactcgcgatgggagcggccggaaaggaaaggggagactcatggtgggagcggccagaaggaaaggggagaagtggaaggcggcctggttcatcgccttggacttctccagcgctgcaacaaggaccgatccaagctgctactgcggcgggaggagaagaaagctgatggcggtgaccggcgaaggggtcaggaaagtgggacctgaagcggccgagggagcagtccatctccgtgactaa

SEQ ID NO: 64800 - DNA, 402 bp, Oryza sativa
  Clone ID: PAT_MRT4530_65909C.1
agggcaagaacaccatcatgcgaggccagcaagaacaacagactgagtttgcaagcttcatcggaaaaaagcagcttaatatgagtccctagttcaagctacttgggacatctaacaacacagggctccattctataaaaatccctatggggggggggaggacaaaacttctcgcaggctatcttaacttgcttctgctaccttcttttttttttttttttttttttttttggggggggagcttgcttcggccactaaaagggggggggggaaagaagaacgagggacccccaccattggaggctccgcctttgaacgaccaaaaatacagggcgggggaggggtatttttcacccagcaccgattaaaaaagggccttttcctcccccaccaaaggtggga

SEQ ID NO: 64801 - DNA, 485 bp, Oryza sativa
  Clone ID: PAT_MRT4530_6590C.1
ggggcaaaccaatcaagtagggatacttatataaaggcatcctcatcatcccattcctacaacgacaacgttttacaaaaagacctttttttcccccaggggaaccggacaaactaacacaaaaggcagccttgattcaacggggataattaaaagggcaagggcggaaagcgcctttaaatatttcagggagcctatgatttcccaagggaaagatccatgggaagataagcaaggcaggctacaaaaaacaggaacacgggtgatatcagcatcaacggttctgcgagcatgaaaatcggattgaattccaaataccccgggaaaggaacattgggctctccaactacgtttcttttttttagaacaacgtggcgtccttccaacaacataaggggatgaataactagcctcaaaatattgttccatcaggaaaggaactacagcttggggacttggcgatccctcaggaagcacgactttga

SEQ ID NO: 64802 - DNA, 411 bp, Oryza sativa
  Clone ID: PAT_MRT4530_65910C.1
atgaggagttatggcatggagcaggacgattccagcggcggagacaaagatggcatggtggaaggcattgggggagatggggagcatgctccaagccgccactcctcgtcccggctccgcatcgtcgatggagggtctcgccgcttgagatcctcccccttgcggccggcaccacctccccccccccccgtgccgcacccatcagtatgcgcgcctggtgtgggagcaaccaggagttacacctggtctggtcattcctgcgctatacccgctgcgctgactttgcgcactgcagatagccacggcttcctgtccacgctcgtcggttgcaactcaggacagcccgagattacaaccgacgacacggacgaggcaacaccaacaacggcagcagcagcggaaacaacggac

SEQ ID NO: 64803 - DNA, 189 bp, Oryza sativa
  Clone ID: PAT_MRT4530_65911C.1
gcgctacagaattctagggtacacctcacagcattcgctcgacaggatgatacgggactatcgaggagtccatagaaggcatcacctgcgcctaactgggaatccacaatatgacccttggccatctgaaagtgaccgggctgtatgaccctgatctatacttcattgacatggctggcatcataatga

SEQ ID NO: 64804 - DNA, 1362 bp, Oryza sativa
  Clone ID: PAT_MRT4530_65912C.1
atgggccgaggagggggagctggtcgatgggccaggcccacgagcggggagagagaagggggggggggtggctgactaggcaggggttgacttggtctggtggggtcagcggctgaggtggcgtccaggtggacgccacgtcggacagggaagggagaggaggccgggcggctcatcggatggccaacggcgctcggtgcgctccagcgaacggtggcgaatcggagtgggcggcaggcactgaaagcgagaggaggaagcggggaatcggttccacggatcggaccggagagaaggggcgccacggcggccggcgacggtggcgaagctcgccggattgccgacgtggatacgcgatgggagggaaaagggggcgcgggctatggttcgatcgaatcggtgtggtgttgcgacgcacacgcgttgggcgcgaaggctgatggtctccggtgttgctcgtgcggcggggcggcgcgggcaaccaaaaggcgcgcgccgcgcgaaaattgaagggagagccggtgtccacgggccagcaagggggaggtcaagaggggcccgaggaaggtgttgccgagcgggttcgaaaaaaaggggggaaccgacgccagagcgcgcccgtgtgccgcggtggtgaatcgggcggcacgacgtgggaacaaaaaagaaggccggcggctaggccggcggttcggggagagtcgagggggctccaggagggtggagacgagaggatacggcgaggggatggccgacggcggcgcgcggtcatgcgtggcggcagcgaatcgggcagagcgactgtttggggtggttcaagggagctcaagggctcaccaatcggtgaggaatggtgtcggcggcgatttgaggatgggaaggggaggaaggccgttggcggcgcacggggacgaacgtgacgccgaagcgggcgcaccagggaaggaagggacgcggggtgggacggtttggtgacggcgcggcgttcttggccgtggcgacgaaggaggcggcggtgctccggggttggccgcgcgacggcgaccgaggttgagggaggatttggggctcggtgggtaggatttataggcaagggggagatcacagacgagctggcgctcggctggcggtggggcgatggtttcgtgggcgacccgaaaacggcaacggcgaggatgcgttgggcggcgaggtcggtggatcaagcggtcgaatttgaacgcggagcgcgggccggcacggtcaaagtgggggcggcgggattcggcgccggggaggaaacgagatttggaaattgaatttggagatggggtttcaaagagaggggaaatactcgggaattgggtttcataaaaaggaatt

SEQ ID NO: 64805 - DNA, 489 bp, Oryza sativa
  Clone ID: PAT_MRT4530_65913C.1
atgtcgacctctaccagtccaccaagcgcatcggccaccgaatatgtcgagtttccgatgttccgtaggagagcgtttacgttgaggaaggtgggttatgagcacatggttttgatggtcgtgctcatgacaattaaggaccagttcgcgagctactgttgtgaaacattaaccgtgccaaccacaagccagtgtgggcaacagcttgatgaggacatccctagcagccactcttccccacctcctaataaacgtgcatctgatatagtgggtccaattacaaggagcagagccaaacaattagagaaggaaattcactctcaggtgaacgctaaccttgtgttaactaatcaaattactttggatgagcctatgcttttgagtacttgttttaatgttcttaggaatgatggagtgcacgaacggacatgggatgatgatggtttctaccctccaaatatatggactaaggagcctggacgtgcatag

SEQ ID NO: 64806 - DNA, 291 bp, Oryza sativa
  Clone ID: PAT_MRT4530_65914C.1
atggtgatggtccccgctgcccatactgaatgtgttcattggcacggcaaatgcaccctctcccttgacgatcgatgccctcagcatcacaacgtaaagacgcatgtacccgttatcctcgacatgaagagtttgaactacaccaagtggaggatattctttattgttgccttcctaggaaagtttggacatcgtggaagatggagtagtagaaaaggcgatgaggatgggtatgtcctcttgcaccctgtgccggttgcatctattggaggaggaagttcgagcacatga

SEQ ID NO: 64807 - DNA, 1014 bp, Oryza sativa
  Clone ID: PAT_MRT4530_65915C.1
atgtctggacctggaggaggaggtcatggcctctacgaggatcatcctgcagccgccggcttcctccccttcgaccacgacgacgacgtggtggccagcttcttctttggcagatcggcggcgtccggaggaggagccggcgccggcgccggcgctggagacgatgatggtgttgggctcatcacgccctactccagcatcacggattatctgcaaggcttcctgcaggaccccgtgtacgcgtcgtccccgttgggcggcgatgctgccgtgaagcacgaaacggtggtggatcatcccagtcaggccggcggcgtggcggcggcgccggccacgccgaactcgtcggtgctgtcgtcgtccagcgaggcggctggaggggacgatctgcgccggtgcaagaaaggtcgtcggccggaggacgaggaggaggaggagattgacgatgagggatcggccgttcagagttgcaagacgaacaaaatgaagaataaaaaaggggcgaagaaggagcgtgagccacgtgtggcgttcatgaccaagagcgaggtcgaccacctcgaggacggctaccggtggcgcaagtacggccagaaagccgtcaagaacagctcctacccaaggagctactaccggtgcacggcgccgcggtgcggggtgaagaagcgggtggagaggtcggagcaggacccgtccatggtgatcaccacatacgaagggcagcacacgcacccgagccccgtgagctaccacatgcacaggcagcaggggctcatgcatgtgagcgcgcgcggtgtcatgcccggcgccgccggcgcctaccagttcggcgcgccgccgccgccgctccttggcttcgacgaagccctcgccgctcgggtgcgaatgacgatgaaccagcagcagcagcagcagcagttaggcttcgtgccgagcatacacgccgccgccgcccggccgacgatgcctcctcttcatctctacaccgcgcagcaagacctcttccttccgtga

SEQ ID NO: 64808 - DNA, 486 bp, Oryza sativa
  Clone ID: PAT_MRT4530_65916C.1
atgggcactcctcgacaagttcccagtcgactaggacatcgtttcctacgtggccatggtgaccgcccacgcaaagcacgggttcttcaacaaggttgtgctgctgttcttggcttcgccatggtggatgattgcaacgtgtccattgctgctcttggtgtgcaagtagatcaaggaccccccgtgcgccccccgccctcagacctcggccctcatgagacgaggctccgtcgccagcccgtgaagattgtcgtcctcttcggctcccataccgccgacaacacccactactccttcttccctgagctctcgcgtcctctcacccagccgctccctcggctcggcagcgagcggcagaggaaaccggcaaaccgcggtgcgcggcacggcgcgcgtcctgcactccagctccgcgccataaccctcttcccgttttgcccctcctcggctcttctcccaccccagccgcgcccccccgcacgccat

SEQ ID NO: 64809 - DNA, 805 bp, Oryza sativa
  Clone ID: PAT_MRT4530_65917C.1
gaacggcaacgcggcgctgctgggccgcgcgcgcaggttccgcgggttcgccgactgcgtggcgcgcaccgtccgcgacgagggcgtgctctccctctggcgcggcaacggcaccgccgtcatccggtactacccctccgtcgccctcaacttctccctcaaggatctgtacaggagcatactgaaagatgcaggaacctcagctgataacaagttctcttctattgctttaaccaacttcattgctggtgctgcggctggatgtactactctggtcctcatttatccacttgatattgctcatacccgtcttgcagctgatattggccggaccgatactcgccagttcagaggcatttgccacttcgttcaaaccatctacaataaaaacggcatccggggtatctacagaggattgccagcatcactacaagggatggtcgttcaccggggcttatactttggaggctttgacaccgccaaggatgtgatggtaccactagactcgcccctgtggcagcgctgggtgacagcacaggcagtcacttccatggcggggctcatctcgtacccgctggataccgtgcgaaggaggatgatgatgcaatcagggatggatgtgcagatgtacagcagcacccttgattgctggaggaagatctacaaggtggaggggatcaagtcgttctaccgcggagcactttctaacatgtttaggagcactggcgctgccgccatacttgttttgtatgatgaagttaagaagtttatggacagggatttttggattcagtatggagattag

SEQ ID NO: 64810 - DNA, 369 bp, Oryza sativa
  Clone ID: PAT_MRT4530_65918C.1
actgcttcttctcccaagtcctcgtcggcggtcacaacacgtacaccacacagctgcgcgagaccggagtaggaggttacaatggaggaggacgacgaagaatcttctcttagcgccccttccccggaaccagaacgcccacggcatcttcatgctgctgacctcccacgcagagctgaccgtgtgagcttcacgaccatgatgacggacccgaagagcacgcttgatacccgcaacacccctcacctgctggaggctcttgtgaggactgacatccccatggcagagggatcccatgttacaatcaaaaaagccaccaagctacagattgcgagcatttttcatggctacggatagtcttaagaaaaa

SEQ ID NO: 64811 - DNA, 389 bp, Oryza sativa
  unsure (1)..(389): unsure at all n locations
  Clone ID: PAT_MRT4530_65919C.1
ttccgcgtgcttgctttttttttgcttttttttggggtcccctttgtgtggggggggtggccgntgttttccatcgttttgcctgggaaatccgtggggttgcccactttattcgccttgcggtccatccccttttcgccggctggggtcttggcgnaggggcccgctcctttcgccttttctatctttttcccttcttttttgtgttttggggtgcgctttgttgcggtttttttttcgcggggggtgttttgtttcgttctttgttttttttttttttttcttcccctttggtgccggtccttgcgctttccgcccttccttccgggcccgttgcgtgggttttcccttttctgtttttttttttgtggttttttttgggttttttt

SEQ ID NO: 64812 - DNA, 1912 bp, Oryza sativa
  Clone ID: PAT_MRT4530_6591C.1
ccggccgggatcgcctcgtctcacgtttgatccatcacactcacacaacacaaccctccccaaaacctcccgaagagagcaagatgttcggcttcgggcaccacggccaccatggccaagaccagccgccccagcaccacggcggcggcggcggcggcgcgcaccagcccaccttcaagatcttctgccgcgccgacgaggggtactgcgtcgccgtgcgcgaggggaacgtcgtcctcgccccgaccaacccgcgcgacgagcaccagcactggtacaaggacatgcgcttcagcgccaagatcaaggacgaggagggcaacccggcgttcgcgctcgtcaacaaggccaccggcctcgccatcaagcactccctcggccagggcccacccggtgaagctggcgcccgttcaacccggagtaccccggacgagtcggtgctgtggacggagagcggcgacgtgggcaagagcttccgctgcattcgcatgctgaacaacatccgcctcaacttcgacgcgttccacggcgacaaggaccacggcggcgtgcacgacggcaccaccatcgtgctctgggagtgggccaagggcgacaaccagtgctggaagatcctcccctggggcgacgaggcctacgccggcggcagcgccaacgcaccccgcggcggcaacgagcccaccgtccgcatcttctgcaaggccgacgagggcttcagcgtcaccgtccgcggcggctccgtctgcctcgcccccaccaaccctcgcgacgagtaccagcactggatcaaggacatgaggcacagcaacagcatcaaggacgaggaagggtaccccgccttcgccctcgtcaacagggtcaccggcgaggccatcaagcactcccaaggcgaaggccaccctgtgaagctggtgccgtacaaccccggataccaggacgagtcggtgctgtggacggagagccgcgacgtcgggcacggcttccgctgcatccgcatggtgaacaacatctacctcaacttcgacgccctccacggcgacaaggaccacggcggcgtccgcgacggcaccaccgtcgcgctctggaagtggtgcgagggcgacaaccagcgctggaagatcgtcccctggtaaatgcggtgtgctggagctgcattggtcgtcgccgtgatctgtggagtggggagagtttgcgcccgtggcctgctgccctctgcctttgttgctagaataaaagtcgtgtgcgatgatcagtggtgatggtgttgtgtctgtgtccgtgtgtaatgcttttagtcgttttctcgagtcctgcttttgtgacagaatgggggtgagaggagaggtgtcgtttccgtgaactatctcgaaggcgtttggccttgcagcttgttcttcagatgttcggagtttcagaccttttgatgagtaccctgctttatcatttatcagccatgtgtctagttcgatccatatgcatcctttgaagtggctttggtttgtctttgaggatcaagatcctgtgcagttgttattgtaactgtaacttaagcagttacatgtgcatcacatgatctagaatggaaggccaggatgtgaagtggtactgtagcagagatgtactattatacctgtactgtagcagtcatctagagccactggatctgaccacggatggccatgattgagtgcagtgtgctattgtgcagtgtacaatagcaactgcatttgatttcaatccgtgtttggaggattaaggatttgattgctgtctgatgctcgttgctcgttcggaggtgctctggtgaatctttgaggacttggctggacgaaatgcacccttgtttagtgcgaaaaaaaaaaaaaaaaaaaaaaaaaaaaaaaaaaaaaaaaaaaaaactcgaggggggccc

SEQ ID NO: 64813 - DNA, 226 bp, Oryza sativa
  unsure (1)..(226): unsure at all n locations
  Clone ID: PAT_MRT4530_65920C.1
tgaagtgtggatgcccgaggtggtggccggatgggatattcacgtgtctaaccacgacaccncatggtacgcctgttggttggtatgaactgtgtgaccacgtgactggctggctgcgaaccacggatgggtgtcacgcttcccgaaattttggcnacgctccctttccaaaaatcnttcntatttcccttcttttttaccttgatttcatataaatccctttgat

SEQ ID NO: 64814 - DNA, 1647 bp, Oryza sativa
  Clone ID: PAT_MRT4530_65921C.1
atgaggcgttgcggttctagctcgggaggtagattcacggggggaggaggccagaaggggagatggccggggttcgaggggaagagagcggcgcccgtggtgaagtggtcgcacgcggaggccatgaagaagaagcctagcggtcggggcgatgctgccgtcaccggcgacggaggagggtggatgaggaggttggaggaggaagaggcggggcttgagcttgatggctcgtgttgggggagttggtcggaggcggcagcaacgagggcgtcgggtacggccaccggcggagcaggaaagcacgttcggtttcgtccggaggcggaggcggaggcgaagagagagaggcctttcgatgccggggaatggggcggaggaggaggaggagaggtgggaggcgatggcggcgaggggcgaatgtacgagtggaggtggacggaggcggtgagcccggagatactggcgctcatactccggggcagggtggacgcggacgaggtggcgcggggcgcggcgcgcgtgtgcagggcgtggagggaggccgcggcggcgccggacgtgtggggggacgtggacatcgaggcgtggtgccgccgcgtcaactgccgccccagggccgacgccgcggtgcgccgcctcgtcgccctcgcgcggggcacgctccggcagctctccgcctaccgcgtcggggacgccgcgctcgcctacgtcgctgcctctgggaagttgctaaatgtgctccaaatcccaatgagcgagatttctgatcaagctgtgaagaagtacgccgaattccttcctgcgctgagagtgctggacatcagcaactgccttaagatctcatcgagtggcatcgaagcgctaggccgacactgcaagctgctcgttcagctgaagaggaacatgcctcctccagatgttccccatggttacaatgcggtgcctaatgtggtcaacgacgaggccttggcaatcgcgaacaccatgcccgtgctcgagcatctcgagcttgcctatggcttgttcagcgataccggacttggtgccatcctcaccaggtgccctcggctgcaaacgcttgacatacttggctgctggaatgtcaggcttgaaggtgacattgagttgagatgctgtgccctggagtcattcagggagccatgggagcctatgtacagtgactgctcaagtaccggaagcgacaatgacgatgatgatgaagacaatgatagtgataattaacaaattcagtttaagatcgtcaggatactttactgaacatttcaagttcttggcataattctgagatacttttgttttggtagtctactgccagtctgcagcatctgccctgtccttcacaaccttatgcctacatggcgcattttgtttgtttgggttcagttaccttctctcttattgctactgatggtgcatatgagcatattactcactggaaatttactggagtaacaaactaagaatagaaagtattgttattagtactggtacttggaagaagagagatgccctttataggaatttgaaaattccaaatttgtgattgtgcttcttgtatgaggagaccaattgaaatgctctactggttgctgtctaacttaagacagaatgagccttttactgtct

SEQ ID NO: 64815 - DNA, 306 bp, Oryza sativa
  Clone ID: PAT_MRT4530_65922C.1
cctttcactgtccggtaccccaccgggcgcgccgcgcttggtcagcccggtcgtgggcccctcacgaaccgagcagcaagggagggctggaacgaaaccattccggaaagtgggcgcctcctcggaccgagcgagcaggaaggaaccgggggggggggggggggtgaccagacggagacgggcgcggtcatccatagggtggaaggaccagcatgactacatacgaacctcgcgccgtcgactgacgaggcgaagacggagccgccccagagggcgcgcgggatcacatacagccggggtacgatg

SEQ ID NO: 64816 - DNA, 246 bp, Oryza sativa
  Clone ID: PAT_MRT4530_65923C.1
tcggcgtgaagccatcgctagagccggaattccgatgctagccattgttaatgaggttgagttcctacgatccatccatggaggatgaggctaatttacgacaaagcttcactgaggtggttgactatgtcaacacgatgttcacgcacccatcaagacaacgagtgcatcatgtgcgcacacaacctagagcgacattggatacttatagtcactgcacctaagtcgagtatggttacctacctt

SEQ ID NO: 64817 - DNA, 658 bp, Oryza sativa
  unsure (1)..(658): unsure at all n locations
  Clone ID: PAT_MRT4530_65924C.1
ncgtnccggcggctcgacgcgtggcgcggatcggatctaactatttacctgctaacctcctcgtcctcctaccgacggatcagcccggctcttcctgcctttatncgctctctcggcaggcgcacatggtagaagatgcgcactatcgttgataccttcctctttacctcgcatggtgacaacgaggtgccacgcctgacaagctctgcgacacaacgtctgagatgctgtgcttgatgcctgtcttgcacgaggacacctgacggcgggcctgttgagagacctgcaccgcgacaaacatggccagtaggcctttggggagatgaccacacacagctgacgatgactactgagaagactgccagggatacgtgccggacttcgcatttgcgtcatgatgatgacggtctcgatgctgacctatgtgtggagcttgtgaactgcgaacttccaactctttaccttggacagggggtgcacggacactgtacccatcgccctgaggagattggtgctggtgaccatcgacacctgttcgtatatgcaactgccgagacccctgagttgatgctcctcagacttgtacttgctaccaagcttaggcgctcgtcttacggagaggtagcaagaatgggacctgcgcatgtgctacgcctga

SEQ ID NO: 64818 - DNA, 564 bp, Oryza sativa
  Clone ID: PAT_MRT4530_65925C.1
ctacaccaagcgaccgattggctcgcgcgcggatagatccgcgagcggctccgcgtccgtgcggcagcgtacaccaccggcagtccggcacccgcgtgccgttcgtccgctcgcgtacgtgccgccatcacagcgctcaaccacgcggtgcaagtacacaacacacgacgcgtcgtgagcgcgtgcgtcgtggtcgtcgggtttggtcatgaggagacaggcgtggacggcgaacgggtgaagcttctggttctgggttgggtatgtagcagcactgcggctaggagcagtgccacgctcgcccttcccgcgccgccaccgccaccaccgccgccgccgccatcccacccagccacctcctccccgaccgccgccgtagccctccgcgacgccgtcgtcctcctccgcgcgctgcttaccggcctcccaccgcttcctcgagcgtgagctccggcagtcgctgtcccctcctcccgccacctcttcagagatgacatcaaaaggaatccaaccactgttgaactttttgatatcgcacaatccaatagtgaacacagcaggcat

SEQ ID NO: 64819 - DNA, 678 bp, Oryza sativa
  Clone ID: PAT_MRT4530_65926C.1
atgccgtacgaaacacccaccaatattcctgacggtatggacattgatgcaccaagtgttgcaccaatgggtggtaacgtgcacttcagtgaagaaaacacttttgtcgagcctcctgagaatgatgacgttggtgatactttatacgatgaagacactaatgaggtggagaacaggattggaaacgggactgaaaacacgatcgcagatgatgacgtccgtctgcctgatgaaattgtcattggttattcggacaatgaagattcagtgaacacattgattgaatatgtgttcccctcgcttgatgacgagagaaatacgacctccgtggaatatatgagcacacgggccatcctctcaacaaaaaatgatttcgtggataagctgaacacgaagatgattgataggtttcctggaaaggaaaagatttacctcagctttgattcagtcgatgatgatccccaaaatagctactctttggactttctgaacacgatcactccaaatggcctccctccacatgagcttaaagtgaagggaagagcaccaagaatatcatctataaagacgttcttgactggtgagcaaagtacgccatcatctgccagatgtgttcccaactcctccagcaaaggaacacgatctcaatatactgggaaaatatttgaagccgagtag

SEQ ID NO: 64820 - DNA, 231 bp, Oryza sativa
  Clone ID: PAT_MRT4530_65927C.1
atgggacgggaccggatcagcacccgcgcgcgtgcgttcgtgcgggtgcggcgctcggtttcgctcgaaacggtgggcgatcgagttcgtccaatattgtcagtgcagcatccagtgacaccctggcgattgatacggggacgactacaaaagcgtcgtgcttttattatcaagaacctgccaccggctttgctacttcacaccgacgccgtgccggtcttatccctttgt

SEQ ID NO: 64821 - DNA, 5904 bp, Oryza sativa
  Clone ID: PAT_MRT4530_65928C.1
atggttgttcagaatggttgggcctatgcaacgggtgttgacgcaacgaggccacaaactgaagagcgtattgcattcggagatattaccaacagactagatgtattgcaaacgacacctttaacaccttccaatgaggtattacataagcgggaagcagctaaccgaagacaacgtgaatgtcgtgcaaggaaaaaggctgcagcaattaccccgtgttctggtacactgatgcaaccaacaactgcttctctttctatgggaagtgaagttgtcaatgcccggctagctgaaactaccaaagatgccagagaggaaaggaaccgtaagcaacgtgaatatcgccaaaagaagaagctggggttaactaatcttgatgggagtgtgagctctttaacacccgtccaaccagcaaatgaggaaaggaacagaaagcaacgtgaataccgtgcgaggaagaaggctgagtcaaacattgttagcggatcaaattctgaatcaaccaatcataatgtttcaccatatggaacgacatattctaccgttttgcaagcaacaagtgtattagacaaggaagctgttgatctagatgatcctgtggattggcttcacagaaatgatacctaccaaagacaatgtaggaagaggaaagtagttagcattgaacatgaccaacactcacccatcctagatggagttacacaagacgaaagtatacctgtccaagctgttcatcaggatgttccaagttccgattacattgaattcgatagtagactattcgaacctctactaaacaattatgacgacgaaggtaatgtcgaactgacgcagacatgtgacgtcgtggatagtgatgatgaggaattgcaaaataaagacgatagttacgagtcatatcgcttggatatcaagggtgttaattctgttgatactgaagatccatacgattatgtttatcataacctgccaaagaaacatcatgtgttaaaaaaagtggctaattgtaagtactgtggggcgattaggtttcagtacgagccccctggattctgctgcaggcaagggaagataacagtagccactccattggtcccccttgagttggtacgcctgtttacaagccaggttgataatgatgcgaattactttagaaaacatattcgttacttcaactcacatttctcattcacaagtcttggagtgacccttgaccacaacgtgagcactgctgcaggcaccggtgtatatacatttcaagtgcacggtgcattgtaccatcgtttagataatttggtgccaggttctcatggtccacgtcatatgcagttgtacttctacgatacggaagaagacactgatcttgcacacagagcaaataggtcccctgatcttgatatcaaccttgtgcgaatcatcctaagaatcttggcggataacccatatgttgagacttttaaccgagtcggtagcatgccaaatctagatgactataagattgagatcaacacgaatgtcacccctgaccaacgaagatataatgctcctacaacatcccaagttgctgctatctggctagaaggggatgatccggttagaacttttgataggcatgtgatggtgcatgccaaaggggagaaacctagctatatcaaagcatacaatggttgctatgacctgttggcgtatcctttatttaaccctaacggcgaaaccggatggaatgtcaaaatgccgtacgaaacacccaacaatattcctgatggtatgaacattgatgcaccaagtgctgcaccaatgggtggtaatgtacatgtcagtgaagaaaacacttttggcgagcctccggagaatgatgacgttggcaatactttatacgatgaagacactaatgaggtggataacaggtcatgcaagcggaagaaagatagatttgtcactgcaagagagtactattgctttaggctacagggtgtcgtcaacgtgatcaattctggagagacaaggggtaaagaggtaggaaagaggattgttctacctcggtcttttcctggtggcgatcgcgacatgcagcggtggtttcttaatgcaatggctcttgtccaacgtttcgggagaccatactacttcatcacgatgacctgcaatccaaattgggaggagataacagaaaatctctatcctggccaacagccgcaagatcgaccggaccttgttgcaagggtattcagggccaagctacgagacatgttagatttgttcaccaagaaaaagtattacggtgaggttcaggcatatgctcatgttaccgagtttcagaagcggggcctcccacatgaacatatcctattaatcatgaagccagagaatgatgacgttggcaatactttatacgatgaagacactaatgaggtggataacaggtcatgcaagcggaagaaagatagatttgtcactgcaagagagtactattgctttaggctacagggtgtcgtcaacgtgatcaattctggagagacaaggggtaaagaggtaggaaagaggattgttctacctcggtcttttcctggtggcgatcgcgacatgcagcggtggtttcttaatgcaatggctcttgtccaacgtttcgggagaccatactacttcatcacgatgacctgcaatccaaattgggaggagataacagaaaatctctatcctggccaacagccgcaagatcgaccggaccttgttgcaagggtattcagggccaagctacgagacatgttagatttgttcaccaagaaaaagtattacggtgaggttcaggcatatgctcacgttaccgagtttcagaagcggggcctcccacatgaacatatcctattaatcatgaagccagagaatgatgacgttggcaatactttatacgatgaagacactaatgaggtggataacaggtcatgcaagcggaagaaagatagatttgtcactgcaagagagtactattgctttaggctacagggtgtcgtcaacgtgatcaattctggagagacaaggggtaaagaggtaggaaagaggattgttctacctcggtcttttcctggtggcgatcgcgacatgcagcggtggtttcttaatgcaatggctcttgtccaacgtttcgggagaccatactacttcatcacgatgacctgcaatccaaattgggaggagataacagaaaatctctatcctggccaacagccgcaagatcgaccggaccttgttgcaagggtattcagggccaagctacgagacatgttagatttgttcaccaagaaaaagtattacggtgaggttcaggcatatgctcacgttaccgagtttcagaagcggggcctcccacatgaacatatcctattaatcatgaagccagcaacacaacaagggaaggactcttatccttcttacaggaggagagatgacgggtggcatgtaaaaattagaggtgcggtgttggacaataggtgggtggtcccatacaatcctggcttgctcatgaggtataattgccacatcaatgttgaagcttgtgcaagcatcaaatctgtgaagtatctatataaatatgtatataaaggacatgactgtgcgtcgttctcagtcgatccatctggagaaatcaatgagatacggcagtatagagatgccagatatgtttcaccgccagaggctatatataggattcttggttttccactattcggtatatatccggcggttttacagctacagcttcatttgccaaacatgcaatatgttgcatatgatgagtctggtaatcttgaggatgtcgtgaacaaaccatctaacaaaaagacaacacttacagagttttttgaaatgaatcgcaaagacccgaaggcaagaaagttactgtacaaggagtttctggagcactatagatgggttgcagggaaaaatgtatggcagaaaagaaaaaccaagacttgccaggttggacggatcgtgtatgcgcacccggcggagggagaaagatactatcttagggtgcttctgaaccatgttagaggtccaacctcgcatgagcatctaagaacagtatgtggaatcacttactccacttgtagagaagcatgcgagaagagtgggcttgttgagacagacatgtcacatgatgactgcttgagcgaggctgcaactttccaaatgccatatgcactccgtcgcttgtttgtgactatacttgcctattgtgaggttactgatatatgtgctttgtggcacaaacataaggagtcaatgtctgaagattatgcccgagataatcccaacccgatgtcagtagagcagatggtgcttagagacatacgggatacacttcattccatgggaaaggatatctcagactatggtcttcctgagttgactgatacatatgttttttccaacgacacaccgattaaagtcagagaggagcagtctgtgccaattgacccagagcatctagatatatacaaatctctgaacgatgagcaacgtgcagggtttgatgacatcatacaacatgtgattaagaagaagagtcaggtttttttcgttgatggtccaggtggcactggaaaaacattcctttacaaggcactacttgctagggtgcgatctgatgggttaatagccattgcaaccgcgacatctggtatcgcagcgtcgatattgctcggaggacgtactgctcactcgaggtttaaaattccaatcaagcttgctcataatagcatgtgtaacttcacaaagcagagtggcaccgcagacctacttcgcagggcatccttgattatttgggatgaagctgcaatgacaaagcgtcaggcagttgagacccttgatagatccctacaagatattatggacaatacgttgccatttggaggaaaggtcattgtatttggtggtgattttagacaagttcttcctgtggtgacacgtgggacaagggcacagataactgatgctaccttgcagagatcttatttatggaagaatataaggaagataagcctttcgcataacatgagggcacaatctgatccttggttttcagattatctacttaggattggaaacgggactaaaaacacgatcgtagatgattacgtccgtctgcctgatgaaattgtcattggttatttggacaatgaagattcagtgaacacattgattgaatatgtgttcccctcgcttgatgatgagagaaatacgacctccgtggaatatatgagcacacgggccatcctctcaacaaaaaatgatttcgtggataagctaaacatgaagatgattgataggtttcctggaaaggaaaagatttaccacagctttgattcaatcgatgatgatacccaaaatagctaccctttggactttctgaacacgatcactccaaatggcctccctccccatgagcttaaagtgaaggtcaactgtcctgttattctcctccgcaaccttgatcctaacaatggtctatgcaacagaacaagactaatggttaggacatttcaagacaatgtaattgacgctgagattgttggtggacagcgcgccaacaaaagggtattcatcccacggatcccattgtctccctctgatgatatatctcttcctttcaaattcaagaggaagcaatttccaatccgtctcagttttgcaatgaccataaataaatcacaaggacaaactatcccaaatgttgggatctatcttccagaacccatattttcacatggtcagttatacatcgcattctcaaggggtgtgtcacgacaaacaacaaggattttggctaagcctaagaaagaggttgaccttgcagggaagagcaccaggaatattgtctataaagacattcttgactggtga

SEQ ID NO: 64822 - DNA, 219 bp, Oryza sativa
  Clone ID: PAT_MRT4530_6592C.1
atgcctgtcgggtccaactccaagtgcatgtcaaacaacacaagctatatagttttgtgcgcgcgctgcaccggcgcgcggcgcttgcccggcggaacccgcgcgctgccagagatgggacgtctcacgcacgtagcgcgcgcggtgggcgggcgcgacgtcgacgcgcgcgcgcagctgctgcatgcctacgcctacgcctacgcctacgacagctag

SEQ ID NO: 64823 - DNA, 123 bp, Oryza sativa
  Clone ID: PAT_MRT4530_65930C.1
tttgagtcactcactacttgccagccgacaaacaggagggtattaatttagctagaagaggggagaaactaaccaaacctagagctaacgatcagtatggctcttcacatgaaataacaattt

SEQ ID NO: 64824 - DNA, 278 bp, Oryza sativa
  Clone ID: PAT_MRT4530_65931C.1
atggaggaggacgacgacaccgtggcagttgatggcggtggccggtgaacggtggccggcgacgcttgaggcgaaggcactgcttcaggcctcactgcagcaacatctgcttcagatcgatgctgaagagacgtctggcccatggcaaacgaggtggacgtcatgaggacgtttatgacagtgaggcggtgacaacagcaacaacgacctccatctttggctccgtcgccggatccggctcctaccgaggtcgcagcgatctcccggttaggtgtctt

SEQ ID NO: 64825 - DNA, 152 bp, Oryza sativa
  Clone ID: PAT_MRT4530_65932C.1
atggcccgagtcttattgggccgtgcatgggccgtgtgtgcagcccgtgtctcgaagaccaacaccctcccgccacctccatctggatcctgtcaacctcccaacattggcacccgcctagccatctccagcgcgccgagctcggggggctg

SEQ ID NO: 64826 - DNA, 426 bp, Oryza sativa
  Clone ID: PAT_MRT4530_65933C.1
ataaataagatcaaccatgtctttgacataccgggtggatgcactgaggaccctaatggagctgatgctaccgcgacacttgctccatgcaaatgataatgacttgaaagatataatgatgccagagcacaaacggtgttcaaaagatgtatacttgggtaatgaactcattgacacatatctacaccagacaattgaatcatctcaacctgtttataatgaccactgacaatatatcctttttcagttactacgaggtctgaagtgcctccattcagacaaggatactccatcgagactctgaaaccaccgcacctcctggataacgcaaactgcgatctccagatgtgataatgtggcttgcgtcgcacagacaacacttaaggtctatttatgactgaatatgcagtgacccggaggtataag

SEQ ID NO: 64827 - DNA, 615 bp, Oryza sativa
  Clone ID: PAT_MRT4530_65934C.1
atgagagagagagacgacgatcgatcgacttggtgcacatgcacgaaaacgagaacgagagagaaaactgatcgactcgaaaacctgcagtccgtgtttaaatttccccggcccctgctgtgttgcgcaggcaatagggcaagttgtgcgacgatcgacgacgatagatggcgaaatggaaaaaccattcatttccactttaatcctttgtttctgcatcagtggcagagaggggccacacgggccgtacgttgcgcgccgtggtttttggatgcccaagttgctcatccgggatggagaaggacgcatgaaccatattatcaccatgatgtcgattatatctacatgttgcaccctggtatactatatggaaccaaccgggcatgcatggtggatcggcacgcacatacattgctggatgagccggaacaaggggatggaggccggattggggcatgcatgtacatggtcggcagcagaaaataccaggtgcagcatcatacgtacatatcgatggacagcatcatcatgcggcgggcaaagcatcgcatagccagctgcactagcactacgttccagcatcatccatctgctccccagccccaacacgacaaa

SEQ ID NO: 64828 - DNA, 1050 bp, Oryza sativa
  Clone ID: PAT_MRT4530_65935C.1
atgccattccgcggaatgacgtcgttaaaatgccactgtcaagactgggcatacatttgttttgccatttggatcatttcattccatttccacctgatttcctacccgggctaccaaaaatgcccttcggtctgccaccaatggcgaccgagctcatggtggcggaggccaaggagaaagaggagctcaccgtggcacgagcttcatgcgccacttctgcttccgctccaccgcgcaggccaggcggccttcctactcctcctggccatctcccccgccaccccactcacccacgcctcctcttgtcctgcttccttcgccgcttccatgtctgatggcaaggtgacggcagcgtcgcggggccaaggggaggcgtcggtagggagaggcggcagcacagctggtgggagaggagtcggcacggtggaggaggcgcgaaggaaggagaagaggaaatctggttacccgaaagagaagttgctcgagagtagcatgccttcgtctcttccccccgccttgcacgagaaacttcctatgggagacgccgtgtattattatttcaaggacatctatgatgctcttcggatagcacaagttggtgtacgtttgatatttcttgatcatgattattcagaatttaggccggttgttccagatgaggagtgcttctataggagtttcatattttcctatctggagcaagttgttgataggatagacacactttgggaagaccgccttcttgctgctcttagagaattggatagacgagctgaacgttttcagcgggcctctgaattttcccggagacgcaaagtatttgtgaagctgattgcgaaaataaagggatggaagcgcatgcgggattacccaccgtcaagagtcagtttttgctttcctcagattagtagcagctacctggatttgcacgcacaaagggagatatggacagcattggtgctcgatgctggttattcctccccatgcgccggaagaccggatcataccaatagccttagcggaagcactacaatgatggaactagtctag

SEQ ID NO: 64829 - DNA, 266 bp, Oryza sativa
  Clone ID: PAT_MRT4530_65936C.1
gctgcatgcatcctcctgcgggacagacgccagacgactccggcggggtacagggtcgaaggcgactccagcgacaccattgggctgcggtgtggcagccttaagtgtctgaacggtgaggatactcgccggtatctccgtgagctgctcttaaccacccttggtgccctgcagcacctaattggagcgaacctatcaggggtgaccctgtactagtcgaccaaggacggcaagcccattgcaggagttctcaaggagggtggcgt

SEQ ID NO: 64830 - DNA, 418 bp, Oryza sativa
  Clone ID: PAT_MRT4530_65937C.1
tagttcattcggaaagaatgtctcttctcctgaggaacagatatttttgcttcgaatgcgatgataccttttgtgattaatcgtccatggcttgatttactacttggtgtattttgttaggttgcttaggtattgttgatggcgatcgagttgaacttgacaacctgcatcgtcagataatacacatagaagcatatgttggacaaccaaaggtgaaatcagctgctgcttcttgccgtgcgtaagatgttatcatttgggcagataatctatcatatataaattgtaaaagcaatctcacttatgtgtgcctacaaagtgatatcaattagttctatatatgtttctcatgaaatcagaattaactcctctatcaaggtgttcgagtatcatatcactttgaatgcgagcaacgctt

SEQ ID NO: 64831 - DNA, 816 bp, Oryza sativa
  Clone ID: PAT_MRT4530_65938C.1
atgtcatcctccctctctccctccctccctcccttatctctctctcacttcaagagcggcggcggtggtggtggccaatggggacgaggcggaagggagcgacggggcggtggcggcggcggtgacggtggggagcggtggtggcagtggaggtgggtaacgcgcggtggagaacgcggctatagcccgcggccgtcaggagggagggaggggtacgagaagggagccgcccccgtggggggtcggagtcgccgacggctggctagcgtggcggcgggggtggcacaaagcggcggcggcggcggtcgggacgaggcggtggggagcggcggcggcggtgccggtggtggtggcgatggggagcggtcaggacgacggcggtggggagcgatggggcggtggtcaggagcggcggcgattatggtggggacgaggcttgccgcctcgagtaactccatccgcctgctctccttgacgctcgctgcgccgctcatccacgacgtcatctctggggctgccgccgccggccgtgccgacctcgccctccagtttttccgcttcgcctaccgccgcactggcttcagccccgaccccgagccgtccaccttcgccctcgccacggcagaaaaattcttggctaggcgccgaacaatccaagaacgcacaccccacacattgtcgatgacatcgatcgcgcaaaagaaaaggacaaagagcgctccggcggggagagccagcatggaggcggggaagaggaacacggggctgcactggaccgccatgaggatttcacgagacgagacgagaaggccctga

SEQ ID NO: 64832 - DNA, 108 bp, Oryza sativa
  Clone ID: PAT_MRT4530_65939C.1
atggcgatgtcaagatcaactggagctgagctcgacgacaccaagctcggcaccgtcgcctacaattactgcgccgatggctggtgtggttacatgaaatcccattga

SEQ ID NO: 64833 - DNA, 997 bp, Oryza sativa
  unsure (1)..(997): unsure at all n locations
  Clone ID: PAT_MRT4530_6593C.1
ccggccgggaatcagcccacagctcaccgaagtgcattagctcaccacgactagctagagcactcattggtgtgcaaaatattactgtctgctcctctaaacatgtctaggtctgtggagcctcttgttgtagggcgcgtgattggggaagttcttgatacctttaacccatgcatgaagatgatagtgacctataactccaacaagcttgtatttaatggtcatgagctctacccatcagcagttgtgtctaaaccaagagttgaggtccaagggggtgacctgcgatctttcttcacattggttatgacagacccagatgtgccaggaccaagtgatccttatctaagggagcaccttcattggattgttactgatatacctgggacaacggatgcttcttttggacgcgaggtcataagctatgagagtccaaagccgaacattggcatccataggttcatttttgtgctcttcaagcagaagcgcaggcaaactgtaattgtgccatccttcagggaccatttcaacacccgccggttcgctgaggagaatgatcttggccttcctgtcgctgctgtctacttcaatgctcagagagagactgcagccaggaggcgctgagaaatgcagctccaattgtcccaaaattacgactctctgaaatcaaacctttttctgccatattactttctcatgaactcaacgttcttctgctacatcagcagccagtatatctgcgaataaaccagatgcattttgcagcatgtattagtattagatttctttccgtatcaagaacatattagtggattattttgtaagcagtaagattgatagccatgttggcaaattccagtgcactaatatgtaaaccacgttattattaatgtttttaagtcatgtataagccaattcatgctggtggacaaacccaactggcagaaagggctttttatctgggatnantncncccgcgggcggcggcgtgctcgcc

SEQ ID NO: 64834 - DNA, 941 bp, Oryza sativa
  Clone ID: PAT_MRT4530_65940C.1
atggagaaagagcagcaagccggccatggcaagctccctcacgagcagctgttgctgcaagccagcacggagctcatgaacctcagcctgggctacgccaggtccatggccctcgggtgcgccgccaagctcggcgtcgccgacgctatccaccgcgccggcggccgcgccaccctccacgacctgcacgccgcgctgtccctccacccgaccaagctccccttcctgcgccgcgtcatgcgcgtgctggtcgcctcgggcgtcttcgcgcaggtcgaggaggaggaggaggaggaggatcactaccgcctcacgcccgtgtcgtccctgctcgtcaccgccggcgacggcagaggcaggagcctcctgccgctggtgctcttccagctctcgccgctatgcgtgacgccggcgacgagcatggccgagtggctcaggagcggcggcgaggaggagacggcgttcgagatggtgcacggcgtgggattgtggggcgcctgcagccgcgccccggatctcggtgttgacaagatcacctcgatggtggatgtcgcgggtggcaccggcgcggcggccagggcggtggccgccgcgttcccgcatatcaagtgcaccgtgctggaccttcctcacgtgatcgattccatcccggctgatcatggcgatgttgttcagtttgttgcaggtgatatgatggatttcatccccaaagcagatgccctcctgcttaaggtttttggggagtgcttcccgcacgactgctctgttcgttgttgtctcgtcgtccaccatgtctacgcctggacacctggagccggagctgccgccggcgccggtgctgctgtctctggagatggcacgccgggagccggagccgttgcgaacgtcaacaccaacggaggcaattctgcctcacaatccagcggagggccattctcggt

SEQ ID NO: 64835 - DNA, 1059 bp, Oryza sativa
  Clone ID: PAT_MRT4530_65941C.1
atggagaaagagcagcaagccggccatggcaagctccctcacgagcagctgttgctgcaagccagcacggagctcatgaacctcagcctgggctacgccaggtccatggccctcgggtgcgccgccaagctcggcgtcgccgacgctatccaccgcgccggcggccgcgccaccctccacgacctgcacgccgcgctgtccctccacccgaccaagctccccttcctgcgccgcgtcatgcgcgtgctggtcgcctcgggcgtcttcgcgcaggtcgaggaggaggaggaggaggaggatcactaccgcctcacgcccgtgtcgtccctgctcgtcaccgccggcgacggcagaggcaggagcctcctgccgctggtgctcttccagctctcgccgctatgcgtgacgccggcgacgagcatggccgagtggctcaggagcggcggcgaggaggagacggcgttcgagatggtgcacggcgtgggattgtggggcgcctgcagccgcgccccggatctcggtgagcacttcaacgacgccatggcggctgactcgcggtttatcatggacatggccatcaacggctcgggccgccaggtgttcgacaagatcacctcgatggtggatgtcgcgggtggcaccggcgcggcggccagggcggtggccgccgcgttcccgcatatcaagtgcaccgtgctggaccttcctcacgtgatcgattccatcccggctgatcatggcgatgttgttcagtttgttgcaggtgatatgatggatttcatccccaaagcagatgccctcctgcttaagtttgtgctacatgattggagtgatgaggactgcataaagatactaaaacgatgcaaagaagcaattattccttctagagctgcaggaggaaagatcatcattttagatgttgtagttggatcttcttctgaagcaatatgccaaggaacccaacaattgtttgatctgattatttcggttacgaggaagagtggtgcaagatattcaaggaggcaggattcactaaatacaagattagcccagtgttag

SEQ ID NO: 64836 - DNA, 836 bp, Oryza sativa
  unsure (1)..(836): unsure at all n locations
  Clone ID: PAT_MRT4530_65942C.1
ccgggctgcaggaatcggcacgagggagagagagagagaactggccgccccttttttttttttttttttccttctgagcacataattgcatatcaactcaaggggcctaaaaacacaggacaattcaactagatgctaccaatcagatctcccagtcaaagtacacattgcatattgttctttcagtcaaagtacataccgctgtgtgattttcattgataggaaactattgcacagacaacacacgagcacaaactgcaagattgaataagcaattcccgattcttaaatacatgtactagctgaagaactgatttctgatgagaatcctacgcgtcgggggcggatgaaggcgtcttggagccgaggccatacttctcctgcagcctggtgatctcctcctccttcttcttgacgtccgacttcttggacatcttggccggctggtagtagagcacgatgaggtagcggttggcgacgttgaagccggagaggtggtcgacggcgttcttggcgtcgtagatgtcctcgtagacgacgaaggccgtgcccctggtgtccttggcgttccccagccggatctgccggatcgcgccgtacttgccgaagatgtcgtacatctcctcgctcgagatgttgaacggcaggttccgcacgtacagcaccctgttcacctccggcggcagcctcgcgttgctcttcctcaagctcaccgccgccatcgccgccctcctctccgctagggtttctgtctctcgcggctttcgatttggggattttttttttctttctcctcgccgcgtctctttttttttttttcccggccggnncctcga

SEQ ID NO: 64837 - DNA, 164 bp, Oryza sativa
  Clone ID: PAT_MRT4530_65943C.1
atgatccaggcaacggtgaaatgccaatgccatgagcgttgccgcaggctatcttgcaatacacactcgatgcccctgtcgtcgcttgcacacatacgcaacaaggtcatgggcgagggagcaaaattagctgttggtgcagagaagaggaagacagcaagcaa

SEQ ID NO: 64838 - DNA, 507 bp, Oryza sativa
  Clone ID: PAT_MRT4530_65944C.1
gccgtcgaagttgctcgtgcccggcgggctcagggcgctccccatcccggtgccattggtgccggttccgatgccgcctccggggctcaaggtgccggtgccggtgccgactccagggctcaagccagttgtcccagcagcactgcatgaacaaaggtggaataaagagctttagatcatcatgctcctgcttcgagttacactgactgaagagaatgcagtcaacagtgcataattcagtcagaagactgctgatggcttgatttgttaacatgctaatcgagtgaaaattatgaattcggttgtccaagactggaaagggatcactttggaaagcctgtcatctcattattgtaagctgcaaagtgcatttctaatgcaaatcaggctcatcgttctgtcagttatgtccttcacacatgacgcacatgcgagaaaggctgtccaactttttgttaagtaagagttaagacggcagcaataatcagccttcatgaaaataatact

SEQ ID NO: 64839 - DNA, 1251 bp, Oryza sativa
  Clone ID: PAT_MRT4530_65945C.1
gtcgactctagaggatccccggacgatgagtccctccgctcgtacatacaacgcttctgccaggtccgcaacactattccatgcattccggcccacgcggtcgtttatgcatttcggaatggcgtgcggcacaaccgcatgctagagaagattgcctccaaggagcccatgaccactgccgagctcttcgagctggcagacaaggaaaaagccaccggcgacaagccgagctccactgctccctccggcgagggtcggtcggcagacaagtggtgctcggtgcacaacacctatcggcacagcctcgccgactgccgctcggtcaagaacttggccgagcggttccggaaggccgatgaggagaagcggcagagtcgatgggagggcaaagcccccgcgacccccgccaatgaccggcgaggggaggccaagaagaaggcccccgctgatgacggcgatgacagcaaggatctggaattccagatacatcagggaaccgtcgccactctcgacgggggggcttgcgctcacacctcccgccgcggcttcaagaccatgaggcgtgagcttctggccgccgtcccaactcacgaggcggcacggaaggcgcgctggtcggaggtgaaactcaccttcgaccagagcgaccatccgacagtgctcactcggggagggaagttggccctcgtggtctcccccaccatccacaacgtcaagatgaagcgtgtcctggtcgacgagggagccagcctcagcatcatctccccagctacctttgacgctctcaaggctccgggaatgaagctccagccgtcattgccaatcattggcgtgaccccgggacataggtggcctctgggtcacgttgagctcccgttgacctttggtgactccaccaacttccgcaccgagcggatcgacttcgacgtggcggacctcaatctgccatacaatgcggtcctgggcaggccctcgttggtgaagttcatggccgcctacctccagatgaagatgccgggccccagtgaccccatcactgtctttgacgatgtgaaggtcgccctggcctgcgcggagcagcgcgccgacaacttggtggcagccaccgagccgcagccctcggagtcctcagcgtcccgcgcctcgaagaagcgcctcgcttcggccgacgaggtccccgtcaaggatatttcccttggcgatgatccgtccaaaaccgccaagattgacggtaccttggacgccaaatag

SEQ ID NO: 64840 - DNA, 4521 bp, Oryza sativa
  Clone ID: PAT_MRT4530_65946C.1
atgcctgtcagcacggtgtactggcgcagaataaggacacacggggattttgaatgttttgtcccagattcagagaaagagatgctgtggaccataatgctcgagacgttcacgctccatgagggtacggaagacaaagtgaaagagtggactctgaagaaagtgactgaacagtttcagaactacaagggagacctctacaagaaatgcatcatgaaagggcagacaatgaacttcaactcattcccgaagctcagggatcattgggatgactttgttgcttacaagacaggcaatcagatacgcgaggctgccaatcgactaacggaagcagtggaagcctcttctcagggcatgtttcgaccggacagagagaaggacgagcttacgctcgctctgcagactcccgaatatccaggacaaacgcgagggaaaggcgtggttccttggaagattggattcaaggaggacatccacatgtacaggagttggatgaggagcaagagagataccgaggcgaagattgcagatctcgaagatagggtatcgaactatgagctcagtatgcaagaggaggtggcaagaaaggtggatgaaagtatggccgcacagcggagccatgagccccagccgtacattcctcctgtcatggtcagcccctcaggcaatcatagcggctgcacctcaacggggccgattccacctggatactcgagggtcggagttgagctagtggaagccgtgtacgaggacctcgagttggactaccttggaggagacggcgagacgcatctacgagacacaagccacgtcattatactatggcgcaagcgctacatcatatttcttgggcgacaagcggcgtctcgtgcaccatctcctccagctcctccgcctcgtgcaccgtctcttctgcctcctacaccatctcctcaggctcctgcaccgtgtccttcggcaccttccaagttaaggtcttgccaagctccaccgcttgtccgcacaagggcaacgaagaaggcgaaagttcaagaccagccgctcgccgaaaacaaagaggaccttgatgcttatgtggtaggagaagtgaagaggcaattcaagcctcggagtctagaaaagaagatacctatagacccgagtgtgaagtacttcttcaagaaaatgtccacaacaaacaaggaggtcttaaagataacggactatgagcgaacacttaagaaagcatattacaaaatgtccaaaccagtccctcagcttggagagcaaccaaaccaagagatcgagccgttggtgaccggccaagaaattggcataaaagaattcatttctgacactgtactagctagggatcaactgcttaaaggcgcaccaatcccaacggcggaaatgaaataccaatttgaactcggtaaaccgcttgtcaagcctgagcagctgaagtccctatcaacacagatgtaccgattccatgaacggtacatggaaatgagcgccaacggtaaacagatgttcggagcaagaatcagaaactcagacttcttccaaggagaagatgttctctggatcctgttcgaggatgtcttcgacctatactatctggatgcccacgatgtctctcttctaagcacatggattttaggacaatctcatccatctcctgacgcagcagcatttcaagatgttcatactactgtcgtacagcacagaattccattgggtccttttacttttcgacttggaggcatgcgagtcaatgtctatgactcaatgaataaagaggagtctacttttgaccaggtttttcaactgatagacagggcttgggatcggttccgtcaattggtccatgggacttggaaagaaaaacttggccggaggtttaattttccatgtgcaaagcagacccagggaactaacttgtgcggctactacgtatgcgagtatacccactgcctatcaacccaaatctacaccacaagagagctcaatctatacatgtatacgatgttgaagaaaagaaaggctcataaaaatcaagtgctacagggttgtccctacctccgtccgtatatacaacgcttctaccaggtccgcaacactattccgtgcattccggcccacgcggtcgtttatgcgtttcggaatagcgtgcggcacaaccgcatgctggagaagattgcctccaaggagctcaagaccaccgccaagctcttcgagctggaggacaaggtggctcgaaaggaggaggcgtgggcctggaactcccccggcaccggcgcggcggctgcagctccccccaagtccgttccccgctctaagcggcgagataggaggaggaaaaggaagtcggcccgctccgatgacgagggccacgtccttgcggccgatgggccctcacgggccccgcacaaggaaaaagccaccggcgacaagccgagctccactgctccctccggcgagggtcgatcggcagacaagtggtcctcggtgcacaacacctattggcatagcctcgctgactgctgctcggtcaaaaacttggccgagcggttccggaaagccgatgagaagcagcagagtcgacgggagggcaaagccctcgcgacccccgccaatgaccagcgagggaggccaagaagaaggcccccgccgatgacagcgaggatctggaattctagatacctcagggaaccgtcgccactctcgacaggggggcttggcaggcccgcgttggtgaagttcatggctgccacccactacgcctacctccagatgaagatgccgggccccagtggccccatcattgtctttggcgatgtgaaggtcgccctggcctgcgcggagcagcgcgccgacaacttggcggcagccaccgagccgcagcccccggaggcctccgtgtcccgcgcctccaagaggcgtcttgcctcggccgacgaggtgcccgtcaaggagattccccttggcgatgatccgtccaagaccgccaaaattggcgcgggcaaactccttggttttctagtcttctcccgaggcataaaagctaatcccgagaaaatacgcgtgatagagaggatgcgcccaccccccagcaaacttagggatgtgcagtgcgtcacgggatgcatggccgccctaagtcgattcatatcgaggctaggagagagggtgctgcccctattcaagctcctcaaacgccccgggccgtttgtgtggacggaggaagtggagcaagctctcaatcagctaaaagcttacctcactccccccatcctggtagccccggggccagaggaaccgttgctactctacttggccgcgaccccccacgcggtgagtgccgcccttatagttgagcgcgacgaaggcgacccgcgtcgcgagcccggccatgaaaagggaccaggggcccccttgattggcgatggcccctcgtcccccgacggcccggtgcctgaagccccgaacccctgggagggtcccgaggcccccgtgggaggaatagaggctctggcgggtggccccgaggcctataatcccgacatggcccgagatccccccggggctcctgagcacgggcgccccaggccagctgcccctgacaacaaggaccggccccaccgaaaggtgcagcggcccgtctgctttgtcagcgaggcacttcgagacgtgaaaacccaatacccacaggcccaaaagatgctttacgcagtcttaatggcctcaagaaaattggccactacttccaagcgcatcagatgcgcagaagctgagaagctcgcgcgtatctctaagcagtacgagctcgtagaaggagccctctaccggcgtgccgccaacgggatactcttgaagtgtatttctcgggagcagggcgtcgagctcattgctgacgctcatcatggtgagtgcggggcccattcggcctcacgcacattggttggtaaagccttccaacaaggtttttacttgccgaccgcgttgcaagatgcccaagaatgggtctggcgatgcaaggcgtgccagttccacgccaagcaaacccaccagccgccccaagccttgcaggtcatcccgctctcttggcctttcgcggtctgggggctggacatcctaggacccttcaaagcggcccgaggcgggttcaccaagtggcccgaggcttacccggtcgtcaagatcgacaagcattccgccctcaagttcatcaggggcatcacgtcccggttcggagtgcccaaccgtatcattacagataacggtacacagttcaccagtgagctatttggcgactattgcgacgacatgggcatcaagctgtgtttcgcctcgcccgcccaccccaagagcaacgaccaagtggagcgagctaacgccgaaatcctcaaaggcctcaagaccaagacgtacaacgtcctgaagaagcactgggattcgtggctcgaggaactgccgcagtgctgtgggcgaatcggaccactccgagttgcgccacaggggaaacaccctgtttcctag

SEQ ID NO: 64841 - DNA, 2228 bp, Oryza sativa
  Clone ID: PAT_MRT4530_65947C.1
agaaaatacgcgcgatagagaggatgcgcccccccagcaagcttagggatgtgcagtgcgtcacgggatgcatggccgctctaagtcgattcatatcgaggctgggagagagggcgctgcccctaatcaagctcctcaaacgccctgggccgtttgtatggacggaggaagcggagcaagctctcaattagctgaaagcttacctcacttcccccccatcctggtagccctggggccagaggaaccgttgctgctctacttggctgcgacaccccacgcggtgagtgccgcccttgtagttgagcgcgacgaaggcaacacgcgtcgcgagcccggccatcagaagggaccaggggccccctttactggcgatggcccctcgtcccccgacgacattccgagacgcgaaaacccgatacccacaggcccagtagatgctttacgcagtcttaatagcctcaaggaaattgcgccactacttccaagcgcatcgggttttcgtcgtgacgtcttaccctctcggcctaatcttgcacaaccaagagggtactggtcgggtcgtaaagtgggccatcgagctcgcttaggttgacctgcacttcgaaccacagcatgcgatcaaaagctaggttatggctgacttcatcgcggagtggacctcggcggacgaccctgttccgtccaaagttccctccctccttggagatggaggagacccaaacgccgacatttgcgcggtgcactaggttatgcactttgacggctccctcaaccttcaaggtgcaggggccggagtcacgctgacttcgccgagcggggatgtcctcaagtacgtcgttcggctcgatttccgagccacgaacaatatggtggaatatgaaggactcctagtgggattaagggcggtggccagagtgggcatccgccgcctcatagtcctaggcgattcccagctggtcgtaaatcaagtctccaaggagtaccagtgcaccgacccgcaaatggacgcttacgtccgcgaagtgcgacgcatggaacgccactttgacggactcgagctccggcacataccccgacgcgacaaggggatcgctgaagagtcgacctgcaggcatgcaagcatgagtattctatagtgtcgaccttcgaggaaagactcgcacagccatcggcgcgggttggaccacccaagggacccccgcaccacggtttccgccccgacccctgacgacccacgggtctcggggcttgagggggtcgaccctgacccccctcgtcaggtcgtttggatgactgacattcgggcgtatcctcttcttgaggatggcacagaagatgagaagctcgcgcatatctctaagcggtatgtgctcgtagaagagaccctctaccggtgtgccgccaatgggatactcttgaagtgtatttctcgagagcaaggcatagagctcattgccgatgctcatcagggtgagtgcagggcccattcggcctcacgcacattggtttgtaaagccttccgacaaggtttttactggccgactgcattgcaagatgcccaagaatgggaccggcgatgcaaggcatgccaattccatgccaagcaaacccaccagccggcccaagccttgcaggtcatcccgctctcttggcctttcgcggtctgggggctggacatcctaggacccttcaaagcggcccgaggcgggtatcagcacctgtacgtcgctattgacaagtttaccaagtggcccgaggcttacccggtcgtcaagatagatgagcattccgccctcaagttcatcaggggcatcatgtcccggttcgaagtgcccaaccgcttcattatagataacaacacccagttcaccagtgagctgtttggcgactattcctgtcccggcgcatggagatgcctacccagcgcaccgcgcgctccagccgtttgatggcatcggagagttggccaggcccaaactcgtcgcgaggtggcggagggtcacaatctccccagcttggtcctacaccaggcgcccaggtcggcgagagtgtcttgagccgcggcaagctggctgaccaattccgccccgccgggctgcccgcctgccgccaactccttctttcgaatgtggtccggagaatttttgttaaattctccttggtctaaaaggagccctcaaattttacttgaattttcagagcaccaaaaatatttattaaacaacaac

SEQ ID NO: 64842 - DNA, 438 bp, Oryza sativa
  Clone ID: PAT_MRT4530_65948C.1
aataccgtttagcagtttaaaaagcgtgctcgtgagaagttcccaactctaggtctgggtgccgaactcagcattctagaacaaaatccagaccaggggttggcaaaacaacggccaatgccccctatgctagctggcgagaaggtgagacggccttgcaccttatcaccacgtgtagatacaccaagagaatctggcaccttgtgtctagctgggtgggctaccaatagatggaaccaggtcaatgggaaggcccagtaagtgcaatagtggtgggagaacctagcaaacacgtccgctgtcccagaaaaaggacttcgatctctgatcctgctagttgtctgggagatctggaaggagagaaaccgacagattttcgaccacaaagagatggcaatgagtttccttttaacgaagatcaaagaggaggctagtctc

SEQ ID NO: 64843 - DNA, 434 bp, Oryza sativa
  Clone ID: PAT_MRT4530_65949C.1
gagtgatactggcggatcggatgtgtagagtattggggtacgttggaacgaggatctacatagtacgacatcgagcagacaaaagacaaggattatactggttcaagccccttatcaggattgatgatgatgagaacagattacaaagagagtagtcgaaatagatgttactgatgagatcgtaatcgaaggattcgacgagatctcccagcgacttggctccatgtactccggctttgtgaaatttggtgggggtcccttttataccgtggatcatcttgccccccaagaaaggtttgaggataccggacctggtacggtatagcagaaactctatcttttccgagtaggactttgccaagccagcccgccttcctcctcccctttgagccaccgcctggtggggcccacccgccaggccacctcctcctctt

SEQ ID NO: 64844 - DNA, 843 bp, Oryza sativa
  Clone ID: PAT_MRT4530_6594C.1
ctgctggctatggttgcggcgaggagagccgagggagcgagctcgccggccggcggcggtcgtcgcgtgcggccaacaggagcagtggtggcagaggcatccttgggtagccgtgcgaagtgcttggggcagagcaggcggagcgcggtggggttggtgaggacagcggaggtggacgtgctctaatcgaccgcgcgcgacgaccgccgtcgagagccaccgcgtgcatcgatctccactgcccacgcactcctgccatagcgtgtgacgacctccgccaccgatggcgctcccgtcacctgcactcccgccgtcgcccatgtgctcccgcaatcgcgtgcaacgaccgccgccacccacacgctcccaccgccagtcgccgagctcgctccctaagttctcctcgccgcagccgaccactgagctcccttggttttcctcgccgccgtcggccggcgagctcgttccgtcagttctcctcgccgccaccatggccatcggtgacgacgaagacgaggagttggatggaggaagaagaaacccgaggggatagcgcgtgaccccacccaggcacccacccatcccgtccgtccgtccaccatcaaaccggtaggcgcccacgcgaccacgcggcgccccgcctgccctgcctcctccacccggggcgcgcgcgacaccggcacagctcgtccggataagcgcgacaccgcgttttcgcgtagagtaccggatccatccatcatccgtccaccgctcatcgctgcagcctatcgatccgtgctcgtgcacgtacagtgttcctctgtgcctctgcacagtaccaattactgctttacttaaaag

SEQ ID NO: 64845 - DNA, 1192 bp, Oryza sativa
  unsure (1)..(1192): unsure at all n locations
  Clone ID: PAT_MRT4530_65950C.1
tcgcgatctagaaccggacacgtggccgagccccactgcaatcccacctccccaactccgccgcacgcatccccgcacccgccaccatggctcgccggagcggcctaatgctactactcctcgccgccgccgctgtcgcctccgcggccgtgccgccgtcgtgcgagcgcatcgagtgcccgtcgtacgaggtggtggacagcgccaacgggttcgagatccggcggtacagcgacgccatgtgggcttccaccgcccccatcgaggacatctccttcgtcgccgccacccgcaccggcttcctccagttgttcaactacatccaggggaagaacgcgtacaacgagacgatcgagatgacggcgccggtgctgacgcaggtggcgccgagcgacgggccgttctgcgtctcctccttcgtggtcagcttctacgtgccggcgaagaaccagccggacccgccgccggcggaggggctgcacgtgcagaggtgggccggggccaggtacgccgctgtgcgccgcttcggcggcttcgtggccgactccgacgtcggcgagcaggccgcgctgctcgacgccagcctgcaggggaccaggtgggccgccgccgtgtccgacgggcgcagggccgacccgacgtcgtcgtacacggtggcgcagtacaactcgccgttcgagttcagcggcagggtcaacgagatatggatgctcttcgacgcgaaggatgcatccgacatgtaacgcgatgagcgcgcggcaattccaaatcttcaaatgttcaccggagtagtagactcgatcgcacagctagtgtaatcttcaagctcctggtcggaagaataatggcatcttaaagccctaaactgctcgagtgaactgtttttttgcactgtaaagtatgtagttgagttgtgactcgtgcgtatcgagattaacaacaataaaagttctgtttagtcaactattttaacgcatgatttaacggggaacatcaatatatataccttttcagctctgtttcgaagaaaaaaaaaaaaaaacccttcccaacagttgcgcagcctgaatggcgaatggcaaattgtaagcgttaatattttgttaaaattcgcgttaaatttttgttaaatcagctcattttttaaccaataggccgaaatcngcaaaatcccttataaatcaaaagaata

SEQ ID NO: 64846 - DNA, 1165 bp, Oryza sativa
  Clone ID: PAT_MRT4530_65951C.1
gagatggcggccatcggcgccttatcgaagagatctgcagttctgcagattcttccattaaaagatcttgttgctgtagtgttatgctctggtttgagctttttactcagcagagtaacaaataaaatgatatcaatcctcaacagatatgacgatgaaataattgtctctatattctacaacaaggaggacaaatctgtgattacaacttcttctcgtttgtttgatggctgcatgtctcgtcaggtcacatcaaccccacttgagtgcattaggtcaaacaagcagaataatggtcagcagatttttgaatcagaaaatataaaatagccagatagtgtggactttgatgcaccaaatgcaagagcattgatacaacaacgcagctgcagcacctaccgagtttttgacttaaaggattattctctgctgtatcaaatacctgatgtgaatgtccatcaagttgtttttaggccatcattgttccttataaagctggagcagacacataatgtctatcctttcaggatattttgtgctcagaactttgaagaaacacactcgtttgtgcttgttgctagctcgaaacgacctgatattcaacctctacatgacaagatgataataaagcagaattttgcgaatgagaatggaaacctccagatacttgatgtaagatatatttagtattaatcactttgttattcattttgttgtgcactcctgatcctttccatgcactgcatggtagaaacctattcttgtctttccagaataactcaacagaactgagagatcttcaaggagatatagtgagaaattttgaggatcatgtactagatgaactgaattgcgtggatgataagttgttcataacaaaagatgaggatgttattatttctggatgcaagtcagaaggtaaagatataaatatcaactgaggtatcggagcggtgcatataagctccatagaaagtggaaaatgcattacagacatcaataccagttccggatcacagctggtcacagcctccagatgcaggaactcctcaggttccaaagccaaagatccaagaaatgctctggctcatgtgccagcatagatctcaaagacaacaattttatcacaccatatctgcatctaacagttcatctccagcaaaaa

SEQ ID NO: 64847 - DNA, 526 bp, Oryza sativa
  Clone ID: PAT_MRT4530_65952C.1
tgctgcgtcgtcctgcgcatcaagctcccggcggcgtggacgcccgaggaggacgccgccctggagcgcctcgccgtggagaacggctcccgccactggcgccgcgtggcggcgcagatgccgcgcaagcgctcgcccgtgcagtgccgcgacaggtggagggaccacctcgcccgcgacgtgttccaccgcccctacaccgcggccgacgacgacgagctcacccgcctcgtcctgcgccccggcggaggtggcgaccgatggaaggacatcagcagagcggtgcacggccgcagctcgcgctccgtgaagcgccggtggatggagatcggcacgagcgatgagctcctcaggaagttggcacccccggtcatcgatgctgtctccggccacggtggtggacgccgtcgtctgatgcggccaaatcaagcttttggatggcgccgttgctagctagggccagttcactgacgcgatgagctcctcaggaagttgtggcacccccggtcatcgatgctgtctccgg

SEQ ID NO: 64848 - DNA, 516 bp, Oryza sativa
  unsure (1)..(516): unsure at all n locations
  Clone ID: PAT_MRT4530_65953C.1
gattcggctcgagcacacnnctancncatcntggtatgagactacttcncacntgntgaagtgnngaagactcatgattnctncccccctctggacntgttcnctgaatccatnnacaggctcntntccncccancncntactgaacggagctctggtntccgattccnacaatccggaggtgaacatggatcaagacnacntggacacctgcggtttccctctctacttcagccatggcctgcaagatgatngcggcttgccttcttttgccaaggggatggttgctgcaaacacctcctccatggacaaagctggagcgagcgcgaccgananaggcgatccggggagttcgccnccgggattccaanaaactgtgctcnaagagctcnangaagtgatggtgccatggcgangacaccggatnttctccgcgacccttctaccngctgggcgaaggntcnaaggtttcctngctcccccnccnccgccncntaangggccccgtcnccanggc

SEQ ID NO: 64849 - DNA, 591 bp, Oryza sativa
  Clone ID: PAT_MRT4530_65954C.1
gggggggagggggctttacattttttccgagagaaaaaaagggtaaggggcccactggtttatcgcataaaaccggaggggaaccccctccctttaccgtaaaaatcttctccaattgatacgcggcccgaataaaccatggccgggcattgtataaaaaacaaccctattttttaatggggggctcattggcccccgtcgagccccaacgggcccttgaaaaactggctttctttctcgtgaaagcggagaaaacacccgcgggggatcgggtacaagccccccttttaccaccgcctcaaaaaccgcgtaaccgttttaactccggcggatacgaccctcccgtggcaacccccgaaccacaggaagccaggatgccctggggatggaaaaccccggggccccatcctgagggtttggatccacaaaccctggggccttaagaccctctgaaatggccaagaaaaccttgggcgggtctcatatgccgggtgggaggcccctgaaccctggaaaggccccctgaacatttttttgcccaaccccagggtgtaggagggcctcggaggcattggcccccccacgccggcc

SEQ ID NO: 64850 - DNA, 658 bp, Oryza sativa
  Clone ID: PAT_MRT4530_65955C.1
gttagaacgaaggagtacttcataacaatataacatccatctcaaaatataaatagctatataacatcggtcttaaaatataacaacttctaggtatgaaactaaaacagtacaatgcttatattctagtacggagggagtactgaattaaacataactaggactataaatctggacatatatcttcagtattcgtattactaacctgtgtctaatccagtactaatctctatactttaggatagagaaaaaaatattatcttcaaaccgtaaaatactattagacttgtacgacaaatactattattatatttgttattactatatattggtactactcccctgtcccacaaagactaattttttggtttttatgtccaacgttgactatctattttatttattatttttttgaaaaaaagtcacgcacaaagtactatacatgttttactatctaataataacaaaaatattaatcataaaaaaaattaaataagacgaagagtcagacgttatatccaaaagttgaaaaatggagtatgtggacagagggagtagtatagtacatccagattcccatgaaaaaatcagaagaatttttatgcaacccaaacatctactaggaaattataatccaacacataataaattgagagta

SEQ ID NO: 64851 - DNA, 297 bp, Oryza sativa
  Clone ID: PAT_MRT4530_65956C.1
gacgtgtgtgttccaacagtggtggagctgtgctatgaacatgatgcagtcaacaactcagcagcagcagcagcagcagcaggccggcaatctgatctgaatctaattttattaaatctaagtaatgctggtgatatgcgaaacaagggatccaaaatcgtttttgcatttgaacttccaaccaaagacagacctgagtggatgagattaagcccggacaccaaggataactcaaatgtcctcgtgcagctgaacaaatctgttgctacagttttccacggctcaattatcacgaga

SEQ ID NO: 64852 - DNA, 337 bp, Oryza sativa
  Clone ID: PAT_MRT4530_65957C.1
attgttcccgccgcccgggcgcgctcggtcctcggatgcagttgtctgccacaactgcatggacgtgaccgcgagtgctcgctgcgccagccatccagccaggatggtgaggatgctacgaggagagcattgccagatgccctggagcaaggctgtcgtcgtcgtcgtcggagtacttatctggcggcgagggtctcgtcaggaccaggggtactacggcgaggggtctcggaggagggctactacggcgagcagcaacagcagccggggatgacccgcgtgaggctgaccagggcgaggcagtacgcggcgcagcttgccatcgatgtgccggggt

SEQ ID NO: 64853 - DNA, 563 bp, Oryza sativa
  Clone ID: PAT_MRT4530_65958C.1
gggaaaccaataaaatcatttttgcaaaaacatcatcttctttttcattttcttaggggacccaacacccactcgatcattattttgtcgcactaaacccattttcatctgccttatattgttttccagttcaactttttgctgactgagggcctcatgacccttcattgcaacagcaccctttaatgcctttgcttttgttaaaaaattcctaggccttatgttaataggccccctataattttttccacgggaaaatataagtgcctagccctttgtaactctttcaatggcgactagtataccgcccctcttatacttttaaagccgggccgttttcttaacaaagggcaaagtcttttgctttgttattaatttgacaacttccctgtgctttcaatgccagtgcctttttttaatgacccccttcaaaaccccccttatttcaacaggcaagttttcctttaaacacaaaccggttttacggaaaaaaaaactttcctcccctgttattagttccttttacaaaaaagggttcccccgggccctttaaaccttttttt

SEQ ID NO: 64854 - DNA, 431 bp, Oryza sativa
  Clone ID: PAT_MRT4530_65959C.1
tcgtccacgcgttcgaccacgcattcagttgtgaagggaggagggtcggataattaagttggctatctcagatttgtttgtaatctaaccagagttaatctgtagatcttgccgatgtcgagagttgaattatattaaatagatttcatttaaatatacttgtcaagtctagattaattagaacgttcaagtctatatgaactctctagtgttggaagaatttataacttactcttgattcaatagccacaaatttgaaaatagccatctaattattcgatacttataacattggaagcttaatcaaatggcagaacaaaaaaaaaaaacatagggcggcccgtgtatatgataccagtttctgtacgcgtgccagctatgcctttagtgagttatattggaacctagatttaatatggtggtcggtggtt

SEQ ID NO: 64855 - DNA, 193 bp, Oryza sativa
  Clone ID: PAT_MRT4530_6595C.1
tttagaattaacaaaaaaatagggggtttaatttatttttttaaaagtattgtagattttttccttctttaaccattacataagtttaagcaataaccagataacaaatcctactcctgttttaggtaaaatattcaaacacattacctttataagaacttattatttaggaaagtagcgggcatgggcataa

SEQ ID NO: 64856 - DNA, 1441 bp, Oryza sativa
  Clone ID: PAT_MRT4530_65960C.1
atgcttctcggactagagaaaaatcagcacaacggggaggacacatcgcctgaggccaacgattccggcgagctggacgaccagagtaagtccactaccccagaaatggtgttgcacagctcaatcattctcatttacggattcaccatatcgttaattccctcaacatggggcatggagtgctctactcccaccgaagtgtcgagcaacagtggccacggatcaataaaccgagcccaagacgacgaccgcttcggatcccagggcggctcttgggtcccgccgctggagcagaagcccgaggcagtgacggcactgatcccgccgctctctaggccaacgcggtcgatttgggatgatgcggagaagtggatttctagccccacggcgaaccgcggtggccgtgtggggagtgcagctggggctgcgccgaagaaatcggcgctggcatttcctgaacatgtaagccggcctccagccgttgctaaggtggttgctgaggtccccatcaacactggaaccttggtgaagaattcagttgctctcgcacagcctatttcatttaatcctgcacaaagtgcttcgatagttgatgaaccagctcctgcagttaggtctgtttcgatgagagacatgggcacagaaatgactcctattgccagccaggagccctctcggactgggactcctattatagcttctagtccaacctcctctcggacaccaacaccacaacgtaatgcagaaatcagtattggtgaatttggtccaaataagatggaaatgtctgaggaggaactacaaatgaatacaagaaaggaaatcatggatcttggccaacggctgggaaagacaactatagctgcatgggctagcaaggaagagaaatctacaacaagtttcgcaaatgtcataaccgacaaggctgtagaaatcgacagagaggctcgtgctgcagattgggaggaggcagagaaagcaaaatatcttgcaaggtttcagagggaagaggtaaagattcaagcttgggaaaaccaccagaaagcaaaaattgaagctgaaatgaagaggatggaggcaaagatagagatcaagagagctcgcgagcaggacaggctttcgagcaagttggcagctgcaaggcacaaggcagaggcgaggagggaggccgctgagtccaggaagaaccaagaagcagcaagaactgaagagcaggcggctcagatccggaaaaccgggcacataccttcctcaatctcctgctggtgctggtgcctgtgattcttcactctgccatgatcatctgttatttgggtagaagaaaaatacttgctccttgcacgaccatgtccaatattcgctactggttggttcatcgttcagtgatcgatgccaatgagtcgccatttttgtccaaaaaacctgcagcccggggatccac

SEQ ID NO: 64857 - DNA, 1302 bp, Oryza sativa
  Clone ID: PAT_MRT4530_65961C.1
caccggccgggggtacggagcgttgtgcagccactggtgagcacatccgccgcagcagctgccatgccctcgcctcctcctcccgcgctcactcttccgcctccacgccagcgaatccccccgccccgggccgccggcgccctcctctgcaaccgcaccggctccggccacgccagcacgcgggtaatacggcacctacccccgccggcgatgtcccacccgctctcctccgaacctcatgctttggaacaaagggcagtggtagtaaccaacaagcatggggagaagctcgtgggagtgctgcatcacacgggttcaagcaagatcgtcgtattgtgtcatggttttatatctaccaagaacgacagtctcattcttgacctgatggctgcattgacaaagaaagggattagtgtctttcgctttgatttcagtggaaatggagaaagtgaaggagaattcgagtatggaaactacaggaaagaggctgatgatttgcactccgttgtatcatatctttgtaaggaaaagtatgatgtaacagcaattgttggccatagtaaagggggagatgtagtaactctatatgcttctatttatgatgatgtacgcttggttattaatgtatctggtagatttgacttagagaaaggcattgaagaacgtataggggaaggatcaattgatagaataaataaagaaggctaccttgatgtcaaggataaatcaggaaatgtacagtacagggtaactaaagagagtttgatggagcggctcaacaccgatatacgtgctgtaagcatgtccattaccaaggaatgcaggttcttcacagttcacggttcagcagatgagactatacctgtggaagacgcctataagtttgcgaagcatataccgaatcacaagctgcaagttattgagggagcaaatcataactacaccgcgcatcgcgaagaattggctgatgctgtagtggatttcatcacatctaattagttctgcatgtctgagagactgagacaacctcattcacgagagatgacttcttgtgatggaggatccttgtgtaggttttgtgccatttctctgccttttctcctctaaacaggtataaatctttggggaatcaaataagcagaaagcaggtgtatccgtgtatattagtgtaccatttcgtaggtccatattgaattactgatatgaattgtttcttgcagatgtctgtgtacctacaggattcctgtaaatatcaaactctatagtagaaccgtataaaatttcaggtttttactttgttct

SEQ ID NO: 64858 - DNA, 741 bp, Oryza sativa
  Clone ID: PAT_MRT4530_65962C.1
atggcgcgcgtgtcgcggtgggacggccggcagcacgctccgccgacgccagcggccgggaaacccgccgcgtggacacaacgtcgccgtcgtttgcgccggctgccggccgccgcttttctccgggtgatccgcgacgccgtgcaatacatatggtcggcggactcggagcctgatctgtcagaaggatccaccgtcctgatcaccgcgcgggagtggctggactccctgcccacggcagggtcaggcgaggccccagcgaggaggaagaggacgcctgggagatggagaaggatccctcgcacgctacctcatccttgcctgagaaagaggctcatgacatgggaggagcttctcgcggacagcttggacatgagcgatgaggctcactgctttagtgaggaggataagcccgctttccgcgagtgcaaggcgcatatggccaggttctatcggaggatgatcgacatcgagaagaacaacatcaaacaaatctcccgaccccgcgtcctgtccgatacaccccggttggctggtgggccagctttagggctcttcggtcagctcctcggtgataggagggctgcgcccattaagggagtggcgccgattcccgagggcgccggctattacccggagcccttgaacagctccggagggtctagaaggctttggagtccttggatggctccggagcccacggacagctccggaggccttgatcggccccagagcccttag

SEQ ID NO: 64859 - DNA, 507 bp, Oryza sativa
  unsure (1)..(507): unsure at all n locations
  Clone ID: PAT_MRT4530_65963C.1
atggcgctcgtctccgcctcctcctccacaccgccgtctnggcgctccccggtgccgccagggcctcntccttcctcggcggcnccgganggagcngcangctgctgctgaagcaagccgagtcgtcgtccgcgcgggcgtcatncgccgtgcgcgccgcggcgcccnacaagccaatctggttccccggcagcaccccgccnccgtggctcgacngaagcctccccggcnanttcngcttcaaccccctgggtctcggatcggacccggagagtttgcggtggancgtacnngcggagctagtgcactgccggtgggcnatactgggcncggcnggnntnttcatnccaganttcctgacnaanatnggnatcctcaacacgccgtcntggtncaccncnggcgaactcnatncttcaccgacaccaccaccctcttcatcttcaactcatnctcattgcttggccnaanggcccccggtggggtnnannttcttcaaccccggtg

SEQ ID NO: 64860 - DNA, 673 bp, Oryza sativa
  Clone ID: PAT_MRT4530_65964C.1
gcctccggagctgtccgtgggctccggagccatccaaggactccaaagccttctagaccctccggagctgttcaagggctctgaaggaagccagggcttcaagagccttggacgtaagatgggtgatcggatcgtagtgggacgccataaatacgcactacacatctgccaaccacctctgacgctgttgatgagggcataccgcgcacgctattacccagatacccgggtaatagccggcgccctcgggaatcggcgccactcccttaatgggcgcagccctcctatcaccgaggagctgaccgaagagccctaaagctggcccaccagccaaccggctagataaattagctattagggtagcgatgtaatttccccttgtacatccttgtataaatatgtaaacattgctcacatttgggcataatgaatacagaagtgatacacatacgcttgttggattttgtcccaacatttggcgccgtggtgtatcggacaggacgcggggtcgggagatttgtttgatgttgttcttctcgatgtcgatcatcctccgatagaacctggccatatgcaccttgcactcgcggaaagcgggcttatcctcctcactaaagcagtgagcctcatcgcttatgtccaagctgtccgcgagaagctcctcccatgtcat

SEQ ID NO: 64861 - DNA, 393 bp, Oryza sativa
  Clone ID: PAT_MRT4530_65965C.1
atggagagagtcgccgccggttataatgctgccgaccgacgacgacggcttgctgaggacgaagaagagccgctctcctccgccgtgccgatcagtctggccgacgacgacggcgtgctggggaggccgcgccgctctcctccgccgccgtcaaccttggtaccccggtgtgccgcgacgcacatgcagctcgccgacgacggtggcggcttgccgaggaggcagtggcatggcccccgacaccccggtgcaaccgccctccgatggcgcgcgtgtcgcggtgggacggccggcagcacgctccgccgacgccagcggccgggaaacccgccgcgtggacacaacgtcgccgtcgtctgcgccggctgccggccgccgcttttctccgggtga

SEQ ID NO: 64862 - DNA, 498 bp, Oryza sativa
  Clone ID: PAT_MRT4530_65966C.1
atggctgatccatactgtgactgtgattgtccccagcaatgtgaagttaagttgcactattacttgcaccagttccgtgctggagcaaaccatccaaaccgcaatgaagaattcgtgacaagtggaggaccctctggattaggcgctgggcttattcatgactggagtttaaccactggacttgaccccaatgtgatgggaatcattgaaggaagtgaagagaaagttggagagtggtctattgtgggtgggactggcgaatttactaatgcgcgtggtaatatcaagtatagagctatcaagaaggaagatgttgagtggataagggaacttgatattcaggtgttctacactccgaacactccatcagattacatgttctttgcgcactgccttgaaggaaaggagcgcttctacaccacccaggggaacagggatcgtttagaggacacaatctacaagcagcctctacggccaccgaccaaacagtctaactag

SEQ ID NO: 64863 - DNA, 438 bp, Oryza sativa
  Clone ID: PAT_MRT4530_65967C.1
atgcttacactatggatccaccactgggcgaaggcacagctggtttctagcagcggcgatggttgcttcgggctgcggatcgatgatgacaatggttgcttcgggtggtggaggtgtgtcaagcttcaagtgatcgtgacgacggaatcaatggcggtggccgcgtacaggagcggcggatccggcatcaaggatcttggctacggcggatcaggcgctagcgagctcggcgatggtggattcgggcctcctgacagcatcaacttcaaacggatccaagccaagggggtatgcgccctagagattccgtttgaagttgatgctgtcaagaggcccgacttagggattagccttctcggcgaggtcaatcgggttttcgacaggattgataacaagaggaagtgtggtgctgcgattgcagggttcggatcatgttaa

SEQ ID NO: 64864 - DNA, 749 bp, Oryza sativa
  Clone ID: PAT_MRT4530_65968C.1
attagtagacaatcacaagcactgtaacatgaatctggtgttgcttatctcacatacaacatttattttcagataaaagatataacagttgccagattggcagaaaaactccaatggcgtaaggaaaaaaatacaatacattcaaatcacatcgcaaaacattgatatgtggaaagaaatagtttatttgatcaaatttttcatgcatgctggagattcattgaccggtgatcactgcgtgcctgcagattagttccccttcgtaatattctttgcaacttgaacatctgatggagtgttcggagtgtagaacacctgaatatcaagttcccttatccactcaacatcttccttcttgatagctctatacttgatattaccacgcgcattagtaaattcgccagtcccacccacaatagaccactctccaactttctcttcacttccttcaatgattcccatcacctgaagcgtagaccctgcatacttactgtcctgaaatactatattctgggaaaggtaccaattagctggggaactttggctggcaacgatatgccatccttgtgcacgtccaacaatatttacattggggtcaagtccagtggttaaactccagtcatgaataagcccagcgcctaatccagagggtcctccacttgtcacgaattcttcattgcggtttggatggtttgctccagcacggaactggtgcaagtaatagtgcaacttaacttcacattgctggg

SEQ ID NO: 64865 - DNA, 2885 bp, Oryza sativa
  Clone ID: PAT_MRT4530_65969C.1
atgtcgggccccaagctcgaccgcaccccgagcatccgcgaccgcgtcgaggacaccctccacgcccaccgcaacgagctcgtcgccctcctctccaagtacgtgagccaggggaaggggatcctgcagccgcaccacatcctcgacgcgctcgacgaggtccagagctccggcggccgcgccctcgtcgagggccccttcctcgacgtcctccgctccgcccaggaggcgatcgtgctgccgccgttcgtggcgatcgcggtgcggccgcggccaggggtgtgggagtacgtccgcgtgaacgtgcacgagctcagcgtcgagcagctcaccgtgtcggagtacctccgcttcaaggaggagctcgtcgacggccagtacaacgatccgtacatacttgagcttgattttgagccattcaatgcctcggttccacgcccaaatcggtcatcatcaattggaaatggcgtgcagtttctcaacaggcacttgtcttcgatcatgttccggaacaaggattgcctggagcccctacttgatttccttcgtgggcatcggcataagggtcatgtcatgatgctaaatgacaggatacagagtctgggaagacttcagtctgtgctgacaaaagctgaggagcacttgtcgaaactcccagctgacacaccatactcacagttcgcatataagtttcaagaatggggattggagaagggttggggcgacacagctggatatgtcttggagatgatacatctccttctggatgtgcttcaagcgcctgatccatctactcttgagacgttcttgggaaggatccccatgatctttaatgtcgtcgtagtgtctcctcatggatattttggccaagccaatgtgttgggcttaccagatactggagggcagattgtctatatactggaccaagtccgtgcattggagaatgagatggttcttaggttaaagaaacaaggccttgattttacccctaaaattcttattgttactcggctgataccagaagcaaaagggacatcatgcaatcagcgtcttgagagaataagtgggacacaacatacttacatattacgagtgccattcagaaatgaaaatgggatactcaggaaatggatatcaagatttgatgtatggccctacctggagaaatttgcagaggatgctgctggtgagattgctgcagaactacaaggtactccagacttcataattggaaactacagtgacggtaatcttgttgcatcattgctatcttacaagatgggaattacccagtgcaatattgctcatgctttggaaaagactaaatatccagactcagacatatactggacgaagtacgatgagaagtaccatttctcctgtcagttcacagctgatataatcgccatgaacaatgctgattttataatcaccagcacataccaggaaattgctggcagcaaaaacacagttggacagtatgagagccatactgcatttactcttcctggtctgtatcgtattgtccatgggattgatgtttttgacccaaagttcaacatagtctctccaggagcagacatgtctatatactttccgtacactgaaaaggccaagcggctcacttcgcttcatggttcacttgaaaacttgatttctgacccagagcaaaatgacgaacatattggacacctggatgacagatcaaaacccattctcttttccatggcaagacttgaccgagttaagaacataacagggttggttgaagcttatgctaaaaacgctaggctgagggagctggtaaaccttgtcgtggttgctggctataacgatgtcaagaaatccaaggacagagaagaaatcgcagagattgagaagatgcatgaacttattaagacctataacttgtttgggcagttccgttggatctcggctcagacgaacagggctcgcaatggtgagctctatcgctacatagctgatactcatggtgccttcgtgcagccagctttctacgaagcattcggtctcactgttgtggaggccatgacatgtggactccctacttttgcaacagtccatggtggacctgccgagattatagagcacgggatctcagggttccacatagatccttatcatccggatcaagctgcaaatctgatagctgacttcttcgaacaatgtaaacaagaccccaaccattgggttgaagtttctaatagaggcctacaacgtatatatgagaaatatacatggaagatctactctgagaggttgatgacattggctggggtttatggcttctggaagtatgtctcgaagcttgagaggcgggagaccaggcgctatcttgagatgttctacatattgaagttccgtgaactggcgaagactgtacctcttgcagtagatgaggcacactgactgtaggtcctcgacgtgatgagatctgagggaaatcttcctgctgtcagtgggaatggtataggcaataatgtgcagcagatggccgcttggccgataataaaatggaatgtaacttgtgtgttcagcaagtgacgaacttgggagttgggactctgtaaaactagatttgtcaaacatcttgtctatgtacattaaaatagtttgatactcagtgcttcattgccattgtgttaatttgataatctgttaccttgtactattaagctaactgttttcccagattggttggacagtcatcatcggcgagctgagacgcggacagctccttattataccacaacactatactggcatgaactgcgcacacacagaaagatgtggtgacaccacaaccattaccaatcctagctttatggcagacggacatacgaagaaacaaggccatcttacac

SEQ ID NO: 64866 - DNA, 266 bp, Oryza sativa
  unsure (1)..(266): unsure at all n locations
  Clone ID: PAT_MRT4530_6596C.1
aaatcaaacataattacgtgataccaggggttttttttattgtcgacgaatacatcagatatgctctagatacatatctngngagaatatagccggagctttgttctcacatatccttacccaacgataattgaaatactctcacaataaaaccggcctgacagggatggaagagattattacatatgtgctaagaccaaatgccatagaaatggtacataaccaaactgtaaaatacaaatattttacgtattatatattgatat

SEQ ID NO: 64867 - DNA, 615 bp, Oryza sativa
  Clone ID: PAT_MRT4530_65970C.1
atgagccggacctcctcgtcgccacggtgtcaacctcccgccgacgcagggggagagggagaggagctggccgctggcaccgccgcaccgctgcgtaggggagaggcgcgaaaactgcgagccgtagccattaacggcgagcgccgacgagctgaggagaggggagatgcgacgagccgtagccgccgcccgaggctagacccggcgagcgccggactgggctgctccgccgccgctccgctggcgccgacgccatcctcctcgccgcgccgccaagctcgtcaccatcctcctctccacgccgccgacctcgtcgccgtccgcgccgccgagctccacgccggtgagctccgtgagctctgcgccgccggagaggacgagctcccgccgtcccgctccaccccggtgagctccgccagatccacgccggtgagctccgtgagctccgcaccgccggagctagaaacacatgatgacatcaccatcgtcgccgcacccaccgagacattaagtgggaggaggtcaccggtggccacgcgggtggcgacggggcagcgcgatgcgaagaggaaggacggcgccggtgaccacgctggcggtggcgtggcatgctga

SEQ ID NO: 64868 - DNA, 422 bp, Oryza sativa
  Clone ID: PAT_MRT4530_65971C.1
ttttttttttttttggtgtcatctcatctcatcaaggcaaaaatataatgagaatcatgaggaaattttgtacaaatctggagtccatctgctgtaactctttttactcctgatggagggaaatcccattaagtatgagatgttctccacttcttcaggttagggcaatagtacacgcatgaatccatgtgatgtgtatatggtacacccactccactcctcttggcatctaagaccttcacccacacaggtcaggtcaggaagccacattatgccagaagcttacatgctaacatacactggaaggtacacatctgttacatctcctccccatgctcaaggcgagagcgcagagcggggtacggggaaggtcggaaggccacaatctaggctccgggggcatgatcatatgggcccgccct

SEQ ID NO: 64869 - DNA, 612 bp, Oryza sativa
  unsure (1)..(612): unsure at all n locations
  Clone ID: PAT_MRT4530_65972C.1
cccgccgtccactcacccgtctccccacgcccatcaacttgctcctcaagaagagagaagaggaagagctcgtcgcggcgcggcaatggcggcgaggaggctgatcccgtcgatgaaccgggtgctggtggagaagctgctgcagcccaacaagagcgccggcggcatcctcctcccggagaccaccaagcagctgaattctgcaaaagtagtggctgttggtcctggcgaacgtgacagggatggcaaactgatccctgtatctttgaaagaaggtgacaccgttctgctacctgagtatggaggaactgaagtgaagcttgctgagaaagagtaccttcttttcagagagcacgacatactcggacggcttgaggagtaacttggacggctcgactcgaggagtaactgggggttgtttgccatgacctcataactcgtttatttaattagacacgctggaatgtgagcgtggaagtttttttctgggagcaaaaatgcctgcctgaatttgatgtcgttgtgtcatcgatcgtgagcattactaaaaactgatgaaaccttctctttttgcgcgccttaatcatacctttgaatggaacctgccagncc

SEQ ID NO: 64870 - DNA, 286 bp, Oryza sativa
  Clone ID: PAT_MRT4530_65973C.1
gttaaacgcccgaaacacaattaaccagagggcaatttgaatgcaatgcacttacatgcatcacaggtaacagaatcacacacacacagacgtgacatgttcatattcgaaccggcaccaaattttatggatcaacaacaaacattccaaacaaatagatggctctatgattacagagctttaccaaacaaaacaaatcacttagcttggttcagtcaatcgaccacacctgcctgtccattcatggaacagtgggactttgtattattccataaacctccctcac

SEQ ID NO: 64871 - DNA, 5124 bp, Oryza sativa
  Clone ID: PAT_MRT4530_65974C.1
atgtcctacatcctcgccggcctcgacgacgactatgaacccgtggtttcatcactggtaggcaagaccaagccagttcacatctttgtagtttactctcaacttttatgttttgagtacagggcaaaattgcgtcaatcggcagcaaaccaggtctactcctccgccaacagcactaaatgtggtggtgggagaggtggctacaacaacaacgacaacaacaactccaactgcggtggatgcgatggcaactccggtggtggctgtggagatcgtggccatggccgcggcaacggaggcgatcgctacaactccaaacctcatatggtgtgccaattgtgtggcaacactggccatttggctggcgattgctggtatagatttgatgatacttttgttctagatttagaggtaacaatggcagcctcatacaacgttgatcccaattgtgctagaaaacaagctattgtttccaagtcaagtacagaagttgaatataaagcagttgctaataccacaacagaggacctcagtagcctcaagtatgatttcatctcagagttgatagactggagcgagccgccgctgtcaccctgctttttcctctgccgccaagccatctcctccatcgccgcagctgtttggatgacgccaactccaaccaatctatcaggtctgcaagccgggatgaagcagaggaggagcaacctgacgatgaaacagcaagcgtcccggacgagctataggacggcgacaggacaaagccaaagctgggtcgtgggctgcgcaacaagaaggccaatactagaattgctggaccggtgtgggccaagggaaggattggggctgttcttcggaactgatcccacgaaaaggcaacttgccttcctcaggttgactggattcggaagcaaagtaagggggtaccaaggtgtggaggaagtcatggcgcaagatgggaaactggatttactcctgaagacgatggcggagaacgagaagaagcgggaggaagcggaggctcgcacgcgtgcggacttcgccgagctcaagctgtcgctggatgtgcgcctaccagcggtggaaaagaaggtggagaccctcaacaccgtgtgcaagactctgagcgccaaggtcgaacagttggagggcagtattgcgttgcaacgcaaggatgatgaattcgcggggaaggtgaccacagctgtgtatcctgaagcccacaaggaggaacctcaggattcgcgcaacttccaatcaacccctctccaccatggtatgcgcgattcaaccctgatctctcctattcctttcccgcatgatgattctgcgttccagtctagtagccatggccagtcctctgctctagtgtatagtattcccccgatgacatttccacagttcaatggagacaacccacagatgtggaaagcaaattgtgaaatctattttgatgtgtatggtattcacccccggaattgggttaaagtggctacactgaatttctgtgggaatgcagctttttggttacaatcagttagatctcagttggcaggggccacttggtttgaattgtgtgaaagagtctgtgcaagattttctagagataggcaacagacactcatacgtcagtggattcgtatttctcagagctccacaataagtgattatgttgagaggtttgatagcattatgcatcagttgctggcctatcgtggagccaatgaacccatttattttgtcactaaatttgtggatggtctgaaggacaatatcaggcttgctgttatgatgctgaggccacaagacttggacacagcttgttctttagctcttttgcaggaagaggctctagaaggggtagttcaatctggagttaggagacaagattctggagtatatgtgaaaagcagacccacccctactccagtcctcccaacaagaacaaccagtgaagacaaggtgggagctaaatctgtaagaactagagaagacaagttattagctcttaagtcttatagaaggtctaagggactgtgttttaagagtggggaaaggtggggcaaggatcacaaatgtgcagcatctattcagcttcatgtggtggaggaattactcaatgcattacagttcaatactgaagaagaaaagttttctggtgacataccagaaactgcagatgatgcattaatgtctatttcttatcagtccttaaatgggattgattcttctacttcaattagactaaggggatgggtacaaggaactgagttgctcatgttagtagactcaggcagcactcattcttttgtggatgaaagaattggctctacctttattggcttaaaacacctgccccaaccattgaaggttcaaattgctgatggagggcagctatcatgttctcaggtgattccaaagtgtgattggtggattcagggtcataatttttctagtgacttcagattacttcccctgggcagctatgatgctatattgggaatggactggctgcagcagttcagccccatgcaaattgaatggaatcacaagtggttggagttttctcatctgggtaaagtggtcaagttgcaaggtattactccacagacatctcagtgtgctaccatttctggggaacagctgcaggaacccactggattacctcccaagaggatgtgtgaccaccatataccattagtggaaggtgcaaaacctgttaatcttcgaccctataggtataaacctgcactgaaggatgaaattgaacgtcaggtttctgaaatgctcaggtcaggggtcatacaacccagccaaagctccttctcttccccaactcttctagttaaaaagaaggatggaacatggcgattgtgcattgattacaggcagctaaattctatcactgttaaaacttttcagacacactctggccactatgaattcaaagtgatgtcctttggtctcaccggagctcctgcaacttttctgggggcaatgaatgataccatgtctcctgtgttgaggaagtttgttttggtcttttttgatgacattctgatctacagtcctgataaagaatctcatctgcaacacctaaagattgtattgcaattgttggctgacaataaatggcaagttaaattgagcaagtgctcttttgcacaacaagaactatcttacttgggtcatatcattggggtactgggagtttctactgacccttccaaaattcaggatgtgctgaattggcctcaaccaactaccttaaaaaaattgaggggattcctaggcttagctggttattacaggaggttcgttaaaaattttggtgttatcagcaaacccctcactatgcttttgagaaaaggagttccattcaagtggactgcagaaactaagtcagccttccaacaacttaaacatgctttggttgctgccccagtgctggcacttcctgacttctccaaaccttttactattgagacagatgctagtgatcagggaattggggcagttctatctcaagacaagcatcccattgcttttcttagcaaagctttgggtccaaaaaccaagggactctccacttatgaaaaggaatacttagccattctgctagctatggaaaattggaggccatacatccaacaaggggaatttgttattctgacaaaccaccacagcctaatgcatttgtctgaacaatggttgcataccccttggcaacaaaaagctttcactaagctgttgggccttcaatatagaatttgttatcgaaagggattatcaaatgcagctgctgatgctctatctcgcaaggaactacctgattcagccgagttagcagcaatatctgaatgtattccattgtgggctaagcccgatagatccaagtatcccggtctcttgcaaccattgccagttcctgaaggtgcatggcaaactctgtccctggattttattgagggcctgccaagatctgggcactataactgcattttagtggtcgttgataagttttccaagtacagtcacttcatccctttaactcatccttttactgctaatggagttgctactgagttcatgaaacacatctacaagctgcatgggttacccaaggttattatctctgatcgggataaaatattcactaaccagttttgggatcaactattctctagatcaggtacgaaattgcacatgagctctgcttaccatccccaaactgatggccagactgagcgtgtcaatcagtgtttggagatctatttgagatgctttgtccatgctactcctactaaatgggccacctggttatatcttgctgaattttggtacaatagttcatatcactcaactctgggtaaaactctctttgaggtcttatatggctacactccagcacattttggcattagctctgatgattgtcaaattgctgatctaaaaatttggttgcaagagcgacagttcatgcagcaactcttgcagcaacaccttaaccgagctcagcagcaaatgaagtctcaagctgacaagaagaggagtttcaaggaattcaatgtgggagattgggtttatctcaagttacagccatacattcaaacttctgtgactaagagagctaatcataagctagaatttcgatatttcggcccatttcaagttctggacagagtgggggctgtagcttatcgtttgcagttgccctcttatagtgctattcatccggtcttccatgtgtcacaattgcgagcggctgccgggttctctaaaccggttatgtctcaattaccaagctctttaggggaactacaaattccactccagttcttggacaagcgtctcactaaaaaagaggaagctacctgggaggacatggaggaactgcgtgctcgctttcctggcgcgctggcttgggggcaagccagccaccaagagtgggggattgtcaggtctgcaagtcgggctgaagcagaggaggagcaacctgacgatgaaacagcaagcgtcccggacgagctacaggacggcgacaggacaaagccaaagctgggtcgtgggctgcgcaacaagaaggccaatactagaattgctggaccgatgtgggccaagtga

SEQ ID NO: 64872 - DNA, 1371 bp, Oryza sativa
  Clone ID: PAT_MRT4530_65975C.1
atggcttcccacgacgctattgctcctgagaagacgaccaactatgagccctcagtctggggggatttctttatcaactatagaccacaaccgctccagagatcagaggaatggatgaggcagagagccaagaggctcaagatgaatgtccgcacactattctggacttccaatgatgtggttgtaaggatgaacttagtggatgcagtccaacgtctaggaattggtcacctcttcaaagatgagataaggcgcacactaaatgatatacaccaaagtgaatttactagctctagcctccatgaggttgctcttcggtttcgcttgcttagggagcacggcttatgggtatctccagttacattcaacaaattcaaaggtgacgatgggaggttcatgaatggaatagctgatgaaccaaggggtttattaagtttatacaatgcagcttacctccttgttcatgatgagccagaactcgaagaggcaatctctttttctaggtaccatctaaaatcaatgatgcagggcaataacctcaaacaccctttatctgaccaagtcaagcgtgcccttaacacaccattaccaaggacatccaaaagaacagagacattgcattatctttcggagtatggacaagaggaagggcatatgtcaattcttttggatcttgcaaaggtggaatttaaccttctgcagggggtccacttgaaggagctcaaagctatttctgagtggtggagagaccttaatgaacatgtggagctaagttatcttagggatcgtgtggtggagagctatacatgttcacacatgttgttctatgaagaaggcttagcattcacacggataacttttaccaagataattgtactaattattatgatggatgatacatatgattcccatgctaccatccaggaatgcaggaagctaaatgaagccatacaaagatggaatgagagtgccgtctctgtcctaccagagtacctaaaaaatttttaccataaattgttgaataattttaaggagtttgagaatcaagtggtggttagtgagaagtaccgggttgctcatgctaaaaaagaggaagctgaatggtcacataataattacaagccaagttttgaagagcagttggctttatctacaaagacttcaacggtgcaactattatgtgtgtctactacggtcggccggggtgatgcaataacaaatgaagcattcatgtgggcagctagcagtactaccgtgacatcatgtgcaaagataatgcgtttcatgaatgacattgcttcatttgagaacaacattgttcctgagtggccacagtatttgttcaagctcatcattatagagaaacggtaa

SEQ ID NO: 64873 - DNA, 443 bp, Oryza sativa
  Clone ID: PAT_MRT4530_65976C.1
atcaagaaggaggatatcagcaaagtcaagacggaagaggctgacctaacggtttgaaagacaccttcagcaccatgagggtaaggcaaaacatcgataatcctaaccgtgctgatacatacaacccaagagctggaaggcttacaaatatgatcacgcagaattatcccattcttaatctcgttcagatgagcgcgcgagaagtagatctataccagaatgcactgctttcaccgagctggaacatcaacgctcacaagatcgtgtatattactcatggaacatcccatgttcaagctctcaacaacaatggatagactgcgttgaacggaaagctatatcgaggacagctacttattgcaccacaacactatgcagttgtttagaacgcacatacaagcaagatgtgcttacattgcattcaagacaaaccctaactctat

SEQ ID NO: 64874 - DNA, 1991 bp, Oryza sativa
  Clone ID: PAT_MRT4530_65977C.1
ggtgacatggcatggaagaaatataattaattagtgggaggcaagttaatttgaaaaaatcatacaatatagattttgtttcatctatccctccaaaagtaaaaagaaaaaaaaatagataatatttgacaatacagtctaaaaggggaactacatggtaatgggattgatgaaaagattcctaacaatctcttgtagatgtgtggagaatgtgtacgcatcctttctcttgtcataaaagaacattatacaaatagccaagttcacaactcgttgcactaccgggagtagctgatgatgttcacaacgggcttggttgatggttctccattcatcttctaccagtgaatcgagtttggcaaaggccacctcacttatgatgttgtgctcattcatgtagcactcaacggtgctcgcaatttcccctttgttcttcccacgctcaaatgaagcaatgtcattcatgaaacgcattatctttgcacatgatgtcacggtagtactgctagctgcccacatgaatgcttcatttgttattgcatcaccccggccgaccgtagtagacacacataatagttgcaccgttgaagtctttgtagataaagccaactgctcttcaaaacttggcttgtaattattatgtgaccattcagcttcctggagaaaataatgggacagtatttgaaactcttttttagcatgagcaacccggtacttctcactaaccaccacttgattctcaaactccttaaaattattcaacaatttatggtaaaaattttttaggtactctggtaggacagagacggcactctcattccatctttgtatggcttcatttagcttcctgcattcctggatggtagcatgggaatcatatgtatcatccatcataataattagtacaattatcttggtaaaagttatccgtgtgaatgctaagccttcttcatagaacaacatgtgtgaacatgtatagctctccaccacacgatccctaagataacttagctccacatgttcattaaggtctctccaccactcagaaatagctttgagctccttcaagtggaccccctgcagaaggttaaattccacctttgcaagatccaaaagaattgacatatgcccttcctcttgtccatactccgaaagataatgcaatgtctctgttcttttggatgtccttggtaatggtgtgttaagggcacgcttgacttggtcagataaagggtgtttgaggttattgccctgcatcattgattttagatggtacctagaaaaagagattgcctcttcgagttctggctcatcatgaacaaggaggtaagctgcattgtataaacttaataaaccccttggttcatcagctattccattcatgaacctcccatcgtcacctttgaatttgttgaatgtaactggagatacccataagccgtgctccctaagcaagcgaaaccgaagagcaacctcatggaggctagagctagtaaattcactttggtgtatatcatttagtgtgcgccttatctcatctttgaagaggtgaccaattcctagacgttggactgcatccactaagttcatccttacaaccacatcattggaagtccagaatagtgtgcggacattcatcttgagcctcttggctctctgcctcatccattcctctgatctctggagcggttgtggtctatagttgataaagaaatccccccagactgagggctcatagttggtcgtcttctcaggagcaatagcgtcgtgggaagccatggcccgaggcgtaggcctaacgctggatgggctcacagcgatcttccccatcatgccaagtcctatatgtgttggtgcaaggcttggcgcgcacttgccggcggaacccatactttggacccttttcccaaagccctttttttggcccggccctgccctcccgatcccccgggcgctggctgaatgcggcctgcagcccgggggatccacta

SEQ ID NO: 64875 - DNA, 664 bp, Oryza sativa
  Clone ID: PAT_MRT4530_65978C.1
gacgtccgatgcacgcgctacctaacctaggtatcctctacacggacgcgggccggttttttttatgcactccatgccttcagtggtctttttaccactttcttccatttcagtttttatccaacccctgcctctcctatttttcacatgggttaagattccacgatgaaccagttcctcaggaagcctccattttgaagtgagggggaggggctttaataatatagttgctcgcataattgtatggcttatgacagtaaaatacattcaagtctaaccaggtatgataatttgggaagtgctacaaatatgcactgtgcaatgggctttcttcacattggagcgttaatattttggataatatggaaatagttcctttttatttattttttaaaaaactaatatcacacacacatttattaatccagatgtttctaggggttggtatgaccctcacatgtagccacttacggggccaaactttaaagaaacaatcagtacaagatttttggaaaagcgctagcaagagtgcagaatgacagtcaggttacagcataaattgggtgtcctggtactgggtgtggcatgaaggtggaaatcgggcagttcgggggggcattcttaacaagggttggacagatgaggacggcggtgaacatgtggg

SEQ ID NO: 64876 - DNA, 288 bp, Oryza sativa
  Clone ID: PAT_MRT4530_65979C.1
atggcgtctcgccacattgggggagatctcacatgtcgcaaagccgctttcgcgttagtgcgcgacgaggcgtcagctgttgtatcttgctgccatccgtcgagtggcccgatgccccaagctggagcagcaggctttaatggtcttatcagctattcagctgtaacccgtggaaataaagtttttgtgagacaaattttaaatgctaaagataaatactctaggacggtcactcactcactcagttacgcagtctcctttaagtcaggaggaaaaggattggtgtag

SEQ ID NO: 64877 - DNA, 657 bp, Oryza sativa
  Clone ID: PAT_MRT4530_6597C.1
atggctggtttctgctatcccttcctcagtggtgttggtggaacgggagaagccccagccgatcgtggaggatcacttgccgtcgaccaggccgacatccacactgttgttccccgtgtcctgcggctttccaacaagcaaactgcatcaccgacggcctctccaagcggcaacaccaccgaccaccttccagcactccaaccacctcgccaagccactatgccggccaccttccccagctcctcgctggccaaaacaaccattttctgctccacagccgcctactccaacttgcccccaccacatccgccggccacctacgacttgccgacgtcgtcctcaacacctccgccggccacctactcgccgacgtcgcccccctcacctccgccggcccccatcacctccaccggccaccagccacctaatcgccatcgcccccctcacctcttttgtgttttatttaatgaaactccgcgttgtctgaatgccaattctttcagaaaaatacgctgtgggcgtcgtccaacgggacggcgccacagagtcgctggcgccgtcgttcaacgggacgacgcgctcccctgccacctcagcgccgacctgccacggttgctggaggacggcgccagagaggcagcgactctggcgccctaa

SEQ ID NO: 64878 - DNA, 203 bp, Oryza sativa
  Clone ID: PAT_MRT4530_65980C.1
ccctaaacttgtagcgctgtgtcatcccgatccccaaactcgcaaatcaaccgtttaggtcctcaaacttatttgactgtgtcatcccaatccctaaacttgcagatcactcgtttaggtcctccaacttaactgaacaagttagagaatctaaacgagtgatctgcaagtttagagaccgagatgatacagtccaacaagtt

SEQ ID NO: 64879 - DNA, 599 bp, Oryza sativa
  Clone ID: PAT_MRT4530_65981C.1
ccgggctgcaggtgagacaagactggcattttcagagcttgacagctcagatggaccatcggtttctggtggaacaaaaaacttgttgaaaccaagcaacagatctgagccacagactgacccaacgctgaccatgattcgcaacatggatgctgtctcaagagctgcaacactacggaactacatcgataggattcaaagcttggataagctatcaaggaatgactgcctgtggctgttttcactgtgtgtccccgtggacactcccttggacgccgagacatgtgcttcgctgaggtcgctgctgcgcaagtgcgcaaatgtccttgccgccaagttggagatggatgatgaagtcgctatgctgaacatactgatcacaatctctggacggttctttggacagtatgataatcattaggatagcaaaggtaccccatcttgtgatatctcccttttgttagtatgcctagacgaagttttgtctccttactccttagactgcctatatagtgatggaatgtacacaatcagttctctgaaattctggatgccttcatcactatcatggctaatatagcgaggcaccttgagatggg

SEQ ID NO: 64880 - DNA, 501 bp, Oryza sativa
  Clone ID: PAT_MRT4530_65982C.1
tgatgggaagccagaaccccagttcagctccgggggctacatgtagctctacacgcggaggaacaacatgtgcacgcagaagacagagcacgactacctcgtagtcgatctacgagaagtactgcgagtccttcgaggagtacataacgtacagggtcttaccttcattaagagagaaacatgatgagttcatgctgtgagagttagcaaaacggtggtcaaacccatatagtgatggcatcgtggctctcacgctacccccataatgttgatcggtactttattttaaggcggttcctaacacagctaagcgagcttgggcttacctgactccgggaaccggtgtaacaagaggatctaaggacaagtacaaagtgcggtgacattcctaaatgatccagaacgtgagggtgaacaaaaagatagggacctgataaagaaggttctggaaatatctgtggaaaatggggtgaatattatggccttctccaaaaatgattt

SEQ ID NO: 64881 - DNA, 1907 bp, Oryza sativa
  Clone ID: PAT_MRT4530_65983C.1
atggcctcctgcgacgacgacttcggtctcctcggtgacggccccgtccccgaggaggaggcggcggcggcggcggcgtcgtcgcaggccgcgccgccgccgccgcagcagcaggcccaggccttctgcttcggcgatgcggcctcggtcgccggggccggggcgggcgtgggccccttcgctccgatggggcaggaggagggaaaccacagcgcggagcgagggaaggcggcggcggcggcggcgcaccactccaagcgggggagggaccgggcggaggagttcagcgatgggggagagtactgctcctacctcaacagcggcggaggtggcggcggcgcggggaagaagggccgcggcgggggcggcggtggcgggggcggggtcgcggccggctcgtcggagtaccgcaaggaccgggaggagtggacggacggcgccatcagcagcctcctcgactcgtacacggaccggttcgagcagctcaaccgggggaacctgcggggtcgggactgggaggacgtcgccgccgccgtgaccgacgggcagggcaagagcagcgggggcaagagcgtggagcagtgcaagaacaagatcgacaacctcaagaagcggtacaaggtggagtgccagcggctcgccggctcgggggcctctgccgtcagccactggccctggttcaagaagatggagcagatcgtcggcaactcgtcttctcccgcttcctccaaggcgttggtggcctccgacgacgacaacaagccacggcaaccgcagcagcatagcagcaaaaggcacgctccttctggcagtagcacccccaccttcggcggcagctccagattggcccctccatcaaatccaaaatggaaaagggtgcttctcaagattgggggcacagcattggctggagcgcctcctcaaaatgttgatcctaaggtaattatgctgattgcccgagaagttcaagtggcatgccgccatggtgttgaggtgtcaattgttgtgggaggtcggaatatattctgcggcgacacttgggtttctgcaacgggcactgatagagcttcaacatactcaatcggtcatgcagatgcagcattggtcccaaatagtccttttgatagttgcatgatgttttgtatcctgatcttcaccatgcacattccttatatgtatctaatgaacaccagaattggtagctccagttcaagcacatgtgtctctttgaattttgtcaggatgatggcatcagtgatgaatgcagtactgctccaagcgtcactagaaaagataggtgtggagacacgagtccaaactgcactgatgatgcaagaagttgcagagccatacataaggcgacgagccatacgccatcttgaaaaaggaagggtcgttatctttgctggtattggtgctggcataggaaatccacttttcaccacagatacagctgctgccttgagagcttctgaaatcaatgcagatgttgtgcttaaaggtaccgccggagatgacgattatggttgtcctcctaggggcaacaacaatccaccttttgagcacatctcatttagggagttagcggctagaggattcagcagaatggatatgacagcgattacatgttgtcaggaaaataatattcctgttgtcatcttcaacatgttagagcctggcaatatctccaaagcaatttgtggggatcaagtaggtacattagttgaccaatcaggaaggattacataaactttaagaaggttagctgcggtagagcattgggtcatgcccgtactatgggggtagcctgcatattggttgatttttgtggatgcgagagcgggcatgttccttgtgacagaaggctcccaccttgatttgtcttgggatgcttgtttgtgtactat

SEQ ID NO: 64882 - DNA, 656 bp, Oryza sativa
  Clone ID: PAT_MRT4530_65984C.1
ctactcccttcccccatcctccacgctaatgttggcgcctcctgccaccgtggtggggcggcgctgaggtggcagggggagcgcgccagagtggctcagcgccgacctgccacggtggtaggaggacggcgccagcgacttgatgtcagccttcacgccggtagcatatctcctacgtcctccgagctccaccctgcgagggcggcggctgcggcatcggcatggagctgcgagggcgggacgtggagctgcgaagggcggcggttgcggcgtcggcgtggagctatgagggcagaggctgcggcatcggcgtgcagctgcgagggcataggctgtggcgtcggcgtgtggttgtgagggcggggcgtggagctgcgagggcggtggctgcggcgtcagcgtggagctgcgagggcggcggcgctgccatggtcgcggaggcagtcgccagcgaaaggctctgcacgcagtcgccagcgaggagagtggcaacagcggtggaccttgctgccctgcgcggaagaggcggacctcgccggagccacacgcgtggggaggagtcctcctatggaacgccgccactgcttgatcgaggacgaggtcaagctcaaggccatatctgcatccgccggccgccgccgcctcatcgagcttga

SEQ ID NO: 64883 - DNA, 351 bp, Oryza sativa
  Clone ID: PAT_MRT4530_65985C.1
atggccgacgaggaggccatcgaggatgtcgatcatgaagacgttcgccgggctggtccgcatcatatcgaccggtggctcgacctgacggatgggaagacgacgcacgcggctcgtctgcgaggtggacgtacgtcgtcgccgaaccatgcgaggtgccgcgcgtcctcgcgctccacctcgtgcccaagtggctcgtcaccgtcgtgctgcggagacgcgacgacgacgcctccgatgacggctgtgacggcgaagaaagaggatggccccatcggaacaaggacaatctacaatgatatatgcagagaaagggagaagggaccaaagcatctgatggaaaatggctaa

SEQ ID NO: 64884 - DNA, 4551 bp, Oryza sativa
  Clone ID: PAT_MRT4530_65986C.1
atggccgccgatgatccctccgtcggattcttctccggggtctggtcccgcctccgcgctgcttggcgccggactggagccgcacaccaccccgccgggcccggagacgacgacgatggtcaaaacgaggaaacggtggtgcgttcgcgccttgtcaggcgagcggcggcggctcggaggctcgcccacaagctcgccttcctctccttcaacctcgaggtcctggtgttcgtttatgctttctggagggccaggaggcgcaatttgagctggaggcagcccatccaagctctgcctgttcttgtcatccctgctctagctacactcatctatgccgctttcatccgcttcaccagaagacttgatctcaaggaccatagaaggcttaaaaggattcaggagcagaagcaggcaaatgatggtgagccaaggaagcctaaccagaacgacctgatcagtgcacagaagcagaactgtggcgatgtagatgatgccagtaattctttgccggcaactgattcaaatagtacttttctgccagcaactcattcagagaacagaacttctaaacctaagaaacgccgccagccaagtattagctcaaggggtgatggtgaagcagacatgtcttggggtcatagtaaggacttccagccgatgcccttggatggcctacggaagaggagattctcaagtgagaaaacatatagaacaacaagcattgctaccgaaagcatcgaggaagatacacagaatacaatgtcatctagtgtcgcaggttccatctgcggcaaggagtttcctgaattaagtgattcctctataagtcaatcaaacaacataaaaccgatttgtggcagttcagcaccattgatagggtatcctggaatccttctgagagatggaaatgaagaagtaccagctgcctccacacatttagatcagcaaggtggtgcccatgatcctattgaagatactgttttctctcctctggattacaggaaccattctggacctgttatatttgtcaagttaactgaacctccaactattcatcacgaatcgcctgtaggaggtggtgaagacaaagtttttgatagattattggacatcgtgaacactaatttcagctcctgcaaggagaatctcatatgtccagttaactctcatgacagttcttttgatagaggtgactcatgcttaactgaacatgggatgtcatccttaatgactgtcttcagagaaatgcctgtcaaagtcagtgaggaaagctcaccatctcaaccagaaaaactggaatcctatccagtttctattaatgaacctcccgcttctccatctgactacattgttgcttatggtagcttaaatgatgtgagccaggatccatctgatccagtgctatctgcattagaaaactttgaacaggttcctccagagggtggcaaggaggactcattgcttgagccacacaaattgacagcgctgcaaacagatactgtcactccagagaaggtccctacttcacatgccattgatgacaatgaagtgataattaatcctgatgaggttaccaatgcacttgcttgcatctgtactgatgcaaacatcattgcagctgttgcagacattgatacaggggtcagtcctagattgaaccttccagcatttcaagagtcgcattgcgaggaatttgaggatcctgaggtgagattttcatcctctgcagagttagcgatgaagggtgatgaggatacctgggaaaaagaaccatgtggatttaacgggcaggaaggaaatgatgtattcatctgttcagaggaggaagctctgctgggtccgcttgcagtcagtaccactgaacagtacatgaaaacttcaggtttccctttatgctgtcaagatgccaatatgatggaaattcctaggattgttgcagttaatcccgaattgaacaacccaacatctggagagctactcacagatagcgatgaggtctcaaaggaggaattatcctacatccgattttttttatgcaatggagtagagacaaccattactgaagctcatgaagctgtcaagaaaagtttgtctgaatcgcaagatgaagggccatttaaccctataaaggctgctgttaacccttcatgtgatgatagtaaccctgcacattttgttccagacaccaacgtgaggaaaaaaattcaaggtggccaggagaaaactcaggaagcattttctaatcagctagaccaaataacttgtaattttgaagggattttattatcttcagataatcctatctttctagatgaggttacaagagctgaaaattggacgaataacactggatcttctcaatgtatttcagacagacatgagattcgatcgtttcatgatggcaaacaagttccatctgaaacaatacagggacttactcttggtgtagagggaagttttgtatctccagaagagagcataaattctgaaaaatattcactctattccaggtcatcctcatgtgtttcagaggttaacataatgcatgctaccggaggtggcgcattggctgaaccagggaacaatcaaaatttcaacttggatgataagaacaccatgatgtttcaaagtgtgaatagtacagaaaattatggaaacaacaggtctgttgaatttattccagagaccaacatgatagaaactcttgaagttgctggggaatcaatagatggtttactacatgaagtttcatccaatgttgttaatgctttcgtaactccagacacaggcaatgacatgggaaaatcagatgattacttggacttaccgtctttttcatctgttcatacagttcagaattccaaggctgaaaataacccatacaagacaacttcatcattgttctctgcagatgtcaatttgactggatgtttaggaagcggtcagcaaggaaatcaacaaggagaagaaaccgctttatgttttgagaatctttacatggctctccaggatgacaattctaaagatcattttaccaatttggggtctcaagatattccagatgctagtatttcagacattcttcaagttgaagagaaattatcatctgataggcttcatgatggtatcttcagcattgaggggactttaatatctctagatgatggcaacattgctgattcaaataattcatcatttgtttttcataacacacagatcaacagaaatctcttagggcttcaaaaaggctcattcaagctacaagatgaacatacaatgactcccatttctcgaaataaggttgatattgctgagaagtctacatgctacgttgctggagaatccatggttgcagatctacaggataccaacaaaacaccgtcagacccaagagatggaagcatctcaagtttctcaggggcttgcaatcttttagatgagtcaaaatattcaacggatcatccgtactactcaagatccatgtcatctgggcctgaatgtagtttgatagaaactcctgaagcagcccgtggagaatcagttgagacagatgacgaaaattttagttttgaggagactttgactcctgaaatctcttcaaataggtctgcttcatataactgcacagaggaagctgtaagatcatctggaaaaggatcaactgatcctctaatggttgatgttcatagttttgatatgattcccgctggtgaagaaagggaaaacgaaacattaaatgaaattgcctataattcagagcaggcagccataattacggaggatgtcaagtacactgaaagttttctgaacaagccaggatcgcttccatatgctccaaatgataattgccccatagccactgaaaattttgacaaaggattttctgagccacagtatcaggatggaccagaagttgctgttcgtttggcagggatgcccctctttgtggataatggcactgaagctgaaaaaagccatgataataccagatgctcttcttcttctcattctgaactcaacattacagaggctgtccaagaactgtctatagatgttggaaataaagtttcccccaagggctctgaattacctgattggcatcggatggataaggaagcaaaagacagtagattggacgatgtgaaagaggatttagaagacttggatgaggaccatgagaatagtcccattgaccctccgaaggtagctggaattacaccttctcttgcaccaacgccttctctaaaactatatgcacaagatgcttcttggagggattcatcaatgggagtaagcaatgattttgaagtggcacgagcagcagggcttcggcaaaggaaacaagtattcacaatcagtagtggcactgggagcggtactatgtctgagctaactgacacacagtacactgaacttgttgacgatgttatcgattctcttaatgctcctctaccctcatcagctgttattaatactaaaaaaggaccaaatggtatggctgcatactttttagaacagtcagctactgaacagcctcgtaagaacatctga

SEQ ID NO: 64885 - DNA, 496 bp, Oryza sativa
  Clone ID: PAT_MRT4530_65987C.1
gaataccaatttcacacagggacagctatgacccatggattgacagccagctgctaatgacgactcactatgagggaaagctggttacgcctcgcagtgaccaggtccaggaattgcaccaggttcagacccacgcagtgcactgcaggacgcatgggcaggacagcgtggggatgttgcaatcgatgttgagtgctacccggggaggatttggtggaaaagggatgagaatggaaacaatgttgcaaggacaacgccttgccttgccaaacagggcttggggttgtatgttttgagagctgagggggacttgtttatgcatgcttgtgcgtgcagctgatgtgcaagtgtcgcaggacatgggctactggtgatgatgtgtgttggggtggtgaagtgccatgaggtggcaaccaatgcccccccactgtgggcgggagtttgtggtgatgttaagtgaccatgtgtgtgcatgatgctggtaaagcggactgga

SEQ ID NO: 64886 - DNA, 1552 bp, Oryza sativa
  Clone ID: PAT_MRT4530_65988C.1
ctagcggctgcggcggcagcgcctgtgcacggtgggagggtgcgcgccgtctggggcggcggtggccggcgcgcggagggaagaggtggcgctgctggcgcgcggaggaaggaagcaggcgggcccggtggtggagctcgagttcttggatctagcgagggaggggcggcggtggtggccggtacgcggagggtagaggaggcgccgccgacatacggggatgaaggaaggcggcgagcccggcgatggagcagtgacggttggatcccgagtgtacgacgacggctttccggcgatgaggagtggacggctcggtgacgatgagaagtggatgggtcggcagcgacgaggagtggcggcggtgctccacagctgccggctggcacgggctcgccctcttgccactcgccagggcccccggccgaaccggcaaaggggggcctgcgcggtctcccggtgaggagccccacgctccgtcagggccagtcagaccgccggtatatgggcggtctgactgcggcctgaactccggtctgaccgcaattatgtggccgggcagaccgtcagggtccgagtccgactctgttttcgtcgggtctcgggtttccttgctcgggaaggcatgtttcgtgtttcctttagtttctatcccgagttggacatggagaagggcgctagccggtttagcttttctttttgtaaaacccttcttgatttggccctttgactagatcgaggtggttggcgactccatatcaccgcaaggcgtttaggtgttgcgatcgtgcttgtcaacttgtcacaaaaagttggcaacagtgtgttggtgagtgtaagccggacgttgagtgaccgtgctttggtttgggcggtgaacatagcgcatatttgctgccatgcttgcatcgccgaggatgccgtagccacctgggtgagtacatctcttgagagggtggagagcaggaaccccaagacctgttggtcagaggtaaaccactcctggaaagcagggttggcgatcttctctgatttgccatcggtgacgcactcgatctccgcggccagagcagcagcggcgccggtgagatgcccgtctaggcgcgacccacgtatggccgtagcgcttgacgaggatcctgccatcgccgcgcttgaggatttgtcgccggactttggtggctctaataccatatgcaacctcagtatttttgcagttaaaaggattctaagccacggctgcagcgcgcggagggcgtcggcggcacggctgcggcgtgcgaagggcgtcggcggcgggactcacgcagaggatgggagcggcgttggcggcgcacggggagagagcgagcagcggcgccgagaaggtataggcggctcgtcggcgttcttcgcgatggagacgcgcgactcgccgacgtgctgcgtggtcatggaggaggcatctcgccaggcgcggtgcgcacagggagctcggcgtaaggcaggcactagcatggctattgcttgcacatcttcgcctcctctttgttggattgctgctgaacattgttag

SEQ ID NO: 64887 - DNA, 1232 bp, Oryza sativa
  Clone ID: PAT_MRT4530_65989C.1
aataacaatattatattaaacttgattgatagaaaagtcgctaaggagatagctggttgtattgtgaatacagagtgccttgcccacttgcattgcatacatcaaggaccaagtggcaaaagctatcttgcacactagctagatacatgaaacatgagcacacttgcaatgttacatagctgtaaatatttagatccatgctaatgattcttctacaaaagcacttcacttctgctaggtggataattaacttgggtaacctagttcaatatattgcttcaataacatgggcccacccctttaccataaccaaattgtggtgctaccttgatctcatcatccatcctcaagcatgtttctgggcaatagtaatcccacataggatatggcaatagaggaccagataggctattggatgcactatcctttgcttcatcaaaacatggccctgggagcacatttggtgcctcaatttccatccatatctgatccatgggataaccatccatgtcaacaggggtgcttttcatgatgcttgtgatgcagccactgccgccatgaagttcctgctcctcaattccaatgatcattgacggggtctctgtttccccaccgagcatggagctcaaggatgaggcgctcttcatgcggagacatgcgcccacgcttgaggccagggtggaggtagttgacccaccggaggcggcagctcttgcctgtgcgattaaggccagttgcaggtcctcctgctctgtccatggccctttgcgtatctcttctctcactgtcaccatattgattacccttgtatcggctcggagccggtcttcttgctcttcttccacctctgtgtgcttgttggctccagcttcaggatgtgatccttgatgaactccagccattggaaatggtatcttcgaaaagtctctatctggtttcttccaaatatttttccctgtccgtctgatatgaaaagcactagcctttttgtcagccattatcattggcacagaggactccatccctccttttctgggaggagatgttgagcccctgcctctgcttcttcttcctctggcagtggcagcatgcactagcttcaggatttgtcggtcatcatcggcgccacgacgagatgtatgaagctctcgttccagtgcccaatcgagtgccctgttgaaaatctccatgcaggtgaggtgtgcagctgcaatccttcttgacttcgccat

SEQ ID NO: 64888 - DNA, 279 bp, Oryza sativa
  Clone ID: PAT_MRT4530_6598C.1
atggagatgcatcggagtataaataatgtgaagccaagtggtatgagctttgaagagcagcagaatttcatgaatgcagagtatttgtctgtgcggtgtggagtagaaggggaagaggagatggggatggaaagggctctcgtatttatagaagaggaagagatgggcggggtggagaggaaggaatcgggggcggagaagcggaagcgcatcgcgtgcggattggggcccacggctctgcgcccacacatggaactccacgatccaaatactcctata

SEQ ID NO: 64889 - DNA, 198 bp, Oryza sativa
  Clone ID: PAT_MRT4530_65990C.1
atgattgcagccatgaggtgcgagatgccaaaagcgcaagcatatcttgcattattcagagttgcagatgaggaggaggaggatcctgattcctgcagcctcggagattgctgcacgagggaggccaccaccatgcttggtgctttcttggctgcaggaatgtgcgcggcagatgctaagctaagattggggcattga

SEQ ID NO: 64890 - DNA, 319 bp, Oryza sativa
  Clone ID: PAT_MRT4530_65991C.1
accacccgttgcgtgttggggcggaggtggagcggacgctccgcgcggggaatttgaaatacaggcgcggtaaccccaccgtggacgtcgacctcgtcgccagggacgggcggctgcaccgctccgtggagcccagcggcgcatacacggagatctacgaggcgctcgagctccgccacggggacgggacggggtacgcctggaagggcgagctgaacgccctccgtaacattaacgaggttatcgagcccaaactcttacacttggacgacaggaaccagagcgatgttcatgcaagcatgctagacattgcaggaac

SEQ ID NO: 64891 - DNA, 447 bp, Oryza sativa
  unsure (1)..(447): unsure at all n locations
  Clone ID: PAT_MRT4530_65992C.1
cgatcgatcgaggtgtgtacacaaggtgttcgacaatggtgaagctggcgacggcgagggagtgccgggcgtacggcttgggcggcggggggcgggcggcgcgggggaggtgggagtacatcaacgccggggcgtacgtcttcgcggcggtgctcctagccggcggcttcgggtggcacctctccgcgtggtccgccaccaccaggtccggcctcgccgcggcggcgctcgggctcctcctcctcctcgcggtgaacgcgcacgacctcctggcgcacgccgccggcgtcngactacagcctcgcactcgccgccgggctncgacagccagttcgctcttcgtncgaggtcgccgtccccgccgttccacttcgntgggcaccgtgctcaccctcattgcggctcatcttncttcgagatttcagattgcaangaggggtacaggca

SEQ ID NO: 64892 - DNA, 280 bp, Oryza sativa
  Clone ID: PAT_MRT4530_65993C.1
aaacccaatggcccagttggcatgtaaatggcgagacgaatctttggggtctaattccgtcttgattggacaagggggggctcaagtaaacattggctaatgcccaattaattaggcttaatagattcgcctcgcagtttataagcgaaaccggcaaccgggttgggtattagcctacattaaatccttcaaaggggccccgatccttcaaaaattttttttgggcccccgaactaaccccgccaagcaccaaattttcagcatgttatctctcaagaaa

SEQ ID NO: 64893 - DNA, 540 bp, Oryza sativa
  unsure (1)..(540): unsure at all n locations
  Clone ID: PAT_MRT4530_65994C.1
naaaaaaaaaaaaaaaaaaaaaaaaaaaaaaaaaaaaaaaaaaaaaaagaaaaaaaaaatataaaagaaaaaaaaataaaaaacgcagtacatgcaaaaaaaatggcggctttttattgcgaggaccctagattcaattaacgtcggtccgtcgtttgacaccgtttctttcttgggaaacccctgattttacccaggtggggggcgttgaaccccttccggtttgcgacagctggggttttcccgaattggcccgttccggaggcctttcccttctgtcgagctgcctaaatggcgaatgggccgccccttgtggcccttcattaaacttggggaccctggtggttacgggcaatgagcccggtacgcttgcctgatccctagcgcccggtccttttcctttcttggcttcctttctccttttctttgccgtttttccccttcattctttaatttgggggctccttttagcggtccagtttggtttttcccggtacctttaggttagggagcttgtttttggggttggttcaagccctg

SEQ ID NO: 64894 - DNA, 429 bp, Oryza sativa
  Clone ID: PAT_MRT4530_65995C.1
atggctagggcgcagcggccgacggccagctgtcctgactgggaggcagcgacgcacgctacccgatggttgccggcagcggccatctgcgtggtagagcggcaacacggcagcgacacagcggcatggcagggaagaggaggagggtctcaccgacggcgcggaggagatgacgacgacagcaacgacaacgacagcgaggagcggatgggttccaggaagggatggcggcgagtgaccggcggacgacgcggctctcggcctcgtgattccgatggcagcaacagcgcgcgagtgagcgaaaaggaagaggggatctcggggaggctttttatagcagtaggagcacgggggcggctgggagacagggagaggcacggcgctggctggaggaaggggaagggcccgacaggtgggccctcctattag

SEQ ID NO: 64895 - DNA, 903 bp, Oryza sativa
  Clone ID: PAT_MRT4530_65996C.1
atgacgcgtgtgtaccctatttctgagaaggttgagactaccccgaaggacaatcccgaagaaagacggaaaaaatcccgtcgagatgaatgtaatcacgtccttgggcacgaacgcacgacagatatactggacatagaccgttcgctgtcatgtgaactaaaaaatgattttttttataccgtcaaaaccgattttcgtagacaattgggtaactcgcatatagacttttacatgcggccaccgccgccgcttccactccttcgaatgccgctagcagctgcacctcaccgcgctgttgctgccatcggaatcacgaggccgagagccgcgtcgtccgccggtcactcgccgccatctgccgtcggatctcgctgccctccgctcgccggtgagccgccattgatggccaactccgggcagctctctccggttgtccctcttcccctctctctttctaatctaccccttcctggaacccatccgctcctcgctgtcgttgtcgttgctgtcgtcgtcatctcctccgcgccgtcggtgagaccctcctcctcttccctgccatgccgctgtgtcgctgccgtgttgccgctctaccacgcagatggccgctgccggcaaccatcgggtagcgtgcgtcgctgcctcccagtcaggacagctggccgtcggccgctgcgccctagccatccgatctaccccttggcagatcggggtcgtccacgtccgtgccgcgtggctgccacgtcagtgccacgtgtacgccacgtggtacactcgccccagtcatgtggacttggtccaccatgggccgaaccgccttgtgtcactgacaggtgggacccatcggtcggcgccggttctatcccctcgctgacgtcagcaccctcctttgttgcacaa

SEQ ID NO: 64896 - DNA, 240 bp, Oryza sativa
  Clone ID: PAT_MRT4530_65997C.1
atgttaaggagaggaagggagaagaggataggagatgacagcaaggggctcactggtcggtctagcggcgatgacgtgtgctccctctcacactcggaagcagcactggcggctgcccccgcgcacgctccgtccgcccctgagacccgcataaactctgagattaccctcacgctgagaactactgaccctgcattaccgctggctgttgagaacgcgaagggatgccatattgattag

SEQ ID NO: 64897 - DNA, 349 bp, Oryza sativa
  Clone ID: PAT_MRT4530_65998C.1
gtcttttgttgcacaggctgctgaaacagaaacggagtggactagcctgcgtgccactggcgcatataacccaatgcttctagcgacgccacaacccggcgcgctctacgcctaatcacgcgccatctgcttgatatgaacaaacggatgatataggacagggacgggcgtgtacaagacgaccgctggaatgatcaaggtgcatgcctgtggttgggcgcctgtaccgcttgacacgcttgacgaaaccgtagacgtggtggagctgagggctactgcaatatagtaataacttgacgctggactggagagggctaaggagttctcaaaagcaaagaataaaagaggg

SEQ ID NO: 64898 - DNA, 1533 bp, Oryza sativa
  Clone ID: PAT_MRT4530_65999C.1
atgatatcgtggcacgagctgtacatggtgctgtcggcggtggtgccgctgtacgtggcgatgatggtggcgtacggctccgtgcggtggtggggcgtcctcacgccggagcagtgctccggcatcaaccgcttcgtcgccgtcatcgccgtcccgctcctctccttccacttcatctcctccagcgacccctacgccatgaacctccgcttcgtcgccgccgacaccctgcagaagatcgtcgtgctccagtccatcgtctggtacacgctcctgctcttcctcttcgagttccgcgccgcgcgggtgctcatcgcggcgcagttcccggacaccgcggcgtccatcgccgccgtgcacgtcgacccggacgtggtgtcgctcgagggcagccaggcggaggcgcacgccgaggtggcgcccgacgggaggctgcgcatggtcgtgtgccgctcgtcggtgtcgaggcggtccgccgccgccgccgccacgccgcgcgcgtcgaacctgaccggcgtggagatctactcgatcagctcgtcgcggaacgccaccccgaggggctccaccttcaccctcgccgacatccctggtcaccagccgcccaacagcgcgctgcgcgcgtccagcttcggcgccgcggacctcttctcgctgcactcttcgtcgaggcagcacaccccgaggccgtccagcttcgacgagcacgcggcggcgcgggccagagcatccgcgaccgtggctcccaccaatgacctcaaggacacgcacatgatcgagtggagctccggcgcttccgccgcgtcggaggtcaccggcctgccggtgttccgcagcggccgggagacgcgccggcttgtcccctccgacgcgccatccattgcctcgtcgagagttatccgaccgccgccgggagcgacgggcggggagcgcgcggcgagcttcaacaaggccgtgggcgggcaggacgagctagcgaagctggaggccggcgccaagacggagcagcagacgacggcggtgactacgacgacgaagggcggcggcgcagcgggcgcggagcgggcgagagggcagcagaacgcgccggccggcgtgatgctgcggctcatcctcactacggtttggcgccggctgatccggaaccccaacacgtacgccagcctcatcggcctcacctggtcgctcatcgcgttccggttccacatcacgatgccaatcatagtagccaaatcaatctccattctctccgatgcagggttaggcatggccatgtttagcttaggattgttcatggccacgcagccgaagatcatcgcctgcggctactccgtcgcggcggccagcatgggcgtccgcttcttcttcggccccgccatcatggccgccgcgtccgccgccgtcggcatccgaggcacgctcttgcgtatcgccattgttcaggccgccctgccacaaggaattgtgccatttgtgttcgctaaggaatacaacctccacgctaccatcctttgcactttttgcagctgctaa

SEQ ID NO: 64899 - DNA, 573 bp, Oryza sativa
  Clone ID: PAT_MRT4530_6599C.1
caaaaactttctcctcgcgagtcgctagttcaccgatcgaattatggtgcgaagtgtttgggttcgggcaccaccacagccagagcaccggctgctgccgtcggacccgaaccagatcttcaagatcttctggcgcgccaacgagatctactgactcaccgtccgagacagaggcctttgatctagggcccgactaccctaaggactatcaccaacactggttctaggacatgaagttcagtaccaacgtgaaggacagcagaggtcatgccgctgttcgccctattcaacattgacaccggactctgcggaaagcactcactatgacagtcccacccattgatgtttgtgccgcttaatctgtattacgaggacgcgtagatgctgtggacggacagcaatgtcatgagcgagggcttacgctgcatgcgcatggtaaacatcacccggctaagattgaacgccttccacttagatctgtaccacagcggagtgcgcgacctgaccacagtcgtgctctggaagtggctgaagggcaacaaaccaagctggaagatcctaccctggctgccc

SEQ ID NO: 64900 - DNA, 1010 bp, Oryza sativa
  unsure (1)..(1010): unsure at all n locations
  Clone ID: PAT_MRT4530_659C.1
acatactgagctcacgctgnggntgcggtctagactagtggatctcccggctgcnggaattcggcacgagggacagaatagctgcagcgaacaagacataataatggcgttagagaaagcctaggcacctcgcttcttcctcccctgtcttcatcttcagtaaaacatattgtggattctgcgatagggtcaaaccagctgttcaagcagcctggtgcatcataccaccgctcttgaacatggacaaggaacaggatggagatgctatccaagctgctcttcatgagtggacaggacagaggactcgcccaaatgtcttcataggatgaaagcacattggcggctgtgatgctgtgacagcaaagcactcacccagggcagcttgtgccactgctcactgaagccttacctataactcgcgagatataagtatctgcttgagctctcagccgaagggagggggaccctcgccgctgtgtcttcctccgcgcgtgtggcccgcgttgtgaggcggaggtgtttcttcctacccggcgcttgcgcttcgactgtcggtacggaactccttcccccttatggttcttgaagttatacatatcactgatatgcaatagatactgtaatggttgcttctcaacaatcactataatcacttattaacaaatattcctcttggggtgccggaccatattctcttanggagttgttacgcgcgcacgtgcctctgtatactactactgtgtgggaaactctgtggtacctaatanatctctatgagtctatctccctttgctagtctgtcggagtangagaagtcactatcgtncagtctctcaaanctacgccatcatgattgagtactggacctcacttgtncttgcctactactacgcgtcggtcgtgtgtgtnacgctgtgntacatgctcacacganacgctctaacactctaatcttctcatatcactcttttctagcncagtgctggtcttcacgattactctatcgtcag

SEQ ID NO: 64901 - DNA, 559 bp, Oryza sativa
  Clone ID: PAT_MRT4530_65C.1
ttagaagacgcgccggcggccgcagcattgctccgtccccagaagaagatccgcagccccgatcgtcgcctccagcgctccatctcctcgctgtcgtcggcccctgcttcccccgactcgtcctctgtctccaaccccatgtctcccccggcgatgtccttgccgaatcagccgccatcgtcgcgacatatatttccgttcgcgtacgattcgtctccgggcgcggcggcaccaaggctcctcccgctgctgcagtactccagcttatacccgcagcctctgctgccgcagcagcaatcacccttgcagaatcagcaaatgatatcgttcggcagtagccagcagcagcagcagccgcagtttggggcggcgtctcctctgttcccgccgcagttcttgccgccggaggagcagcagcgcctgctgctgcgctactggagcgaggcgctgaacctgagcccccgaggcgtgcgcggcggcgccctgcggccgtcgctgtaccagcacctgctgcgcgcgcctgggccgcccaagctgtaccgcggcgtgcggcagcgcc

SEQ ID NO: 64902 - DNA, 1719 bp, Oryza sativa
  Clone ID: PAT_MRT4530_66000C.1
atgatatcgtggcacgagctgtacatggtgctgtcggcggtggtgccgctgtacgtggcgatgatggtggcgtacggctccgtgcggtggtggggcgtcctcacgccggagcagtgctccggcatcaaccgcttcgtcgccgtcatcgccgtcccgctcctctccttccacttcatctcctccagcgacccctacgccatgaacctccgcttcgtcgccgccgacaccctgcagaaggtgctcgtcctcgccgcgctcgccgcgtggtcgcgcttccccgcgcgcttcgtccccccggcgtggccgccgctcgactgctccatcacgctcttctccgtctccaccctccccaacacgctcgtcatggggatcccgctcctcgtctccatgtacggcccttactccggcgacctcatggtccagatcgtcgtgctccagtccatcgtctggtacacgctcctgctcttcctcttcgagttccgcgccgcgcgggtgctcatcgcggcgcagttcccggacaccgcggcgtccatcgccgccgtgcacgtcgacccggacgtggtgtcgctcgagggcagccaggcggaggcgcacgccgaggtggcgcccgacgggaggctgcgcatggtcgtgtgccgctcgtcggtgtcgaggcggtccgccgccgccgccgccacgccgcgcgcgtcgaacctgaccggcgtggagatctactcgatcagctcgtcgcggaacgccaccccgaggggctccaccttcaccctcgccgacatccctggtcaccagccgcccaacagcgcgctgcgcgcgttcagcttcggcgccgcggacctcttctcgctgcactcttcgtcgaggcagcacaccccgaggccgtccagcttcgacgagcacgcggcggcgcgggccagagcatccgcgaccgtggctcccaccaatgacctcaaggacacgcacatgatcgagtggagctccggcgcttccgccgcgtcggaggtcaccggcctgccggtgttccgcagcggccgggagacgcgccggcttgtcccctccgacgcgccatccattgcctcgtcgagagttatccgaccgccgccgggagcgacgggcggggagcgcgcggcgagcttcaacaaggccgtgggcgggcaggacgagctagcgaagctggaggccggcgccaagacggagcagcagacgacggcggtgactacgacgacgaagggcggcggcgcagcgggcgcggagcgggcgagagggcagcagaacgcgccggccggcgtgatgctgcggctcatcctcactacggtttggcgccggctgatccggaaccccaacacgtacgccagcctcatcggcctcacctggtcgctcatcgcgttccggttccacatcacgatgccaatcatagtagccaaatcaatctccattctctccgatgcagggttaggcatggccatgtttagcttaggattgttcatggccacgcagccgaagatcatcgcctgcggctactccgtcgcggcggccagcatgggcgtccgcttcttcttcggccccgccatcatggccgccgcgtccgccgccgtcggcatccgaggcacgctcttgcgtatcgccattgttcaggccgccctgccacaaggaattgtgccatttgtgttcgctaaggaatacaacctccacgctaccatcctttgcactttttgcagctgctaa

SEQ ID NO: 64903 - DNA, 255 bp, Oryza sativa
  Clone ID: PAT_MRT4530_66001C.1
gaaaaaggaaaaaaattccaccaaccacacaccgacatcgccaacacacaagcccaggagaaggctggcaccggaccgaccgccgctaagcgtaaccgaccgccactaaaccaacaaagggacacagacgagatcgctcccctaggggatgccaaacgatgtcttcaagaagacaagcgaccgaaaaaccgccgccgccgtccgtcggggctcaaaggagccaagactgggcttttgcccggcaaccacccttga

SEQ ID NO: 64904 - DNA, 348 bp, Oryza sativa
  Clone ID: PAT_MRT4530_66002C.1
cccacgcgtccggggggttgatgcggtgcgcgtcgacgggggcgtgcagggtggcgccgtgcgccgaggcggcgagggcctctgcaagagtggtgggaggagggacaacgaatgtgccggcagggcacgtgccggtggaggggggagcacacgagaaggatacaaaacggtaaaatgttctatacgggtaacctgcgggctacatttgataattgtgagtatgacaagttcatcaactactatgtcatggagaagttcacattgaggtacattggaggaaaggtttttggtgacaaccatatcaaaaatgaggagataggcatttttaccaacgtgacgtgtactaca

SEQ ID NO: 64905 - DNA, 456 bp, Oryza sativa
  unsure (1)..(456): unsure at all n locations
  Clone ID: PAT_MRT4530_66003C.1
ttagcatcatcagtgatcctctaccatcatcgactttcagcaaatttngatggctgctgccttctcctccacccgttggagctccgggcgtccactccnancaacttcctgggggaagaaactgaaaaaacaagttgaacatcccgcgggtgaacttnccatggccaagaactcccacatcnacangttctnagtngatnggcccanggaacttggaaccaaagggcgancnnaacnaccaangaacaagttggaanggttctccccctacccaacatctccccaattaacaacaaggaacatcaccncnggggaanggttttcgttccaactccccttttccaagctcccncngggttntnggcacccaccaaggccgtcctcttctcctaccaattacctcanccngggtctccnaaacnttcnanttccacaacaccntggggangnttcttc

SEQ ID NO: 64906 - DNA, 2958 bp, Oryza sativa
  Clone ID: PAT_MRT4530_66004C.1
atggcgcggcggcgcgaaggtggctactccttgatgggttgcattaaagatattccgaccctgaaaggagataactacgcagaatggaaaagaaaactcgaccttgcttttatcttgggaaaggtggactgggtgttgactaccccatgtcctatggaacctgctgcacttgtcagaggtgcaaatgagtcagatgctgactggcaaaagagacagagggacaatggtcctctcgtcatgtcatatgacattgaacaaaagaaatggtccttagccaacaagaaatgtttggctgtggtaaagaacacgattgagccaacattattgggctcaattccagagtgtgacgctgtctcagagtaccttgaaagaataaagagtcagtttaatggctcttcaaagacttatgctacacagctgatcaagcagcttgtgacagaaaggtaccatggaggtggtgttagagaccacatacttagaatgagcaacatggcttccaagttgaagccaatggatttgggcataacagatgactttctggtccatctggttatggcctcattgccaaagcagtttgacaattttattgtcaactacgatataagtctagagaaatggaactttgaaaagctcattgctaattgtgtgcaagagaaggagagaatcaaagaatcaaatggtggttcaattaattatgttaaagataacaagaaaaagaaccacaagtctcccacctcaaaagctaaacagtctcagcatctgcctcagcaacaacagttcgctgttgagaaagatcagactacgcaaagaagagaaagctccattagagttgccaatggagttgaagaaaaagttgaagctgttggagatctacttctagagctcgcgaatggcttcgcacttttacttcgagatgtcttttatgtaccttctttgcaaagaaacttaataagtgtatcgaaattggatttcgatggatatgattgccgctttggaagtggcaaatgtgaactatggtataataatgaatgcattggtcttgctgtgttgcgagacgagctttatttgttatctctttctgagaatatattcaaagctgaagttgaaaatcagcatgatataaagattaaagtagtaagatctgaccgtgggggggagtactatggtcgacatacgccttatgggcaagtccctagaccttttgcaaggttcttgttagagaatggaatagtagcccagtattcaacaccgggcaaacctcaacagaatggggtagctgaaaggcgtaaccgtacccttatggatatggtgcgcagcatgatgagctactccaccctaccactgggtttatggatggaggcgttaaaaaccgccattcatattctcaacagagttccaagcaaatcggtacccaaaacaccgtatgagctatggacaggaagagtaccctcgctagctcacctccgtgtgtgggggagtcctgtagaggctaaagtatttaacccaaatattgggaagttggaccccaaaacagattcaacagaaattgttgccacaccagaggaggagctgcaacagcctcaaatagataatgtgccagtacaggagactcaacaagagcctcagggacaggatgtgccaaatgtgcaggcccctagaaggtctgaaagagtcagaagatcggctatccgtgatgactataaagtttataatatagaagagttgcatatggaggatgatcccacctcatatgaagaggccatgagaagcgcacgctcatctgaatggttggaagccatgaaagatgaaatgaaatcaatgaaactaaacgatgtttgggatttagaagaaattcctaaaggagccaaaatagtaggctattccttcaggattataatggcactggtggcacattatgatttggaattacatcagatggatgtaaaaatggcatttctaaatggagatttggaggaaaaagtatacatggcacaaccgaaaggttttgtcatgaaaggaaatgaaaatatgggatgccgtctaaagagatccatttatggattaaagcaagcttcgagacagtggtacttgaagtttgatgggacaataaagaaatttgggtttcaagagaatgtcgaggacaactgtatctattcaaagtttaagaatggaagatttattttcctaattctatgcaatgctacacctgctcctatagtgaaaggcaaaaagtatggggcatcacaatgtcgcagaaatcagtatgagctcaatgaaatgaaaacaaagccatatgcgtcagctgtaggaagcctacagtacgcgcaagtgtgcacacgacctgacttggcatttgttaccaggttacttggcagatttcaaagtaatccaggcccagagcactggaaattggtaaagaaagtcttgcgttatttgcaaggaacaaaaggcctcatgctgtcttacagaagatcagaatcactccagatagtggggtattcagattctgactttgcaaaagataatacaaagtcaacatcgggatacgtgtttaccctgccaggaggagctatttcatggaaaagctcaaaacagactattattgcagggtctactatgtatgccgagtttatagcatgctatgaggcaacggggcaggtgaactggctaaaaaagttcatacgcggtttaaaggtggttgacagtattgagaaaccactaaagttatactgcgacaacgaacccgcagtaatgtacgctcacaacaatcagtcaagtggtgctgccaaacacattgacataaagtactatgttgtgaaggacaaagtccgggatcaaacaatcagtctcgagtacattagaacagaaaggatgctcgcggatccgctcacgaaaggcctaccacccaatgtgttcaaggaacatgtagccggcatgggtttaagggaagccttatga

SEQ ID NO: 64907 - DNA, 210 bp, Oryza sativa
  Clone ID: PAT_MRT4530_66005C.1
atggagattaatctcgacatgcatagtcggttggtgttgcaccaggtcggaggagaggtagaccgcactgacattgtcacagtaaaccaaggtggccttaggcggtggcgagtggagctcatggaggagttggtggagctaggtgacttcagcgacctcgttggcgacagtgcggtactcagcacggtttgtccactaactcattactga

SEQ ID NO: 64908 - DNA, 3705 bp, Oryza sativa
  Clone ID: PAT_MRT4530_66006C.1
atggccggcacttcttcatcctccaacacctcaaccggtggctactccttgatgggttgcattaaagatattccgaccctaaaaggagataactacgcagaatggaaaagaaaactcgaccttgcttttatcttgggagaggtggactgggtattgactaccccatgtcctatagaacctgctgaccttgtcagaggtgaaaatgagtcagatgctgactggcaaaagagacagagggacaatgctcctctcgtcatgtcgtatgacattgaacaaaagaaatggtccttagccaacaagaaatgtttggctgtggtaaagaatacgattgagcctaccatattgggctcgatcccagagtgtgacgctgtctcagagtaccttgaaagaataaagagtcagtttactggctcttcaaagacttatgctacacagctgatcaagcagcttgtgacagaaaggtaccatggaggtggtgttagagaccacatacttagaatgagcaacatggcttccaaattgaagccaatggatttgggcataacagatgactttctggtccatctggttatggcctcattgccaaagcagtttgacaattttattgtcaactacaacataagtccagagaaatggaactttgagaagctcattgctaattgtgtgcaagaggaggagagaatcaaagaatcaaatggtggttcaataaactatgttaaagataagaaaaagaaccacaagtctcccacctcaaaagacgagctttatttgttatctctttctgagaatgtgaatgttgtgtcctcgttgacaaaagaaaacaagaaaagaaagcgaactcccgatgtctcatcgaaattatggcactgtcgtttgggccatatttcgagggggagaattgagagactagttaagaatgaaattcttcctccattggagttctcagacttagaacaatgcatagaatgcattaaaggaaaatttgtaaagagcatcaaaaagggtgcaaaacgaagcgcaggaattttagagatcattcatacagatatttgtggtccatttcctgtgaaaagtgtggatggctatgactcgttcataacattcacagatgattactcccgctatggttatatttatccaattaaagagcgatcagaagcattggataaatttaagatattcaaagctgaagttgaaaatcagcatgatataaagattaaagtagtaagatctgaccgtgggggggagtactatggtcgacatacgccttatgggcaagtccctggaccttttgcaaggttcttgctagagaatggaatagtagcccagtattcaacaccgggcgaacctcaacagaatggggtagctgaaaggcgcaaccgtacccttatggatatggtgcgcagcatgatgagctactccacactaccactcggtttatggatggaggcgttaaaaaccgccattcatattctcaacagagttccaagcaaatcggtgcccaaaacaccgtatgagctatggacaggaagagtaccctcgctaactcacctccgtgtgtgggggagtcctgcagaggccaaagtatttaacccaaatattgggaagttggaccccaaaacagtcagctgccattttattggctatcctgaaagatcaaaaggctatcgtttctactgtccaaacagttatacaaagtttgtagaaacgagacacgccgtcttcttggaagacgaaatgattagggggagctcggtagttcgagaaattgatcttgaggagaggcgggtgtctgtacccgctccgtcgactcaggaacctttcttctctctacctgctgatgttgtgcctgcaatgcctgtcattgaggtaccagcacctgttgttacccctcctgtggcaacaatgaatgagagtgaggaacctgttatacaggattcaacagaaatggttgccacaccagaggaggagctacaacaacctcaaatagataatgtgccagtacaggagactcatcaagagcctcaggtacaggatgtgccaaatgtgcaggcccctagaaggtctgaaagagtcagaagatcggctatccgtgatgactataaagtttataatatagaagagtcgcatatggaggatgatcccacctcatatgaagaggccatgagaagcgctcgctcatctgaatggttggaagccatgaaagatgaaatggaatcaatgaaactaaacgatgtttgggatttagaagaaattcctaaaggagccaaaacagtaggctgtaaatgggtctacaaaaccaaatatgactccagagggaatatagaaaagtttaaagcgcgacttgtggcaaaaggcttcacacaacgagaagggattgattacaatgagacattttctccagtctcttgtaaagattccttcaggattataatggcactagtggcacattatgatttggaattacatcagatggatgtaaaaacggcatttctaaatggagatttggaggaaaaagtatacatggcgcaaccgaaaggttttgtcatgaaaggaaacgaaaatatgggatgtcgtctaaagagatccatttatggattaaagcaagcttcgagacagtggtacttgaagtttgatgggacaataaagaaatttgggtttcaagagaatgtcgaggacaattgtatttattcaaagtttaagaatgggagatttattttcctaattctgtatgtggatgacattctactggctagtagtgatgtcagtctactgcaggaaacaaagaaattcttgtcctcaaactttgacatgaaagacctcggtgaggcttcatatgttttgggcatagagattcaccgagatagaacaaagtatgcattgggactttctcaaaagacatatatagaaaaggtgttgaagaaattcaacatgtacagatgcagtgctacacctgctcctataatgaaaggcgaaaagtatggggcatcgcaatgtcccagaaatcagtttgagctcaatgaaatgaaaacaaagccatatgcgtcagctgtaggaagcctacagtacgcgcaagtgtgcacacgacctgacttggcatttgttaccgggttacttggcagatttcagagtaatccaggcctagagcactggaaattggtaaagaaagtcttgcgttatttgcaaggaacaaaaggcctcatgctgtcttacagaagatcagaatcactccagatagtggggtactcagattctgactttgcaaaagataatacaaagtcaacatcgggatatgtgtttaccctggcaggaggagctatttcatggaaaagctcaaaacagactatcactgcagggtctactatgtatgccgagtttatagcatgctatgaggcaacggggcaggtgaactggctaaagaagttcatacccggtttaaaggtggttgacagtattgagaaaccactaaagttatactgcgacaacgaacccgcagtaatgtacgctcacaacaatcagtcaagtggtgctgccaaacacattgacataaagtactatgttgtgaaggacaaagtccgggatcaaacaatcagtctcgagcacattaaaacagaaaggatgctcgcggatccgctcacgaaaggcctaccacccaacgtgttcaaggaacatgtagccggcatgggtttaagggaagccttatga

SEQ ID NO: 64909 - DNA, 521 bp, Oryza sativa
  Clone ID: PAT_MRT4530_66007C.1
tttctttcctctcgccgccgccccctgatccaaagcctccgccgcgccgccgtcgagaggaggaggaggaggaggaggaggaggaggtggcttgtgcccctttgggtaccctcctccgtccgtgttctctcttccactcctcctgcgcctgttacgcctctccttctaccgctctcgctgtgtcggtgttctgctttcgcgtcctttttcgtgttgtgccttcctcatcgtttgctcctcctcccggttccttaagttgttgtcccgacttctttctctttgtctcttttttttacctttctgtgatcttatttcgcccttgtctgttccttttccattttgcattcgccgcatgctctctcattcttcgatttctttttctttgttcatatccgtttgcttcttcttgctgacttcagtttccttaatcttttttttgtctccatgtttttttttctttcacttttcctcttttttacctttctctattattttttccctttcatttttatctttttttc

SEQ ID NO: 64910 - DNA, 728 bp, Oryza sativa
  Clone ID: PAT_MRT4530_66008C.1
ccacgcgtccggtttgttccctcttcacttatgcttagtcccctgctctgccgatggtggtggaggtcctggatagggcggatatgacggaatcgacagcggcggagaggaggccacatcccggcgtccggttcacctcctccatgcggtggctggtgcaatccgagccatcgaggtgggcgacgatgccatcaaaggggtgggaagactggtcgttgccggctccatatccacaccagtgatgcggcggaccagatccaggtgcttcttgcttcttttccccacgaagagagacaaagagggagaagaaagggatgccagtgatgctgcaatgcaacgtctcctctgtgcgcctggcatcaaccccatcgatctgatcatcttctttctcctgttcgtcttcgttttctttccttcttttctctgacacgcccattgattttgcaaagatttcactgtggtgatgcctgctgagtactgttctcataatgcattctgacggttggtggtgctcccctccaaccgagtgaccgtcagcaggagagggcggtggcatcctgcggtggctggagcgacgactggtgctgctccactcccccaagttgagacctattggaggagcaggcggcagcttccggcggtggccaggcgtaggcatttgatcagagattcataatgtacacaacagtgcatcagatctttggtgggatacatacattttgtttgca

SEQ ID NO: 64911 - DNA, 1458 bp, Oryza sativa
  Clone ID: PAT_MRT4530_66009C.1
atgtcgcatgacattgagcatgcgaaatggtccttagccaacaagaaatgtttggctgtggtaaagaacacggttgagccatcgatattgggttcaatcccagagtgtgacgctgtctcagagtaccttgaaagaataaagactgatcaagctgtcagagaccacattcttaggatgagcaacatggcttccaaattgaagccaatggatttgggcataacagatgactttctggtccatctggttatggcctcattgccaaagcattttgacaattttattgtcaactacaacataagtccagagaaatggaactttgaaaagctcatcgctaattgtgtatccacatggaggattgattctggagcaactattcatgcatgtaattgtttaaaggcattctgttcgatgaggactacgcaaagaagcgaaagctccattggagtcgccaatggagttgaagaaaaagttgaagctgctggagatctttgcctagagctcacgaatggcttcacacttttacttcgagatgttttttatgttccttcttttcaaagaaatttaataagtgtatcgaaattggattttgatggatatgattgccgctttggaagtggcaaatgtgaactatggtattataatgcatgtattggtcttgttgtgttgcaagacgagctttatttgttatctctttctcagaatgtgaatgttgtgttctcgttgacaaaagaaaacaagaaaagaaagagcactcctgatgtctcatcgaaattatggcactgtcatttaggccatatttcgagggggagaattgagagactagttaagaatgaaattcttcctccattggagttctcagacttagaacaatgcatagaatgcattaaatactatggtcaacatacgccttatgggcaagtccctagaccttttgcaaggttcttgctagagaatggaatagtagcccagtattcaacaccgagcgaacctcaacagaatggggtagctgaaaggcataaccgtacccttatggatatggtgcgtagcatgatgagctactccacactaccactgggtttatggatggaggcgttaaaaaccgccattcatattctcaacagagttccaagcaaatcggtgcccaaaacaccgtatgagctatggacaggaagagtaccctcgctagctcacctccgtgtgtgggggagtcctgcagaggctaaagtatttaacccaaatattgggaagttggaccctgttggcggtatggcaatgagggctacaaatagtcccatagggcatgaggcccttcgaccaaacctgccgaagccatgcgaacagtggggattcaagcccgagacgtcaagattagtcagggcgaagtccccccatggcgaagactatggaataacgacggcgagaggcggggaatcacatgggtaccttgccaagccataa

SEQ ID NO: 64912 - DNA, 789 bp, Oryza sativa
  unsure (1)..(789): unsure at all n locations
  Clone ID: PAT_MRT4530_6600C.1
aaatatttctaaagcacagccctctcatcatccacctccatctcatctccattgaactgcatggacttcaccaaccttcttatcacggtgctcctcctactctctcctctcaaatacgaatccgatgttgccacagcaagtgatgatgaagacttcttcaagacttgttcatcccagcggtgcagcaagcatggaccagagatcagcaaaaagagtcatcagcactggtgagactgtattcacttggtacacaagtaacgttactagtatttgccaacaatgtgaacgtgaaggtcggcgttgtggctttagctctcaaaggaatcaagcattctgccagcatcatagtccgcgtgtcacaatcattgcagcaacatcatctgtgggcacatttatagttctttcattaattgtggccactgcactctacatctccttgaagtcaaggtacaatgaagagatacatttgaaagtcgaaatgtttctgaagacatatggcacatcaaaacccacaaggtacacattctccgaagttaagaagatagcgaggcgattcaaggacaaattgggccatggtgcatttggaactgtatataaaggtgagctaccgaatggagttcctgtggctgttaagatgctagaaaactctgtaggagagggaccagagttcatcaatgaagtcgcaaccattgggcgaattcatcatgcanacattgtccgcctnnctaggctttgctctgaaggacacgacgggctntaatatatgaactcatgccccatgaatcattg

SEQ ID NO: 64913 - DNA, 2088 bp, Oryza sativa
  Clone ID: PAT_MRT4530_66010C.1
atggtgaggggaaagagaaaagatggcggcggggcgaggcgctgcccggacgccggcggtgcaaggcgcggcgacgcgaaggtcgccggcggcggcgaccttcgcgtcgcgcggtcgtgcgcgagagagaaaagagaggctagggtggctactcctatgggttgcattaaagatattccgaccttgaagggagataactacgcagaatggaaaaaaaaactcgaccttgcttttatcttaggaaaggtggactgggtgttgaccaccccatatccgatagaacctgctgcacttgtcagaggtgaaaaagagtcagatgctgactggcaaaagagagagagggacaatgctcccctcataatgtcgtatgacattgagcatgcgaaatggtccttagccaacaagaaatgtttggctgcggtaaagaacacaattgagccaactatattgggcttaatcccaaagtgtgacaccgtctttgagtacctcaaaataataaagagccagtttactggttcttcaaagatttatgctacacagctgataaagcagcttgtgacagagaggtaccatggaggtggtgtaagagaccacattcttaggatgagcaacatggcttccaagttgaagccaatggatttgggcatcttagattactttctgatccatctggttatggcctcattgccaaagcactttgacaactttgttgtcaactacaaaataagtccaaagaaatggaattttgaaaagctcatcgctaattataacaaggaaaagaactacaagacaccctcctcaaaagcaaaacagcctcagcatctgcctcagcaacaacagttcacagttgaaaaggatcagtgtctccactgcaagaaaaggaactactataaagattatcctgacttcctgaaaatgatcatggcaaagaaagaacgggaggctcaacaagagtctcaggtacagaatgtgccaaatgaggaggcccctagaaggtctgaaagagtcagaagattggctatccgtgataactatgaagtttataatatagaagagtcacatattgaggatgatcccacctcatatgaagaggccatgagaagcgcacgctcatctgaatggttagaagacatgaaagatgaaatgaaatcaatgaaactaaacgatgtctgggatttagaagagattcctaaaggagccaaaacattaggctgtaaatgggtctacaaaaccaaatatgactccagagggaatattgaaaagtttaaagcgcgacttgtggcaaaaggcttcacgcaaagagaagggattgattacaatgagacattttctccagtctcttgtaaagattccttcaggataataatggcactgatggatgtaaaaacggtatttctaaatggagatttggaggaaaaagtatacatggcacaactgaaaggttttgtcgtgaaaggaaacgataatatggggtgtcgtctaaagagatgcatttatggattaaaatttcaaagtaatccaggcccagagcactggaaattagtaaagaaagtcttgcgttatttgcaaggtacaaaaggcctcatgttgtcctacagaagatcagaatcgctccagatagtggggtattcagattctgattttgcaaaagataatgcaaagtcaacatcgggatacgtgttcacccttgcaggaggagctatttcatggaaaagctcaaaacagactatcactggagggtctactatgtatgtcgagtttatagcatgctatgaggccacggggcaggtgaactggctaaagaagttcatacccggtttaaaggtggttgacagtattgagaaaccactaaagttatactgcgataacgaacccgcagtaatgtacgctcacaacaatcagtcaagtggtgctgccaaacacattgacataaagtactatgttgtgaaggacaaagtccgggatcaaacaatcagtctcgagctcattagaatagaaaggatgctcgcggatccgctcacgaaaggcctaccacccaacgtgttcaaggaacatgtagccggcatgggtttaagagaagccttatga

SEQ ID NO: 64914 - DNA, 583 bp, Oryza sativa
  unsure (1)..(583): unsure at all n locations
  Clone ID: PAT_MRT4530_66011C.1
ccccccccctcccccacatgggggaaaattggccccctaccgaataaggacccacgtgctctgcccgttgtggcctctctttgcgaggggcctctgtggcccacactggagtgtaacgttttttgtgcggttttctcacgcccactctgtgccactgtnctggatacgccctcactgataatactgtgtgcccctcacgagngatggatgccaccatgatgtgccccacgtgggggaggatatatgccacagaccacttgtccccgtnatttggttaaagaatgaggtgtgcctctgtgttgccttggcctctgtgtaggccccggggtggtggtgagataattcctggtgtctgccacaggtgttgcctgtgtgtcccctatgtttctggtgtggttgtgttgtgctttctcgttgggtttattggttagtagtgcgatcctaattggtgttggaagataacctccgacccgtgtgataaagctgtgcctttctagtggaactggtgatgttgaagtcccggaagttttctattgtatattgcagattaattgaatggctccaaaaaaaaaaaaaaaaaaaa

SEQ ID NO: 64915 - DNA, 3196 bp, Oryza sativa
  Clone ID: PAT_MRT4530_66012C.1
atggaactctccggcgagaccgcctcgccggcgccggagccggagccgccggggcagccggaggtgtcgccgcggggggcggggatgtttgaggatgcagtggaggggtcgtcgactgccacggagtcgccggtggcagtggcgcggccagacggcgaggccaccaccgagtcctcttcgccatcagcgtcgaggacgctggccggcgacgagccggcggccgcgggcgcaggggaagtggaggcctacggcggggatgagtcgccgtcggtttctgaaccgcgagaggagtcgggaagtgtggatacgggaagcgccgcgtcgccgtcggttttgcgatcggagcagcgtgcgaggggggcggaggagcaggagaattccatggccgcgcagttgggggaaggatcgccagcgagggaggagacgaagtcgaggatctcttcggcgccgtcgtcgccggttctatcgggcacgtcgacctcgtcgtcgtcgccgctgtcacagatcaagcatcaggcgcggcacgtgcgcaccggcagcttccagcgtttccggcagcagatgcagcgggcgtggaaatgggggccaattggaagtggaggcggcggcgagaggagccccagggagcagctgctgcgtacgacagtgaactttgaagctatggcgcatcagaagcggcagtggtatcaaatccaatccaagtcacgggacaataagcagtataaggaaccaacaacactctttgaacattttttcgtagtcggacttcattcttatgcaaatgttggagtcattgaggatgcatttgcaaagaagaaagcttgggaatctaatgtagaacactcggagattgtagatcttagaaaaattcaatatcatggacctataccaaccatggaaccacagattcttttcaagtatccacctggaaagaaagcggaaattagggaaattgatttgccgtcattctgttttcccgagggtgtaaagctttgtttcattaaaaggaggtctgagaggaagattcagttaagggcccgcttaatagagaggactccatcaatgagtgatctgaatgaagtggtatttgggcaggaacatctgtgtcgagatgacctgtcttttattttctccatgaaggtatcagataatgcaccactatatggtgtttgtctgcatgtccaggaaatagttcagagagcaccgggtatactaggcatggtttcaccactaaaccctacttcctacaagccaagtcgtttcttggtttctgcaccacgatgttactgtttactcacaaaagtgcccttttttgagctgcattatgagatgctaaacagcataattgctcaggagaggcttgacaggataacacagtttgctagtgaaattgctctggcagaaccaatcccccgctctatgaaagagcaaagtcaagtaaatggggaggattttgaatccgcaaatgagctttcttacaatgattggacagaatatgctgtacctgtcaacagtatatcaggtctcatctcttcatcaggacttccatcagagggagagattccttcatatttgttcaggagttgggagcctaattctcctgaaagtatgtcggctagtgagacttcagattctagttacataagagaactcgagaaggaaggcaggcatagtttccaacaatatgaggattgtatatcagagaacttgggatcccgttgtgatagctttggaagaacaagttatacttatgagaatggacatacttccccagatcttctctccacacattcgcctatctccagaagaatcatgcgtgcacagagcatggagtctttacacagttctgtgaaaggtgttgggtcagatgaagaagaagaactaaatatgaagcaagaaatagttgttgatgatgaaaaagttatgggatgggctaaggtacacaacaatgaacctctgcagattgtttgtggctaccatgctcttgctctgccacctcgtggaggtgaacttgttttccacccccttgaacatctgcaacctgttaaatactcccggcctggattgtctttattggggttaggagacacaatttcagacaatggtttgacttcagtagaaaaaactgaggtcaatgcccgtttggcggctgcagaagaagctatcgcattatcgatatggactacagctacaatttgtcgtgctttgtctctcgaaagtgtgctagagttatttgctgctgctctgttggagaagcagattgtggtaatatgctcaaatctgggtgtactgtcagctattgttttgtcagttatgccgatgataagaccattccagtggcagagtttattgcttcctgttctaccaagaaaattggtggattttcttgatgctcccgtccctttcattgctggtgtccaacataaaccccctgatattaagatgaaagcatcaagtattgtcagaatcaatgtagataaagatcaggtgaaggcatgctcattacctcaacttccacgattcaaagaacttgtttctgatctcagtccaattcatgctagactttcatgtgagaatgccctggctaagagacatccaatttacaaatgcaatgaagttcaggctgaggcagcttggcagttcttgaacgtcatgagatcctatctggagtcgctttgttctgacctgccatctcataccatcaccaatgtacagtcaaataatgacagggtttcgttgcttctaaaagacagttttatcgattcattcccctcaaaggaccgaccatttgtaaagctttttgtggagacgcagatgttctctgttctatcagattctcgactttccacatttgagaatgaactaacataaaacggtttgctctagtcagagatcaaagtaatcaacttccccggtttgtggcgaaaatttccctgtcattagaacgatcgggcaatgggaagaaaaggcagtccggaccgagaattgagggttagactgcgcaagccccagaagtttccgttcaatgctggagcttaaaagacggatgaatcggatagtctggacatgaaaaatgtgtgatgcaacccagtcttttaaatgggatgcacctgtcctttgggtttgggaaggtatacatgggatggaaaagaaatgtttcacccctgcattacagttatatatatttttggttcct

SEQ ID NO: 64916 - DNA, 3594 bp, Oryza sativa
  Clone ID: PAT_MRT4530_66013C.1
gtggattgtgtgttgactaccccatgtcctatagaacctgctgaacttgtcagaggtgaaaatgagtcagatgctgactggcaaaagagacagagggacaatgctcctctcgtcatgtcgtatgacattgaacaaaagaaatggtccttagccaacaagaaatgtttggctgtggtaaagaatacgattgagcctaccatattgggctcaatcccagagtgtgacgctgtctcagagtaccttgaaaaaataaagagtcagtttactggctcttcaaagacgtatgctacacagctgatcaagcagcttgtgacagaaaggtaccatggaggtggtgttagagatcacatacttagaatgagcaacatggcttccaagttgaagccaatggatttaggcataacagatgactttctggaggagagaatcaaaggatcaaatggtggttcaataaactatgttaaagataagaaaaagaaccacaagtctcccgcctcaaaagctaaacaatctcagcatctgcctcagcaacaacagttcgctgttgagaaagatcagtgtctccattgcaagaagacaggacactacaagaaagattgtcctgattttttgaaaatgatcatggcaaggaaaggtgagaacattattacatttgtaaatgaatcttattatgttggttactctagatccacatggtggattgattctggagcaactattcatgcttgtaattgtttaaaggcattccgttcgacgaggactacgcaaagaagagaaagctccattagagtcgccaatggagttgaagaaaaagttgaagctgttggagatcttcctctagagctcgcgaatggcttcatgcttttacttcgagatgtcttttatgttccttctttgcaaagaaacttaataagtgtatcaaagttggattttgatggatatgattgccgctttggaagtggcaaatgtgaactatggcataataatgcatgtattggtcttgctgtgttgcgagacgagttttatttgttatctctttctgagaatgtgaatgttgtgtcctcgttgacaaaagaaaacaagaaaagaaagcgaactcccgatgtctcatcgaaattatggcaccgtcgtttgggccatatttcgagggggagaattgagagactagttaagaatgaaattcttcctccattggagttctcagacttagaacaatgcatagaatgcattaaaggaaaatttgtaaagagcatcaaaaagggtgcaaaacgaagcgcaagaattttagagatcattcatacagatatttgtggtccatttcctgtgaaaagtgtggatggctatgactcgttcataacattcacagatgattactcccgctattgttatatttatccaattaaagagcgatcagaagcattggataaatttaagatattcaaagctgaagttgaaaatcagcatgatataaagattaaagtagtaagatctgaccgtgggggggagtactatggtcgacatacaccttatgggcaagtccctggaccttttgcaaggttcttgttagagaatggaatagtagcccagtattcaacaccgggcgaacctcaacagaatggggtagctaaaaggcgtaaccgtacccttatggatatggtgcgcagcatgatgagctactccacactaccactgggtttatggatggaggcgttaaaaaccaccattcatattctcaacagaattccaagcaaatcggtgcccaaaacaccgtatgagctatggacaggaagagtaccctcgctagctcacctccgtgtgtgggggagttctgcagaggccaaagtatttaacccaaatattgggaagttggatcccaagacagtcggctgccattttattggctatcctgaaagatcaaaaggctatcgtttctactgtccaaacagttatacaaagtttgtagaaatgagacatgccgtcttcttggaagacgaaatgattagggggagctcggattcaacagaaatggttgccacaccagaggaggagctgcaacagccacaaatagataatgtgccagtacaggagactcaacaagagcctcaggtacaggatgtgccaaatatgcaggctcctagaaggtctgaaagagtcagaagatcggctatccgtgatgactataaaatttataatatagaagagtcgcatatggaggatgatcccacctcatatgaagaggccatgagaagcgctcgctcatctgaatggttggaagccatgaaagatgaaatgaaatcaatgaaactaaacaatgtttgggatttagaagaaattcctaaaagagccaaaacagatttaatggcactagtggcacattatgatttggaattacatcagatggatgtaaaaacggcatttctaaatggagatttggaggaaatagtatacatggtgcaaccgaaaggttttgtcatgaaaggaaacgaaaatatgggatgccgtttaaagagatccatttatggattaaagcaagcttcgagacagtggtacttgaagtttgatgggacaataaagaaatttgggtttcaagagaatgtcgaggacaactgtatttattcaaagtttaagaatgggagatttattttcctaattctgtatgtggatgacattctactggctagtagtgatgtcagtctactgcaggaaacaaagaaattcttgtcctcaaactttgacatgaaagacctcggtgaagcttcatatgttttgggcatagagattcaccgagatagaacaaagtatgcattgggactttctcaaaagacatatatagaaaaggtgttgaagaaattcaacatgtacagatgcagtgctacacctgctcctatagtgaaaggcgaaaagtatggggcatcgcaatgtcccagaaatcagtatgagctcaatgaaatgaaaacaaagccatatgcgtcagctgtaggaagcctacagtatgcgcaagtgtgcacacgacctgacttggcatttgttaccgggttacttggcagatttcaaagtaatccaggcctagagcactggaaattggtaaagaaagtcttgcgttatttgcaaggaacaaaaggcctcatgctgtcttacagaagatcagaatcactccagatagtggggtattcagattctgactttgcaaaagataatacaaagtcaacatcgggatacgtgtttaccctggcaggaggagctatttcatggaaaagctcaaaacagactatcactgcagggtctactatgtatgctgagtttatagcatgctatgaggcaacggggcaggtgattgacagtattgagaaaccactgaagttatactgcgacaacgaacccgcagtaatgtacgctcacaacaatcagtcaagtggtgctgccaaacacattgacataaagtactatgttgtgaaggacaaagtccgggatcaaacaatcagtctcgagcacattaaaacagaaaggatgctcgcggatccgctcacaaaaggcctaccacccaacgtgttcaaggaacatgtagccggcatgggtttaagggaagccttatga

SEQ ID NO: 64917 - DNA, 327 bp, Oryza sativa
  Clone ID: PAT_MRT4530_66014C.1
atggtgttgcgtcgttcctttattattagacttttttcttttagaagcatagaagcacatcccgctaaggtcgctaaggtatttggtggttacaataagtggctctttcttgatgaatgcccctacattcagagaacacatcccactaagagcttcccccgtccagaagcttttagacgtaaaaggacatgggatcaggatcaaacggagattgaagagcctaccttgcatcacctcgtgacagtgatcattaaacgatttcgttgggctcgactgcgaggttgctcttgttggactgctactgagctggtcaccttctttagatga

SEQ ID NO: 64918 - DNA, 2826 bp, Oryza sativa
  Clone ID: PAT_MRT4530_66015C.1
aagaccttgttggtgcctccgctcgtcatcaccgatgctgctgacgttgctcctgccgtcgctcgagaggttggggagaggggggggggagaaattgagtggggagagagatgttgtaaaaaatgagagaacgaatgcatcagatgcgaccgtgccaggctttctgcctcaacaaacaacagttaacagttgagacaggaccagtgtctccactgcaagaagacaagacattccaagaaagatcatcctgacttcctgatagtgatcatggcaaagaaaggtgagaacatttttacatttgtaaatgaatctcattatgattggttattctagatccacatagtggatttattctagagcaactattcatatgtgtaattgtttaaagggattccgttcagtgaggactacgcaaaagaagtgaaagatccattagagttgccaatggagttgaagcaaaagttgaagctgttggagatcttcgcctagagctcgtgaatggcttcacacttttacttccagatgtttttatgtcccttctttgcaaagaaataagtgtatccaaattggattttgatatatatgattgccattttggaaatggcaaatgtgaactatggtataataatgcatgtattggtcttgtgttgcaagatcagctttatttgttatctctttctgagaatgtgaatgttgtgtcctcgttgacaaaagaaaagaaagcgaactcctgatgtctcatcgaaattatggtactgacgtttaggccatatttcgagggggagaattaagagaccggttaagaatataattcttcctccattggagttctcagttttagaacaatgcatacaagcatataatgcatcggtgcccaaaacaccgtatgacctatggatccttcgtgtgtgggggagtcttgcaaaggataaagtatttaacccaaatcttaggaaattggatcccaaaacagtaagctgccattttattggctattctgaaagatcaaagggttatcatttctactatccaaacagttgtgcaaagtttgtagaaacgaaacacgccgtcttcttggaagacgaaatgattaggagagctcggtagttcgagaaattgatcttgaggagaggcgggtgtctgtacccgctaagtcgactcaggaacctttcttctctctacctgctgatgttgtgcttgcaatgcatgacgttgcggtaccaacacatgttgctatctctcctgtggcaacaatgaatgaaagtgaggaacctgttctacaggattcaacagaaattattgccacatcaggggaggagctgcaacagcctcaaatagataatgtgccagaataggaggcccctagaaggtctgaaagagtagcatatggaggatgatcccacctcatatgaagaggccatgagaagcgatcgctcacctgaatggttggaaaccatgaaagatgaaatgaaatcaatgaaattaaatgatgtctgggatttagaagaaattcctaaaggagccaaaacagtaggctgtaaatgggtctacaaaaccaaatatgactcctgagggaatatagaaaagtttaaagcacgacttgtggcaaaaggcttcacgcaaagagaagggattacaatgagacattttttccagtctcttgtaaagattccttcatgattatagtggcacattatgatttggaattacattagatggatgtaaaaacggaatttctaaatggtgatttgaagaaaaaagtatacatggcacaaccgaaaggtttcgttatgaaaggaaacgaaaatataggatgatgtataaagagatccatttatggattaaatcaaagcttcgagacagtgctacttgaagtttgatggaacaataaagaaattttgggttttcaagagaatgtcgaggacaactatattcattcaaagttaagaatgggagattcattttcctactggctagtagtgatgtcagtctactgcaggaaacaaagaaattattgtcctcaaactttgacataaaagacctcagtgagtcttcatatgttttgggcatagagtttcaccgagatagaatagagtatgcattgggactttctcaaaaggcatatatagaaaaggtgttgaagaaattcaatatgtacagatgcagtgctacacctgctcctatagtcaaaggcgaaaagtatgggggcattgcaatgtcctagaaatcagtatgagctcaatgaaatgaaaaccaagccatatgcgtcagctgtaggaagcctgcagtacgcgcaagtgtgcacacgacctgacttggcatttgttaccgggatatttggcagatttcaaagtaatccaggcctagagcactagaattagtaaagattatttgcaaagaacaaaaggcctcatgctgtcttacagaaaatcagaatagctccagatagtagggtattcagattctgactctgcaaaagataatacaaagtcaacattgggatacgtgttcaccctggcagtaggagctatttcatggaaaagctcaaaacagaccatcactgcagggtctactatgattgagaaaccactaaagttatactgcgataaagaacccacagtaatgtactctcacaacaatcagtcaagtggtgctgccaaacacattgacataaagtactatgttgtgaaagacaaagtctgggatcaaacaatcaatctcgagcacataagaacagaaaggatgctcacggatccgctcatgaaaggcctacctcccaacatgttcaaggaacatgtagcatgcatgggtttaagggaagcctta

SEQ ID NO: 64919 - DNA, 2715 bp, Oryza sativa
  Clone ID: PAT_MRT4530_66016C.1
atggcgcccttcccggtcgcgggaccacagaaagagaacaaatggcgggggaggtggttctatcttcagatagaggattcggatccggtcttcattgttcctgaagaacaaccaaacaagattccatcctggaccaccaaacccgctttgatctcctcccttcagtctttcatcgatgtcattaatgaccttcgagaacaggggttgtcggggtatgaagtcactgccgacttcattggcttggacagtgcaaccgtggagcgccgcgtcagtcaactggtgatcagtggcccgacaacggcgagcaacgtccccgtccccctttgcgagaagggggcggccgagcgtgatgctgccatcaatgctctccctctgactgatatcatcgggccgctcgtggaccatcaggtggcggcgttgctgaaggagaaagttgccaaggaggcgtctgacgctgctgctgccgctgccacaacgagtggcggcaatgttccgaaaaaggggaggaaattctcctctatggtcggacatcgtcggaagacacccaccccctcggcctcggacgcgtctcctccacctccgcgacggcagcggctagtgatgcttagcgagaacctgtctcagttccatcttttcgcagggcggcacgggcgaaggtggcgcaagacgggtctggagggacctccagcgcgtctcctgccatggcctcgacggatgtcgtggtcgtgcccaggagtcgcgaggcgacacctagcggcccaatcagcgatcttgccgctggtcggggttcgccagctgccgttctcacctgggaggagctccaggtcgagatggggcgccttctcgaggctagtgctcgcggaggcaagggcggcggcagcgtcgtcggcgaatgagcgcgccgaccggctggcgcgcgacttagcggaggtttgcgaggacctccagaagatgcaggagctggtggctggcaatgagcgacaacggcaggggctcgagcaccgtatgtcagagctcgagaaccgcttgtcggagatccgcggctccctgcgtgtcacctacaccggcctgcaccagctcgccggggaatacggcgtcaaggccaccatcccggcgaaccccgacgagttctcgttgacgtcctcacttgaggagctggcagcggcgatggaggcgatcccctccaaacacgcggccagggtcggagaggagacgtccaacgggatctataccggggcgtgccatgtccttgcgtgtaagatcttggatcagggggcggccagcgatgtgcgcaaggacgagatggaggaggatcatcgcatccagtactggaggacgaagtttgaggtcgcggaactcaagaggactatgctggaagtgagaaaggaccaggccgtagagacactccggggtcgtgaggtgtggttcaactcgtatctgaagagttgctgcacatccatgtcgagagtctgtaaagagctccgagtaccccgcggggatcccgaggaatcggcggccggatatatctcgtggctgaatggcgctagcacccagctcgaaggcatcggtcaacgtatcgacgaagccttgaagcaggagtgtcgtcggtcgagccgatatgccggggggcatgattcaaccgaaattattgccacaccagaggaggagctgcaacagcctcaaacagataatgtgccggaacagcaggcccctagaaggtctgaaagagttagaagatcggctattcgtgatgactatcaagtttatagtatagaagagtcgcatatggaggctgatcccacctcatatgaagaggccatgagaagcgctcgctcatctgaatggttggaagcaatagggaatatagaaaatttgaaggcgcgacttgtggcaaaaggcttcacgcaacgagaaaggattgattacaatgagacattttctctagtctattgtaaagattccttcaggataataatggcactggtggcacattatgatttggaattacatcagatggatgtaaaaacggcatttctaaatggagatttagaggaaaaagtatacatggcacaaacaaaaggttttgtcatgaaagggaacaaaaatatgggatgccgtctaaagagatccatttatggattaaagcaagcttcgagacagtggtacttgaagtttgatgggactataaagaaatttgggtttcaagagaatgtcgaggacaactgtatttattcaaaatttaagaatggaatattcattttcctaattctgtatgtggatgacattctaccatctagtagtgatgtcagtccactgcaggaaacaaagaaatccttgtcctcaaactttgacatgaaagacctcgggtctactatgtatgccaagtttatagcatgctatgaggccactaggcaggtgaactggctaaagaagttcatacccggtttaaaggtggttgatagtattgagaaaccactaaagttatactgcgataacgaacccgcagttttgtacgctcacaacaatcagtcaagtggtgctgccaaacagattgacataaagtactatgttgtgaaggacaaagtctgggatcaaacaattagtctcgagcacattagaacagaaaggatgctcgcggatccgctcacgaaaggcctatcactcaacgtgttcaagaaacatgtagtcggcatgggtttaagggaagccttatga

SEQ ID NO: 64920 - DNA, 1182 bp, Oryza sativa
  Clone ID: PAT_MRT4530_66017C.1
tttttttttttttttaattaaagctagctaagctagtagctaggtatccattcaatccggcaaacttttttttttttcatagagaacagaagcttttatttatatctgaatagttaagctagcaggcaggcaacagaccaagcttcaacaacgctagaagggcagtaattaactagctcgagtagccggtgtgaaaaacacacaaagaaacgaagcaattaaaccagctagtactcatgtttcctcgcttcgatcgatcgatcatggcgccgcggcgaagccggcgaccatctatggctttgcctccacctccacaggcgggagcttggggaacttgaggaatggattcttcttgatcaatggcagcagcttcttgaacagctcggggtcagcctccgcgtcgtcctgcatcgccaccttcttctcctccgccggcgggtggtagatcggcggcgacggcgtcggcagcggctgcttgtacaccggcgtcgggtgagagtacgccggcgtcgggtaggagtacaccggcggcgccgggtgcgtgtacgacggcggcggcttgtggtacgccgccggcgctggcggcgacgggttcttgtagtggaagaagaagtccttcttgtggaacgggtcgcagaggaacgccgacgcgcactccgacgacgggaagtgggtgtcgccggcgacggcgacgaaggtcttcttcttgtcggcggcggcgttgacgatccacgacggctcctgcccggggcatggctggttcgacgccgcgctgtgcagctgcgcgaagcattgctgcctcagctcgccgtcgtcgccgaggaggtccgccgcgaggggcacggcgaacgcgccagacttgccgacctcgccggtggccttcgtctcgtactcgccgttgctgttcttgcacttgatcgccacgcgaacacccttgaaaacggcctcagctttcatgttcttcctggtgcagtcggcgcacttggccaatccgacgaccatggacgccgccgccgcggcgtcgccgtcggcggcaacggcgagcacgttcaccagcaagacggcggcgcaaacgccgaggactagagcccttggcagagcccccattgctgaagctcacaagagatatatgatgatcagcaagaagtagtggattgggagatcccggccggctcgtatgat

SEQ ID NO: 64921 - DNA, 1366 bp, Oryza sativa
  Clone ID: PAT_MRT4530_66018C.1
atgtcgtatgacattgagcatgcgaaatggtccttagccaacaagaactgtttggctgcggtaaagaacatgattgagccaaccatattcggctcaatcatagagtatgacactgtctctaagtacctcgaatgtataaagagccaatttactggttcttcaaagtttcatgcgacacagctgataaagcagcttgtgacagagaggtaccatggaggtggtgtaaaagaccacattcttaggatgagcaacatggcttccaagttgaagcaaaaagatttgggcatctcagatgactttctggtccatctggttatgtcctctttgccaaagaactttgacaaccttgttgtcaactacaaaataagtctagagaaatgggatattgaagagcacatctctaattgtgtgcaagaggaggaaagactcaaagagatcaatggtggctccattaaccttgttaaagataacaaggaaaagagctagaggtcatcctcctcaaaagctaaacagcctcagcatctgcctcagcaataacagttcacagttgagacaggatcagtgtctccactgcaagaagacaagacattccaagaaagatcgtcctgacttcctgacagtgatcatggcaaagaaagaggaggagctgcaacagcctcaaacagataatgtgccaaatgaggaggcccctagaaggtctgaaagagtcagaagatcggctatccgtgatgactatgaagtttataatatagaagagttgcatatggaggaaacaaagaaattcttgtcctcaaactttgacatgaaagacctcagtgaggcttcatatgttttgggcatagagtttcaccgagatagaataaagtatgcattgggactttctcaaaaggcatatatagaaaaggtgttgaagaaatttaatatgcacagatgtagtgctacacctgctcctatagtcaaaggcgaaaagtatcgggcatctcaatatcctagaaatcagtatgagctcaatgaaatgaaaacaaagccatatgcgtcagctgtaggaagcctacagtctagagcactggaattagtaaagaaagtcttgcgttatttgcaaggaacaaaaggcctcatgctgtcttacagaaaatcagaatcgctccagatagtggggtattctgattctgacattgcaaaagataatacaaagtcaacatcgggatacgtgttcaccctagcagtaggagctatttcatggaaaagctcaaaacagatcatcactgcagggtctactatgtatgccgagtttatagcaggctatgaggcaacggggcaggtgaactggctaaagaagttcatacccggttttaaaggtggttga

SEQ ID NO: 64922 - DNA, 3891 bp, Oryza sativa
  Clone ID: PAT_MRT4530_66019C.1
atggcgacgccgtccacgcggtcgcgtggctactccttgatgggttgcattaaagatattccgaccctaaaaggagataactacgcagaatggaaaagaaaactcgaccttgcttttatcttgggagaggtggactgggtgttgactaccccatgtcctatagaacttgctgaacttatcagaggtgaaaatgagtcagatgctgactggcaaaagagacagagggacaatgctcctctcgtcatgtcgtatgacattgaacaaaagaaatggtccttagccaacaagaaatgtttggctgtggtaaagaatacgattgagcctaccatattgggctcgatcccagagtgtgacgctgtctcagagtaccttgaaagaataaagagtcagtttactggctcttcaaagacttatgctacacagctgatcaagcagcttgtgacagaaaggtaccatggaggtggtgttagagaccacatacttagaataagcaacatggcttccaagttgaagccaatggatttgggcataacagatgactttctggtccatctggttatggcctcattgccaaagcagtttgacaattttattgtcaactacaacataagtccagagaaatggaactttgagaagctcattgctaattgtgtgcaagaggaggagagaatcaacgaatcaaatggtggttcaataaactatgttaaagataagaaaaaaaaccacaagtctcccacctcaaaaggtaaacagtctcagcatctgcctcagcaacaacagttcgctgttgagaaagatcaatgtctccactgcaagaagacaggacactacaagagagattgtcctgactttttgaaaatgatcatggcaaagaaaggtgagaacattattacatttgtaaatgaatctcattatgttggttactctagatccacatggtggattgattctggagcaactattcatgcttgtaattgtttaaaggcattccgttcgacgaggactacgcaaagaagagaaagcaccattagagttgccaatggagttgaagaaaaagttgaagctgttggagatcttcctctagagctcgcgaatggcttcatacttttacttcgagatgtcttttatgttccttctttgcaaagaaacttaataagtgtatcaaagttggattttgatggatatgattgccgctttggaagtggcaaatgtgaactatggcataataatgcatgtattggtcttgctgtgttgcgagacgagctttatttgttatctctttctgagaatgtgaatgttgtgtcctcgttgacaaaagaaaacaagaaaagaaaggggagaattgagagactagttaagaatgaaattcttcctccattggggttctcagaacaatgcatagaatgcattaaaggaaaatttgtaaagagcatcaaaaagggtgcaaaacgaagcgcaggaattttagagatcattcatacagatatttgtggtccatttcctgtgaaaagtgtggatggctatgactcgttcataacattcacagatgattactcccgctatggttatatttatccaattaaagagcgatcagaagcactggataaatttaagatattcaaagctgaagttgaaaatcagcatgatataaagattaaagtagtaagatctaaccgtgggggggagtactatggtcgacatacgccttatgggcaagtccctggaccttttgcaaggttcttgctagagaatggaatagtagcccagtattcaacaccgggcgaacctcaacagaatggggtagctgaaaggcgcaaccgtacccttatggatatggtgcgcagcataatgagctactccacactaccactcggtttatggatggaggcgttaaaaaccgccattcatattctcaacagagttccaagcaaatcggtgcccaaaacaccgtatgagctatggataggaagagtaccctcgctaactcacctccgtgtgtgggggagtcctacagaggccaaagtatttaacccaaatattgggaagttggaccccaaaacagtcagctgccattttattggctatcctgaaagatcaaaaggctatcgtttctactgtccaaacagttatacaaagtttgtagaaacgagacacgccgtcttcttggaagacgaaatgattagggggagctcggtagttcgagaaattgatcttgaggagaggcgggtgtctgtacccgctccgtcgactcaggaacctttcttctctctacctgctgatgttgtgcctgcaatgcctgtcattgaggtaccaacacctgttgttacccctcctgtggcaacaatgaatgagagtgaggaacctgttatacaggattcaacagaaatggttgccacaccagaggaggagctacaacagcctcaaatagataatgtgccagtacaggagactcatcaagagcctcaggtacaggatgtgccaaatgtgcaggcccctagaagagggaatatagaaaagtttaaagcgcgacttgtggcaaaaggcttcacacaacgagaagggattgattacaatgagacattttctccagtctcttgtaaagattccttcaggattataatggcactagtggcacattatgatttggaattacatcagttggatgtaaaaacggcatttctaaatggagatttggaggaaaaagtatacatggcgcaaccgaaaggttttgtcatgaaaggaaacgaaaatatgggatgtcgtctaaagagatccatttatggattaaagcaagcttcgagacagtggtacttgaagtttgatgggacaataaaaaaatttgggtttcaagagaatgtcgaggacaactgtatttattcaaagtttaagaatgggagatttattttcctaattctgtatgtggatgacattctactggctagtagtgatgtcagtctactgcaggaaacaaaaaaattcttgtcctcaaactttgacatgaaagacctcggtgaggcttcatatgttttgggcatagagattcaccgagatagaacaaagtatgcattgggactttctcaaaagacatatatagaaaaggtgttgaagaaattcaacatgtacagatgcagtgctacacctgctcctataatgaaaggcgaaaagtatggggcatcgcaatgtcccagaaatcagtatgagctcaatgaaatgaaaacaaagccatatgcgtcagctgtaggaagcctacagtatgcgcaagtgtgcacacgacctgacttggcatttgttaccgggttacttggcagatttcagagtaatccaggcctagagcactggaaattggtaaagaaagtcttgcgttatttgcaaggaacaaaaggcctcatgctgtcttacaaaagatcagaatcactccagatagtggggtactcagattctgactttgcaaaagataatacaaagtcaacatcgggatacgtgtttaccctggcaggaggagctatttcatggaaaagctcaaaacagactatcactgcagggtctactatgtatgccgagtttatagcatgctatgaggcaacggggcaggtgaactggctaaagaagttcatacccggtttaaaggtggttgacagtattgagaaaccactaaagttatactgcgacaacgaacccgcagtaatgtacgctcacaacaatcagtcaagtggtgctgccaaacacattgacataaagtactatgttgtgaaggacaaagtccgggatcaaacaatcagtctcgagcacattaaaacagaaaggatgctcgcggatccgctcacgaaaggcctaccacccaacgtgttcaaggaacatgtagccggcatgggtttaagggaagccttatga

SEQ ID NO: 64923 - DNA, 2096 bp, Oryza sativa
  Clone ID: PAT_MRT4530_6601C.1
atggacttcaccaaccttcttatcacggtgctcctcctactcgctcctctgaaatacaaatctgatgttgccacagcaagtgatgatgaagacttcttcaagacttgttcatcacatcggtgcagcaagcatggaccagagatcaggtacccgttccggctttcgacacaacctccatcatgcggcgcacctgggatgcaattatcatgctctggacaagacaccatcctggatcaccctgttcttggttcctgcaaagtgacaatgatatattacaggcatgttatcatgaacgccatcccacttgtagattcctcacctcattgcctacttcacaagtttatatcagtaaatcaatcaactgctgtgtacagacctcacactttaaaagctgcaagtctagtaggttgttcaagagattccatagacacaaaccaatataatagtatagttggcccaacctcttgcctcagcctcgctaacaacgcaagccagttctggtatttggcatatccctatgaatatatgtctattcttccattgggctgcacaattgtttccaaagacatcccaatgccctacagttacgacaaaaatggtccaaactttgacatctcaatcttcaccgaaacagcaaaaagagtcatcagcactggtgagactgtattcacttggtactcaagtaacgttactagtatttgccaacaatgtgaacatgaaggtccgcgtgtcacaatcattgcaggcacatttatagttctttcattaattgtggccactgcactctacatctccttgaagtcaaggtacaatgaagagatacatttgaaagtcgaaatgtttctgaagacatatggcacatcaaaacccacaaggtacacattctccgaagttaagaagatagcaaggcggttcaaggacaaattgggccatggtgcatttggaactgtatataaaggtgagctactgaatggagttcctgtggctgttaagatgctagaaaactctgtaggagagggacaagagttcatcaatgaagtcgcaaccattgggcgaattcaccatgcaaacattgtccgcctcctaggcttttgctctgaaggaacacggcaggctttaatatatgaattcatgcccaatgaatcattggagaaatatatattcccacatggttctaatatttcaagagaacttctagtaccagacaaaatgctagatattgcattaggcatcgcccgaggaatggagtacctgcaccaagggtgcaatcagcgcattctccattttgacatcaagcctcacaacatactgttggactacagcttcaatccaaagatttcagactttgggcttgccaagctatgtgcaagagatcaaagcattgtcacattgactgcagcaagaggcacaatgggctatattgcaccagaactatattctcggaattttggagcaatttcatataagtcggatgtctacagctttggcatgctggtgttagaaatggtgagtgggaggaggaacacagaaccaaccgttgagaaccaaaatgagttctactttcctgagtggatatatgagagagttatgaatgggcaggacctggtgcttaccatggagacaacacaaggcgagaaagaaatggtgagacagctagctattgtagcgttatggtgcattcagtggaacccaaaaaaccggccctcaatgacaaaggtggtaaacatgttgacggggaggttgcagaatctgcaggtgccccctaagccctttacatcgtctcaaaatcaacttgtgatttagatcatgagaccgcatcgccatggtttggactttggagaccagcaaagcaatggagcttggccagcatttcctataaaatggcatcaccatggttttgtgcctgagtgacagataatccacatatcataaaatagttcttagtgagctgaagcatgcacatatagtgtttaattattaaactaaactgcgcaaccaggtatatgatatatcaccatgtactcatgtaattctgatatccagcaaacatatgccaatggattttatttgcaatataataatagttgatgacaact

SEQ ID NO: 64924 - DNA, 222 bp, Oryza sativa
  Clone ID: PAT_MRT4530_66020C.1
atgggcgaacccgccggtggaattccccagcctgcgccggccgcgacggaggcgttcgccggccgccggtggccgcgggcgatgaaatctgttgacgagacagctaatcctggtgtaagtgtaactgcgctgctcagttcacaatcactgttactggctcatgctcatgctcatgctgcccccaaccccgagtccgtagcccgtaggcctgaaaaggcctag

SEQ ID NO: 64925 - DNA, 257 bp, Oryza sativa
  Clone ID: PAT_MRT4530_66021C.1
ctgtcactgacttgcagcgggtatgcaaagaacacacagtctgtagatgaagtctctcacctctcaccattggatgagcacttgacagcagctagtaacacatgtatgcgatccatgctcgcaactcaggactttatggacacgagattgaggaatgtaccgagacctactacgaagctaccaatcatcaatccgaggagaatgcgagctagctgcaggtcatcatcagccactagcagctgcaaagtacttgctcg

SEQ ID NO: 64926 - DNA, 490 bp, Oryza sativa
  Clone ID: PAT_MRT4530_66022C.1
ttttttttttttttttttgatgaagaattccatcttaatgttttctaatatctcaatggacaaaggatctgaaatattctgtggtgtacatgttgccgctcctgagcaaccaccaacacataacaagtgaggtccttggcaagaaacatttgtccttaaaaaacctttgtccttagcatatgaacctttgtccatcttaagaaacctttgtccttagcatatagcgacagctaacaagtgaggtctatgaatactgaaaaaaaaaatctcatggtcaacaccagctacttgaatttgttgcacctagcataagcaaaataacataattttgtaaattaggatgtacttcatcctaaacaagtccagcattcgatcgatggatacaacagtcatcagtcagggcggcgacttagtacaaactgctccggaagattcacgatttttctgatcctaaattaaaacttctttttacttcttggactttcttggg

SEQ ID NO: 64927 - DNA, 368 bp, Oryza sativa
  unsure (1)..(368): unsure at all n locations
  Clone ID: PAT_MRT4530_66023C.1
ctagcttagcttagccacctcactcactagctcactctagctcgagctccacttcgttggaagccaccacgccacgacggcgacggcggcggcgaggaggaggcgggcatgatgagcggtaggatgaacgcggcgggggacgagtcgccgttcccgttcggggcgatgcaggcgccggggccgggggcgtacgtcgggttcgaccatggcgcggcggcggtggcggcggcggctgcggcggcgcacggggcggggatgctgcaacaccaccaccaccacatgtacgacggctttgacttcgcggcggcgatgcagttcggcggcgggnaggacgcgccgncgcacccgcagctgntggcgtgccgcga

SEQ ID NO: 64928 - DNA, 413 bp, Oryza sativa
  Clone ID: PAT_MRT4530_66024C.1
ccctctcgaggcttgcgctccggtccactccgatccggggccttcttatcgaccctatgaaacgagaacccatcccggcgtgccgttgtaggctacctgctccaccatccatccatacaagcgcggcgcgtattacagagaagagaagggggggagggcaaagcgacggctccgatgaatctgtacgggtctaccctatcttggaacgtgacaaggtgcgtaccagagctggaggaggccgggtcctacaacgagatcgcactcgctcgattactgcaaaggagagcacatagcccccgaccacctagacaggaacccctgtagttaggtgccggctctgcaaagaagagacttgtgtctctaggaatcacgtgccatcgcaagtgaggatgccgcgagaacaaaacagagct

SEQ ID NO: 64929 - DNA, 312 bp, Oryza sativa
  Clone ID: PAT_MRT4530_66025C.1
gcactacaaaaaaatcttgacttctcaaggtaaagatagaatttcatacaccatagtaaaatgataatttggattattcctataaaatcttttctggtgaatcacactaccttctagccaacaaaggtacatatatattcacaatgtaaaaagtagccattcccatattccacatcaaattatagtatagaaatgaaatccatggggaaaaaaaggcattagcattcttgtcaagattgactgcaaaaaacatcaagatttgaatacaaaagacatgctaaaaaacttttttggtaaaaaaagagatgaaat

SEQ ID NO: 64930 - DNA, 742 bp, Oryza sativa
  Clone ID: PAT_MRT4530_66027C.1
ccaccaccgctcctctgccgcgctccccctcgagccccgcgccgcccctgcgcgcgccgcgccgctgccgccctctgctgcgccgctgccttgcgccccgcgccgccgcgcgccgtcttgtcaccgccgtcgccctgccgcgtcatgtcgccgtcgccgcgccgtctccatcccgccgcgcgccgtcgccgtcgacggtcgcatcctctcgagccccactcctccgcgcgtgccgtcgtcgtcgccgtcgcatcgacatcatcgccgcgccgcgcgccgtcgcatcagcttcgctgccgcgtcgcgcgccgtctcgtcgcgcctcgcgccccgcgccggcaagccgtgtgccgctgctgcgccgtcgtccgtcgcgtcgcaccacgccgagccccgtgccaccacaagcccctcacccacctataaaagacctcctagcccccacgagctcgtccgcccctctctgccttttcttctccctactacacatttcgtcgaacaccttgtgggcgtgccgcagcttcttcccggctccaccaccgccgcggaacttcgtcattccgccgtccctcgggccataattgtgacaagcccgagctacgaagctccgcccgtggaggtcaccgtggacatgccatccggggggttctcccttcgatttttctggaaaaacggaaccctcatgcgccatagatgctcacgccctcaccaatttggtcgcaaaccattccgttcaccatag

SEQ ID NO: 64931 - DNA, 1355 bp, Oryza sativa
  Clone ID: PAT_MRT4530_66028C.1
atggacatcgccggtggtgggtcgccggaaggacagcagccagaaacattaacgacagcggcgggcggagctcaggacggcggacaggactggcggaaggcggagcttgggacaagcagcggcacctctagctctccgtcaccgagaggcagcggcagaggcggagctcgggacgacggaggggacgggcggaaggcagagcttgggacaagcggtggcacctctatctatccatcattgagaagcagtggcggagggggagcacgggaacagtggcgggcggagctcggggcgagaagagctcgagacggcggaggggacgggtggcaggtgaagcttgggacaagcggcggcaccccccccatctctgtcaccgagaggcagcagcggaggcggagctcgagactgccgaggatgctcgaccatttcctaggcaccggtgacaagggtgggcgtgatggagttgggtcagctggggtgtccggttgtccagctgctggattcaccgcggcgcatgaggggactgcccactgcctgttgaggggcatcgagcggcggaggcggctcctcctcggcctctgccggcacacgcctcctccacgaccacctcgtgagcttgctgccaccgtctcctacactcggggatgctcacagccagcggcgcacggctcgtcctcggcttccgtcggcgcatggggctcctcctccgttgagggtaaaagatatctgatgacatctcagcccactaagcccaataccacctcatccggaggcaaccaactccctgctgcaccaccacaagatcttttcatccccaatccccaccttatgcgcatctccgaagactgcaaattcccccaccgtgcggcgccgcaacgacccgcgactgcgatgtgctgcccctgccgccgccgcatctcgcctctcaccccaaaaccaacaacccctgccgccgccgcgtgtcttggcgccctctggcgcatgccggccagccacacctcgtggaggccgtgtgcgggagctggagacctcggcgacggagacgtcggccatgagcaaaaagatgggagccgcagtaacaacaatggcaggaggcgatgggatggatgggatcttggtccctggagccatatggaaaaagtgatagcagagatcgatggggagtatcaatttgctttttcttttctttttcttcagaatcccatcgatctgctttttttttctttttctttagaattgtgctcgatttgctagtggcatcaaattgtagtgtgtcatctatgtgttttctttgactcattgatcttgtaccgattacttgtcatattttggctgttagaacttctgttacggtt

SEQ ID NO: 64932 - DNA, 3540 bp, Oryza sativa
  Clone ID: PAT_MRT4530_66029C.1
atggcgaccgatctatcccaatcacttgatttaagtatatatcgacataaagattatctactattaacatctacagctgatcgagtagatttagttttaatttacttattcacaattgccgatcgattcacatatgacatcggctcaaagaagtacaagctgaaggtagttgcagccgatgaagttggctcaagttcatctcaaggtgacaagggtgctgcagctggctcaggcgataaaggtgatgtccctcaagatggtacagtcgaagaccttggcgcagatgacaaccaggagccattacagttcaataactttcaagatcggatcgactacgctgtgcagcatgctctgatcaaccaatctggagtgttggcctttggtgacagcaaaccagcagaatgctacactgccggttcagccgatggcaccagtttcaactactgcaccagctgcgtcatcatcggcaccaagacagatatgatgagggagcagtttgggcttaagccaaaggacactggaaacatgtatcggcatccttaccctagccaatacaagaaggtgattttacatgagcaaagatttgctgaagctaaaaagaatttcaagaaaatcaatcatgtatatccttatatgtatgattctgaagaatatgatgattctgaagtagcagcagccgagtggattcaacttcctgctggtcatgtaatcccatcggctgaagagctaggcaaaaggaggtattgcaagtggcacaattctggttctcattctactaatgattgcaaagtttttaggcaacaaatccaagtggccattgaggggggaaagatcaagtttgatgattcaaagaagccgatgatggttgatggtaatcctttccctgttaatatgacgcatacatctgggaggacagccgatgggggaaagaatcgaaattttcagatgaactcggctagaattattaataaataccagagaagatatgagaagcagcaggagaggtattatgaagaagaaaatgatggtggttttgatcctcattggaactgtgactttttcagattttgttggaataagggtatgaggctgccatcgattgaggattaccctggatgcagtgaagatacagggagttcaagccgatcctataatagaggcaatcggctgactcagaagagagtacctgtccatcagagattgggcccagtaaatcaagattattaccatgatgaggatgaaagtaggaaagcacaatggtgctctacagttattttcaccaagaaccagaagagaagggttcaaagattgaggaacagggaacgttttcaggaggtgcaacaggaaattagccatcggctgaggaaaataaagaccaagcaagagtggcgtgttaagagcacggttacaacagccgatgaagttgaagccgacaaggcaaaaaggttgcttaaaggcaaggcagtctttgagaagccagaagggacagagaatcggcatctcaagccgttgtatatcaatggatttgtcaatgggaagttgatgtccaagatgatggttgatggaggagctgctgtgaatttaatgccatatgctacattcaaaaagttaggcagaaattcagatgatcttatcaagactaacatgtgcttaattcaatggcaaggtgacaagattgagatcatgccagctgacagccaattgaagatggagaacccaaattattgttttgagggcatcgtggagggttcaaatgtctacaccaaggacacggtagatgatctcgatgacaagcaaggacaaggtttcatgtcggctaatgatttggaagaaattgacataggtccaggagatagaccatggccgacattcatcagtaagaatttgtctccagaatttagaaccaagttgatagagctcttaaaggaatacagagattgctttgcttgggagtattatgagatgccaggacttagccgatcgatagtcgaacatcggcttcctatcaaacatggggttagaccatatcagcagccaccaaggagatgtaaagccgatatgcttgaggctgtcaaggctgaggttacacgtttatatgatgttggttttatccgcccgtgccgatatgctgagtgggtttctaatatagttccagtcatcaagaaaaatggcaaagtcagggtgtgcattgatttttgggacttaaacaaagctaccccaaaggataagtacccaatgccggtagccgatcagttggtagatgctgcttcaggacacaaaatattgagttttatggatggtaatgcgggttataatcaaatctttatggcagaagaagatattcataagacagctttcagatgtacgggtgcaatcagcttgtttgagtgggttgtgatgccttttggcttgaagagcattggagctacatatcagagagccatgaattacatattccatgatctgatcggctggttggttgaagtttatattgatgacgtggttgtcaagccaaaggaaatagagaaccacatagccgatttgaggaaggttttcgagaggactagaaagtatggcttgaagatgaacccgataaagtgtgcttttggcgtattggctggccaatttttgggatttcttgttcacgagaaggggattgaggtgactcaaaggagtattaatgcaattcaaaagattcaacctccggaggacaaggcaaagttgcaagagttgatcagcaagataaattttgttcggaggtttatctctaatttatcaggaagattagaaccttttatacctttgttgaggttgaaagccgatcaaaagtttacttggggggcagaacagcagaaagctttggaaaatatcaaggaatatcttagttcccccaccagttttaattcctccaaaaaagggatacctttcagattatatctatcggctggtgacaagtcgattggttcggtgttgattcaggagcttgaaggaaaagaaagggttgtgttttatttaagtcgtcggctcttggatgcagaaacaagatactacaaaggatgtcaagactgtcagaagtttggagcgattcaaagagcaccagcatcagctatgaatcctattatcaaactgtggccattcagaggatggggtatggacatgatcggccagattaatccacctttcagcaaggggcataaatttatattagttgcaactgattatttcaccaagtgggtagaggctattcctttgaagaaggttgatccaggagatgcaattcaatttgtcaaggagcatataatctaccgatttggtattccccagactattacaactgaccagggatcaatctttgtgtctgatgagtttgttcagtttgccgatagcatgggcatcaagttgttgaattcttcaccatattatgcgcaagccaatgggcaagccgaggtatctaacaagagtttgatcaagttgattaagagaaaaatttttgattatcctcggcaatggcatactagttcactttggaacatatcatag

SEQ ID NO: 64933 - DNA, 1746 bp, Oryza sativa
  Clone ID: PAT_MRT4530_6602C.1
atggacttgccaaaacttctcttcacagtactcatactctctcttctcaactacgaatcctcttccgccacagcatgggatgatgaagatttcttcaagacttgctcatcacacaggtgcagcaagcatggaccagagatcaggttccctttccggctctcgacacaacctccatcatgcggcgcacccggcatgcacttgtcatgctctggacaggacaccatcctcaatcacccagttcttggtccctgcaaagtaaccgagataagttacagttatgctaccatgaacgtcatcccacctgtagattcctcacctcactgcccacttcagaagctcatgtcgaaaaaccaatcaacttctgtgtacaaacctcaaggtcctcaatcgcagggagctacccttgtagtttgttcaagagatcccatacctgcaaatcaatacgacatagttggcccaatatcttgcctcggccataataaccagttctggtatttggcagatccctatacatacatgtctgttcttcccttggactgcacagttatttctaaaggcatcccaatgccctatagttatgataaaaaagggagaataaactgggacacctcaaacttcaaggaaacagcaaatagagtcatcaacgatggaccgcgggtcactcttgttgcagctacatcatctgtagccacatttgtaattctttcattagttgtggccactgcattctacatctccttaaagtcaaggtacaacaaagagatacatttgaaagttgaaatgtttctcaagacatatggcacatccaagcccatgaggtacactttctccgatgttaagaaaataacaagacggttcaagaataaattaggccatggtggatttggaagtgtctacaaaggtgagctaccaaatggagttcctgtggcagtcaagatgctagagaactccttaggagagggagaagagttcatcaatgaagttgcgaccattgggagaattcaccatgcaaacatcgtccgtctcctaggattttgctctgaaggaacacgacgggctttaatatatgaattcatgcccaatgaatcgttggagaaatatatattctcaaatggttctaatatttcaagagaattcctagtaccaaagaaaatgctagatattgctttaggcatcgcccgaggaatggagtacttgcaccaagggtgcaatcagcgcattctccattttgacatcaagcctcacaacatattgttggactacagcttcagtccaaagatctcagactttgggcttgcaaagttgtgcgcaagagatcaaagcattgtcacattaactgcagcaaggggcacgatgggttatattgcaccagaactatattctcggagttttggagcaatatcatacaagtcggatgtctacagtttcggcatgctggtgttagaaatggtgagtgggaggaggaacacagacccaaccgttgagaaccaaaatgagttctactttcctgagtggatatatgagagagtaatcaatgggcaggaactggtgcttaacatggagacaacacaaggggagaaagaaacggttagacagctagccattgtagcgttatggtgcattcagtggaacccaacaaaccggccctcgatgacaaaggtagtaaacatgttaacggggaggttgcagaaactacaggtgccgcctaagcccttcatttcgtctgaaaatcatcttgcgacttag

SEQ ID NO: 64934 - DNA, 1145 bp, Oryza sativa
  Clone ID: PAT_MRT4530_66030C.1
atgggctgcctgagccggcatcagctctgcctcggcggcaaccgtgggttgccattcctaaggaaattcaagcacaaggagatcgaggcggcgacgaacgggttcagcgcgatcctggaggccggccccggcggccgcgcggcgtacagggcccggttcgccgacggcctcgtcgcgacggtgcggcgagccggcggcgacggcgaccaggacagagaggccttctaccgcgagctgcagctgctcgcccgcctcaaccaccgccacatcgtcaggctccatggctactctgacggccactccaggtttctggtgttcgaccagatggagaacaggagcctgaaagaatgtctccatgatcctctcaggacgcctctgaactggaggaccaggttgcaggtcgccatagatgttgcagcagcattggaatacctgtactacttctgtgatcctccggtgttccatgtgtcggtcaactcaagcaatgtgatgatggatgccaattttgtcgcaaagttatcagatatcagtgtcatcggttacgacccgaaacgaacggtggaatccaatgctgcatcttttgaagatgaaattcagcagaggagaagggacctggtgttccagtatggtgtgctgatccttgagctagtgaccgggcaatcgccgggcggcgaaggcgagctcgtgcagtgggtgcaggagcctggatttgcctgcacaatgtacaaaatggtagatgcagatcttggcaatatctatgactccaaggagcttcggaaccttgtgatcattgctaggttgtgcacaaggcctggaaatgatgcaatggtttcgattccgctcattcttcggtatttgcaagggaaggtggcaaatcttgggtgtgaaagtgaaaacatttgtgaattatctgtgtagggagcagttaaaattgctccatcttgatctctgaaataatcttactttctctgtctcctttacttgtagagagaattttcttcttgtgtatcattagcattatttttcatgtccatagaggaattacagcaaatgaaatttgtgtatgttgaatatgaacatggcatggaaatttctatgtgaactcaatagacaatacattcaaaaatgctggtacttatctagtg

SEQ ID NO: 64935 - DNA, 1790 bp, Oryza sativa
  Clone ID: PAT_MRT4530_66031C.1
ccggccgggaccccgtatctgtatagccggccggggaagaacgagccaactttccccgggccgaaaactgatcgggtggtgcggcctctctcgcctttgatttaccctttcgcgcaccaaacaccaaaccctcgccgccgccggcgccgccatgcggatccccacggagacggagacggagacggggacgggggcacggattcccagccacaggcggcgcaagggatcgtccgacggttcgcgggccgtacaccggcgcaaaccaacgccgaccaaggagacggagattcccggcggccacgggcggccgaagcggtcctcctcagccctgtcgttggacggcgccggcgactccaacccaacctgggtgatcctgaatcgggtcggtgcccggagggattccttccgcggcgaccgcaccacgtcggtggcctcccgcacctccggcggcaaggagatctccgtctcgttcgagctcgcgccgccgccggagacctccctcctcaccctcgactggccgcaagggccccgcccgtcggaggggaccacatcctacccttacgtcatcgcggcgcacggcaacgtcgtgctgctcgagatcatctccaccgccaagtgccctcgccccatcgacatcgactacttcgtctacaaggccaagcccaacggggaaccctccttgacgcggctgcccgtttgctactggaagggggcttcgggcagagacaatcctcggccacgcatcatgagtagggtggccatgggtgtcctgtcctgcagcaaggattcgttcgttgtggccgagatggagagaaggtcataccaaccttctgcagctaacatctacatgtttttctccggctccgacggctggagagtcttcagggatgtgcggattgaccatatcaatggtgccggctggtggtcaactgatgcagtgttatcctaccgccgtcgctacttgatctgggtggactacttgagagggatgattgttgccaaattggcacatccaggaggaggagacccacaggagcctgctctatggtatgtaccgcttccggtcgatccggttatggggaacccttatgacagtgagcgtgggcgaggatgccctgaagcttcccgtaatgtgtgtgccacccaccatggcatcaagttcgtcaatatcatcaaccaatgtggtggcagttttagcataaccctgtggtcgtggtgcgaggacggaacatggagagaagatgcgacactggatgctgcccaactttgggacctcgattgtgaaaaccgccttccaaatgtccaaccagaattccctattgttgacatggaaaacccttacaccgtttgcttcttgttgaacgagggcaactacattgtccctgaagccacaacatggatgatcaaggtccacatgaagaagaagattctactaggttgtactagttattctaaaaatggaagcttgtctcatcagaacaccacctacatgactgccagaaggatgtctgagagactctcctttatctccagtgaaatgccatattacctgtctggacaaaccatgaaaagaattttcctagtttgaggaaagaccaaatgcatgccatgctgttctgttgtttgcatgttgtgacaaattttcctagtgttaaattatgtgttctgcccattttaatctaaaacaggattatggatggattgtatgctatattattttgtctcgcatgtccatattatttttaaaaaaaaaaaaaaaaaaaaacctgcagcccgggggatccactagt

SEQ ID NO: 64936 - DNA, 659 bp, Oryza sativa
  Clone ID: PAT_MRT4530_66032C.1
cggcgcccagcgcggcggcgtgcggtcgtggtggcggcggcgtgcggccggcggcgaggcggcagggcggcggctggctgtggcttggcgaggctggcccgggcgctgtggcggcagacagccgcagctcggcgtggccgaccccgcgcgcggaggcggcggtggcgtgcccggctggcagcgcagcctgcccgacgcagcagcggcgaccccactcgtcctggccgggcagccgagatgccgtcgcggtggctagcgccaccggcggccagatggtagttataagggagctggcggcggtgggtcgttttcctcgttgccgctcgtcagcgggggaagctcaggctgccgatgcaatgccacctagtcccgggttctcctttggccaaaactggcgaggcggccggcgggtggtggaacagaggggtcttgggccagctctcaggggtggtggctcgatgaagtcggccgacggaggggcgtcggtgcggcgaaagcctagtccggtggttcaccgggccggcagcggctacgtcttcgggcgtcgtaacctttttggggcgttgtcgaggatgggcgatggcggcatcctggatgtcgtgaccaccttggtggcatcgttttcggagcctcgtctctgtgtgtttgatgatctgtga

SEQ ID NO: 64937 - DNA, 180 bp, Oryza sativa
  Clone ID: PAT_MRT4530_66033C.1
atggaggggatgaaggcggacccgctcctcacgaagacaatgagtgttgcttcctctcctatggcagcagcaaatgatttcttcgcggcgatggtagtggcgccatgtccaatagccgagcggcgatggtccaagagtcaggaggtgcacaccaagggtggcagcggcgcccgcgtctag

SEQ ID NO: 64938 - DNA, 685 bp, Oryza sativa
  Clone ID: PAT_MRT4530_66034C.1
atcactcatagtactttaagtgggccaacggcaacaccacagagacgaggctccgaaaacgatgccaccaaggtggtcacgacatccaggatgccgccatcgcccatctgaaaaagatgtggttttcacccagagaagctcgtcgagaaagggagaggaaactccccgcaaagaaggggaggagctccaggaagggcgagggtgccgaccggcaacgaggaaaacgacccaccgccgccagctcccttataactaccatctggccgccggtggcgctgccgctccaaaccggcgccacccgccagcgcccccgttatccggccacgcgcctcacctagccaccgcgacggcatctcggctgcccggccaggacgagtggggtcgccgctgctgcgtcgggcaggctgcgctgccagccgggcacgccaccgccgcctccgcgcgcggggtcggccacgccgagctgcggctgtctgccgccacagcgcccgggccagcctcgccaagccacagccagccgccgccctgccgcctcgccgccggccgcacgccgccgccaccacgaccgcacgccgccgcgctgggcgccgctgccgctctggcagccggccgggccaccgccactctgcgcgcgggtcggccaggggggcccataacggcccaaaggttggccccatgggctggc

SEQ ID NO: 64939 - DNA, 396 bp, Oryza sativa
  Clone ID: PAT_MRT4530_66035C.1
atggggggactaaattttggattaaagtggcacgttttccaaattgctaaacggagattcaaggtggtgtttgagtaccttccacctccacgggggaaggtagatagatctgtggcgacggtgaagatgatgttagatttcttcatcctagagatgatgccaacacagatcggtgaggcaattcacacctattgcctcgccccttccaccaacctccgcgcggaggacatccctgacccgcatcctgacctcctccctgccatcctctccgccttccttgcccctgtcgtagattccatacgcacaccccacacacccctaccctcatccctgccgactagtgctgcgtcttggggtggtgtttttgcagggatgctatcagcagatggggtttga

SEQ ID NO: 64940 - DNA, 1127 bp, Oryza sativa
  Clone ID: PAT_MRT4530_66036C.1
tttttttttgtaggagcagcataacacacatagaatttccacattagaagcttacgtagaataagttactcccaaataaacacgctacaaaaataaggtccagatatttctttgatatattctcttgcactgacagacaaaagccggtcccagagcgacaggtctattttaagaggaaaagcttggtttcaactgatccttttcacttctaggtggaacacaccaacttagaacaccctgattggtttccccatggtgctcttgatgtaaaggcacctcacattctgccagttctttttcaaaagggacacgaggaagttgacgctcatttggatgttttgctggatctgcttctcctccattgacaagttacccacagcaacacccatgcacagaaccttcttcagctggaacttgactgtagctttcgtctcgttgaccttggattcaagagactcctggtgagtaaccaatgtagggaacttgcctgccttgttgagaccaggaccaaggagacgaggaatctgcttgatgatggcctctgatgctaagaaagcatggtacttcttggcaagcttcttaaccagcttcttgttcttgttcattttcttaagagcctcaacatccatgtagtcaagcccaatcttctcagcctcctcgacatgctgggcatcaccaagcatgcagaccttcatcttggggcgggggatatggggcagcttgacggagccgctgaaacgcttgtccttttgcgggtcatagttcttgagaccaatctgaagctcaacggtctcggtgaacttcctgcccttctccttggattccccaacaacctgggagatggcttccttgagaacctcgctctgcaacttactcatgatgatcggcggcggcggcggcggagggtcagggagcgaaacggcgcgagaggagagaaggcggcgattaaggtcaacggtctcggtgaacttcctgttcttttccttgcaatcagcaacaacctgggagatggcttccttgagagcctcggtttgtaacttactcatgtttgcggccgataactcaacaacactctagggtttgggcaggggcggcgccggcggaggagaggcgaagagcccggccgg

SEQ ID NO: 64941 - DNA, 572 bp, Oryza sativa
  Clone ID: PAT_MRT4530_66037C.1
cgccgctcctctccctccctccagtcggccggcgcgcgttgcctcttctctcgccggcctccccgatgagcttgcctcctccctcgcagcgctctcgtcacgctgctcgctgcccgtcgtcgctccgtccaccgcccgccgccgctccgcttccaccagccgcccctctgctccgccctccgcccgccgacctccatcccttcgcccatcgccctgtctctgtcgttccgcccaccgcccgctggccgctgctgctcgtccttctggaataggaagtccatttgactggctttgggcgctagtgttttgatttggtatgcgaggctgtgagcaccctgaccattgttccgaggaggaggtgtactaaaaccttcaagtcctagaaggtttaacccttcttgattaatgtccgcctgccttttggattttgcggaggatccaccctggggtggcacagaactactagttcccttagcagtggccatctcttgtttttgcaaggatatgatcttgttgagaaatgcttcaatcaaattgttgctgtatactgcctttgacgggtgaaggtccat

SEQ ID NO: 64942 - DNA, 326 bp, Oryza sativa
  Clone ID: PAT_MRT4530_66038C.1
gaatgctatttaaataggagagaaaattccgaaccatgtgacatcgagtttaaactgtcacgcatgatgacgcatgcctttacttgtaacatacgtacccttgtactatcacaatatagtgcccaacgctcccaacgttggcaatgctactgcctgcagtgtattacttgcgatagataccacatatgcttggcaggcttaacgtcggcgcagatcgatctagagctagagtctgagcaaagaagacgacaccctccttctgcaggtgtaaaccctgaacaatgggctgaaccctactcatggcctccgagcgaaaccggtttgac

SEQ ID NO: 64943 - DNA, 331 bp, Oryza sativa
  Clone ID: PAT_MRT4530_66039C.1
catttttactggtactactccacatgagttgattagctgcagctgtctgcaggaactaggagcaacacataatggggggcatggaaaaaggagtctgtgaggtgtaagctagaggcatcaaccaccgcatatccatacccattcatattcgcaagcgcgcttaccctatcatgatgatgaagagatggagcagggaggaagactaagacaagtcggggacaggcaccaacaccatcaccacgccacgtttttcgaacgtctactgtcgcgcccgccccggctagctccttgacatcgtgggccccaaaggagccagcgagtacaccctcct

SEQ ID NO: 64944 - DNA, 517 bp, Oryza sativa
  unsure (1)..(517): unsure at all n locations
  Clone ID: PAT_MRT4530_6603C.1
ggggccgggattncaagttcattagtactacaacaacatggcatctctaaatcgccccatagttttcttacagtttgctagactcctgttgtgcaacggctctctagcccagcagctattaggccatagcactagccaatggcagagttctcgtcgcggaagactcaagagaatgcaggctcgatcggttgcaagcatttgagccaattcggagtgtgaggcctcaagctgggacaactgagttcttcgatgtctctaatgagcaatttcaatgcaccggcgtatctgctgatcgtggagttattgaacctacaatcctcctactaccccattacactaacggcgcatctctagtacatatgatccaacggagaggtataacagggccaacttctccacgctcgcccgagtcctacctagaacaggtccaacaatcaggccaagcccaattgaccgacagtcaaagccaaagtccaaagctgagggatgaacatggaaagatccaccgtttcacaca

SEQ ID NO: 64945 - DNA, 241 bp, Oryza sativa
  Clone ID: PAT_MRT4530_66040C.1
atggctgtgtggcaagcaattgcacctcccaagtccatgggcccagggcatactctcaggtgcgacttactcactagtcgaactcataaaagagggtccatacggatccccgctatcggggcccctcaccctaacaaccacattgactacttcctctacgtcatggctggtggcgataatatggttggtggcaagaaaagtaacggcgacggttctattggcaggaatggccacggcaacg

SEQ ID NO: 64946 - DNA, 1813 bp, Oryza sativa
  Clone ID: PAT_MRT4530_66041C.1
ctgccaagtaaacctactcaccaataatccatcctcgaatcctcgatttatcatggagataaactcggcagccaccctcaccctcgtctctctcctcaccctccccattcttctggcgttgctgacccgcaagtcgtcgtcaaagaagaggaggcctccagggccatggaacctccccttggtcggcggcctcctccacctcctccggtcgcatccgcaggtcgcgctccgcgagctcgccagcaagtacggcccggtgatgttcctccggatggggcagatcgacacggtcgtcgtctcatcgccggcggcggcgcaggaggtgctccgcgacaaggacgtcatgttcgcgtcgcggccgagcctcctcgtctcggagatcttctgctacgacaacctcgacgtcggcttcgcgccctacggcgcctactggcggatgctgcgcaagctctgcacggtggagctcctcagcaccaaggtggtgcggcagctcgcgccggtcaggaatgacgagacgctgaccctcgtcaggaacatcaaggccgcctcctccggccatggcggcggcggcggcaagaagccggtcaccctcgccaggctgctcacgacgtgcacgaacacgatcaccgccaaggcggcgttcgggcaggcgtgcggcgtcgagctccaggagcagttcttgacggctctggacgtcgggctcaagttcagcggcggattctgcttcggcgacctcttcccgtcgctgcggttcatcgacgccatgaccgggctgaggagccgcctgtggcgagcacgcgggcagctggactccgtcttcgacaagatcatcgctcagtgcgaggagcatcagggtgattcccttgtcaacgtccttctcaggatcagagatcagggcgacctcgaattccccttcggcacaacgaacatcaaggcaattatactggatatgttcacgggagggacagagacgacgtcgtcggccgcggagtgggtcatgtcggagctcatgaggaaccctgaggtaatggccaaggtacaggccgaggtgcggcgagtgttcgacaacaagagcccacaagaccatgagggcctgattgacaacctacgctacatgaagatggtgatcaaggagactatgaggttgaatccagtgttgccgctgctgatgccccatctctgccgggagacctgcgacattggtggttatgaggtcgtggaggggaccagggtggtgatcaattcgtgggcgatggcgaggagccccgagtactgggatgacgcggaggagtttaagccagagaggtttgaggatggcatggcagactacaaaggctcccgttttgagtacttgccgtttggaaccgggaggaggagatgccctggtgatacatttggtatggtcttgttggagctcatcgtggcacgccttctctactacttcgattggagcctccctgccggaatgcagccggatgatgttgacatggacttcgtcgtcaccgccacaactaggagaaagaaccatcttcagctagtggcgtcgccatataagttggctcctatccaaatctgatggatatacggctcctacccaaagctgatggatgtatcagtgtgtttgttcttttcttatcataggtgtatttgttattcgcgtgtttgtgtaccttgtaagggtgcacgtaatgtttgtccccggataatggacaaacaaataataattgtgaacaatatcatgtactactacgtatttatttaaagttacaaatatttgataattattaagaaaaaaaaaaaaaaaaaaaaaaaa

SEQ ID NO: 64947 - DNA, 1878 bp, Oryza sativa
  Clone ID: PAT_MRT4530_66042C.1
atgaagaggaagaggaggagaaggagaagcgggaaaggaaatgtaccgccttcctcaccaccgacggccatactggctgctgtctttgttgacagcgaccaaaccgtcgacctcgtccacccctccctcggagtccgcaaactgcacgctgttgtcgccgaccgggtgagccttgtaccacagcagatcttggcctcgctcgcgcgcccccgccgcgcgcgccgcgtcccccacaacgaggggactgacctcaccgccaccatcgcgcgcgagggcttcgacagctacgtcctcgccgtcctccgccgctcccaccgcgagtgccgcggtggccgctcccgccccgggaagaaggcggtggctgcgacagcgggggaccgagcccggcatcctgaagcgcctccccccgatggatctggcctccctggcctcgaccccctcgcaggcggcgatatagatgagtgcgctcttccgggtattatgagcaattgctcctttaatagcgtatgcgtaaacagaccaggaggctttgattgtccatgcaaacgaggaatgacgggcgacggcaaaagaggaacatgcaccgagaatttcccaccagcagcaaaagccgctgtcggcctttcttccttcattgttttcatcgtcctaatttttatggtgaaacaacacctaaaacttaagaagttctacgaacaaaatggtggtccggtattgaaaggtgtgagaaatataaagatctacacaaagaaagaactgaaacaaataacgagtaactatagcagcgacattggagaaggagcctctggtaaagtttatatggggactcttaagggcggacaacaagtggctataaagaagtccaaaaaagttgatgaagaaagaaaaagtgaattcactcaagaggtcatactccaatctgaaatgaagcacaagaatataatccagctctttggttgttgccttgaagttgatgttcctatgttagtgtatgagtttaccgtgaaaggaagtttacatgatgtcctcttcaaatgtgatgagaatatgaaagggaatttacatgacgttctacccaaatacaatgataacaagaaagggaaagggaaagggaaagggaaagtacacgacgcactcgttgaatgtgatggtaacaaaaatgtgagtttgcatgatgtcctcttcaaatgcggggataaaattgcaatagatacacttctggagatcgctattggatcagctgaaggactaacttatatgcatacagcacgggagactcccatccgtcatggtgatctcaaatctggtaatatacttatagacaataatttcgtccctaaaatttcagactttggaacatcaagatcactggttgcaggtcataaatttaggcctgataaattcattcctgcggacatgaattatatagatccagtatatatggaagatggaatgctcacggagaaaagtgacatctatagctttggaattgttcttattgaacttgttacaaggaagcccgcaaaatatgatgacgacaggagctatgttcgaaacttcattcaggcctaccttgataaaagagaaagggaaaaatgccataaagagattacaccagatgtggaaattaatattcttgaaatggttagtgaagttgctgtggcatgtttagaacctgtccaggataaacgccctgatatgatagaagtagaacggcagctccatcgaattagacacattgcaggccaaaggatagaggaaaaaaaagaggaatttcaacgtgcattccctagaacgggatcggttatctcaaacgggtttaaagcctcgtctctttcaggtagggtccctgtcactaagcaaaggtcactaatgtga

SEQ ID NO: 64948 - DNA, 372 bp, Oryza sativa
  Clone ID: PAT_MRT4530_66043C.1
atggtggtgacactgatcatcgtccctctcgcgctgaggggagcctcgcttctcggcaatgccgtcgccgccgccgtcgtcccgtcgtcgtcgccggagcagcagcagcagcagcagcggcggccgcggccgcctcccggttccaagaacggcgcctcgccgtcgtcgtcggctcatgggcagcactggaaggatcagagccgccacgccgccttcacccgacggcggttcggcaccggcaccggcggcggcggcgacgatggcttcttcagcgacgacaagaggttctcgccgactggatcaaatccgctgcacaacttgagcagtttgtggttgttgggttatgtattagtcgcttccgatgctacttaa

SEQ ID NO: 64949 - DNA, 642 bp, Oryza sativa
  unsure (1)..(642): unsure at all n locations
  Clone ID: PAT_MRT4530_66044C.1
tttttttttttttttttattccaaataaattggagatatttttatttattattattcattgtagataaaaaaaacattaagcatgactgtctccaacaagaaggggcaggcatgcatgcatgcatgcagcttgttgtacaaactagcaacaggttcacttgaaatgaaccatcttcattattctagctttgtctcaactctccatctccagaagttcagaatgctcatggaatggtgttgcagtcgaagtcgaggctgagcgggaacggcagcggcgcggcgcacttggccgggaggtcgcggatggcgtcgccgttgagccccttgaaccgcgccgccgccttcttcacgcagtcgcaggcgaaccgccgctcggcggtgccgacgggcagcgtccggaggtgcctcacgccggcgcagcaatcccccgagggcgccgccgccttgccggtcaggtacgccacgcacggcagcaggctcgcgtccacgtcgccgcacgtcaccgcgccgtcgacgacggacaccgccgccgccgccagcaagcagccggccaccaccaccatcgccaccgcagccgctcccttcatcttcgccgtcgtcttcttcttcttcttctttctnacgcgtggacgcgacgcgtgg

SEQ ID NO: 64950 - DNA, 453 bp, Oryza sativa
  Clone ID: PAT_MRT4530_66045C.1
tttggttttttttttttttttgtttttttttttttccgagctcaacatcgccgttgtattttttacctgggccctcacgctcacaaaataccgggacgcccagttacactaactataccactacctacaccaactataatcacggctacgattacaatagcatgcccactaccggtggcgattcctcgtacgcgtacctttaagcattcgcccccctgggggcatcggatgccccggtcaccggggggggaacgcagacaacagccacagaccccattacagacaccgtcgaagatcgacatatcgcgatcggacggggtatagcatccattggacaacaaatccatggataccaaggggggggattcccattttccctatctggggggttttccacgcaggccgatgggcaatggcagggggagtgtttttacggggacgatgggaccgttt

SEQ ID NO: 64951 - DNA, 1960 bp, Oryza sativa
  Clone ID: PAT_MRT4530_66046C.1
ggcaaacaaattatgttttattaagttagtaactgttgaagtattcttgtagacattatacaatttaggagcaaggaagtttgcagtgatcaatgtgccattactcgggtgctgcccatatttgagaagtcagaacccgaccggagagtgcttcgaaccgctaaaccagttggccaagagactgaacggcgaaatccgggacctgttccgtgacctcagctccgaaatgcagggaatgaagtactccattgccagcttctatgaacttatctccagcctaattgaaaatccacaagctgctgggtttgtagaggtgaagagtgcatgctgtggtggtggtggcaagttcaacgccgaggaagcctgtacccccagctccagctgctgcgctgaccgtagcagatatctcttctgggatctcctccaccctacccaggccacctccaagattgtaggccttgccttctatgacggggcagcacggtttgtcagtcccataaccttcaagcagctgtcctagttttctcatgagtgtaagtaaaaatggttgctggttgtccccattaggtgattgatctgtgctctcctcatccaccggagagctccagtcagtggccagccattgcttcaccctgtcgcgcttggcgacaagccggcctttgttcctcatggacagcctcagggggctccccatcctgctcagaacctcctgagccagctccctcaccttgggctcacctctgacatcgctgtgcttgccaatgccacacaccactgacacctccaatggcaatgcgcggcgcgccttcatcgcatccacccactgcaaaatcaaaacataggctgcaattgtgctgaatccatggaggttcagcttcacctccgactccgaccaatccatcgccttgtcgagcaccgaagaggatgtcaggagctcctgcaccagctcagcttctgctggccattgagatgcagacctgagcttcttgaccaactcagccgttgacaatggcagtgattcccccaattcttgagccatcgaagctactgttgggcatgagttgagcacaaagttgaaggccttcgtcgtcggcgcaatccgcagcttcctcatcctcctcagccatgccagcatcctggaatggtcacggcaggaggtgtagcacgagagcacgatgttcgccgcgccggtgccgaggcggatgccggcgtcggacatggacgagatcaccctctccatctcggccatggatcccgccttgccgtagcacttcgccaccaatccgaactggaacgcctccggctggtgcccccgagacgccatctccctcagcgccgcctccgcctcgccggcgaggcccatcaggcacagagattttatcatcgccgtgtaggtcttcttcccggacagcggcggcgaggctcgcagctgggagtagaaatccatcgcccggtctcgcatcccgcgggaggagaaggccgccatgaggtcgcagtagaagagggacacctcctcggaggaggaggaggtggagtggaggcgcgagatggagtcggagatgagggatcttgattcctccgcgctgccattgctctcgagcagcgcggcgacggcggcggcgtggatggagctccacttgaaccaccgcgcctgggtgaccacctcgtagaacgggatggcgaaggggtcggagtccatgagcaggcgggagagcgcggcgagggcggcgcgctccgacttggaggcgacgtagctgcggatgacgcgctccgccgcgccgggcgtcaccgtgcgctccagctccgacatgagccgccgctcgctccgccagctcgagccacctcccgccgccgcccgccgcagggacgccaccgccacgttcaccctcctccggcccctccccccggccgccggcgatggcgccggggtcgagagcgacgccgccaccgccaccgccat

SEQ ID NO: 64952 - DNA, 169 bp, Oryza sativa
  Clone ID: PAT_MRT4530_66047C.1
tgttgaggagaggataaggatgcctactccgtgggggtctattacacatggggcgaaggcctgctaggtgctaccgacagaacatgaacaagctcgaccccaagtcaaggaactgccgtggtgtccctagaccccatgatcaggatctatgatgttggcatgatgaaga

SEQ ID NO: 64953 - DNA, 1155 bp, Oryza sativa
  Clone ID: PAT_MRT4530_66048C.1
atggccaggctaatattaatccccctcctcacggtcacggatttttcgtcgtcgcatctcagccatatggcaacggtgtgggtgtttgtgcttagcttaatcggcctcgttcctcttgctgagcgactcagcttcctcaccgagcagattgcattttacaccggtcctactgtgggaggactactgaacgcgacatttgggaacgtgacggaggtgataatcgcgctgttggcgctgcgagaaggaaagattgaggtggtgaaatgctccctgctgggatccatcctctccaacctgctgcttgtcctcggcacctccctcttcctcgccggcatcgccaacctccgcgcccaccagccgtacgacaccaagcaagctcacgtcaacaccgccctcctcatgctcgccgtcctctgccactccctgccgctcatgctcaggtacgccgtcacctccggcgaccacgccatcgtctccggcgacgccgccctccacctgtcgcgtgcctgcagcatcctcatgctcatcgcctacctggcctacctcttcttccaactcaacacgcatcgccagctgtttgagccccaacaggttgaggatgatgacgacgatgatttagtgatcgctcaagatgatgagccagtactgggattctcgagtgccatgatttggctggctctcatgactctcctgactgcgctcttgtcagggtatgttgtgagcacaattgaggcggcctcagaatcatgggaactatcagtgagcttcattagcatcatcttgcttcccatcgttgggaacgcagcagagcatgccggtgccgtcatatttgctctcaagaacaagatggatattactctcggagtgtctttgggctctgccacacagatctccatgtttgtggttccagtgagtgtgattgtagcctggactatgggaatcccaatggatcttgatttcaacctgctggagactggctctctgtttctagcaatattagtgacagccttcaccctccaggagggagaatcacattatctgaagggattgattcttgtcctgtgctacgctgtcatcagcgtgtgctttttcgttataagacggcgttctgcaggagggacggacggtgttcaccatctggatgtgattgtgtag

SEQ ID NO: 64954 - DNA, 150 bp, Oryza sativa
  Clone ID: PAT_MRT4530_66049C.1
atgctggggcacacacccatcccgctgctcctccgaagaccgccgaggagggaagggagcaatgatgccatgctcaacttcaagggtgactgcttcgagtttctcccttccgactttgaccgccactcctgcctagagatgacactctag

SEQ ID NO: 64955 - DNA, 2126 bp, Oryza sativa
  Clone ID: PAT_MRT4530_6604C.1
atggacttcaccaaccttcttatcacggtgctcctcctactctctcctctcaaatacgaatccgatgttgccacagcaagtgatgatgaagacttcttcaagacttgttcatcccagcggtgcagcaagcatggaccagagatcaggtacccgttccgtctttcgacacaacctccatcatgcggtgcacctggtatgcaattatcatgctctggacaagacaccatcctggatcaccctgttcttggttcctgcaaagtgaccatgatatattacaggcatgttatcatgaacgccattccacttgtagattccttacctcactgcccacttcagaagctcgtgtcagtaaatcaatcaactgctgtgtacaaacctcatacgtcggaagttgcaagtgtagtaggttgttcaagagattccatagacacaaaccaatatggtatagttggcccaacctcttgccccagcctcgctaacaacgcaagccagttctggtatttggcatatccctatacatacatgtctattcttccattgggctgcacaattgtttccaaagacatcccaatgccctacagttacgataaaaatggtccaaactttgacatctcaatcttcaccgaaacagcaaaaagagtcatcagcactggtgagactgtattcacttggtacacaagtaacgttactagtatttgccaacaatgtgaacgtgaagtttggattactgtgggaggtactacggtgagagtagtcaccatctcaattagaccttttggtgctagagatgcacttgatagtgcagtggcaaggggtccgcgtgtcacaatcattgcagcaacatcatctgtgggcacatttatagttctttcattaattgtggccactgcactctacatctccttgaagtcaaggtacaatgaagagatacatttgaaagtcgaaatgtttctgaagacatatggcacatcaaagcccatgaggtacacattctccgaagttaagaagataacaagacggttcaagaacaaattgggccatggtggatttggaactgtatacaaaggtgagctaccgaatggagttcctgtggctgttaagatgctagaaaactctgtaggagagggacaagagttcatcaatgaagtcgcaaccattgggagaattcaccatgcaaacatcgtccgcctcctaggcttttgctctgaaggaacacgacgggctttaatatatgaattcatgcccaatgaatcattggagaaatatatattcccacatggttctaatatttcaagagaactcctagtaccaaagaaaatgctagatattgcattaggcatcgcccgaggaatggagtacttgcaccaagggtgcaatcagcgcattctccattttgacatcaagcctcacaacatactgttggactacagcttcaatccaaagatttcagactttgggcttgccaagctatgtgcaagagatcaaagcattgtcacattgactgcagcaagaggcacaatgggctatattgcaccagaactatattctcggaattttggagcaatttcatataagtcggatgtctacagctttggcatgctggtgttagaaatggtgagtgggaggaggaacacagacccaaccgttgagaaccaaaatgagttctactttcctgagtggatatatgagagagtaatcaatgggcaggaactggtgcttaacatggagacaacacaaggggagaaagaaacggttagacagctagccattgtagcgttatggtgcattcagtggaacccaacaaaccggccctcgatgacaaaggtagtaaacatgttaacggggaggttgcagaaactacaggtgccgcctaagcccttcatttcgtctgaaaatcatcttgcgacttagatcatggaaacacaattccatggtttagagatatgtttgatcgatccgtagcttgtatgtatggtgtaagattattcaactatattgtgctatcagacatatggtatatgtattcatgcaattctaatatccagcaaacatatgccaatggattttatttgcaatataataatacttgatgacaactaacttaccttaaaaaaaaaaaaaaaaaa

SEQ ID NO: 64956 - DNA, 462 bp, Oryza sativa
  Clone ID: PAT_MRT4530_66050C.1
cgagggtcacggatgcgcatggtgacgtgacaagaggaagctgtggaccgtgaagggtctccaggggttcgtggacctctgctgctccgtgaaagtgtgcctctccacacatgtgtgctcaggttcatcgtgttcagcgaagacctcaacgagacatcccggctaaacctctggattaagcatgctctgctgcgtatggttcagtttctccaggtctccatccggcagaatacagccttctatcaccagattaatctaggcatcctgccttttgtttcacggcacttgtcgatgcttgagcttcacggtgtacggatggtgggaagtttccttgatttctccagatgcccggcttgcaacatctagaatttgaccgctgtgagttgccatgtgacaagatcttatcagagtccctaaaacttctgcgcatcactcgctgcaaattcagtcaaacatcacggg

SEQ ID NO: 64957 - DNA, 3375 bp, Oryza sativa
  Clone ID: PAT_MRT4530_66051C.1
atggcgaggtaccccgctccgacgagctctcgtgcaatcggagcccccatccagcccacggagcctcacgcgccactgccgaacaccgggggagaaggagcaccaccaccagcacgcaccatgccaccgccatcctctcaggccgcgacctccactcctcccgccgccgcgacgccactgcagcggccgccggcgcaagccaccgctcagccgtcgacacagagatactacgtcggcgtgcagcgagacaagggcacgggcaaatgggcggcatgcgtggtcgacccgtccaacccgaccaagcaccgcctcgtgggcgccttcccggacgagcacgcggcggcgctggcgcacgaccgcctcgacctcgcgttccgcggcggcggccaccgcggcgccggcgacaacttccgcccggcgttccacgccgtggagctggagttcctcaggctgtgcgcggccacctcgtcgccgggctcccactgcggcctcgtcgccggcggcgacaagtacgacgagaagtactccgaattcctgcgcaaaatctaccacggggtgatggacaactccccctcctacaagaaattcttcgacgtgatcctggatttcttcatcgctcgggcgagagagatcgggcgggaggccctcgaggacggcggggatatgctggtggagaggttcgtcgcgatgcacaagaacaaggccgtgacgccgaggtggcgtgcgtggtaccggagcgattctcgcaaggttcttcagattcctctgtccctccgagggggaggaggagagatcgatcactcaacccagaaggaagctaggatggattctgatagctgcaaaaggcggaagcatgaaagcggtcacgatagctcttcacgggtccagtcccagtcaagcatccttagtcgtaacagaattttgtgtcatcagttgcttgaacaatgcgatgacttgaagtatgggagctccacgaatgattacaaggcaatcagtatgaagcggcttgaacttatcagcatcctacaaaagctgcaagaagtacctatccagttgccatatgccagtccactcaagtcatcagaaacaaatcgccttgtgcaagatggaagaaactctagttgtcgtaatataattgacttggattcagacaatgatgaagattatacttttgctaatgtggacaatattggtgctaacacaacagttgttttagttgattctgatgacggggacagtgttgcatcctttgtagatgaaaaatcatctgattccaagcaaaatgcgaattatattgaagaaagcgttctgcctgagcagcatgcccaacaacaggaaatctccatgctggataatgaaaacatcagttctgaagcacaagcagttaagaaaggaaaggatagtatggacatcaacgatgttatttacaacaagagtggtcatgaggagataggggaagaggaagcacaagctgaaaatgtccagataaaagggaacttaaagaaagagatcatctctgttgcttctgatgaactagcttgtgaagttatgcgcagtcagtcaccaaccaatggaaattttgatcaatatgacaacagcagcccagttgatgagctggaaggactttggatggacatgtaccttgcaatggcatgttcaaagactgttggaagcgatcataacattgtcccatcagagaattcttgtgaacaagcagaggatgaatgccagcacgatttcctgatgaaagatgatttgggcattgtctgtcgtgtttgtggtctgatccagcaacgtattgaaaatatttttgagtaccagtggaaaaagcggaagcaatcgtacagagcacgtccctcagaacacagaaattctagtgatgcagatgcaattgacaaaacttcaggagctattctcgaagtggtccctgatgctctatgcctccaccctcaacattcacagcatatgaaacctcaccaagtggaaggtttcaatttcctggtcaagaacttggcagatgagaacaaccctggtggctgtattctggcacatgcaccaggttctgggaagacttttttgataattagttttgtccacagcttcctagccaaataccctgctggaaggccattgattattctcccaaagggaattctatcaacatggagaaccgaatttcttcattggcaagttgatgatattcctttgtatgacttctactcctccaaagctgacaaacggtctgaacaactcaaagttttgaacttgtgggaggagagcagaagtatcctgttgttgggctatcaacagtttgcatgcatagtttctgatcacacttctgatacagaagccatcatgtgccaggagaagttactgaaggtcccgagccttgtcattctagatgaaggacacactccaagaaacgaggaaacagacttgctcacttcactggaaaacatccgaactcctcgtaaagtagtcctctcaggaaccttgttccagaaccatgtgagggaggttttcaacattttgaaacttgtccgatccaaattcttgaagatggacaaatctcgtgctattgttaactgcatactaagcaaggtggacttgatggggaagagtgcacgatcaaagaatatctcagataaggacttctttgatttggttcaagaacaccttcagaaagatggaaatgacaagatgagagcggtgattatccaaaatcttcgtgagctaactgcagatgtgcttcactattaccaaggcaagcttttggatgagctacctggaattgtggactttacagtttttttcaatatgagtatgatgccacgggaagggaaggtactcgtgttcagccagtatgtgcgctctttgattttcttggaaaagctggtcagtagaatgaaaggatggaaatcagaggtacatattttcagggttactggtggctcaactcaggatcagcgtgagcaagcagtccatagattcaacaactcaccagatgctagagtcttctttggctccatcaaggcatgtggcgagggcatctccctcgttggcgcgtctcgtatagtgatcttggatgtccatgagaacccttcagtgatgcgccaggcgattggccgtgcctataggccaggacagtctaaaatggtgtattgctaccgcctcgtcgctgctgattcgcctgaggaggatgatcaccacaccgccttcaagaaagaacgagtgtcgaagctgtggttcgagtggaatgagctctgcagcagtgatgattttgagctcgcaacggtggatgtttcagatagcgaggacaggttccttgaaagctctgcattgaaacaagatatcaaagccctattaaaaaggtga

SEQ ID NO: 64958 - DNA, 579 bp, Oryza sativa
  Clone ID: PAT_MRT4530_66052C.1
atgatgaacaaaagacataaacgccgaggccgtgcgctgcctcccatcccgccgtcgcggctgcttccgctgcaccggctgcggccacctgccgcctcccatcccgctgccacggcggcttccgccgcgccggccagcgcctcctaccgtgcgccgcctcccatcccccgccgcacaggtcacctatcgcccgccggaggggagggggccgaaggaggagatggggccgggctcggaggcccaataggcccagtaaaccaaaccctagaggcactcaaccctcaggcctcagccatagagacaagaggcaccgcaagccacagcgctgcgccgcgccgccatctatcctcatccatcgcgctcgggctcacggtctcgcgcggcgcggacccgcggtcacgccgcctccaccctccgcggctctgcctccatcgtgccgccacaccgcctctgccctccagccagcccgcctccacctcggcgccgcctccaacaacagcgagcccgcttgcgcctcagcgcgacgacaccgcctccagcgacagcgagcccgcctccactttttttttgtctctctga

SEQ ID NO: 64959 - DNA, 408 bp, Oryza sativa
  Clone ID: PAT_MRT4530_66053C.1
gaagcggccagaatagggctgttcaggtcttcaaattgaaattgaagttacaattattatgttcttaagcgaaaggaaaattgccctgagaaccaagcaaataacgctgggaccaaacacctattgtgaaaaacggatgccatgtctgtatcggtcataacacaggctttcattgggaacacacaactggggattcactttccaaacacattgctaactgaaatttgggctaccaatgcgggcgcgaatttttccggcgggaaatacacatgttccaggttctggtcccctggtggatgccatatgtttactggaatgggcaggtcccattttctggttccctggtggaggccatatgtttactggaatgaacatttccttttatctttggcgcctgtgaacccttta

SEQ ID NO: 64960 - DNA, 3594 bp, Oryza sativa
  Clone ID: PAT_MRT4530_66054C.1
atggcgaggtaccccgctccgacgagctctcgtgcaatcggagcccccatccagcccacggagcctcacgcgccactgccgaacaccgggggagaaggagcaccaccaccagcacgcaccatgccaccgccatcctctcaggccgcgacctccactcctcccgccgccgcgacgccactgcagcggccgccggcgcaagccaccgctcagccgtcgacacagagatactacgtcggcgtgcagcgagacaagggcacgggcaaatgggcggcatgcgtggtcgacccgtccaacccgaccaagcaccgcctcgtgggcgccttcccggacgagcacgcggcggcgctggcgcacgaccgcctcgacctcgcgttccgcggcggcggccaccgcggcgccggcgacaacttccgcccggcgttccacgccgtggagctggagttcctcaggctgtgcgcggccacctcgtcgccgggctcccactgcggcctcgtcgccggcggcgacaagtacgacgagaagtactccgaattcctgcgcaaaatctaccacggggtgatggacaactccccctcctacaagaaattcttcgacgtgatcctggatttcttcatcgctcgggcgagagagatcgggcgggaggccctcgaggacggcggggatatgctggtggagaggttcgtcgcgatgcacaagaacaaggccgtgacgccgaggtggcgtgcgtggtaccggagcgattctcgcaaggttcttcagattcctctgtccctccgagggggaggaggagagatcgatcactcaacccagaaggaagctaggatggattctgatagctgcaaaaggcggaagcatgaaagcggtcacgatagctcttcacgggtccagtcccagtcaagcatccttagtcgtaacagaattttgtgtcatcagttgcttgaacaatgcgatgacttgaagtatgggagctccacgaatgattacaaggcaatcagtatgaagcggcttgaacttatcagcatcctacaaaagctgcaagaagtacctatccagttgccatatgccagtccactcaagtcatcagaaacaaatcgccttgtgcaagatggaagaaactctagttgtcgtaatataattgacttggattcagacaatgatgaagattatacttttgctaatgtggacaatattggtgctaacacaacagttgttttagttgattctgatgacggggacagtgttgcatcctttgtagatgaaaaatcatctgattccaagcaaaatgcgaattatattgaagaaagcgttctgcctgagcagcatgcccaacaacaggaaatctccatgctggataatgaaaacatcagttctgaagcacaagcagttaagaaaggaaaggatagtatggacatcaacgatgttatttacaacaagagtggtcatgaggagataggggaagaggaagcacaagctgaaaatgtccagataaaagggaacttaaagaaagagatcatctctgttgcttctgatgaactagcttgtgaagttatgcgcagtcagtcaccaaccaatggaaattttgatcaatatgacaacagcagcccagttgatgagctggaaggactttggatggacatgtaccttgcaatggcatgttcaaagactgttggaagcgatcataacattgtcccatcagagaattcttgtgaacaagcagaggatgaatgccagcacgatttcctgatgaaagatgatttgggcattgtctgtcgtgtttgtggtctgatccagcaacgtattgaaaatatttttgagtaccagtggaaaaagcggaagcaatcgtacagagcacgtccctcagaacacagaaattctagtgatgcagatgcaattgacaaaacttcaggagctattctcgaagtggtccctgatgctctatgcctccaccctcaacattcacagcatatgaaacctcaccaagtggaaggtttcaatttcctggtcaagaacttggcagatgagaacaaccctggtggctgtattctggcacatgcaccaggttctgggaagacttttttgataattagttttgtccacagcttcctagccaaataccctgctggaaggccattgattattctcccaaagggaattctatcaacatggagaaccgaatttcttcattggcaagttgatgatattcctttgtatgacttctactcctccaaagctgacaaacggtctgaacaactcaaagttttgaacttgtgggaggagagcagaagtatcctgttgttgggctatcaacagtttgcatgcatagtttctgatcacacttctgatacagaagccatcatgtgccaggagaagttactgaaggtcccgagccttgtcattctagatgaaggacacactccaagaaacgaggaaacagacttgctcacttcactggaaaacatccgaactcctcgtaaagtagtcctctcaggaaccttgttccagaaccatgtgagggaggttttcaacattttgaaacttgtccgatccaaattcttgaagatggacaaatctcgtgctattgttaactgcatactaagcaaggtggacttgatggggaagagtgcacgatcaaagaatatctcagataaggacttctttgatttggttcaagaacaccttcagaaagatggaaatgacaagatgagagcggtgattatccaaaatcttcgtgagctaactgcagatgtgcttcactattaccaaggcaagcttttggatgagctacctggaattgtggactttacagtttttctcaatatgagtagcaaacaggaacatattattaagggcttggatggaataaataaatttgcgaaacgctcgagatgcaatgccgtttctcttcatccatgcttgaagaatgccaataaagctgatgcagatgatggaaatgtcaccaataggaagatcggttccatcatatccggaattgatatcaacgacggggtgaaggccaagtttgtacacaatctgttgtctctttcagaagccacgggagggaaggtactcgtgttcagccagtatgtgcgctctttgattttcttggaaaagctggtcagtagaatgaaaggatggaaatcagaggtacatattttcagggttactggtggctcaactcaggatcagcgtgagcaagcagtccatagattcaacaactcaccagatgctagagtcttctttggctccatcaaggcatgtggcgagggcatctccctcgttggcgcgtctcgtatagtgatcttggatgtccatgagaacccttcagtgatgcgccaggcgattggccgtgcctataggccaggacagtctaaaatggtgtattgctaccgcctcgtcgctgctgattcgcctgaggaggatgatcaccacaccgccttcaagaaagaacgagtgtcgaagctgtggttcgagtggaatgagctctgcagcagtgatgattttgagctcgcaacggtggatgtttcagatagcgaggacaggttccttgaaagctctgcattgaaacaagatatcaaagccctattaaaaaggtga

SEQ ID NO: 64961 - DNA, 464 bp, Oryza sativa
  Clone ID: PAT_MRT4530_66055C.1
ctttattttcttccttgggagtggcaaatgacgagactacccctcctcctccactcgccccgcttcgccgccgcactgaccacgccgccgccgccgccgctgccaccggcgcgccgcctcgtcgccgccgctgcaggaggagacctatcgctcgcgatgtcggcggcaaccggggagtacccggtcccggtctcccctccctacccggcggcgtccaaggacgtggagctccggcgcgccatgacggcctcggcgcgctccgccgcctactcctccgcgcccgtcgtgttcgaggacgagtggctcgccgtcgtcgacaagcccgcgggagtctactgcgacgccctcctctccgctctcccttgctccgctgccacattaggggatgaagcaactaaacctaaccttcacctcgccaacaggctagaccgtgataccagtgggctcatggttattaccaaatg

SEQ ID NO: 64962 - DNA, 1623 bp, Oryza sativa
  Clone ID: PAT_MRT4530_66056C.1
actagtggatccccgggctgcccggcccggaagatcattccccgatcaccaaccgacgaaacccgcacccactcctccggccaccgacgccgcagccggcggcgcagagaggggagatccacgccgccgcgatgggccgcaagcgcgcgctcctggtgggcatcaactacccaggcaccaaggctgagctcaagggctgccacaacgatgtggaccgcatgcaccgctgcctcgtcgaccgcttcggcttcgacgaggatgacatccgcgtcctcctcgaccgcgactcctccgggacgcagcccaccggcgccaacatccgccgggcgctggcgcagctcgtcggggacgcgcgccccggggacttcctcttcttccactacagcggccacggcacccgtctgcccgccgagacagggcagaacgacgacaccggctatgacgagtgcatcgttcccagcgacatgaaccttatcacagatcaagatttcagagaacttgtgcaaaaggtgcccaatggttgcttatttaccatcgtctctgattcttgccacagtggtggcctattggacagcgccaaggagcagataggtaatagtaccaggcagaatcaaacccagtcccgtgaacgcgaagagccttctgattctggcagtggtttccggtcatttctcaaagaaactgttcgggacgtgtttgagtctgagggaatccacctccctcgtagtcgccatagccagagccactatggaggtgaggaccagtatgagacatacgctcaaccaactgatggccacactaaaaatcggtcactgccactttcaactcttattgagatgcttaaggagaaaactgggaaggatgacattgatgtgggctcaattcgtatgacattgttcaacatctttggagatgatgctagcccaaaggtcaagaaattcatgaaagtcatgcttgggaaattccagcaaggccaatcaggcgaacagggtggtctcatgggaatggttggctccctggctcaagagtttctgaaggttaagcttgaaggcaacgaggaagaagctttcaagccagctatagaacaagaggttcacagtgttgacgaggtgtatgctgggactaagacatgggcacctaacaacggcattctgatcagtgggtgccaaagtaatcaaacatcagccgatgcaaccacaccgcagggttcttcatatggtgccctcagcaatgctatccagaccattcttgcagacaagcgcggaaatgtgtcaaacaaggaccttgtgatgaaagcacggtcattgctggctaagcaaggatacactcagcagcctggactttactgcagcgatgaccatgttcatgtgtcttttatatgctgaaacatgtatcattacactttatggtgttctcttttttttttttttgtgttgagctgtgcatgagggcttgaagcttccctggtatacgttactgttgcgtgtctatggcagtaccatttaaacgctatgctttgatgtagaccatgtctatactaaaataagggtgtgactaaacatttatacataatatatgcatatatatgcaaacaaattttcaaaaaaaaaaaaaaaaaaaaaa

SEQ ID NO: 64963 - DNA, 2496 bp, Oryza sativa
  Clone ID: PAT_MRT4530_66057C.1
atgtggcaacaccttagcagccttagacaatcttccactttaccttgggtagttctaggtgacttcaatgaggccctttggcagtttgagcacctgtcaaagaatcctagatctgaaatccaaatgcaagcttttagagatgttttagatgtttgtaatcttatagacttaggttttgagggtaatcccttcacttatgataacaggaggaaaggcagtaacaatgttcaagttagattggatagggtggttgctgatgaaagttggagggatatttttagtgcggctcatgttgttcacttggtttcaccttgttctgaccatgtgccaatccttctgagattattgcaggaggaaaaccataatcaccggaagaaatgtcgacactacgaaatcatgtgggaaagagaggctgagctaccacatatcatttcggcagcatgggaagctattgaatgcaaaacagatctaggcaacatcgaagtgggccttgacaaggtcatgtcagatttacatacatggggaagcagaaagtttggcaatgttgtgaggaaaatagaaaagttaaggaagaaattaggggagctccagtactctaattcagaccaacatgagatcaggaagatcactgatgagatgaatgagttactttacagggaagagatgctatggctacaacgctcccggatcgactggttaaaggaaggtgatagaaatactaaattctttcatggtagggcagtctggcgatctagaaaaaacaagatagaaaaacttaaggcagctgatggcaatgtttactcaaatcaggaaaccatgggtaccatggcaacaaattatttcaaagagttatttactaaagatccaaatctggtgccggctaatgtggcaaacttgttcgccccgcaagtttcttcagcaacaaatgaagccctgtgtgcagatttttctgaggaagaaatatcaacagctctgtttcagattgggccaattaaggcaccagggccggatggctttccggcaagattttttcaaaggaattggggactcttcaaggacaacattgtccaggctgtaaaaaagttccttgatacaggtcaaatgccagaaggagttaatcatactaccatagtgctaataccgaaggtggatcaaccagttgaaatgaaggattttagaccaatcagcttatgcaacgttttatacaagattgtctcaaaatgcttggttaacaggttgagacctctgctgggtgatattatctcgcctaaccagagtgcgtttgtccaggggagaatgataacagataatgctttgatagcctttgagtgcatacatcatatacaacaagtgaagagaccagacaactccttttgtgcttacaagctagatttatctaaggccaatgatagggtggattggtgtttcttggagcaggctatgcataagataggtttctctaaccggtggattacttggataatggcgtgtgtttcctcggttaggtactctgtaaaattcaatggaaccctattggaagcatttgctccatcgcgtggactgcgacaaggtgatcccctatctccctttctttttctgtttgtggctgatggtttgtctgctttattaaaggaagcggtgcaaaatggtgaaataactcctgtgaaggtatgtcgtagagctccaggcgtgtcacacctcttgtttgctgatgacacacttctctttttcaaagctaactcagatcaagctaacatggtcaagaatgtattagagagctatgcagctagtactggacagctgatcaaccctcaaaagtgctctatcctatttggccatgcatgtccagaagagttacaggaagaagtaaagaatgtcctgcaggttggtaacgttacttttgaagagaagtacctgggcctcccaaccccggaaggacgaatgaaaaaagggaagtatcaacggctgcaagaacgtctgagtaagaaattgatgcaatgggcagagaaccacttgtctcagggtggtaaggaagtcatgatcaaagccatcgctcaggctatcccagtgtacgtcatgggggtcttcaaattaccagatggggtatgtgaagaactaactaagattattcggaacttctggtggggttttgataatggaaagaggaaggtgcactggaaagcgtggtctcaactcaccaaatcgaaaaatgctggtggtttgggatttagagacatgaaagcattcaatcaagctctgctcgcaaggcaagcatggaggttaattgataatcctgtcagcctgtgtgcaagagtgttaaaggccaagtattatccaaatggttgcctaatggacacggttttctcagttaaaactgcctaccgtttagccattgaaaataagctgaattccgaaaatagcaatgcttctggcagttcaattgaggggagtaaaagcttatggaatacaatatggtcttgtccggttcctccgaag

SEQ ID NO: 64964 - DNA, 3088 bp, Oryza sativa
  Clone ID: PAT_MRT4530_66058C.1
tggggggcactcgttgagggtgggtttcagaggtgtgggaggtcgcctccatggcggaggacaagggaggcctcgatgccgtcctcaaggagtcggtcgacttggagaacatcccgatcgaagaagtattccagaatttgaaatgctgccgacaggggctcacttccgaagaggcgcagctgcgcctgcaactttttggtccgaacaagctcgaggagaaggaggagagcaaattcctcaagttcttggggttcatgtggaatccgctgtcatgggtcatggaggctgcagctatcatggccattgcattagccaatggtggggggaagccaccagattggcaggactttgttggtatcatcacactgctacttatcaactcaactatcagtttcattgaggaaaacaatgctggcaatgctgctgctgcgctcatggcgcgtcttgcgccaaaagccaaggtgctccgaaatggtagttggactgaggaagaggcagccatccttgtgcctggggacatcatcagtattaagctgggagatatcattcccgcagatgctcgcctcctggaaggagatcctttgaagattgatcagtctgcgctgactggagagtcattgccagccaccaaaggtcctggtgacggtgtttactctggttcaacggttaagcagggtgagattgaggctgttgtgattgcaactggtgtgcacactttctttggaaaggctgcacatcttgttgattccaccaatcaagttggccatttccaaaaggttttaacagctatcgggaatttttgcatttgctcaattgctgtggggatgtttgttgagatcattgtcatgtaccctatccagcacaggccataccgccctgggattgacaacctattggtgcttctcattggaggcattcctatagcaatgcccacagtcttatctgtaaccatggcaatagggtctcatcgcttgtctcagcagggagctataacaaagagaatgactgcaattgaagagatggctggcatggatgttctttgcagtgataaaacaggaactctgactttaaataagctcacagtggacaagaatctcattgagatttttgaaagaggagtcactcaggaccaagtaattctgatggctgctagagcatcccgaacagaaaatcaagatgctattgatactgcattagtcgggatgctcgctgatccaaaagaggcacgtgctggtattcaagaggttcacttcctgccattcaatccgactgacaagagaactgcattgacatacattgatagtgatggaaagatgtaccgtgttagtaaaggcgcaccagagcagattctcaacctggcacacaacaagacacagatagaacgacgagtccatgctgtaattgataagtttgcagaacgtggacttcgatcacttgctgtagcatatcaggaagttccagatggaaggaaagagagtcctggtgggccatggcgctttgttgctctccttccactctttgatcctccaaggcatgatagtgcagaaacaattcgaagggcacttaaccttggtgtaaatgttaagatgatcacaggtgaccaactagcgattgggaaagaaacagggcgtcgtctaggaatgggtacaaacatgtacccttcatctgctttgttgggacagaacaaggatgagtctgttgctgctttaccagttgacgatctaatcgagaaagctgatggttttgctggtgtattcccagagcacaagtatgagattgtaaaacgtctgcaagcacggaagcacatctgtggaatgactggtgatggtgtaaacgatcctccagccctaaagaaagctgatattggtatagcagttgctgatgcgactgatgcagcaaggagtgcatctgatattgtactcacagaacctggcttgagtgtgatcattagtgctgttcttaccagtcgggcgattttccagcgaatgaagaactacactatatatgctgtctcgattacaatacgtattgtgtttgggtttatgctgcttgcccttatatgggagtttgatttcccgccatttatggttctgatcattgcaattctgaatgatggtaccataatgactatatctaaggatctagtaaagccttctccactacctgacagctggaagttggctgaaattttcacaactggagttgtgctgggtggatacttggcaatgatgactgttatattcttctgggctgcatacaagaccaactttttccctaggatctttcacgtcgaaagccttgagaagacagctccaagatgactaccaaaagcttgcatctgctgtatatcttcaagttagcaccatcagccaagctcttatctttgtcacaaggtctcgcagctggtcatttatcgaacgccctggctttctacttgtctttgctttcttcgttgcacagctgatagctacattgatagctgtttatgctaactgggcattcacttcaatcaaaggcattggatggggctgggccggtatcgtgtggctctacaatctcgttttctacttcccgctcgatatcatcaagttcctcatccgatatgctctgagtgggaaagcatgggatcttgtcattgagcagagaattgcgtttacaaggaagaaggattttggcaaggaagagagggaactcaagtgggcacatgcacataggacactccatggcctgcagccaccggatgcgaagcccttcccagagaagaccggctacagtgagctgaatcagatggcggaagaggcgaaacggagggccgagattgcaaggctcagggagcttcatacgctgaaggggcatgtggagtcagttgtgaagctgaagggcctggacattgataccattcaccagtcctacacagtgtgatagactcttatctaacaagagtaatatggttgctgcagaggaactgtttcgtttcatctaattagtagtttttatctcctctcagctaacataaatgtaatcaaccaacagttcatacaatctataaatcaaatcatcaaaggggattgttgagattatccgtttt

SEQ ID NO: 64965 - DNA, 448 bp, Oryza sativa
  unsure (1)..(448): unsure at all n locations
  Clone ID: PAT_MRT4530_66059C.1
cccacgngttcggtgaactatgcctgacctgatagagaaatccgcctncccaatnnncccgcgncccgctccacagtcccgcatcgccccccgcccccttcctcgctctcgctctccaaaccctaaccctaaccccaaccctggtcgtctcggagcatctagcaccggatcccgcggncccctcaccatcttcgcttgcgatctcactggtcgcgcctctattcacggccactgcggaccgttcccctccaaccggaacagcagcatngncatcgggacgggagcaggatccccatctggatcagcggtaaacaagtaggtgattggattggctttcttttatttggttgttttctgcactttgaacgaaagcaagcaaattatcccttcttttattttggttcgattcagaattgacaatacataataaatctgagtaaatgttaag

SEQ ID NO: 64966 - DNA, 2093 bp, Oryza sativa
  Clone ID: PAT_MRT4530_6605C.1
tttcagatttatgctctttggcgctccaggctcaagggtaaccttccgcctcccacttgtgcttatgttgaggatagaggctctgttgtattatcctgtcacaaggccaagatggaaaattaatgctagtcaagatgccacgcaagaaactggcctgattgatgcagaaattaattcttatgcctatagtgaaaggaagaacaggaaatacaacggcgcctacatcgataaagatggtgtatcaaggaccttcgatcgaaagaaaatatcaagaaaaagggggggtgctatgagaggccggggctggaagtatggctctggttttgtagatggagtcttccctgtgctcagtccaatggcacaggatatcttagaatttgttcagaagggaacagacgttgcaaaaatctgggaatctttggataacattccttccacacacaatctttttgatgatcttgtgaatgtcgctgtccaattccgtatgaacaagaaatgggatctgatcattccagtctgcgagtggatcctgtacaggagctcattccgtcctgacatcatctgctacaacctgctcatagaatcctatggcaagaagcgtcagctgaacaaggcagagtcaatctacatggctcttctggaagctcagtgtgtgccaactgaagacacctatgctcttctcctgcgcgcttactgcaacgctggatcgctgcaccgagcagaaggcgtgatctcggagatgcgcgagcacgggattcctccaaatgctactgtatataatgcttacttggatggattactgaaggcaagatgtaccgaaaaggcggtcgaggtgtaccaaaggatgaagagagaacggtgcagagctaacacggagacattcaccctgatgatcaatgtgtacgggaaggcaaagcaaccaatgtcatcgatgaaagttttcaacgagatgaagtcgattgggtgcaagcctaatatctgcacttacactgccctggtgaatgcatttgcgagggaaggcctgtgcgagaaggctgaagaagtgttcgaggagatgcagcaggcagggcacgagcctgacgtgtatgcttacaatgccctcatggaagcttacagccgcgctggattgccgcaaggcgcatcggagatcttctccttgatgcagcacatggggtgtgagcctgacagagcttcatacaacatcttggtagatgcatatggaagagccggccttcatgaagatgcggaggcggtgttcgaggagctgaagcagcgggggatgtcgccgacgatgaagtcccacatgctgctgctggcggcgcacgccaggtccggcaacgcgacgaggtgcgaggaggtgatggcgcagctgcacaagtccggcctcaccccggacaccttcgcgctgaacgccatgctcaacgcctacgcccgcgccggccgcctcgacgacatggagcgcctcttcgccgccatggagcgccgcggcgacgccgacgtgggcacgtacaacgtggcggtgaacgcgtacgggcgcgccgggtacgtggggaggatggaggcggcgttcgcggcggtggcggcgagggggctcgccgccgacgtggtgacgtggacggcgaggatgggggcgtacgcgaggaggaaggagtacgggcggtgcgtggggatggtggaggagatggtggacgccggctgctacccggacgccggcacggcgagggtgctgctggcggcgtgctccgacgagcgccaggtggagcaggtcaccgccatcgtcaggtccatgcacaagaagcccaagacactcttcaccatataataataaaaaaaaacccaacactttgcatatataattgcattattattacatgtataataatacagtataaatgtacattacaatactaccttagttttcttttaatgtatgccgccattaattctaaagtagcggctaaccattcatcttaattattttaaaaaaatattgtaaatatgctactatctctgttttttaatatggcgccccgtcctcatatatttagggatggagggagtaaattgtaagtcaaaaaaaaaaaaaaaaaaaa

SEQ ID NO: 64967 - DNA, 332 bp, Oryza sativa
  Clone ID: PAT_MRT4530_66060C.1
ctaaactccgtataaaagaaaacggcagcgaacaatatacgacccgacccaacttgtaagtcgcccccttgttatccgtatatatctctttaactctatatctaatctgatcaaatctaatctaacacaagtagaagttaccatccatccgttaatacaaggaaaaaaatgccgccacagaaaaaaataatttccaaaaaaatgcgcgggaaaaatacggtttccttcgtctgaaaaaaacaaaaaaaatgctattaaaactatcagaaagaaatacaccatttctaaaaaaatggtttcaaaaaaccacacaaaaaaaaaaaaaaaaaaaa

SEQ ID NO: 64968 - DNA, 213 bp, Oryza sativa
  Clone ID: PAT_MRT4530_66061C.1
atggacgacattctcgtgacctgcgagaactgcctcctgatgacaatgaagacaattaggaattatcgtagtcagaggttcgactcctggacctactaccttgtcttcgggccctctagaagtctggggatctcgagtttcttcgtcgtcatatgtcgagagattcctgtggtgagagatcgctacgatctactggtcgaggaccaggtgtag

SEQ ID NO: 64969 - DNA, 1888 bp, Oryza sativa
  Clone ID: PAT_MRT4530_66062C.1
agatatacatgagcgctcagaccaagcaagtaccaatctaacaatcgttctaaaggcaacagcattcaaccataacagcacacattcaaggacaaataaacttctgtaatcaaatgggaaaagcgctttataaagtgatagtgtgaacacaattttccactcccttttgcaacatccagcactaaggcgcgaaaacaccacaaataaggcagagtggtcaggcccccccccaaagaaaaaccaaaacacaaaccaacgcagaggagggaagagtgtagtcctttttagtttagagagggcaactagaatatctttttattttttttatttgaaaggcatatccaaaagttctcagtttgttcatcagcaccaggccttggctgtgcctttttcttctgtgttcagagttcaaaacgcttcaaaacaaacactccaaaatgttttcagaacaaggatgcaggcatgcacaacgatccatcgatcgatcgccgcaacagaaaaaaaaaaagaactctttcttggcgtcgccgcggcagcggccttcactgcagctgctcgcggaacaccgtgagcacgtcggcgaacgtgacgatcccggcgaggcggcagtcgtcgtcctcgtcgagcacccacaggtagctggcgcggtgggcgagcgcctgcatcatcacggccaccagcgagctcgccgggctgcacaccaccggctcctccgtcgagcggcgcccgtagctccccgacgacggccgcctcagccgcgcggcgcggccgtgggcctcgtcgtcggaggacgacgaggtggaggaggaggagaacgcgaaggaggacaccgcctcgttctccaccagctcgagcatggcgtcgaggcccttgctcttcagcccggccttgaccgcgcgaaggatgtgctccggcggcgcgccgaagtagtcgacgtacgccatgaggtcggccaccgacagcgtcgcgatggccgcggccgccgtctcgtcgcaggacgcgaggagcgcgggggagatctcgccgacgaggtggccgccgtcgtcgacgacggcgaccgcggtctccgtggcgatggcgcggcggaggaggggcacggcggacagggctgcctcgtggggccgcaccgtgaggaggtcgtcggcgcgcacgaggccgagggaggagacggagcggccggcgacatgggagaagagggagatggagttgaggaagtagcggacgaggtcctcctgcgtcaaccagcagtagtcgccgccgccgccgccaccgccgccgccgccgagctgcttcctccggccgccggagcggagagggacggcgagcacctgcgcgccgctcaagacggcatcaagcgcctccaacacactggcgcgggggtcgacgcggcggacctcgccggcgccgtccttggggaggagcgcggaggcgggcttggagagcgcggcggtggggtgggcgagcgcgcccggcgcggcgcagaggaagcagagcacgtcggcgagcccgagcctccccgcgacggcgcgcccggggccgacgacggcgacgcacgcggccgcccctcccgctgcctgctgcggtcccctcctgagcgccgcggccaggtccccggcggcggcggagagcgggagcgacctcaccgccggcttgccgatgcacaggtccgacacctcattagccagtaggcgcactgccatgcactcgcggggcgaacccttgtcggtttcgagatcgaaaccctcacaaacgatttcgaggaggaagaagagagacgagacgagacgaggttttttttgccacggaaatcgcggaggaggaagaagacgagacgagacgggatttttttttgcctcgtgccctcgtgccgaattcctcagcccggggg

SEQ ID NO: 64970 - DNA, 632 bp, Oryza sativa
  Clone ID: PAT_MRT4530_66063C.1
atggcgcttttgtggcattataataaaacaaaaggcaaaaaagtacgtgggacccatctgtcattcacagaaaatattgtgggggtcattggcatgtgggtcatacatgtcctcatcttcctcctctcatcccttctctctccttaccatcgcgtgtcaccccgcaccgggatgacgctcctcattgtcaccttcgaatggccacgacggggtcgacatcgtcggcgccgagctgtctcctctgttggcggagtcacccaacgacagcttgaggacaagagagaaggaaacggtgaggccggagccaagtacgaaggcgaggaaaaagtggcagggagaggcagttgggcccgcaggagacgtggagggaggggagtgtcggtgcggcggtggcgagcgaaggatggaggtcagtggggttgccagtggtggacaaaatgaaagacaaacttgttgatggcgccggcgtcgatgttgtaatgcttcttgtcgtcaccgagcatgcacacgcgcatccatggcgtgaaggtgttcacaatcaacgacgtacggatggtggagtcggagaggtcctggaacgcgtcggcgaagctacggaagtgttgacgaaaaaatcgaacacaccggtctag

SEQ ID NO: 64971 - DNA, 464 bp, Oryza sativa
  Clone ID: PAT_MRT4530_66064C.1
gggcctaaaaaggccaaaaatttattactcttatgggcccggcctttttggcgccagcatggggcctgaaagcaccaaaaaaaggggtaaaatgcatttttttagcccccgaggggggggggaaaccctaacatcccaagggcaaaagggggggaaacatttttggaccccaagggggatattcccaaacaaaaacggggaaaggggggggctcccacctaggaacccaaactaacagctaaagggggcggggaaaaaacccttttgggggttaaaacccaaggggggggggggggaaaaaaaatgccccgaaactgaaggggggcccacttggaaaacttgggggggagcccccggaccaacttggggggaaccaaaaccgggatcccgcccaccggggaacgcgggggggggaaccccaccacatttccggggaaaaaaattccttggggggtatgggggga

SEQ ID NO: 64972 - DNA, 207 bp, Oryza sativa
  Clone ID: PAT_MRT4530_66065C.1
ctacattgataagttcggatatacctcatcgtccccagaagcgtccgcaatccccattaaagaataccacctgtcatccctgtcctccggccgctcccgccgcctcgcccgtgccctagtgccgccgccgccgacgaatccgccgcatcccgccgtccccgcgcgcattgaagtggggggaattactccccgtgattccctcgccat

SEQ ID NO: 64973 - DNA, 287 bp, Oryza sativa
  unsure (1)..(287): unsure at all n locations
  Clone ID: PAT_MRT4530_66066C.1
aatgatgtgtcgctatggccagctagcatgcattaactttgtggccgacggagtagatgtgtcggtgtttgagtnaggttactacatctgtatacatacatgatacatggcttcttgcttcattgcttgattgtatctactgtacgggcatatcattgcaaaattttcgtcgcagtatggggactacttactactatgcacaagtatatgctgtacacccatgtgtaattgttcagtacatcgtgagaaataaatagtacttatgtgggataaaaaaaaaaaaaaaa

SEQ ID NO: 64974 - DNA, 390 bp, Oryza sativa
  Clone ID: PAT_MRT4530_66067C.1
agggggggcccgaccccccaaaattaaaatttccccccgatttcaagttgaacagaagacccccaaggagctctttaatttaaaaaaaccggccaaaaacaccaaggggttcataataacaaaaaaggtttttaaccccccccctcaaagggacacctagggcataaaaaaactcgaagggggggtccctaacaaattttgggcttaatggcccccccccaagttgggggccaaaccctttcccccgggcgggggagaacaatgctccataattccggcgggcattgactggccaacacccgggtacaatttgggaaaaaaggggttcagaaagccccccagccccttgaacttggaaaaaaacccaaaaaacccggggagggtggtggc

SEQ ID NO: 64975 - DNA, 624 bp, Oryza sativa
  Clone ID: PAT_MRT4530_66068C.1
aagaggagcaccaaggacggccgcgccggccacggcgacggcaagacctagcgcttcttcaccgagctcgaggccctccacggcgccgccgcctccgcgcgccccccgccgccggtgtccctcgcgccggcgcctgtggccatggcgcccgttggccacccctgcgggtctctcggcgttgcgcatccgccactccgcctcgccgtcgccggtcgccccactccgcccatcgccgccccgctccatcccgccggcttcgtgacgcggataatacagagaagagagggggtgagagaggaggggaaagaggaagaaaggtggataggagaggagaagaagaggctgacgtgtgggtcccacgctgagttagctgtcatgtcggagaaaaccggcgaggagatggcttacgtgccggtgtgcgtgcagtgcgggacgcacagcaacccgtgcaggtgcaaggtgctcggcccgacgctgggtttcgtggcgttcgtggtggccggcgtcgtggagtggccgctcggcgcgttcgtgtacctgttccgccaccgcaagggtcgccgcatcatggggcacccggccaacgtcgtctacccgcggatcaccagcgcgatccccatctaa

SEQ ID NO: 64976 - DNA, 545 bp, Oryza sativa
  unsure (1)..(545): unsure at all n locations
  Clone ID: PAT_MRT4530_66069C.1
tagggttctaagctgttgcagcgagcttaattaagcttaaatgaattgaagaaaggcgaaccatcgagcagccatcaacattaagcattgcttgttaattgtgctcgatctatgtagtagtagtagcagcttgttaaccagtctagattgtctttttttttttctcctacgaagcatggagtttgtcatctcagtttgggtaagaaaaactagtagcacctaatcagccatatatcgatgttcaagatccagtaactgagaattaattgacactaaaccaagtgtcaaagattgacctgatctggttactgcatcataagttttaagattgttgcaagttgttgattgaaacactctttgttttggagatgtaagccgtttctatttccatttccattatttgatcggtgttattatacacactgatacatattgagcgaaagcaaaagaggcccataacattatttagaaagtgttatgggcttgacattaaaatggatcggtccgnnttttccgccaaaaaaaaaaaaaaaaaaaaaaaaaaa

SEQ ID NO: 64977 - DNA, 2306 bp, Oryza sativa
  Clone ID: PAT_MRT4530_6606C.1
ttaagacgtggccgttacaaaggtggacctaaaatctctaagacacagcgctctcatgcacccccccggtctcatggccattagccagcgtggactccattctccttattgtcccgggtcagcacccacactcggctctcaaaaactaccgcgcatgcgttttatcgaaagggtgagaagcatgaggaaccattacccaaccctggagagacctaaatgatttccaaggaccgaagtggatgtaagggatgttaatcaatgctccgggtctcgtgcttgccatggagtaaatatcagcgggagaaagataatggaaagacctttaggcaatgtgtgaaaaaacagatgtctcggtgtgagcctcgatttgtggtcactaatgcggggagattgagatattacagtaaactagataaactaatccatcaaatacaatgatttcgttaagggggtatacacttatctggtgaacaggcaatacacacataattgtacgctgtgatggtagaaaaattctactaatcttatcaaagaaagtaaccaacacgacatgccaatcccaacaattccatatatttcttttcaaaggaacaataattccacatcaatcccagggtttgtgtccgatcgagactgcttggtcacacggacagacttgatcagaagcaagcctccaacaggcagcagcagcaaagtgcagccaagcatccctccatgaaggaaggcccgctgctgtggtgctgctgctgctgcggcggcggtggctgcgcgtacggcggcgggtagccctgctgcggcgggtacccctgctgcggagggtatccctggggagggtacccctgcgccggcggtgggtagccggccggcgggtaccccggcggcgggtacgcgtccttccccgggtacccttgcggcggcggcgcgcccaccggcggctgctgaccgtagtagctcatctctttctagtttagctggaggattacttttcccgttagctttggaagtcgaaatgtttctgaagacatatggcacatcaaaacccacaaggtacacattctccgaagttaagaagatagcgaggcgattcaaggacaaattgggccatggtgcatttggaactgtatataaaggtgagctaccgaatggagttcctgtggctgttaagatgctagaaaactctgtaggagagggacaagagttcatcaatgaagtcgcaaccattgggcgaattcatcatgcaaacattgtccgcctcctaggcttttgctctgaaggaacacgacgggctttaatatatgaactcatgcccaatgaatcattggagaaatatatattcccacatggttctaatatttcaagagaactcctagtaccagacaaaatgctagatattgcattaggcatagcccgaggaatggagtacctgcaccaagggtgcaatcagcgcattctccattttgacatcaagcctcacaacatactgttggactacagcttcaatccaaagatttcagactttgggcttgccaagctatgtgcaagagatcaaagcattgtcacattgactgcagcaagaggcacaatgggctatattgcaccagaactatattctcggaattttggagcaatttcatataagtcggatgtctacagctttggcatgctggtgttagaaatggtgagtgggaggaggaacacagacccaaccgtcgagagccaaaatgagttctactttcctgagtggatatatgagagagttatcaatgggcaggacctggtgcttaccatggagacaacacaaggagagaaagaaatggtgagacagctagcaattgtagccctagccttatggtgcattcagtggaacccaaaagaccggccttcaatgacaaaggtggtaaacatgttgacggggaggttgcagaatctgcaggtgccccctaagccttttatatcgtctcaaaatcaacttgtgatttagatcatgagaccgcatcgccatggtttggactttggagaccagcaaagcaatggagcttggccagcatttcctataaaatggcatcaccatggttttgtgcctgagtgacagataatccacatatcataaaatagttcttagtgagctgaagcatgcacatatagtgtttaattattaaactaaactgcgcaaccaggtatatgatatatcaccatgtactcatgtaattctgatatccagcaaacatatgccaatggattttatttgcaatataataatagttgatgacaactaaattaccttattcaaaaaaaaaaaaaaaaaa

SEQ ID NO: 64978 - DNA, 483 bp, Oryza sativa
  Clone ID: PAT_MRT4530_66070C.1
acaccaaagcttttctatgtaaattgcatcattggcactgaaatacatcaatccaccgttcatgtttaattgcaacaaatcacagccgtgtatctaaagattaagtgatgattaaccccaaaagaatttacaccaaaaactagtattattcacccaatctcatgagtcatgagaccacatttaaccactaaaccccctcaaaacccaaaccttaaaccccctccttaaacccagtttggtcctcacctcacctcaccgcctccggccgccgcactgcgacggcggccggcggcgacccctgccgcccttcgccgggcacgccgccaccaccggcggcggcggcgccacgcagttcatgtgcgcgcacacggcggcgctcgccgggacgccgcccacgccgatgccggtcaggaagttgtcctgcaagaagagcacccgcatccggccgccctccgccgccgcggggatctcccgcggcacctg

SEQ ID NO: 64979 - DNA, 132 bp, Oryza sativa
  Clone ID: PAT_MRT4530_66071C.1
atgcagtggcggagcggcgaggcggcatccgctccgggcaagacggcggatggaggctactgcagattctatcctcttcttttacctggagtgtggaagaactctgtgggtgcctgggtggcgttcagctga

SEQ ID NO: 64980 - DNA, 3258 bp, Oryza sativa
  Clone ID: PAT_MRT4530_66072C.1
atggctgcgggcgacagggtggcggatgatggggccacggcaggcgacggcgcggccaaatccagcagccctgtgcctccctccaccgcgccaccccttcgaccccgagcctggacacagttggagctgtgcaagcgatggcagatacagagccgccgatccgcgggcgtgctggtgaggaagaagacgaatccaactctgacggagcggatggaggtggcggagggagaaatcggtttcctgacgacgagggtgaccgagctcaccagcagcatcaactccatcctcggatcacttcaaggcatggagaagtggatccccacggtggatttgggcatgaaggatctacgtcaagctgtggatcaagtcaacgcgcgggtcgctcaacttgagacccgtgcacaagcgacgccagcaatggcgaagcaaacgcccgtagggcccggcgacgacgagaactaccagggtgatgctaccggggcaagctttgcccaggagcgaaccctggtcaagggtaaacacaagttccatcactcacctgtgcagtttgatttgagggaaaattctgagagagaaaactgtggatctcaaagctctgggaaatttggggggtctagattgcctaagactgatttccctaagtttgatggagagaatcctaagctctggaaaactaattgtgaaaaatacttcagcatgtatcatgttccttatgaaacatgggcttcctttgccaccttgcatttcactggcactgcagcacttcggctccaaacctatgaggagttgcattgcatagagagttggcctgaactagtggtagaagttcatagcaagtttggtagagataaatacgagcaacatttggaagaacaagaaggttttaagcaattagggggagtggaggaataccattccaaatttgaagagatcatgaataaagtcttagtttataataaggcttttgatgaaaccttttttgttactaaatttgttggtgggttgaaaagtgagattaaagcagctattaagctgcacaagcctagaactgttgatgctgctctatcacttgctaaaacgcaggaggacttgctgggagaaatcacagtgaagactgttggcagaactacatacaaagagcagtacaagcctgctgtcaagaccccattccttggtaaaggaattctgggccctagccctgatgagaacaagaaggtggaggaaaagcccaagtgggaagagagatttgattcactaaaagcagctagaagggctcgaggagagtgtttcaagtgcggggaaaagtatggccctggacacaagtgcccaaaatcggtgcagctgcatgttctggaagaattgctagaggtgttcctggcgcaagaagaggacagtaacaaggctgatgatgtggaaggaacaagtgatgaggaactggtactctctgaatgtgcagtctctggtacagttgggaaaaggaccattagactgcgggcttgttacagaatcaagagatacttgtcctggttgattctgggaaaaactttcaaaactgatctgaaggtgcttccactgggtggttatgacatgatccttggtatggagtggttggaggaattcagtcccatgtgggtggattggaagagaaagaaaatgagattcacttatgaagaaaagagaatcactctagttggggtcaaggaacaattgtttaccaatttgtgtgcactagaggagaaagggttggagcaaggactttccctagaggttcaggaagttctgaacaggttccaggacaggtttcaggaacctagaactttgccaccccatagacagtttgaccatggaattccactcatgccaggcacaaaactagtcaacctgaaaccttataggtactcccctggacagaaggatgagatagagagacaagtgtctcagatgctgaaacaagggatcattaaacccagtactagtccttttgcctcccctgtgttgttggtcaggaagaaggatgggacatggaggttttgtgtggattacaggggcctgaatgaggtgactgtaaagaacaaattcccaatgcctgtagttgatgagctgctggatgagttggctggggcacagtggttcacaaaacttgacctcaggtcaggttaccaccaaatcaggctgttggaggaggatgaatataagactgcatttagaacccaccatgggctatatgagtttagagttatgccttttgggctcacaaacgcccctgcaactttccagggattaatgaacacggtgtttgcaccattactcagaaaatgtgtgttggtgtttgttgatgacatcttggtgtacagcaattcattgcaggaacatgttcaacacttgcagcaagtgtttgagttgttgcaagatcatgggctgcctctcaccaacttgctcaagaaaggagtcagctacatctggggtactgaagagcaacaagcttttgtgttactcaaacaggctctgactcaggcaccagttctgaaactaccagactttcagaaggaatttgttatagaaactgatgccagtggaaaggggattggtgtagtattaatgcaggaagggcatcctttggcttatatcagtaaggctttgggggttaaatcacaggggttttcaacctatgagaaagaatgcatggccatattgctagctgtgggaaagtggagacagtatcttcagcacaatgtgtttactatacagactgatcacaagagccttatccatttaagtgagcagcagttgctcacaggaatgcaacaaagagcatttattaagttaatggggttgcagtacaaactgaaatacaaaaaggggcaagaaaataaagcagcagatgcactgtcaagaaaagaagaagataagagccaagctatatccacctgtgtaccaaaatggctggaaattgtacaagaaggatatgagaaggatgaagaagccaaacacttgttaactgagctcagtttgaatcctgaaggagttggggaatttcagttacaacgaggaattattaggcataaggggaagatttggctgggtaatcacctggaggctaagcaagcagtgatgttagctcttcatgacagtggcttgggtggtcactcaggaatccatgcaacttatcagagaataagggggctattcagctggaagggtcttaagaaggatgtccagcaatatgttctgagttgtgaaacttgtcaacaagctaag

SEQ ID NO: 64981 - DNA, 3189 bp, Oryza sativa
  Clone ID: PAT_MRT4530_66073C.1
atggctgcgggcgacagggtggcggatgatggggccacggcaggcgacggcgcggccaaatccagcagccctgtgcctccctccaccgcgccaccccttcgaccccgagcctggacacagttggagctgtgcaagcgatggcagatacagagccgccgatccgcgggcgtgctggtgaggaagaagacgaatccaactctgacggagcggatggaggtggcggagggagaaatcggtttcctgacgacgagggtgaccgagctcaccagcagcatcaactccatcctcggatcacttcaaggcatggagaagtggatccccacggtggatttgggcatgaaggatctacgtcaagctgtggatcaagtcaacgcgcgggtcgctcaacttgagacccgtgcacaagcgacgccagcaatggcgaagcaaacgcccgtagggcccggcgacgacgagaactaccagggtgatgctaccggggcaagctttgcccaggagcgaaccctggtcaagggtaaacacaagttccatcactcacctgtgcagtttgatttgagggaaaattctgagagagaaaactgtggatctcaaagctctgggaaatttggggggtctagattgcctaagactgatttccctaagtttgatggagagaatcctaagctctggaaaactaattgtgaaaaatacttcagcatgtatcatgttccttatgaaacatgggcttcctttgccaccttgcatttcactggcactgcagcacttcggctccaaacctatgaggagttgcattgcatagagagttggcctgaactagtggtagaagttcatagcaagtttggtagagataaatacgagcaacatttggaagaacaagaaggttttaagcaattagggggagtggaggaataccattccaaatttgaagagatcatgaataaagtcttagtttataataaggcttttgatgaaaccttttttgttactaaatttgttggtgggttgaaaagtgagattaaagcagctattaagctgcacaagcctagaactgttgatgctgctctatcacttgataaaacgcaggaggacttgctgggagaaatcacagtgaagactgttggcagaactacatacaaagagcagtacaagcctgctgtcaagaccccattccttggtaaaggaattctgggccctagccctgatgagaacaagaaggtggaggaaaagcccaagtgggaagagagatttgattcactaaaagcagctagaagggctcgaggagagtgtttcaagtgcggggaaaagtatggccctggacacaagtgcccaaaatcggtgcagctgcatgttctggaagaattgctagaggtgttcctggcgcaagaagaggacagtaacaaggctgatgatgtggaaggaacaagtgatgaggaactggtactctctgaatgtgcagtctctggtacagttgggaaaaggaccattagactgcgggcttgttacagaatcaagagatacttgtcctggttgattctgggaaaaactttcaaaactgatctgaaggtgcttccactgggtggttatgacatgatccttgcaaggcaactcaaagggatggcaaaggctggagcaatctctcagttggtgcagttgtgtgcactagaggagaaagggttggagcaaggactttccctagaggttcaggaagttctgaacaggttccaggacaggtttcaggaacctagaactttgccaccccatagacagtttgaccatggaattccactcatgccaggcacaaaactagtcaacctgaaaccttataggtactcccctggacagaaggatgagatagagagacaagtgtctcagatgctgaaacaagggatcattaaacccagtactagtccttttgcctcccctgtgttgttggtcaggaagaaggatgggacatggaggttttgtgtggattacaggggcctgaatgaggtgactgtaaagaacaaattcccaatgcctgtagttgatgagctgctggatgagttggctggggcacagtggttcacaaaacttgacctcaggtcaggttaccaccaaatcaggctgttggaggaggatgaatataagactgcatttagaacccaccatgggctatatgagtttagagttatgccttttgggctcacaaacgcccctgcaactttccagggattaatgaacacggtgtttgcaccattactcagaaaatgtgtgttggtgtttgttgatgacatcttggtgtacagcaattcattgcaggaacatgttcaacacttgcagcaagtgtttgagttgttgcaagatcatgggctgcctctcaccaacttgctcaagaaaggagtcagctacatctggggtactgaagagcaacaagcttttgtgttactcaaacaggctctgactcaggcaccagttctgaaactaccagactttcagaaggaatttgttatagaaactgatgccagtggaaaggggattggtgtagtattaatgcaggaagggcatcctttggcttatatcagtaaggctttgggggttaaatcacaggggttttcaacctatgagaaagaatgcatggccatattgctagctgtgggaaagtggagacagtatcttcagcacaatgtgtttactatacagactgatcacaagagccttatccatttaagtgagcagcagttgctcacaggaatgcaacaaagagcatttattaagttaatggggttgcagtacaaactgaaatacaaaaaggggcaagaaaataaagcagcagatgcactgtcaagaaaagaagaagataagagccaagctatatccacctgtgtaccaaaatggctggaaattgtacaagaaggatatgagaaggatgaagaagccaaacacttgttaactgagctcagtttgaatcctgaaggagttggggaatttcagttacaacgaggaattattaggcataaggggaagatttggctgggtaatcacctggaggctaagcaagcagtgatgttagctcttcatgacagtggcttgggtggtcactcaggaatccatgcaacttatcagagaataagggggctattcagctggaagggtcttaagaaggatgtccagcaatatgttctgagttgtgaaacttgtcaacaagctaag

SEQ ID NO: 64982 - DNA, 333 bp, Oryza sativa
  Clone ID: PAT_MRT4530_66074C.1
atggctttgtattctgctgcgttgttggttgtgtcgaactgcagccttgcagcgtaccgaatcggcacaccattcggcgaaatgaggactcccgcaatgcctgcccccttgtacgaccacgaactgtcggagcacatcacccagaattgttcgacgggctcgggctcgggggcgaataccagtgccgaggcccagccaggccgccccgccgccctcctctcccggggtcgccgacagggcaccccgaatcccgtccgccggtggccgtcgtcctcccgtgactcgccgtcgccgttcaccgtcgtcttcctccgcgccggccaccctcggtga

SEQ ID NO: 64983 - DNA, 423 bp, Oryza sativa
  Clone ID: PAT_MRT4530_66075C.1
atggcgacacctctttgcttgatttcatttggggtttggccgttgtcctttgggaaatcggagctgctgcgcgattgcgagcttggcagcgatgacccaagtcttacccgcgtcagtcgtgttttgctccagtgtgaggtgtcggagctgcggcatcgacggggcgtgacatgcggcaacgatgacatgagcccttttgaattgtgcttcagcgcgaagtcggagccgcccgatcacgtaggtgatggtgtgatgacgataatgtcaactcacttgcaagtgttcccggattgggcgtgcgtccacgtgaagcggcacatcacatgtgctgtgcacgcgcgcaaactggcaacctgcaggcagcagctagccgcgcaaatgcatcagttcaccaccaccgcccatatgcattcatggtcctaa

SEQ ID NO: 64984 - DNA, 648 bp, Oryza sativa
  Clone ID: PAT_MRT4530_66076C.1
atggcttttctgagggcactctctcctctcgtcttcaccctgctcctcctactcgccgcctccacatccgacgcctccatcttggaggaaacctgcaagtcgctcgccggtaaccacacggccatcgactacccctactgcgtcaggttcttccaggccagcaaggagagcgccaccgccgacacgcacggcctcgccgccatcgccgtgaggatcaccgaggcggccgccgagggcaccgccaagcgcatcgccgccctgcgatcctcgcacaaggaggagaagatgcaggagtgcctccgcataagctccgacctgtacgcctacatgctggccgttctcggcaacgaggcgaaagccgccgccctggtggacggcggcgcgcagcatgcggcggcgtcgccgccaacgcccgacgtcgcgcggtatgtcgcggatggttgcgagggcaggttccgtgggaacaaggagaccctgccgctggttgcggagtacgccgagtttagacagagtgcgtccattgctctcgcattgatagaggcgatatcaccaccgagtgatcagtgaatgtgtgtttttactctcagattttgtaagccaaacaatgtagatgaataaacatggcaattatcaaaaaaaaaaaaaaaa

SEQ ID NO: 64985 - DNA, 2693 bp, Oryza sativa
  Clone ID: PAT_MRT4530_66077C.1
ccacgcgtccgattcatcaccaggttgaagatgaaaagtcggcagacacagagaacaatagcgcagaatctgaagctgtgcaaccaaaacttgatataacgattgctgagacaaataatgacaataatttgtctacaatcaatcccttgcctgagcatgaaacagaaaatgcctcagatataaatcaaaacagacaatatcaggaagcaaccaatgaagatgctatcgacaacattgaaactggtcgtgtcgagaaaatggagacaagctatactgcaacaactgaagtggtcacactcaatgaagatatctgcgataaggctagtggagctgatggagtaccacctgatggaagtcttaagacatctgaggacaaccttgatgtttcatctgtagttacagaatcagagggagaaaatattaacaaggagacggaagatcacaagcttgctcttcctgtgcatcctacacaggatgaaaacacaactgagcagggatttggtttggaagatacagaaaaagagtccatgtcaccagagaaggcactgcctgctgaaccagaggagcaagaagagaatcaagtaaccaaagaacaagatgaagaagacaggcatgatgcagaacttggtgatgcacatgaagaagatcacaaagaagctgaacaagattatttgcctgtctctagtttcctgatgaacctaatattgggaaaagacaatgatgatccaaagaaagattcagaaaccgaggttgaaaaggagcaagaagaaacaacgaaggatggaagttgtttgatcgcttctcaacaagaagaaaatttggtggcatttcctatagaaaaatcggtggatgaaaaactcacctttgaacaagaaaaagaaaaggtagaaggctctgaagaaacaaaagaaccagtaaaagaacagagttatgatgtcgagatggacgtccaaaaatcattggaaactgatgaagagctcaaaaggaacacttgtgatttggaagcaccagtataccaagataatgcccaggatgaaatttctagcaaactgatatcagccaaggcagctgatccgatcaaaaaaatggaagctagagactttgaattggatgaagagtcatttgatacagtttgtcaggaaaacgtggaagcagcaacagaaattgaagacggaagcttgaatagggaccaagatgacataacaagcccaaaggcttcacaagaggatgctttggaggaagtaggaacagaacttccgcatgagtctttacatgaaaatagacatggtgcaaaggatgagcaaacactctccttgatagaacccgatacaggcaacgctgaaaaattgcctaacgaggctgacagtgttcaaagccctccttgcacagaacaagaagagtccattgaatcttcctatgttgaagtgagaagtactactgagggtcaagtggagagtgaagtaatagaaacgaatgaggaggaccagcatacgaccgcaggtggacatactgaagaacagatagaaaatttacatgatgataagtcgaaagaaacatgttctgaagaaatatctgatgagcaggcacctgaaataactgaaccagttagccacactgatcgaaattttgcttatgaaaaggaaattcctgcaagttcgacatgcatggacaagaaagagagtatgatctcaaacaatgaagtcagcaactttgaaaaagcccttgagacacactcagatagtccaaatttgcatgttaaccaagataagaaagatgaaacagctgataaccaaactgtggtggaccataacaccgtgttagacaagcttgaagattctaatcggcaggaggagcaggaaactgctgcacagaagttaccaaaagaaactgaaggaaaccaggaatttatggcaataacagagcctgtgatcaaagaagagaatgtacatgaaacagttgaaggtaacactcaagcagtgaagataaaatctaatgaagagaaagaactttttgattcacaggttcaggaacgtggtctcaatgtggtttcacccaaagcaacttctgaggccgacgaaaaatttgtggagataacaaagccagaattcagcacagatgaagaacatagtccaaaggcggatgaatcaaataagccagacgagaatacttgtgatgagaaaacaaaggctgaagaggaaactaataatatcactgatgaagcaacagtgaaaatagaagaacgaggagcagaacagaaggtatcacataaaaaacataacattttgtctggtgttggatcaaaggtgaagcatcaactagcaaaagtgaagaaagccatcataggtaaacctgggcacacaaagtctgaatcaccaaaatcataaaattgattcaccttagagcatgtaattcttgtacaatatgtatttttgtaaggaatttatgtgaggtgtaggatattgcaatgggtttagtgaaccatctgtaattttgtatgaacgattcattcaaaggttgtgttcttaaggacgcttgtaaatataggcaggcagtgtgtagttcaagtttccataaactttgtaattgtttcaccaacttggtgtgaggtgaacaacatgtacatggcatattgtttttgttacttcctcattgatatgcatgtgttgttttgtggtaaaaaaaaaaaaaaaaaa

SEQ ID NO: 64986 - DNA, 363 bp, Oryza sativa
  Clone ID: PAT_MRT4530_66078C.1
atgtggggagtgtgctgttgcttctggtgcttaggcttgggaaataaggaagagtggagtgggggagtgagagagagagagaggtggctggtgcactcattgtgttccttgagcatccattgggcatgggggacggtgtttgctgtgaggggagagtgggaggctgtcatatgggtcccagggggtgtggggcccactgtcagtgaaagattcgaaaatagccttggaggccaagtcaaagagggttgcctgccaaggatctttggaagggattcaaggtggattttgtgcagcaagaaatctgggctaggtatcctcttggtctggggtgatgtggagagtaaatgtgctgaagtgggttga

SEQ ID NO: 64987 - DNA, 288 bp, Oryza sativa
  Clone ID: PAT_MRT4530_66079C.1
cctatctttaatctcgcccttcctcctcctccgagcgatggagtcctagacctgtcccggccgtagacgcgcgcgcgaaggagagagagagagggagagagggagggagatcgcctagccgcctcggcgtagggacccggatgtgtgagaacgaggatgttcttctgaattttgtatagcgggcgtgcgcgcttgtgcagatctcgtcctacaactcgtacgccatcggcatagccgccttcatcggtgcattcgtcctctgcgccgactgggggatctttatcaagg

SEQ ID NO: 64988 - DNA, 341 bp, Oryza sativa
  Clone ID: PAT_MRT4530_6607C.1
acccaaaaacagtgagggtagacccccacggtatatatataaaaaggagatcagaaagtatttacaaggaaaacaacaaaaccaaaaaaaaaaaagttacaacaggtcaatccatgattgaactaaaggccgaaaggattcctagaacctaattaaatgtaggtttagatcagacttcaggttgctcttccaacttgagatagagggctgaatgccttggaaaattatactattcctctccttccaaatgttccaagcagcaagaagaaacaaatccatgaaagcttggtgcggcaaagacgaacggaggttgtgaagcatctgatgaaactccaaagatg

SEQ ID NO: 64989 - DNA, 333 bp, Oryza sativa
  Clone ID: PAT_MRT4530_66080C.1
atgcacatcttggtgataagagattgcgacatcgtagccatcctgatttctgcagttctcattcaagaaaaggaaaaggagactttgacccatcgactttttaacaccgtcgatttcaggaacaaaaaaaagaaaaagccatcacggtcagtatctgtgcctgtcaagagctccaggaaatttccacgaaataggctgaatcagctggagtggttcacgtcgtcgtctggtcaactttatacacggtttcgatgttgttggacggacggactgagagatgatgggctggcccaagcctattacactacggcccaagagtacgtttccccgtcc

SEQ ID NO: 64990 - DNA, 3408 bp, Oryza sativa
  Clone ID: PAT_MRT4530_66081C.1
atgccgcgtcgtcgctcgtcgtcaccgatcgtgcgcactcctcatgactccggcggccgcgccacgggcagcggcgggggtgaccgcgggctggtgatccaccgcgtggtgaaagaaggaggcggctcggtgaactacccgctgctgaccaagaccaactacaacgactgggcgctactgatgaagatcaagctgcaggctcactgcctgtgggcggcgatcgagcccgacggcgtggacgtccctctgcatgaggaccggatggctcttgacgctatctgcagtgccgtgccgccggagatgattggcaccctggcgaccaaagcgtcggcccgggaagcctgggaatgcatcaagacaatgcgagtcggcaacgaccggattcgcaaggcgagtgcacagaaagtgcgcgctgagtatgaatcgcttgcgttccgcggtgacgagaccgtggaagatttcgctctatggctcacaaccatcgtcaaccagcttgcaaccctcggtgatcctgaacctgctgataaagtcatcgaaaagtaccttcgggtagctcgtcccaggttcaatcaactcatcttgtctattgaaactcttctcgatatctctactctgtccatggaggaagttactggcagactgaaagccgctgaggattctgggcaatcctcgtcgcacaccgccggtgggaagctgtacctaactgaggaggagtgggctgaacgtcagaagaagaaggatcaagaggcaaagcggggtgactcgggcggctctggcggccgcggcaagcgccgtggcgggagagggcgcactggtggcggcgggactgcgagccccgagagcacgaactctggttcggcgcgcaagggagacaaatgccgaaattgcggcaaacttgggcactgggcgaaggactgtaggagcaagtccaagcgcgaagaacaggctcacgtcgcccaggaggatgaagaagagcacaccttgatgttgctcaccggcggccgcgttgacacggtcgacgcggcggcgccggagggcgacacgcccacaccgccccaccaagccgtggtggaactcgtggagatgaaagtatttccagcgctcgacgacgtggctgaccatgatcccgggcgctggattatggattccggcgcgtcaaaccatatgacgggcagcaggatggcgttcgccgacctcgacacgaacatcaccgggaacgtgcgactcagcgatggatccgtggtccggatcgcaggacggggcacaattctctttgcctgcaagaatggtgagcaccgcactctgtcgaacacctattatcttccccgtcttgctgccaatattatcagcattgggcaattggatgagaccggcttcaaagtgctggcggaggatggcatcatgcgggtctgggatgagcagcggcgtctgcttgcccggatccctcgcaccccagggcgactgtacatgcttgacatcaacctggcgcgcctggtctgtttggcggcacacgccgacgaagacgcgtggcgctggcatgctcgcctcgggcacataaacttcagggcgctctgcaagatgggcaaggaggagctggtacgtggtctaccatgtttgtcgcaggttgatcaggtctgtgaggcctgtctcgccgggaaacaccggaggtcgccgttcccgcggcaggcactttgccggtctgacgagccgctggcgctgctacatggagatctctgtggaccgatcacgccggcgacacccagtggcaaccgctatttccttctactcgtcgacgactacagctggtacatgtgggtcgccctcctctccaccaaagatgcggcgccggctgccatcaagcgtattcaggcggcggcagaaaggaagagtggacgcaagctccgcgcgttgcggacggatcgcgggggagaattcacgtctacacagttcgccgagtactgcgccgagctgggaatgcggcgcgagctcacggcgccctactctccgcaacagaacggcgttgtcgagcggcgaaaccaatccgtggtgggcacggcgcggagtatgctcaaggcgaaggggctaccaggtatgttttggggagaggcgataaataccgccgggtatctgctcaacaggtcgtcgtccaagggtatcggcggcaagaccccgtacgcgctgtggaatggcgttccgccggccgtgcaccatctgcgcacgtttgggtgtgtggcacacgtgaagacgaccaccccgaacctgaagaaactggatgacaggagttgtccaatgatctttgtcggctacgagccggggtccaaggcgtatcgcgcctatgatccggctactcggcgtgttcacatctcccgtgacatcgtcttcgacgaagcggcccagtgggactgggatgctgaggcggccgctgatctcgacaccgacttcgtcgttgagtacaccacggtgtaccatcctggctcgctgtcaggaacacgccaagatgctggggagccgcctgctcgatcttcatcatcgccgcgaacgccatcagactcaccgacagccggccgaacaccttcggtgcatggcgatgcgccggcggttgattttgtgtcgccaccaactggagcagctgctaatcttgatgcagaccacgacgacgcaccactccgtttccgcacgatggacaatgtgctggggccggccatgctgccaggtctcgctaatcgtgaggtccaggaagagctgatgatggtgagcggagaagaaccggcaacgttcgctcaagctgaacgcgacgaggattggcgtcgggcaatgctcgatgaaatctcttcgatagaggagaacaagacctggaggctcgtcgatctgccttcgggacatcggccaattgggctgaaatgggtgtataaactgaagaaagatgctcagggcgtcgtcgtcaaacacaaggcgagattggtggcaaagggctacgtgcagagggctggaattgactttgatgaggaaggttggatggtgcatcatatggacgttaaatcagcgttcctcaatggggaactgattgaggaggtgtatgttgttcagccaccggggtttgagatcgatggacaggagaacaaggtttacaggcttgataaggcgttgtatggtcttcgccaagcacccagagcttggaacaccaagctagactgcacactgaagaaacttggcttcaagcaaagcccgttggagcatgggctgtacgcgcgcggcgatggcagtgggcgactgctcgtcggtgtgtatgtggatgatctggtaattgtcgggggtgacagtggcatgatcaagggattcaaagagcagatgaaggctgaatttaagatgagtgatcttggtcctttgagtttttatcttgggatcgag

SEQ ID NO: 64991 - DNA, 163 bp, Oryza sativa
  Clone ID: PAT_MRT4530_66082C.1
gtgagattgtagcgagggtagctcgccacagcgtgttctttgctttgaggcgccagcgcagtcgagcctgcaggctgccacgcccggaggatactatctatcattttggcaccgcgatggaactctaacagagtaccctggtataccatgacagagaccctgt

SEQ ID NO: 64992 - DNA, 9084 bp, Oryza sativa
  Clone ID: PAT_MRT4530_66083C.1
atgccgcgtcgtcgctcgtcgtcaccgatcgtgcgcactcctcatgactccggcggccgcgccacgggcagcggcgggggtgaccgcgggctggtgatccaccgcgtggtgaaagaaggaggcggctcggtgaactacccgctgctgaccaagaccaactacaacgactgggcgctactgatgaagatcaagctgcaggctcgctgcctgtgggcggcgatcaagcccgacggcgtggacgtccctctgcatgaggaccggatggctcttgacgctatctgcagtgccgtgccgccggagatgattggcaccctggcgaccaaagcgtcggcccgggaagcctgggaatgcatcaagacaatgcgagtcggcaacgaccggattcgcaaggcgagtgcacagaaagtgcgcgctgagtatgaatcgcttgcgttccgcggtgacgagaccgtggaagatttcgctctacggctcacaaccatcgtcaaccagcttgcaaccctcggtgatcctgaacctgctgataaagtcgtcgaaaagtaccttcgggtagctcgtcccaggttcaatcaactcatcttgtctattgaaactcttctcgatatctctactctgtccatggaggaagttactggcagactgaaagccgctgaggattctgggcaatcctcgtcgcacaccgccggtgggaagctgtacctaactgaggaggagtgggctgaacgtcagaagaagaaggatcaagaggcaaagcggggtgactcgggcggctctggcggccgcggcaagcgccgtggcgggagagggcgcactggtggcggcgggactgcgagccccgagagcacgaactctggttcggcgcgcaagggagacaaatgccgaaattgcggcaaacttgggcactgggcgaaggactgcaggagcaagtccaagcgcgaagaacaggctcacgtcgcccaggaggatgaagaagagcacaccttgatgttgctcaccggcggccgcgttgacacggtcgacgcggcggcgccggagggcgacacgcccacaccgccccaccaagccgtggtggaactcgtggagatgaaagtatttgcagcgctcgacgacgcggctgaccatgatcccgggcgctggattatggattccggcgcgtcaaaccatatgacgggcagcaggatggcgttcgccgacctcgacacgaacatcaccgggaacgtgcgactcggcgatggatccgtggtccggatcgcaggacggggcacaattctctttgcctgcaagaatggtgagcaccgcactctgtcgaacacctattatcttccccgtcttgctgccaatattatcagcattgggcaattggatgagaccggcttcaaagtgctggcggaggatggcatcatgcgggtctgggatgagcagcggcgtctgcttgcccggatccctcgcaccccagggcgactgtacatgcttgacatcaacctggcgcgccctgtctgtttggcggcacacgccgacgaagacgcgtggcgctggcatgctcgcctcgggcacataaacttcagggcgctctgcaagatgggcaaggaggagctggtacgtggtctaccatgtttgtcgcaggttgatcaggtctgtgaggcctgtctcgccgggaaacaccggaggtcgccgttcccgcggcaggcactttgccggtctgacgagccgctggcgctgctacatggagatctctgtggaccgatcacgccggcgacacccagtggcaaccgctatttccttctactcgtcgacgactacagccggtacatgtgggtcgccctcctctccaccaaagatgcggcgccggctgccatcaagcgtattcaggcggcggcagaaaggaagagtggacgcaagctccgcgcgttgcggacggatcgcgggggagaattcacgtctacacagttcgccgagtactgcgccgagctgggaatgcggcgcgagctcatggcgccctactctccgcaacagaacggcgttgtcgagcggcgaaaccaatccgtggtgggcacggcgcggagtatgctcaaggcgaaggggctgccaggaacacgccaagatgctggggagccgcctgctcgatcttcatcatcgccgcgaacgccatcagactcaccgacagccggccgaacaccttcggtgcatggcgatgcgccggcggttgaatttgtgtcgccaccaactggagcagctgctaatcttgatgcagaccacgatgacgcaccactccgtttccgcacgatggacaatgtgctggggccggccatgctgccaggtctcgctaatcgtgaggtccaggaagagctgatgatggtgagcggagaagaaccggcaacgttcgctcaagctgaacgcgacgaggattggcgtcgggcaatgctcgatgaaatctcttcgatagaggagaacaagacctggaggctcgtcgatctgccttcgggacatcggccaattgggctgaaatgggtgtataaactgaagaaagatgctcagggcgtcgtcgtcaaacacaaggcgagattggtggcaaagggctacgtgcagagggctggaattgactttgatgaggtattcgctcctgttgctcgtcttgattctgttcgtttgttgctcgctctcgctgcgcaggaaggttggatggtgcatcatatggacgttaaattagcgttcctcaatggggaactgattgaggaggtgtatgttgttcagccaccggggtttgagatcgatggacaggagaacaaggtttacaggcttgataaggcgctgtatggtcttcgccaagcacccagagcttggaacaccaagctagactgcacactaaagaaacttggcttcaagcagagcccgttggagcatgggctgtacgcgcgcggcgatggcagtgggcgactgctcgtcggtgtgtatgtggatgatctggtaattgtcgggggtgacagtggcatgatcaagggattcaaagagcagatgaaggctgaatttaagatgagtgatcttggtcctttgagtttttatcttgggatcgaggtacatcaagaagctggaatcatcactttaaagcaagcagcgtatgcgtcgcgtattgtggagaaggctgggctcaccggctgcaacccctgtgcaacaccgatggaaccacgtctaaagctgagcaaggaaagtgcaggatcgctagttgatgcgacagaatacagaagtctagtgggaagcttgcgctatctggtgaacacccgaccagaccttgcatattcggttggttatgtcagtcgtttcatggagaaacccacggacgaacacttggcggcagtgaagcgcatcataaggtatgttgctggtaccattcatcttgggtgccgctatgtgaaggaaggtgaaggaggactgcagggttacagtgacagtgatatggctggagacattgacactcgcaagagcaccacaggagtaattttctttctcggcaaaaatcctgttagctggcagtctcaaaaacagagagttgtagcactctcctcctgtgaatctgagtatattgcagctgcaacagctgcatgccagggcatttggcttgcccggctcctcggtgacctcaggaatgcagcaactgaagtcgtcgatctcagggtggacaaccaatccgctctggccctgatgaagaaccctgtttttcacgatcgaagtaagcacattcaaacaaaatttcatttcattcgtgaagccgtggagaatggggaaatcacaccgagttacatcggcacagaagggcaacttgcagatatcctgacgaagccgctttctcgaatcaagtttcaggagctgcgggaacaaattggtatgtttcctgtataatcggcacatcaagcttagggagagttttgttagcagtaatcttgtgtgccacggttagttagttgattagttatctgcatgtttccgtttttttttcgaataaacgcatgggaaaagaacttctgggcgcgacaccacggcactccggagcacgctccaagcgccgccgcagccgacatcgtcgtcgttccgaccaccgtagaccaaaccaagccgagccgtcgcgccaacgtcttctctgttagcagtaatcttgtgtgccacggtttagccacacgatcgctggggaaattcctaacaattggtatcagagcacggtttaggaagtggactcgtgaccgcgcattggaaggcgtcttcatgccgcgtcgtcgctcgtcgtcaccgatcgtgcgcactcctcatgactccggcggccgcgccacgggcagcggcgggggtgaccgcgggctggtgatccaccgcgtggtgaaagaaggaggcggctcggtgaactacccgctgctgaccaagaccaactacaacgactgggcgctactgatgaagatcaagctgcaggctcgctgcctgtgggcggcgatcgagcccgacggcgtggacgtccctctgcatgaggaccggatggctcttgacgctatctgcagtgccgtgccgccggagatgattggcaccctggcgaccaaagcgtcggcccgggaagcctgggaatgcatcaagacaatgcgagtcggcaacgaccggattcgcaaggcgagtgcacagaaagtgcgcgctgagtatgaatcgcttgcgttccgcggtgacgagaccgtggaagatttcgctctacggctcacaaccatcgtcaaccagcttgcaaccctcggtgatcctgaacctgctgataaagtcgtcgaaaagtaccttcgggtagctcgtcccaggttcaatcaactcatcttgtctattgaaactcttctcgatatctctactctgtccatggaggaagttactggcagactgaaagccgctgaggattctgggcaatcctcgtcgcacaccgccggtgggaagctgtacctaactgaggaggagtgggctgaacgtcagaagaagaaggatcaagaggcaaagcggggtgactcgggcggctctggcggccgcggcaagcgccgtggcgggagagggcgcactggtggcggcgggactgcgagccccgagagcacgaactctggttcggcgcgcaagggagacaaatgccgaaattgcggcaaacttgggcactgggcgaaggactgcaggagcaagtccaagcgcgaagaacaggctcacgtcgcccaggaggatgaagaagagcacaccttgatgttgctcaccggcggctgcgttgacacggtcgacgcggcggcgccggagggcgacacgcccacaccgccccaccaagccgtggtggaactcgtggagatgaaagtatttgcagcgctcgacgacgcggctgaccatgatcccgggcgctggattatggattccggcgcgtcaaaccatatgacgggcagcaggatggcgttcgccgacctcgacacgaacatcaccgggaacgtgcgactcggcgatggatccgtggtccggatcgcaggacggggcacaattctctttgcctgcaagaatggtgagcaccgcactctgtcgaacacctattatcttccccgtcttgctgccaatattatcagcattgggcaattggatgagaccggcttcaaagtgctggcggaggatggcatcatgcgggtctgggatgagcagcggcgtctgcttgcccggatccctcgcaccccagggcgactgtacatgcttgacatcaacctggcgcgcccggtctgtttggcggcacacgccgacgaagacgcgtggcgctggcatgctcgcctcgggcacataaacttcagggcgctctgcaagatgggcaaggaggagctggtacgtggtctaccatgtttgtcgcaggttgatcaggtctgtgaggcctgtctcgccgggaaacaccggaggtcgccgttcccgcggcaggcactttgccggtctgacgagccgctggcgctgctacatggagatctctgtggaccgatcacgccggcgacacccagtggcaaccgctatttccttctactcgtcgacgactacagccggtacatgtgggtcgccctcctctccaccaaagatgcggcgccggctgccatcaagcgtattcaggcggcggcagaaaggaagagtggacgcaagctccgcgcgttgcggacggatcgcgggggagaattcacgtctacacagttcgccgagtactgcgccgagctgggaatgcggcgcgagctcacggcgccctactctccgcaacagaacggcgttgtcgagcggcgaaaccaatccgtggtgggcacggcgcggagtatgctcaaggcgaaggggctgccaggtatgttttggggagaggcgataaataccgccgtgtatctgctcaacaggtcgtcgtccaagggtatcggcggcaagaccccgtacgcgctgtggaacggcgttccgccggccgtgcaccatctgcgcacgtttgggtgtgtggcacacgtgaagacgaccaccccgaacctgaagaaactggatgacaggagtcgtccaatgatctttgtcggctacgagccggggtccaaggcgtatcgcgcctatgatccggctactcggcgtgttcacatctcccgtgacatcgtcttcgacgaagcggcccagtgggactgggatgctgaggcggccgctgatctcgacaccgacttcgtcgttgagtacaccacggtgtaccatcctggctcgctgtcaggaacacgccaagacgctggggagccgcctgctcgatcttcatcatcgccgcgaacgccatcagactcaccgacagccggccgaacaccttcggtgcatggcgatgcgccggcggttgaatttgtgtcgccaccaactggagcagctgctaatcttgatgcagaccacgacgacgcaccactccgtttccgcacgatggacaatgtgctggggccggccatgctgccaggtctcgctaatcgtgaggtccaggaagagctgatgatggtgagcggagaagaaccggcaacgttcgctcaagctgaacgcgacgaggattggcgtcgggcaatgctcgatgaaatctcttcgatagaggagaacaagacctggaggctcgtcgatctgccttcgggacatcggccaattgggctgaaatgggtgtataaactgaagaaagatgctcagggcgtcgtcgtcaaacacaaggcgagattggtggcaaagggctacgtgcagagggctggaattgactttgatgaggtattcgctcctgttgctcgtcttgattctgttcgtttgttgctcgctctcgctgcgcaggaaggttggatggtgcatcatatggacgttaaatcagcgttcctcaatggggaactgattgaggaggtgtatgttgttcagccaccggggtttgagatcgatggacaggagaacaaggtttacaggcttgataaggcgctgtatggtcttcgccaagcacccagagcttggaacaccaagctagactgcacactgaagaaacttggcttcaagcagagcccgttggagcatgggctgtacgcgcgcggcgatggcagtgggcgactgctcgtcggtgtgtatgtggatgatctggtaattgtcgggggtgacagtggcatgatcaagggattcaaagagcagatgaaggctgaatttaagatgagtgatcttggtcctttgagtttttatcttgggatcgaggtacatcaagaagctggaatcatcactttaaagcaagcagcgtatgcgtcgcgtattgtggagaaggctgggctcaccggctgcaacccctgtgcaacaccgatggaaccacgtctaaagctgagcaaggaaagtgcaggatcgctagttgatgcgacagaatacagaagtctagtgggaagcttgcgctatctggtgaacacccgaccagaccttgcatattcggttggttatgtcagtcgtttcatggagaaacccacggacgaacacttggcggcagtgaagcgcatcataaggtatgttgctggtaccattcatcttgggtgccgctatgtgaaggaaggtgaaggaggactgcagggttacagtgacagtgatatggctggagacattgacactcgcaagagcaccacaggagtaattttctttctcggcaaaaatcctgttagctggcagtctcaaaaacagagagttgtagcactctcctcctgtgaatctgagtatattgcagctgcaacagctgcatgccagggcatttggcttgcccggctcctcggtgacctcaggaatgcagcaactgaagtcgtcgatctcagggtggacaaccaatccgctctggccctgatgaagaaccctgtttttcacgatcgaagtaagcacattcaaacaaaatttcatttcattcgtgaagccgtggagaatggggaaatcacaccgagttacatcggcacagaagggcaacttgcagatatcctgacgaagccgctttctcgaatcaagtttcaggagctgcgggaacaaattggtttagccacagtacgccgatcgctggggaaattcctaacattggagcggtcgaggtatctcgtggacgactgcttcacggtcaggtgcgacatcgtcatcctcgccggcgccgccgccgctcctcctccgtcatcgtcgttgttcggcgcggtggagagcttcgggcgcctcctcggcagggaggagggcgccgacgtgacgttcgaggtcggcggcgagacgttcaccgcgcaccggtgcgtgctcgcggcgcggtccaaggtgttcgaggcggagctcttcggccccatgagagaaggcgcggcggcgagcgtcgtgcggatcgaggacatggacgccgaggtgttccgtggacttcttagcttcatctacaccgacgtgctgcccgaccaaggagacctcggcgacgaagcgcacgagtggcacgacgacgacgacgacgacgagggaggaggagattgcgacatggctgcagaaactgaccgtagccgcggacagatacgatctccagaggctgaagctgctgtgcgaggaggagatgtacgactacattag

SEQ ID NO: 64993 - DNA, 593 bp, Oryza sativa
  Clone ID: PAT_MRT4530_66084C.1
aactatctcaccttccttctattctattctattccctctggcttagcttgtttttatcagttcttacctttcttgattctcctctcctctcctctgccatggagtcatcccatatcactggggatgatggcgagggctgcaacagcagcgagtccgggtggacaatgtaccttgcctctcccatgcacggcgacgatgacggcggcggcaaaaggagcggcagcgaaggaagcaatgttgatgatggctatggctacatcagcggtcggggaagccgcaaggagtatgaagacgacggcgatggcgacgacgacgattccctcgcctccgatgcttcaaccggtccggccaaagtgaaggtgccttccgcaccggacggcgatgacgccggcggccgtcggaagcacgacggcgacgaagacggcggcggcaagggggaggaggaggaggaagaagatcatggcttgcacaccaaattctcgatgagctccggcaagaaagccggcaagacggagaaaggaggagaagggaagtcctccaagaaaggccagaacaagagaggaagctcatcaagaacaagattcttttggtaa

SEQ ID NO: 64994 - DNA, 397 bp, Oryza sativa
  Clone ID: PAT_MRT4530_66085C.1
atggcagtgactccggtggcggtccgcggtggaccgagtccacggaccggggaagggggcggcgcaccacgtggcactgacgtggcgccgacgtggcgcacacgtggcggccacatggcacgccacgcgggcggccgaaccgacgtccccgatctacccgagagtagatcggacggcggcggggaccacgcggtcggcacgcacgagcggctcaagacggcccgacggccatggcgcacggtggcgctaccgcggggcagcggcggcagacggcggcgaccgacggcaagcggtggcagcgcgatggcgcgggtgtcgctagcggcggataaggggctaggcggcggtgcggcgactaagcggcgcgggagagagagggaggacggagaggaggtgt

SEQ ID NO: 64995 - DNA, 928 bp, Oryza sativa
  Clone ID: PAT_MRT4530_66086C.1
cccacgcgtccgcccacgcgtccgctatagctatacaagaatcatcgaccactacttgtgcacaagcaaaagttccatcaacttaacatggcctcctccaacttctttcttcccacagctctcatcgctttggtcgctactcaggccatggcttttgatcccagtcctcttcaggacttctgcgttgccgacaggaactctccagtacgtgtcaatgggttcccttgcaaggatgctaaggatgtgaatgttgatgacttcttcctagcagctaacctcgacaagccgatggacacaaccaagagcaaggctggatccaatgttacattgatcaatgtgatgaaactcgcaggtctcaacacccttggcatctccatggcaaggatcgactatgctcctaaagggcaaaacccaccacacacgcatccccgtgctaccgagatcctaactgttcttgagggtacactctatgttggttttgttacatcgaaccaagcaaacggagaaaacaagctcttcaccaagacacttaacaagggtgatgtcttcgtgttcccacaaggtctcattcacttccagttcaatccaagctatgataagccagcagttgccatcgctgcacttagcagccagaaccctggagcgattaccattgctaatgcagtatttggatcaaatccaccaatctcggatgatgttcttgctaaggcatttcaagtggacaagaaggcagtggattggctccaagctcaattctgggagaacaaccataactaaattattgatgcttgataaggttcaaaactagtgattggtagtaaaaagagtttgttgattattatattagctaaatattgtatacttcatgtaatcctaaactcgatattttatatgattctttttatgaataatgtatatcagtacacat

SEQ ID NO: 64996 - DNA, 757 bp, Oryza sativa
  Clone ID: PAT_MRT4530_66087C.1
tgtcactccaaaccctaagaatgttgacagctcatcaaaaatatcatcgcaacaaggacatgccaaattggcagcaggttcttctagcttacattttagggagtgggatattatgagtatgccgatctaatcaatcgaataaacaagggtgtacaacttttttttaatagcatgcaagaactttctcagaaaggaacaggtggacttagtgaagcgttcgtggcattcagaaactattttgtagaaaaggatgtttttgaggaaattgattacaaattcggagaaatattgcatcactgctctcgtactgtgggaattaggaagatttatcatcactataatttcacagttgagatgaaaaatgataaggactgttggatccctagggtttattttgcggaagtcaagatgaagtatggtttcaagtatcgtttctgtgctcctctcgaggcgactgatgatggtcaatgttattcgtgcaagaaccaaggtattgataaactcaagcacccatctagaggagggtactcaaaaggttatgatggtgctgtatgcaaccaccttggtgaggatagttctgatgaagaggacgaacttatgtaaccacctgctaactagccagagcctttaggcattagagccagaagcgaaactgatcgagtggcagagaagccaaacagagagttgatacttaagctgtatttatataaatttgtgccttctgtcaaaaagttgtgccaactttagctctcgtgcc

SEQ ID NO: 64997 - DNA, 204 bp, Oryza sativa
  Clone ID: PAT_MRT4530_66088C.1
cttccgacggaacgggctacttcttacgacttacccgactgacatatctggccgacccccccgtcttgggtgttaccactaccctacgaccgggactttgggggtgacacactttacgccgtgcgacggtgcgcttgtgtgtttgtacaccgacggacggggcgccgggcggccgacgagacgcccggggacggtgtcccggcc

SEQ ID NO: 64998 - DNA, 548 bp, Oryza sativa
  Clone ID: PAT_MRT4530_66089C.1
tcgcgggacgcgtgggtcggtacgcgtgggcaaagtttcttataatatcagttcatgaatgctaaggacatccctcaagatggtctttctcaaaaaaaaaaaaaaaaaaaaaaaaaaaaaaagaaaaaaaaaaaaaactaaaaaaaaaaaaaaaaaaaaaaaaaaacaaaaaactaagggccatccattttaggaggggaaggacatcaccatcaccatacttggcaaccacatatcttctaacaaagtacaacctcaaatgaataaacaatcaactcatgtcaaaaacaatgtgtgacaacagaaaacctttggtatcccaacaataatactattagaccataagtagctttcaggagattgtgcaataactacaagtgcagcacgtatgggttttctaattagatcagactcaagattaagctaaagataagctgttcttaaagttgatataacatatgtggtatttattgctaactactaaattgatccgatgtagtattccaaccgttagtggtgtttggttctgatttgtaatgttttaatgg

SEQ ID NO: 64999 - DNA, 468 bp, Oryza sativa
  Clone ID: PAT_MRT4530_6608C.1
ccatgtgtaggatgcatagtgaatggttaaaattgtatataacatgcatatacacgactattgttagtttgtaacttctatattctattgaaaaaatcaactttagcatttcttttgtctacaatatcataaaacaattaagtaaagcagacattgttcaggcgggcgtttaaattttgcaaatctattacataaagagtttaaaatagaaacattagacatcaaccaaataacacagagtggactagtcaatatttgtttctgaacatgtgtgatctgaatctcctactggctggtactcagataagggctccacatcattcagtagtccacatcttagcacatctaatcagctcaagaggcaaaacaaccaccattgtgctttaagctatagtgatcaactaatacgtattctgtgaaatttcaacagtgttgcaacagctctctatttctatactactacaaacg

SEQ ID NO: 65000 - DNA, 531 bp, Oryza sativa
  Clone ID: PAT_MRT4530_66090C.1
atgcgtcgagcatctcctgatccacacccaataaccacccctatgatccccatcatcccccatccaagaacacattcatggaatcgatcaaaattgcaacagaaaatgaaaataaacagggcaaggaatgtagtgtggggcaagttggtagtgatggtagaggagcgggtcgaggcaatggaggtggatgttggatatatatactacgagcttgtggctatggaagatgaagcagtggcacagatcgacgagggcggcgctaccaccagtgctcctcaaccttgccaccatcactcctcctctgccgccaccaccagcatcctcattgcatgcggtcactacttgtcgtcgagctcggcgccaaagtcagtgagcctggcctgtggcagctgcaccggcacagccacggtgaccacgtcctctccctccacctccacctatggactagtggtttgggggcggtgggagtttggaaggttctttagagggggtgggggtgcggagaggatatggatggtgggaagtggataa

SEQ ID NO: 65001 - DNA, 404 bp, Oryza sativa
  Clone ID: PAT_MRT4530_66091C.1
ccccattcgaaaatcaaaatctcttcctcgcctctctctctgctctctgctctcctcgccttcctctctcgccagttgctccgcgtcctcgctcgagtgcgcggcgatccatccgggagggagagacggtgacggcgcgggttgaagatgaactcaacggcgggtgggatggcttccttcgagatgagtgaactcaagaagattgggctgggcttatctgggttcggaggtctgatctcgattcttgggaacatcatgctgtttgacaagggggtgcttgcaataggaaacattctgttcgtgactggtgcttcactgaccattggaccgaagacaaccgagcagatcttcaccaagcctaagaatcacaagggctcgagtgcttttggaataggcttcttcct

SEQ ID NO: 65002 - DNA, 2856 bp, Oryza sativa
  Clone ID: PAT_MRT4530_66092C.1
atggccaccgccgccaccgcccaggcctccgcctcctcctccaccgcctccacccgcggctcccccgccgcctcctcctcctcccactccgccgtctgcctcgtccccttcaggtggtgggcgagggtgagggaggaggcgccgccggaaggcggggtgaggtacgcggcgaccgcggcggcgtcgccctcgtcgtactacgggcttcgcttgctccacagcttcctccacccggatctcgtgcttcgcctcgagcgcgggggttgccgcggcacgggtgccggcgccggggggcggagctacgcgctcgtgccggccgacgagctctcgcgtgtgctcgcgaggcaaaattctagtttggcattgcataataaacattcatttgctgaggatagtgctggtgcgtaccctttggtgcttaggatatctgttcgagaaacaagcattttgactgtgaagatcagcaaaaaggacaatccagttgagaactataaacgggcatacaagatttttaatattgattctcaaccagttcatgtttgggatttttcaggccagacaaacctaatattaatgaatgagtggaataggtcaaatcatgactgctgccactcagagctagagaatattcttgaagtgcaagtctatgcaatgtctgactccttaacttccaagattggtggaaccagcaaagagtatacagaacaatcttctgcagatgttaatgatatggatgttgatttgtcctatggaagctttggaagatctagctcgcatgggctaattggattggaaaatcttgggaatacttgctttatgaacagttcaattcaatgtttggcccacacatcaaagcttgttgattatttcctaggagattatgacagggatataaatcggactaacccactaggactgaatggggaacttgctttggcatttggagaattattgaggagattatggaacaccgagagaaaaccagtttcaccacatcactttaaggcaaagattgcttgttttgcccctcagttcagtggcttcaatcagcatgattcacaggagcttcttgctttcttattggatggcctccatgaagatcttaaccaggtcaagtgcaagccatatgaagaagctaaggatgcaagtgggcgccctgacaaagaagtggctgatgagtactggagtaatcatttagctcgaaatgactctgtaatagttgatacttaccatgggcagtacaaatctacattaacttgccctacttgcagtaaaacatctgtcacttttgacccatttatgtacttgtctttgcctgtaccttccacggcaaagaggacaatgactgttacagttttcagcactgatggtagtatagagccaatctcatatgatgtcactgtgccacaatttgggagtcttaatgatcttgttcaggctttaagttctgcttgttcactgggagatgatgaaatcctgctgattacagaggtttataacaaccgcatcctccgatacctcgaagagccttcagattcagtttcattgctgagggatggagataaattggcagcattccggctaccaagaaaatatgaaaaatccccagttgtggtttttacacaccaatattttgatgagcgttctagtattgataatataacaccacaaatgaaggaatttgaggccccactgctggcagttcttcctgagagagccaatggattaactctgaagaatatctacctgaagttgttggaaccattaagattttccaagagtactagttctcttaatgatagtgggaggtgtaatagtggctgtgctgctgtcatgatggatgcaacgcctgattcagatagtaagtttcagagtgctccatcggaaaacgcccctgaaagtagccagtctgagactattgaatgccaaatgaccgaaggacctagtgagtcaaatattggtgacactactgattctgatcgggaggcacacatggaagagtttgaattttatttaataaatggaaggggtgaattccagcagacgagaatacaaacagatgaggtggatttacagacaacaccaaaccggctacttatcaatgtccattggcaacaaaatgcagtaggacaatatgacacctcaatgctgaaaagtctacctgagattcataagcttgagcttatcccgaaaggaaatgaagattctgtcgcactacatggttgtctggaagcctttctaaaagaggaaccgttgggcccagaagacatgtggtactgcccatgctgcaaaaagcatcaacaagcgatgaagaaattagatctgtggaggctaccggaagttcttgtcattcatctcaaaaggttctcgtacacccaattcacaagaaataagcttgagacatttgtggatttccccattagtgatttggatctgtcatcatatatcattgacaagagtgaactatcagactgccactatcgcttgtatgctattagcaatcactatggaaatatgggaggtggacactacaccgccagcatctaccatgaagaagggaagggatggtataagtttgatgatgagtgcgaaaatatatacatgatcatctctgattccgacctatctccagaactctgctgtttgacaaataacagaagattattgctgtcctcagtgctgtttggcctgattgccttggacaaatattctgacatatctcaacaacatcttttctgccttgacataccacaggaccagaccaggttggatgggcatcagagctttatgtgcaacaaggtgtcctggacaaactgtgttctgaatgacaactccataccccaggttgtcatctga

SEQ ID NO: 65003 - DNA, 723 bp, Oryza sativa
  Clone ID: PAT_MRT4530_66093C.1
tcataacccaaaccctacctggtccgcgagtgcggtggcgatggcgacattctccgatgcgccgcccggggacgcggcggccggcgagaagatcttcaggaccaagtgcgcgtactgccatgccgtcgacaaggccgccggccacaagcatgggccaaacttgaacggtttgtttgggaggcaatctggtacagctcctggtttctcttacccatctggcgacaagatagtgcctgtgatttgggaagagaacactttgtatgactacctgcttactcctaagaagtacactcctgccaagatggggttcaatggactgaagcagccacaggaccgtgctgatctcatcgcatacctgaagaacgccacagcatgagagtccctgctgccatcttcctaagatgaagagaagcttattgctcgtagcctcatactgactctttgtaacttgtaaggtgaactttgcaacaaaactgtgttgtaaatttgtaataataagcagtggcctcgtggaagagacgatgtgcagctcatccacttgggcagctgcgagctattctttggctgtgttctttgacgtgggttgggaactaatcccatgcataaacagagcgacagataaatatatttttttcgtgggggggcccggtacccaattcgccctatagtgagtcgtattacaattcactggccgtcgttttacaacgtcgtgactgggaaaac

SEQ ID NO: 65004 - DNA, 258 bp, Oryza sativa
  Clone ID: PAT_MRT4530_66094C.1
atgtcactccaccttgaaggtcaagtttcatctgaggttgctgcctcccggctacttccctgcgacaaccctttgcttagccacctttgctcacgaccggttccccccgagcactatatggccaggtccaacaaggagatggcaacggtgaggaagaacttgaacgggaacatagaggcaagggagggcatcgatcttaacaacgtcaatgatgtggggatgggtttggaggagattgctaattgggttgcttattga

SEQ ID NO: 65005 - DNA, 305 bp, Oryza sativa
  Clone ID: PAT_MRT4530_66095C.1
cacactcaaccgatctatccttcacatgattaacactactatcctacaagttaagtgcaccacttctacaggaagacaagtaatccatgctgtactcatacaattataaatcactatactattcacactactaaccacaaaaatattcaataacctcatgtccatacattctacaatccaattattcattctttctacactccaactaccgattctaagtcccctacactcccgcttgaaaccaatagctacttccatccttaaaccaaaacctactcacattcttactttttatctttaccaac

SEQ ID NO: 65006 - DNA, 441 bp, Oryza sativa
  Clone ID: PAT_MRT4530_66096C.1
atggcgacattctccgatgcgccgcccggggacgcggcggccggcgagaagatcttcaggaccaagtgcgcgtactgccatgccgtcgacaaggccgccggccacaagcatgggccaaacttgaacggtttgtttgggaggcaatctggtacagctcctggtttctcttacccatctggcgacaagatagtgcctgtgatttgggaagagaacactttgtatgactacctgcttactcctaagaagcatgccctcgcgctgccacgctgtggacctaaattaaagatagtcgcctccctggaactcataagtgatactcttggttctgtgatcccaggcataactcataaatacactcctgccaagatggggttcaatggactgaagcagccacaggaccgtgctgatctcatcgcatacctgaagaacgccacagcatga

SEQ ID NO: 65007 - DNA, 306 bp, Oryza sativa
  Clone ID: PAT_MRT4530_66097C.1
atggcgaagcagcgcgcgaacaaagttcaagatggccacaatgggcaagccctgttcttcctccttcctcttccctgcacttatttgttcccttcaccatctccaaaaatcaatgccactcttcgtccttccttcttccagtgccatttggaatgggggtatcgaccgcttgccaatgatgagcaagagaagcgcattcttgcattactcatgctgatgtcaaggctacccggagactgcccatcttcatgcttgcttgtgtcaccaccactcatgatggagccactgttgggagtatcacgataa

SEQ ID NO: 65008 - DNA, 549 bp, Oryza sativa
  Clone ID: PAT_MRT4530_66098C.1
aaatatttttcatgtgtatatctccaggatatcaaaacccgcgtgtacgatacgctcatggcctacgacacaaaatgggtagaagaactcccgtctgtactatgggccgtacgaaccacgctgacaacatccaacaaggaaacaccttttttcctcatgtacggatcagaagccatggtccccatggagctgcgacatcagagcacacgagtacagaaatacttcgacgaggaacatgatgaaagacgaagcgatgacgtgaatctactcgaagaacatcgtgaacgagttgccatccgagcagccgcgtaccaacaggccctacgccgatatcacgagaaacacatcagagctcgtacacttgccatcagtggctacgtcctccaacaagttcaaaaccaagcagggcggaataagctctcgcccaaatgggaaggaccatacatggtggtgcaagtcttacgaccaagcgcgttcaagattacagatggcgagggctgcgagttatccaactcctggaacattgatcaactacgtaaattctatgta

SEQ ID NO: 65009 - DNA, 241 bp, Oryza sativa
  Clone ID: PAT_MRT4530_66099C.1
catctgcccaccccaggtccagggtgactacatggcactattgctcgtggtgagaagcagctcaagttgagtttgtgaaggtcacccgtatgagtatgaaggcgttcaaggcactatgctaagctccgtgtttgagaggatgaacacacgccccatgtgggtcccccacccaagaaagagggctggctgagccagagaaggaagagaagtatagtgtaagtgaccggacatagtatccggg

SEQ ID NO: 65010 - DNA, 207 bp, Oryza sativa
  Clone ID: PAT_MRT4530_6609C.1
atgcatacgttccaaggattacactgtgacagaggtgagcaggcgagttggattgactggaggaaacgacaacgcttcgtcgttctgaggacgcgcatgctggatctggggcgcgggccgcagtggatgacggtgagagcggaggaactcaggatcaccgcggccgagtggaaactgtccgtagatcgctatcctgatggctcgtag

SEQ ID NO: 65011 - DNA, 414 bp, Oryza sativa
  Clone ID: PAT_MRT4530_660C.1
atgtcctcctctaagctgaatctcatcttcgtccttgggatcatcttcttcctttcctccgacatgatcatcgtgtgctcacagggaagacctctcattgcggaggcggcggcggcggcggcggcgcagcagcagagacacctgctatcgtcgtcgtcgtcggcaccgcgttccggcggcgacgtcgaagaagctgccgccggcggcggcaaggggacgacgacggcgatgacccagggcacgctctcgcccgacgccgccgagagcggcggcggcggcggcggcggtgtcgggatcgtcgaggacgcccggccgacggcgcccgggcacagtcccggcgccggccacgccttcaccaacaaaaatggggttggcaggaggctgcttgtagtaactataagtactttgatttaa

SEQ ID NO: 65012 - DNA, 896 bp, Oryza sativa
  Clone ID: PAT_MRT4530_66100C.1
cgtgcaccgcatctgtgcatgcatccacactagcaactctacctatttaagcccctgcattcccgcgtattctcctcatccatctcatcagcaacgaaccaattcacaccgatcgatcgagcaacagtagtaggaaccatggcccgtgcacagttggtgttggtcgccgttgtggcagctctgctcctcgccgccccgcacgccgccgtggccatcacctgcggccaggtcaactccgccgttgggccctgcctcacctacgcccgcggcggcgccggcccgtcggcggcctgctgcagcggcgtgaggagcctcaaggccgcagccagcagcaccgctgacaggcgcaccgcgtgcaactgcctcaagaacgcggcccgcggcatcaaggggctcaacgccggcaacgccgccagcatcccctctaagtgcggcgtcagcgtcccctacaccatcagcgcttccatcgactgctccagggtgagctgagctatcgatcggatggatcatttatatgcatacagaagcgcgacggtgggtcgatgtgtggagccgatcgaattctgtatccaatattagtagtatctgtacgtattctggaataaaaagatgagctagctaaggtcgatcaatcaccatgcatgcatgtgtgtgcatccatggttgatcggcccggccggtcaggctagctagctttcttcttcttgtgtgttcatctcgtacgttttgctccttctcgaggtgtacgtgtaccagagagagctagctagagattctacatgcatgtactgcaactccttgtactacgtgcttgttttggaatattacacatacatatagctctttttggtacaaaaaaaaaaaaaaaaaaaaaaaaaaaaaaaaaaaaaaaaaaa

SEQ ID NO: 65013 - DNA, 767 bp, Oryza sativa
  Clone ID: PAT_MRT4530_66101C.1
ggccacagttggtgtttgttccgccccttggtgaccagtttctgctcttcgccgcccgcacgcccccctgtgcgcactatcacctgcggcccagttcaaactccgcccttcggcccctgcccttgacttactcccgcggcggccgccggcccttcgccgcctgctgcacgcggcttgaggaccctcaagccgccaccaagcacgacccgcagaccggcgcacccgcctgcaactgcctcaagaacgcggcccgcggcatcaaggggctcaacgccggcaacgccgccagcatcccctccaagtgcggcgtcagcgtcccctacaccatcagcgcttccatcgactgctccagggtgagctgagccatcgatcagagagacggatcatatatatacagcagcgcgccggttgccacctagtagattctgcctgggtcgatgtgtggagccgaattctgtatccagtactagtagtatcatatctgtattctggaataaaagatgagctagctaaggtctcgatcaatcaccatgcatgcatgtgtgtgcatccatggttgatcggcccggtcacgctagctagctttcttcttcttgtgtgttcgtctcgtacgttttgctccttttcgaggggtacgtgtaccagagagagctagagattattacacatacatatagctctttttcgtacatttatagctccttgtagagctccatctatctctgcggccttggcctgtgtgcatcttccaaaaaaaaaaaaaaaaa

SEQ ID NO: 65014 - DNA, 300 bp, Oryza sativa
  Clone ID: PAT_MRT4530_66102C.1
atgccacaatgtggaggattcggcgaggaagttgttggcggcgatagcaggggcggcagtggtcagggtgtagaggtcaccccaactattgcattgacgaatcacgcgtgtggtccgaagcaaccagacctgtttgatccctgttgggctaagcttgctgcatttgaggccagcccggagttggtgaagagacgtatgggccggcaaagtccgtgtggacttgatggtaaggcccaagcaacccggcaccgttgccagggggccgccagggaggctgctgctgcatgggccatggattaa

SEQ ID NO: 65015 - DNA, 2511 bp, Oryza sativa
  Clone ID: PAT_MRT4530_66103C.1
atgaatcccaccggcaagccgttgctcctcctcctcctgggccttctcctgctagcaaccaccactttgtcccgagcaatccatgcgataccgtaccgaaactcggctctgcgagacatcactagcgaccacttaggacttctcacctcgtggaggcaagatgaccatgactgctaccggtggagaggcataacctgtagcaacctcaccggccatgtcctcaagcttcacctcagtggcatatacactaatgagcatacaggtatggaaggtttggtcggccagataagtccccagctgctctacctggatcatttagaacatcttgatctcagcattaactatttggaggggccaagcggtcaaatcccagagttcataggctctatgaagagcttgagatatctaaagctctctggcattccgttctctggtacggtgccttctcaacttggcaatctttcaaagttgcaacatctcgacctttccgacctggagggaaaggaaggtatgcacttagcggatatgtcatgggtatctcgtctaggatcattacggtaccttgatttatcctttataaatctcagcgcggcttctgattgggctcatgccgtgaacatgatcccttccattagagtactttgtttatctttatgccaacttcaaggtgcgaaccattcactcgcacactacaaccttacaaaactcgagaagcttgatctgtcctcgaactattttgaccacccgtatgcatcttgttggttctggaactcaacaatcctcaaataccttgatatttcatcgaacaatttgtatgatcagcttccaaatgcgataggacacatggcatccctcagagtcattaatttttctgataacgctcacatgggcattgtggaaccagagttgatgacgaacctatacttagtcactcttgacgctagcaacaatcagctcgctgggcctctgcccgttgagattggtatgctcacaggtttaaatcacctggacctgagttacaataacctggcaggtgacatcaccgaagaacactttgctaacctaaggagcttaaaatacatagacttatcgtctaatgatcccttgaatattgtggtagaccctacatggatagccccatttagattagaacgtgcatcttttccagcttgcatgatgggtcctcaatttcctacttggctccagtggtcggtggatatttggttattagaaatctcaaatactggtataaaggataagcttcctgattggttctggaccacattttcaaagctcgaagaattggacatgtctaacaaccaaataagtggtgtcttgccaacaaatatggaaaccatggcattgagttatctctatcttggttcaaaccaaataactcaaaatcaacaaatggttacgctgattctttccttcaacaacctatctggccatattccggaatccttttgcagaatggaacagttggccgccttggacttagcaaacaatctttttgagggagaattgcctcaatgtttcgggatgacagttttcctagaacgctccacaaagctacaactcgtagatctatcaaggaacaatttctccggcaaattaccaacgtggattggtgacaagaaggaattagtgcttttgctactaagccacaatgttttctctgggattattccgatcaatatcacaaatctttcaaatcttcgtcaattgaacctggcaggcaatagtctatcaggtaacataccttggcgtttgtcaaatttagaggcaatgaaggaagacaactacatttttaaccttgacatacctgatgatagcagttataataatttatccgtattcacaaagcggacagaacttttttatggtccaaatattttcagcgcggtgaacattgacttgtcatcaaactatttagttggtcaaattccagaggaaatagcttctcttgcacttctaaaaaatctgaatttgtcaaggaattacctgagtggaaaaatcccacaaaaaattgggtcgttatggtcactggaatcactagatctctcaaggaacaagctttcgggggagatccctcctagcctgtcaaatttatcatatttgagtgatttggatttatcacacaacaatctatcgggaagaataccatcgggatcacagcttgacaccctctattttgaacatcctgatatgtatagcagtaacgatggtcttttcggatttcctcttcaaagaaattactcggaaggaattgcaccaaagcagggctatcacgatcatagtaaaacccgacaagtagctgagccaatgttcttttaccttgggcttgtgtcaggatttgttgttggcctatgggtggtgttttgcaccatactcttcaagaagacatggaggattgcctatttctctctttttgacaaggcgtgtgacaaaatatacgtgtttactgttgttacttgggcaagagtatctcaaaagacgaatgtacaataa

SEQ ID NO: 65016 - DNA, 2148 bp, Oryza sativa
  Clone ID: PAT_MRT4530_66104C.1
gcacgaggccatcatccatctcatcggcgagcaaccaattcgcaccgatcgatcgatcgatccagcaactagatcaacagtactagctaggaagcatggcccgtgcacagttggtgttggtcgccctggtggcagctctgctcctcgccgccccgcacgccgccgtggccatcacctgcggccaggtcaactccgccgtcgggccctgcctgacctacgcccgcggcggcgccgggccgtcggcggcctgctgcagcggcgtgaggagcctcaaggcggcagcaagcacgaccgcagaccggcgcaccgcctgcaactgcctcaagaacgcggcccgcggcatcaaggggctcaacgccggcaacgccgccagcatcccctccaagtgcggcgtcagcgtcccctacaccatcagcgcttccatcgactgctccagggtgagctgagccatcgatcagagacggatcatatatatacagcagcgcgccggttgccacctagtagattctgcctgggtcgatgtgtggagccgaattctgtatccagtactagtagtatcatatctgtattctggaataaaagatgagctagctaaggtctcgatcaatcaccatgcatccatggttgatcggcccggtcacgctagctagctttcttcttcttgtgtgttcgtctcgtacgttttgctccttttcgaggggtacgtgtaccagagagagctagagattctacatgcatgtactgcaactccttgtactacgtgcttgttttggattattacacatacatatagctctttttcgtaaaaaaaaaaaaaaaaaaaagaaaaaaaaaaaaaaaatcccttctaacttacctactactgtaccagcgtggatatgatctcccccagacatacgcaatgctttagctaatacacggaaatgcataccatgatttttctgtctatcaataactgcatgcattgctcggtgaatgtgaagaagtaggccgttgtcgcggcaataatgagccaaactagtatttgcggtgaaccccccggttaagtagtcatgcattacaataggaacccctaattccctcgcaaatacagctcttttaatcatttcttcgcatgtacctgcagtcgcattcaagtaatgccccttaatttcaccggtttcggcctgtgatttataaatagcttcggcacaaaagacaaaacgtcccctccaacgcataaatggttgtgagtttacgttttcatcatctttggtaaaatcaagtccaccggctagacactcataacatgctctaccataattttttgcagataatcccaattttggtttaatagtacatcccaataaaggacgaccgtatttgttcaacttatccctttcaacttggataccatgaggcgggccttggaaagtttttgaataagtagggggaattcgcagatcctccagacgtagagcgcgtagggctttgaaaccaaatacgttacccacaatggaagtaaacatgttagtaacagaaccctcttcaaataggtctaatggataagctacataagcgatatattgattatcctccccaacaacgggctcgatgtgatagcatcggcctttgtaacgatcaagactggtaagtccatcagtccaaacagttgtccatgtaccagtagaagattcggcagctactgcagcccctgcttcttcgggcggaacccccggctgaggagttactcggaatgctgccaagatatcagtgtccttggtttcgtactccggggtgtagtaagtcaatttataatccttaacaccagctttaaatccaacacttgctttagtttctgtttgtggtgacatacgtccctccctacaactcatgaattaagaattctcacaacgacagggtctactcgatatggattaggcgtaaatgaaacctttgcaaaaatcttaaaaaaaagatattcaattaatatcaactcattaaagaaaatggggggcatgcttaagttaatgaatatgtttcattcatataatatgtttcattcatatataatgggtacaccctgtgtacattctatgctataggaattctactataggaattcgataagaattgagttgttgttatggtaagttaacatgcttcgtt

SEQ ID NO: 65017 - DNA, 445 bp, Oryza sativa
  unsure (1)..(445): unsure at all n locations
  Clone ID: PAT_MRT4530_66105C.1
ctgcttctcctcccggcaggcggcggcgctgcccccnaccccccgacgcaggcaccgcatcaccgcatctttcccgagcccccgacggatcactgcatcaccgcggtttccgctagtcctcccggcaggcggcggcgctggtcgcgccacccccnagcccccggcgcggtatttnttttcccatatattttctgtaattagtttttgccaaactgattgaaaggttctttagcggttgacaaggtattccgaggccttcttgcaggtatatgaacctcaactctattgttttgtaacaaaaacaaatcattcaattgcgactgtagtttatgatagagtatctgcaagagttttccactgatactggaccantngcactgcaataaatngtttctttanggtaatttggaaggtttgcaaagttatttccncggtaaatttcagt

SEQ ID NO: 65018 - DNA, 1152 bp, Oryza sativa
  Clone ID: PAT_MRT4530_66106C.1
atggttacgctgattctttccttcaacaacctatctggccatattccggaatccttttgcagaatggaacagttggccgccttggacttagcaaacaatctttttgagggagaattgcctcaatgtttcgggatgacaggtatggcaatcgttcttttacaaaacaatagattctctggctcgttcccagttttcctagaacgctccacaaagctacaactcgtagatctatcaaggaacaatttctccggcaaattaccaacgtggattggtgacaagaaggaattagtgcttttgctactaagccacaatgttttctctgggattattccgatcaatatcacaaatctttcaaatcttcgtcaattgaacctggcaggcaatagtctatcaggtaacataccttggcgtttgtcaaatttagaggcaatgaaggaagacaactacatttttaaccttgacatacctgatgatagcagttataataatttatccgtattcacaaagcggacagaacttttttatggtccaaatattttcagcgcggtgaacattgacttgtcatcaaactatttagttggtcaaattccagaggaaatagcttctcttgcacttctaaaaaatctgaatttgtcaaggaattacctgagtggaaaaatcccacaaaaaattgggtcgttatggtcactggaatcactagatctctcaaggaacaagctttcgggggagatccctcctagcctgtcaaatttatcatatttgagtgatttggatttatcacacaacaatctatcgggaagaataccatcgggatcacagcttgacaccctctattttgaacatcctgatatgtatagcagtaacgatggtcttttcggatttcctcttcaaagaaattactcggaaggaattgcaccaaagcagggctatcacgatcatagtaaaacccgacaagtagctgagccaatgttcttttaccttgggcttgtgtcaggatttgttgttggcctatgggtggtgttttgcaccatactcttcaagaagacatggaggattgcctatttctctctttttgacaaggcgtgtgacaaaatatacgtgtttactgttgttacttgggcaagagtatctcaaaagacgaatgtacaataa

SEQ ID NO: 65019 - DNA, 843 bp, Oryza sativa
  Clone ID: PAT_MRT4530_66107C.1
ccccgggctgcaggaattcggcacgaggtcatctcatcatcagcaaccaattcgcaccgatcgatcgatcgatcgatccagcaactagatcaacagtactagctaggaagcatggcccgtgcacagttggtgttggtcgccctggtggcagctctgctcctcgccgccccgcacgccgccgtggccatcacctgcggccaggtcaactccgccgtcgggccctgcctgacctacgcccgcggcggcgccgggccgtcggcggcctgctgcagcggcgtgaggagcctcaaggcggcagcaagcacgaccgcagaccggcgcaccgcctgcaactgcctcaagaacgcggcccgcggcatcaaggggctcaacgccggcaacgccgccagcatcccctccaagtgcggcgtcagcgtcccctacaccatcagcgcttccatcgactgctccagggtgagctgagccatcgatcagagagacggatcatatatatacagcagcgcgccggttgccacctagtagattctgcctgggtcgatgtgtggagccgaattctgtatccagtactagtagtatcatatctgtattctggaataaaagatgagctagctaaggtctcgatcaatcaccatgcatgcatgtgtgtgcatccatggttgatcggcccggtcacgctagctagctttcttcttcttgtgtgttcgtctcgtacgttttgctccttttcgaggggtacgtgtaccagagagagctagagattctacatgcatgtactgcaactccttgtactacgtgctttgttttggattattacacatacatatagctctttttcgtacattt

SEQ ID NO: 65020 - DNA, 2040 bp, Oryza sativa
  Clone ID: PAT_MRT4530_66108C.1
ccataatctccacagtgcctcctcaactcggtaatcttacaaagctacaatatctcgacctttcccattgaaatggaataggtatgtactcaacagatatccaatggctcacccatctaacatcgctacggtacctaggcttatcaaatgtagatctcagcagaatatcttattggcctcgtgtcatgaacatgaatgcttatctaagggcactctatctttctcattgctctcttacaagtgcaagccaatcaattttacagttaaacttcacaagacttgaggagctcgacctctcccacaataattttaaccaacctttggcatcttgttggttttggaatttgacaagcctcaagtacctcgatctttcagtcagggaacaatattgtaggaagtctaccggccgcggtgagcaaatttaccagtttagacactcttgatctctctgagaaccaactttttggatctgttccatatgagattagtatgctgactagtttaactgacatcaacctaagggtcaataacttgacaggtgaaatcacagagaaacacttagctggtctgaagagtttgaaaaacatagacttgtcttctaatcactacttgaagattgtggttggtcctgaatggcaacctccatttaaactagaggtggcaatatttgaatcttgtcagcttggtccaaagtttccttcgtggcttcaatggatggtggatattaaaatacttgatatttggaacacaggttgcaaacagctaatgcacctagatctatcacagagtaagttccatggaagactgccaagttggattggagacttcccagcagtacgaagtctaatcctaaacaacaatgtgttatctgggcatatcccaatcaacatcaccaatctgacaaatctacaggacctggatctatcacaaaataagttccatggaagactgccaaattggattggagacctcccaaaagctctgttcgtttcctggagttcccaactcccccatctcattttccgcgcgcacgcttttcaaactgctaaacgcaaccaccactttgtcccgagcaatccatgcgataccgtaccgaaactcggctctggtgccaccaccgtcgcttgcgtgccacgggaacgggacgcccttctggccttcaagcgagacatcactagcgaccacttaggacttctcacctcgtggaggcaagatgaccatgactgctaccggtggagaggcataacctgtagcaacctcaccggccatgtcctcaagcttcacctcagtggcatatacactaatgagcatacaggtatggaaggtttggtcggccagataagtccccagctgctctacctggatcatttagaacatcttgatctcagcattaactatttggaggggccaagcggtcaaatcccagagttcataggctctatgaagagcttgagatatctaaagctctctggcattccgttctctggtacggtgccttctcaacttggcaatctttcaaagttgcaacatctcgacctttccgacctggagggaaaggaaggtatgcacttagcggatatgtcatgggtatctcgtctaggatcattacggtaccttgatttatcctttataaatctcagcgcggcttctgattgggctcatgccgtgaacatgatcccttccattagagtactttgtttatctttatgccaacttcaaggtgcgaaccattcactcgcacactacaaccttacaaaactcgagaagcttgatctgtcctcgaactattttgaccacccgtatgcatcttgttggttctggaactcaacaatcctcaaataccttgatatttcatcgaacaatttgtatgatcagcttccaaatgcgataggacacatggcatccctcagagtcattaatttttctgataacgctcacatgggcattgtggaaccagagttgatgacgaacctatgtagtttggagaatctaaacctccaagggagcctctcctatgggaacatgacagttgctcgatag

SEQ ID NO: 65021 - DNA, 444 bp, Oryza sativa
  Clone ID: PAT_MRT4530_66109C.1
gccagcagtgttctggacactgttgcagagagcagagttatcagttgcgctgtgtcatcccggtccctaaaattgtatcgctgtgtcatcccggtccctaaactcgcaaatcgaccgttcaggttatcaaacttgtttgaccatgtcattccggtccctaaacttgcagatcactcatttaggtcctccaacttgttcagttgtgtcactccggtccctaaacttggatttgaatatcatctgggtcaaataggatgagaccgggatgacacaactgaacaagttggaggacctaaacgagtgatctgcacgtttagggaccgggatgacatagtcaaacaagggggtggatttgcaaaaaaccaggaaagggcgctgggattggcgggcgttaagtgtaaaagtaccccacctatgtcactagccatcggatgagcatcgtgt

SEQ ID NO: 65022 - DNA, 397 bp, Oryza sativa
  Clone ID: PAT_MRT4530_6610C.1
gtttatgtaacacacactagctacttagccataatgcttatggccacacagcctctagggccagtgctatcccctagccatggcggcccttcttccttctccagctcggtctcgctaggaggccagtgggcgcctcgccgccccgctgtctcctccaaagtaagctgcacccgcatcggcttgtccgaggtcgataatagaaaagtagtaggccatatagacgtcgatgaagaagaacagaccatgcaggtacagggcataaccacggtgacggccactgtggcggtgcgcttgaaagaggggatatccactccccagaaggtggccaacatggttaaccgaaactggcttttccttgatttctttagcttgagtacagagaggcacacggagcccc

SEQ ID NO: 65023 - DNA, 394 bp, Oryza sativa
  Clone ID: PAT_MRT4530_66110C.1
aacaggcgttctgaatgtcaattagtcaggctgctgcactatgtgggggggggtgggacaatcgtggatgacgtgaacgaccacacccagatgatggacctgcactagtaggaggagatgaacctgaccttgctatggcagttctacaccagccacgaggaggtaatgactaactagcttcttgtcaaggccgaggacaccgcagagtggctccgcgcgctcgctgatagacctacctcaacaggagctagccatgggatctgccattcagagccgatgatggtgagaaggactcggactaattttgcgtgaatgacccgaagtaccctactgaactgacgacgaacaatgctacgggaggccggtactgtaatgccagaggtaatgaccaaga

SEQ ID NO: 65024 - DNA, 365 bp, Oryza sativa
  Clone ID: PAT_MRT4530_66111C.1
cccacgcgtccgctagctgaacttgttatgctgaaatagtgcgcacacttatggagaagccacacgttgattttggtctggagcgcgcaggcgcagatctcatgggatttgcacgtctctatgtattcgctcaggagatgatcaagacttacagttcacacacgtacttgtggtcagaagtactctaggtgccaatcatggatccagcaaaagcacaaaagaagcctgctgcaataatggatgttaacatggtacgggctgtcaatgtcaccaaacaggatcgtacgcgaaaatggcatccatatgcgaagtgaaagctaacagatgataaactccgatcaaagaaagcgtctatgaagcgaagc

SEQ ID NO: 65025 - DNA, 260 bp, Oryza sativa
  Clone ID: PAT_MRT4530_66112C.1
gcaatatgcagaggttgactgaataattagcacaaaaaacccattaacgacttgatgatctaccaaaaagtatgctgtttatagcaagtataatagcaagctacaagccagctttaaacatattttaaagagataaaggaagaaagaggagagctgtggactacatatttataactagttacatcacagactttaaaacttaacttttttttatacaggataaacaaggttttaaatatttttcaaacacaccttttttt

SEQ ID NO: 65026 - DNA, 234 bp, Oryza sativa
  Clone ID: PAT_MRT4530_66113C.1
atggacaggcagaagaaccgtgctgagcggccacagtcgtcggaagacaagaaggaggatgatgagaagaaaaagaagatcaagaggtctaccctgagggctccgacgaggaattaccttgcggctcgatgccgcgggcagcgcatcaacgcgggggcggagcagtcagaagcggcgccgcgcgaccatggatgggggcagatcccgacgagccccgccgcggacaccgcctga

SEQ ID NO: 65027 - DNA, 2218 bp, Oryza sativa
  Clone ID: PAT_MRT4530_66114C.1
atagaggggtgactggggacgggggagggaggtggcgccgtggcggcacgaggagcgtcgagccgcaagaaaagaagaaaacatgtctattgcacttgtaattacatgttgtcctgccgatctccggaggaagctccgccgtgcatgagtcgaagcgccaacaccgtgattatgcacgcggcgtgctgaacttagctccaacgaattggccgctgatcttcttctcccttgttatcatcgaacacctggaagacggccatggccgcctatacctccacaatgatgccatggtcgttacggcccgcgtcgcagaggccgacgttcaccggatccttgttgacggaggcagctcggcggacatcttgttcatagctgccttcgaccaaatgaggaccccttgaagccgattaagcaaggctcgttggcccttgaagggtttcagcggggacatggtggaggggctcgggcagatatccctcccggtctcattcggcagaggctggggcgcccggacggagcaagtcaccttcgatgtcgttgacctctcatacgcctacaacgcaataatggggaggggctctttgaacatgttcggagcgcccgtgcatcagaactacctgtgcatgaagatgcctggcccggcaggcgtgatctcaataagggatgatcagctcgcggccaggaaaatcgcgtacggcacggaccgcaagccgaagcgaagcacgttcatgaggtagacggcgccaactcagagcgcgcttcccacttcgtcaagccggaggcggacgaagggacgaacggagtacaccacgacctagcccacccggagcgggccttccggctcggagacggtctggcaagcgacgtcatagcagccatcgtggcggtccttcgagagaacttggacgtctttgcttggtccgcgtcggacctcaagggcgtcgaccgcagcatcgcagagcatcaattgcgtgtccgtacagggtcccggccggtgcgctaggggctccaaaagatgtcagtcgagcgggcccaagcagcccgtaaggaggtgaagaaattgctcgaagcaggggtcattcgggaggtccaattctccgagtggctctcgaacccggtcctcatcaagaaggctaacggcaagtggcggatgtgcatcgacttcaccgccctgaacaaggcgtgccctcgggatcctttcccgctgccccacatcgaccagctggtcaactctacggcaggctgtgaactcctgagcttcttggacgcttactccggttaccaccaagtctggttgcacccggaggatgaggctaagaccagtttcgtcaccccagacggggtgtactgttacgtccggatgccctttggcctccggaatgccggagcgaccttcgccaggctcatccactccgcgctggaggcccagttgggccgcaacgttgaagcctacattgatgatgttgtcatcaagagcaagctggctttagaccacgcagcggaccttcgggagatgttcgacaacctgaggagagcatgcatcaaattaaacctcgagaagtgcaccttcggcgcaacgagaggaaagctcctgggttatcttgtctccaagagggggatagaggccaatccggagaaaatcaaggcaattaccgacatgggctccccccgtactcccaaggaggtacatcgtcttacggggcgcttagcttccctctcgcgcttcctggccaggtctgcggagaattgcctccccttctttgcggtgctccggggcgcgtcgcctttccggtggacgccggagtgccagcaagctctcgacagtctcaagactcacctgtccaagctgacgtccctggcgtccccccccacccgggccaggggctgttgctgtacctggccgcttcgcccgctgcggtgtcggcggtcctggtgttgaaggacagctccgggtcaaggctgcaacagcgccttgtgtactacgtgtcggaggcactggcagggcctaagacacggtacacgaagctggaaaagatggcgtacttgctagtcatggcctcccggaagctccggcattacttcctagcccacgacatcacggtgccaacctcctacctgctgggcgacatgctccggaaccgggaggccataggccgataagctccagaagggctccaggagaccgtacgacccaaggtaccagcagcccgagaaggtt

SEQ ID NO: 65028 - DNA, 200 bp, Oryza sativa
  Clone ID: PAT_MRT4530_66115C.1
caaattagtatattatattgacaatttaatttaacaacagttggttggaattttgaggcgaataactatcaaaaggctaccagatattgctcgtaatttgatgtctttaaaaaattagcaaaacgcgcgatcttgaatcactcgctttgaatggagccggtcttgtcgaccttttattaagttgtgagccacgaaatatt

SEQ ID NO: 65029 - DNA, 1230 bp, Oryza sativa
  Clone ID: PAT_MRT4530_66116C.1
atggggaagaaggccgcgggaacagtggccgcggccggtggtctcctcgtcgtcgtcgtcctcgccattgagccccgcaccctgcacgccctgctgctgcctgctgccgacgcacgcggcccggcgcatgcatggcccccgtcatggcgaccacgcagctgtgccattgaatcaaacaacccattttttccactatggtttgaaggttatatcgatgtcgttctaggtggtgtcgagacggggtgtggcaacacgtcatcaccattgcaggaccagacatgccatgccatgagccgactcatcgtgtgggttgtaccggcacagcccggcccggcaaacaagtattatgatcttgtcaccagtttctacgaatacggctggggagaatcattccatttcggcagcagatggcaaggagaaactttacgcgaaagccttaagcgtcatgagcattttctggccttgcaactcggcctcaagaagggcatgaaggtcctagacgtggggtgtggcattggaggacccttgagagagattgccagattcagctcagcatcggtgactggactgaacaacaatgcgtaccagatatcaaggggcaaggaactcaacttttctgtcggtttgagtgaaacctgcaactttgtcaaggctgacttcatgaacatgcctatccctgatgccaccttcgacgcagcctacgccatcgaggcgacatgccatgcccctgatgctgttggtgtctacagggagatctgccgagtgctgaaaccagggcagttgttcgcgttggacgagtggtgcatgaccgacaagtatgatccaggcaactcgaggcaccggagcatcaaggccgagatcgagctcggcaatggccttccagacatcagaaccaccaaacagtgcatccaggctctcaaagacgcgggctttgaggttgtatcggtgaaggatctggcagaggattcgccgttgccatggtacctgcctcttgattccagccagttctcactcaatggcttccgtctcacccgtgtcggccgcttcatcactcacatgctggtaaagacgctcgagtgcctccatgttgccccacagggcagcctgagggtctccagctttcttgagaccgcggccgaagggcttgtgaagggcgccaaggaagggatcttcacgcccattttcttcgtcttggctcggaaacctctggacaagcagccagagatctga

SEQ ID NO: 65030 - DNA, 414 bp, Oryza sativa
  Clone ID: PAT_MRT4530_66117C.1
atggcatgtcatatcagtgcacgtagcaggtatgagaattatcatgaaatttatggaggtgaagtggaatcaaggacatccaactacgctgatttggcaaacaagtattatgatcttgtcaccagtttctacgaatacggctggggagaatcattccatttcggcagcagatggcaaggagaaactttacgcgaaagccttaagcgtcatgagcattttctggccttgcaactcggcctcaagaagggcatgaaggtcctagacgtggggtgtggcattggaggacccttgagagagattgccagattcagagataaaaatcaagcgaactataattattccaatgctactaattatagctcagcatcggtgactggactgaacaacaatgcgtaccagatatcaaggggcaag

SEQ ID NO: 65031 - DNA, 1007 bp, Oryza sativa
  Clone ID: PAT_MRT4530_66118C.1
atggccatgaacagtgtgctggtgctgatgctcgggctcgcaatggcggcgacatcgtcggcggcggtctacaaggtcggcgacacctccggctggaccatcctcggcaatgtcaattacactgactgggctgtcaagaagaccttccatgggattcacaacgtggtggaggtgaagaaggcggactacgacagctgcaccaactcgtcgccgatcgccacgcacacctccggcgacgacaagatcgccatcaaggccgccggccaccgcttcttcatctgcggcgtccccggccactgcgccgccggccagaaggtcaacatccgcgtcctcaagccacagcgctcctcctcctctgacgccccttccccggcgcccgccgcctccaagcgcggcgccgccgccgcgccgtcccccgccgtctcgtcgtcgccgccggagtcctcctcccccaccacggacagctcgtcctcctccacgaccaccgctccggcgcccaacgccagcgccgccgccggcggcggcggcgctaaggcggccttcgctgccgtggcgttggcgctggtcgccgccacggcgatgctacagtagttcacaagcccttcggccgcggtctcaagaaagctggagaccctcaggctgccctgtggggcaacatggaggcactcgagcgtctttaccagcatgtgagtgatgaagcggccgacacgggtgagacggaagccattgagtgagaactggctggaatcaagaggcaggtaccatggcaacggcgaatcctctgccagatccttcaccgatacaacctcaaagcccgcgtctttgagagcctggatgcactgtttggtggttctgatgtctggaaggccattgccgagctcgatctcggccttgatgctccggtgcctcgagttgcctggatcatacttgtcggtcatgcaccactcgtccaacgcgaacaactgccctggtttcagcactcggcagatctccctgtagacaccaac

SEQ ID NO: 65032 - DNA, 246 bp, Oryza sativa
  Clone ID: PAT_MRT4530_66119C.1
ctattcgcgctttttgttttgctcggatcttcgccctacgtgaatcctgtttgtgctttccttccgttctttttttcctccccccatgatgtgtgaaggccaagtgaaggccaagacccgcaagactttgagcaaggcaagtcatcactattctttgaacatgttgatcccaagtgcgaaattattttgtttacaaataaaattgtatgcaatgatgaacatcctacttgtgattatgccatgcct

SEQ ID NO: 65033 - DNA, 377 bp, Oryza sativa
  Clone ID: PAT_MRT4530_6611C.1
cgggccacaaaaaatgttgagccggtgggcacggtgtgaggtcaagtggggaattcaaaacttaccgggttttttttttggggggaaaagtgtgcggggccaacggggtaaaaaaagggagccgggttttactagatacgagggggattttttaagggggaaacaaagggggtacacgccccggtttaggggggggaaaatcaggttaactattttgatgggcgccgcaccgggaaacagggcacaattatttttggggcaaaaaatttacgggaaacctttgggacgaccttgttttgggaaccaaaggcggggttcctaggggacaaactcgggttactggggggggcactgaactttttggggccctccgggga

SEQ ID NO: 65034 - DNA, 245 bp, Oryza sativa
  Clone ID: PAT_MRT4530_66120C.1
cgtactccaaataaagaaagcgagccgtgcaaggtcaccttcgccgcggtggatccgagcggcagcagcccgaatatgggcgatatgagcgcggccggtgcggacacaggcgcgatccagcgggcgacctgcgcagcagcggacagggcgtgcacggtgtcgaggcgggcaggtgggaccctaaggcggccagcttcgcgcacagctacgcgggcaagcgcgccggatactgccggctgcagtac

SEQ ID NO: 65035 - DNA, 2259 bp, Oryza sativa
  Clone ID: PAT_MRT4530_66121C.1
cttcgcctgcgtgcagccccactggcagcaacattgcgcctggcactgcccccgatctgggttcgctcctggggcatgctgctgggcttctgcctcaggtctggcagcccgatggtgcctggcgcttgctcctcgcggtgaatgcgccccctgtccgggccgatgcggcggggcagcggccgcggcggactcggcttcccgctcccggttcctcccacttccccgagcttgcctcccgctgcacctctgcgggggaccccgcgtattgccctcggcgcgtggcgccgggtcgtggctcccttgttccccaggtccagcctcccgccaggcggccgccgagggggtgcccccccgtcggttacggccgctgcaggccctgccggctgatccgcggcccgcgcggtccgctccgcccatgtggtgtagctccccaggtgcgagctcctgcgtgcctcggactcttgcgcggcacgagcaagactcgaatagccgtggattactaacgcaggcaagatttcagcaatcagaatgaactgctttgcttacagctcagagaactgaagatagtcctgggctggttgaaatgttaccgtagagacgcaaagtttgttcatgtgtttgagtatgtaccctggcaaaaaaagcctccttttgttgtatatatagccttataatcaggaaagttctacatcagtaagacagaaaagagggaaatctgtagtgggggatgtgttcagggtggttctttgttcaatttgtttttgtagtcagcagtcagcagcacaaaaatgtacatctcggaatagttttgggacagataaataagaatcaatcaccccaggtttcagatttttaaccatggtattaccaacaaagtttattatatcctgtctgctgctctgtcttgttgggagaaggcttgcaatttcattgcatgaacccctggttttgaatgagctcccctcatacatactttccagatcattagtgcatcatatatgtccatctggatgatcattggccagcaatgcaatgtcccagtttccagttccacttattcactgaagaataaagcagtgaaggtcttctgcatttgatgttcctgaccgtttttcttggcagattcagctatagttggaccagtactcagctacaagcttacagaaggcagagtcctcattctccatcagccttgatggcctatcatactctatgagtttcccgtatgaaagaaccatgaccatgtcactgtcagtgacagtgggaaccctgtgagctatggtgatcacagtgcaccctgagaactcctgcttgatgactctctgcaggacggcgtcggtggccgagtcgatggacgccgtcgcctcgtcgaggaccaggatcttgttcctgcggaggaggacccgggccaggcagaagagctgccgttgtccggcgctccagttctcgccgtcgtcgctcactggtgattcaagaaggccaggaagggcactgattgtcttcttcaactgacacttatttaaagcctcccaaatgtcttcatcagtgtgcagacccagaggatcaacattgctccttacactgcctctgaaaagtgttggctcctgagggatgatgctgagcttcatcctcaggtctttcaaccctatggtgcaaatgtcaagatcatcgatgagaattctcccgctgtacgggtcgataaggcggaacaatgtgctcagaagagtcgtcttcccgctccccccacttccaacccctccaatcttatgtcctgctgcaaatgtgcaggtaatcccgcgtaataccgtaggcgcatttcgcccctgctgccccgggcatccactgacatagtaatataagaattgcacaatatcagagaaaatatttaattgattcttataagatttcatttgattactcttaagttctccaattctatccttcctgcagatggccatgaagggggaggccttctgtcagtaataacagcaggaggctcagctggcagatgcatgaactgtttgattctctccacagatatgatgtagttttccaggtttgagtaaaatcttgtcacaaacacttgggctgaagaaagcattaacgcatacgagagacacaggccaagaaatcctggagcaactgctccctccggaagcaagacgaggaggatggatgatgcaacaataaccaagatctgtagagcctcgacgcgcaaaagaacccattccagtgctgcgtttgtgtagaagaacagtg

SEQ ID NO: 65036 - DNA, 222 bp, Oryza sativa
  Clone ID: PAT_MRT4530_66122C.1
atgggggctcttcactggatggcaaggtcagggggtggcagcgatggtcggagtgagagaaagggaatggtggcaaaagtgacgccgcaaggagaggaggccaagctaacagggggagcataccacatggaatacggggtgggatctagtcccctagcatttctgaaagacagtttccaagaaaatataaaagataatcggtgttgcatgagtatcatgtag

SEQ ID NO: 65037 - DNA, 750 bp, Oryza sativa
  Clone ID: PAT_MRT4530_66123C.1
atgatgattcttgaggcggcagcattccttcttctaaccgccgccgccgccgccggcggcgcgagcaccgtggtggagcctgtcgcgtcgtgctccgccacggacagcttcgccgccgacagctccttcgccggtaacctggggcgcctcgtctcgctcctggaggccaaggccccggccatcgggttcgacatcgccacggtcggggtcggcggcgatggggaggatcagcgcgtgcacggcctggcgctctgccgcggcgacgtcgcaagggcaacgtgcgccgagtgcatccgggcggcgggtgcgctggcgcggcgcgtgtgcccgtccaagaaggacgccgtcgtctggctcgacgcctgcatgctccgctactccggcgagccattcttcggcgaggtcgacgccgagcaccgcgccgtcgtcccgccggcccgcgtcctgcggggcgcggacaggtcggccgacctcgacagggaggtgtcccggctgatgaagcggctgacgaggacggcctacctgtcgccgctgctgttcgccgccggggaggccgtggcggtcggcggtgcgcagaggctgcacgggatggcacagtgcaccaaggacctctccggcggcgactgcaagatgtgcctggaatccgccattgatcaactgctggcgaggggttgcgccaaggagggaggcaaagtgttgggtggaagctgcagcttgagatacgacttctactccttgtctgattcctag

SEQ ID NO: 65038 - DNA, 155 bp, Oryza sativa
  Clone ID: PAT_MRT4530_66124C.1
gttttaatgaccattcgggttttggaccttggggtagcttttaaatttggtggagtgattacaaatcttgtaaggacattgtgaaacacgattctatgtatcagaaaggatattataggggggtctatacactacatctgtataacgagcacggt

SEQ ID NO: 65039 - DNA, 106 bp, Oryza sativa
  Clone ID: PAT_MRT4530_66125C.1
atcgacatcgtgttgactgatcatgagtcgtcgcatgagcacacagatcgacaccagatgagtccatttctgatggctgtagaggtaccgcaccctgagggaaccg

SEQ ID NO: 65040 - DNA, 2214 bp, Oryza sativa
  Clone ID: PAT_MRT4530_66126C.1
atggcgagggggccaagacgtctacggaagttgaacctagatgcacagagcgcaggacatgtgcaagctgaagaagaaaatttgctgtacaactttgaagctctagatgaagcagatgcacaattcaatgacgataatttgcatctcgaagctcaagatgcagggaatgtacaacccacagaagatagtgagcaagacctttcagagaatgatgacataatcacggagttgcctcttgcagccaaaagaccaattaatataatctggccaaatggggaggtacgacaggttctaggaaattttaatgtaaaaaacttggaccaactgaagcaaggaaaggtaattgtagagacggatgaacatggtattccaaatgatagatcaggttctgttctaggctcgtatcttggtaagcttgcacagaattcaacatttgcaccattggacattccaaaatgggaccatgacttatttgtgggaccaaaggagagcatagtcgctgacgtggagttattcatggtaaagatgaaatttgtgtacccttctgagacgaagcagcttacaagaggctggattctaatgaaagctgataaagggtggagatcttacaaaagccgtttgaagggaagatactttaatcctgatgtgaggactctaaacgatatattaaaatatgtcccaaaaggtgtcaatggatatcaatggcgtggtcttgttaaaatatggtgtcaggataaacacaagaaattatgtgagaaaaactctgaaagcgcaaaacagcagaggaatccacatacaactggtagaaaaagccatgctaggctttgtaaagagatggtggaagcaaaagttaaagggaaggtccatgacattgacgtatgggatgaagcacataagaaaaaggatgagcgcattaaggcggtagtggaatcggcttaccatgaattagctaaaaagaaatctactagttgcagtggtctttcatccaaagattatgatgaagtttttcgacgtgtagttggaaaagagacaaaacttcgagggtactacgatcataagaattggagccaaataagggtttctcagggactagatgttgttggacaatctgaggaatatgcaatgcttaagttacaaatgaatgcaatggaaaataaaatagaggctatgagtgttgatatgactctgatgcgtgccttcatagaacaaaaattccctggagaggattggagaaatattgtggttgcagaacaaaataaagaagttgatatttctgaacaagttggtaatgatatccaacatgaatccaatgttgaagaatcatgtgaacatgtacattctacaccagataatgtgcaggtgcagaagcatttaatcagttatattcctgctaaaaatggttgccacaaaccatctgtaccacatgaacacatgattgccaagcaatcaagcattggaagctttgctagaaggtctgaagctagtcagagatacatggaatcaactatggcacatgaccatggaactgataaggttgatatgtttgatcaagttgacattgactgtacaaatgaatttgataataactttgataattcatttgccaataccaatgctaagtcaaatcatgtgcagcaagtacattctattagttctgctaatggcaatggtcgtcgtttcaatccatctataccatatgaacgcacaaatgctaagcaactaagtggggaaagcttaggcaaaaggtccataacaagtcaaatgaatgtggaatcaatggtgccacgtgagaatgtgaccaatgaggcttatgtttctgaacaagatggtactgatattatgaatgggtttgttcacaaccgtgaggaaccacatgccaatgagaatgctataccaaataatgtgcagcaattatgttctgttagttcaactagagctaaagagaattgttctactaaagctttgccatatgaccacataactgcaaagcaatcaagcattaaaagctctgtcaaaaggactagaactaactgtgtggattcaattttaccacctgataaagccaaacaggatcaaagggtggtgttcttgttttcattgaatccagtatacaaaggcaaagtagtggccaagggaaatttagtgactacagatagcacatatgtggttggaggaaatatgcttggaaatgaatattatggtaagaaagcgtag

SEQ ID NO: 65041 - DNA, 487 bp, Oryza sativa
  unsure (1)..(487): unsure at all n locations
  Clone ID: PAT_MRT4530_66127C.1
cncgctcgatcttccaagaaaccggccggactcgagcgctcgttatgtccgggttccagatcgtgtttgtagagccatggcggcggcggcgcgcgcgatcatatgcgagatggcgccgcagaggggggcggcggcggctccntttgttccttctcaccagaagcccagacgagttcgggccgcagcgcccggagcgcaccctcttcggctccaaggggaaccccgccgccgacgaggaagccgaggccccggccccctctgcgggagaagaggatgcccccgccgacgccgctcgcgttccgatccgaacagggactaggtgccagggacctggtcccacggattaacctccgatatccgtatttgatgcaaaacctggtgaccctgctgccgcaccccaagaaggacaccaaggggcccatggatagcgatgcctggcaatgcgctcaaccagctggcttgagctcaggaactggttcacatggct

SEQ ID NO: 65042 - DNA, 2052 bp, Oryza sativa
  Clone ID: PAT_MRT4530_66128C.1
atggcgagggggccaagacgtctacggaagttgaacctggatgcacaaagcgcaggacatgtgcaagccaaagaagaaaatttgttgtacaagtttgaagctctagatgaagcagatgcacaattcaatgacgataatttgcatctcgaagctcaagatgcagggaatgtacaacccacagaagatagtgagcaagaccattcagagaatgatgacataatcacggagttgcctcttgcagccaaaagactaattaatataatctggctaaatggggaggtacgacaggttctaggaaattttaatgtaaaaagcttggagcaactgaagcaaggaaaggtaattgaggagacagatgaacatggtattccaaatgatagatcaggttctgttcttggctcgtatcttggtaagcttgcacagaattcaacatttgcaccattggacattccaaaatgggaccatgacttatttgtgggaccaaaggagagcatagtcgctgacgcggagttattcatggtaaagatgaaatttgtgtacccttctgagacgaagcatcttacaagagactggattctaatgaaagttgataaagggtggagatcttacaaaagccgtttgaagggaagatactttaatcctgatgtgaggactctaaacgatatattaaaaaatgtcccaaaaggtgtcaatggatatcaatggcgtggtcttgttaaaatatggtatcaggataaacacaaggaagcaaaagttaaagggaaggtccatgacattgacgtatgggatgaagcacataagaaaaaggatgagcacattaaggcactagtggaatcggcttaccatgaattagctaaaaagaaatctactagttgcagtggtctttcatctaaagattatgatgaagtttttcgacgtgtagttggaaaagagacaaaacttcgagggtactacgatcataagaattggagccaaataagggtttctcagggactagatgttaatggacaatctgaggaatatgcaatgcttaagttacaaatgaatgcaatggaaaacaaaatagaggctatgagtgctgatatgactctgatgcgcgccttcatagaacaaaaattccctggagaggattggagaaatattgtggttgcagaacaaaataatgaagttgatatttctgaacaagttggtaatgatatccaacatgaatccaatgttgaagaatcatgtgaacatgtacattctacaccagataatgtgcaggtggtacaatatttacttgataattttaaaattgatgcttttcaaaagcattcaatcagttatgttcctgcaaaaaatggttgccacaaaccatctgtaccacatgaacacatgattgccaagcaatcaagcattggaagctttgtagaaggtctgaagctagtcagagatacatggaatcaactatggcacatgaccatggaactgataagttctgctaatgccaatggtcgtcgtttcaatccatctataccatatgaacgcacaaatgctaagcaactaagtgaggaaagcttaggcaaaaggtccagaacaagtcaaatgaatgtgaaatcaatggtcccacgtgagaatgtgaccaatgaggcttatgtttctgaacaagatggtactgatattatgaatgggtttgttcacaaccatgaggaaccacatgccaatgagaatgctataacaaataatgtgcaggtgattggcgacatcggagttgcagatggcaagggatgtgatcgtacgtgcgcgaccactgcggcggacggcattggttctaggccgctagggcgccggagtcagcagcctgtagatacgcctctgggtcacaccaccgttgttgggcatctacatcttcaccgccggctcgccttcgccgccgccgactggtgtctccgcctgcacggttggcctcttatgccgccgttgttgggcgtctacgacttcaccgccggcctgccttcgtcaccgctgactggtgtccttgcctatacggttcgcggactccaccaccgttga

SEQ ID NO: 65043 - DNA, 2562 bp, Oryza sativa
  Clone ID: PAT_MRT4530_66129C.1
atgggggccatgcgtcagaatatggctaaacttcaagacacgcttcgccagatgcaagagcagcaacaagcgtacgaagcagcaagacaagccaaggcccacaccctgcacttctacgctcagccccaagttcttcttccacacgctgtgcaagcaccggtgtacttcgccaagcccgccccagccgttgccgcgcgtccgacaccgcaagtggcctcggcacctgttcgcctgacggcacctcaagcctatggcaatgcaagctacttcgtcagaccagcaaaaccaggcaatgatgttcggcacggggcatcaatcgacacccgcagtccaacctcatgtacaagctgtggctttgccgttcgcgccctgatacccacagttgaattggccctctcagcaagggaccatggtgaagaggacaccaagcgaagacaagagatacaagccgaatatgacaaggcagcttcagccgcagcggccactgcacaggccaacgcccaagctcaggtccaagcccaagttgtaagttcagcgcccgtcttggttcaccctaccgctccggcgaaccaaggacagcatccaaggccgaaccaagccccaatgacatggaagaaattcaggactgagcgaactagcaaggcagtgatggcggttgaagaagtgcaggccctccgcaaggagttcgacgcccaacaagcgggcggacaacaacaaccttttcgcaagaaaatcaaggacctgtactgcgcttttcatggacgctcttcacacacgaccgagcaatgtcgaaatattcggcagcaagggaacgctcaagcgccgaggcagcagcaagcaagggccgaagaggcaccgcgtgaagcgaagaagatgcaacttcgagtagtgcacaacattgtctcagaaggtgatggggtcccaagatacttgtcgcagccaatatccttcgggctaaaggatgccgatggggttcttttcccacaccaagacccgttggtagtttcggcagagatggctggttttgaagtccggcacatcttgatcgatgggggaagttcgactgatgtcatattcgtcgggacatataccaagatgggtttgccaactttggcgttatcccaagcaccaacttcgctccgggggttcggaggtgaagcagtgcaagtactggggcaggccctcatcaaagtcgccttcggcacgaaagataacagaagagaagaagagatactcttcaacgttgttgacatcccatacaattacaacgccatcttcggccggggcactttgacaaagtttgaagcagtctctcatcacaactacctcaagctcaagatgcctggcccagctggtgtgatagttgtcaaggagtcccagccttcggctgccacggtggctcctttcaacagggaagttcataccttagaagtcgaagggcaagaaaacgcaaaaccaacaccgaaacccgccccccacagcaaagttgtccaattgcagatagatgaatccgatccagcgaaagtcatatcgctcggcggagacctggatgagcaacaagtgaatagcatcctggttgtcctcaagaaaaacattgatatcttcgcctggggtccagacgaggtgggaggtgttttgccagatctcatcatgcaccatctcgcagtcaagcctaacgcaaagccgaaaaagcagaagctaaggaaaatatcggtagattgccaggaggcagcgaaagcggaagtgaacaagctgctaaaagcaggagtaatacaagagattgaccacccagagtcgttagcaaatccagtattggtaaaaaagtcaaacggcaagtggcgaatgtgtgttgatttcatggacctcaacaagatgtgcccgaaggatgatttccccttgcctcggatcgatcagctagttgattcgactgccggatgtgagctcatgagcttcttggatgcatactctggatatcaccaaattcacatgaacccggcaaatatccccaagacagcctttatcacgcccttcagcaccttctgccatctcagaatgcccttcggcctgagaaacgcgggggctacgtttgccaggctggtgtacaaagtcttggggtcacaattggggcgaaatatcgaagcctacgttgatgacattgtcgtaaaaagtcgcaaggccttcgaccatgcgtcagacttgcaagagactttcgacaatctccgtgcatccggcatgaagctaaatccagagaagtgtgtgttcggcgttcgtgctgtgatggcttcaagaatgcttaaacactacttccaagtccacataatcgtagtaccttcgcagtaccctttgggcgaagtgcttcgaggaaaagaaatcacggggcgcctaagcaaatgggccgctgagctatcacctttcgacctacactttgtcgctcgcactgcaattaagtcccaagtcctcgctgattttgtggccgaatggacacccgcgtccgtcgcagagtttgagccagtcgaacaaccatggtttatgctaaaagccaatatctatgtattaatgtga

SEQ ID NO: 65044 - DNA, 1941 bp, Oryza sativa
  Clone ID: PAT_MRT4530_6612C.1
gcacgagggcgccccccggcaatggcggcctactgctctagggtttaccaccaccacccggtctcgccttccacaatgcagggatcgctcgcgaggccttcgatccacgcgggatccgcaagcctgaccttccgtgctcggcccaattccgtgtccatcgtgcgatgcgacgcggactcgccgccggagggaagtgctgtggcgggatgggcgcctccggggccgtacacggggagggacccggcggcgaggaagccggcgtggctgagacagcgtgcggcgcagggggagaagtacgcgaggctgagggagtcgctcggggagctcaagctcaacaccgtctgcgtcgaggcccaatgccccaacatcggtgagtgttgggatggcggcggcggtgcaggtggggacggggacggcattgcgacggcgacgatcatgctcctcggcgacacttgtacccgtggttgtcgattctgtgccgtgaaaaccagtaacaagcctccgccgcccgatgccctggagcctctcaggacagcagtggcagttgcaagttggggcgtagactatgttgtgctgacaagtgttgatagagatgaccttcctgatggtggaagtggccattttgcgcaaacagtgaaggctctaaaggaattgaaacctggtatactggtggagtgtctaacttcagactttcgaggtgacctggaggcagtttcatccttggcaagctctggtttggatgtgtttgcacacaacattgaaactatacgatcagagtttagctgttctgaaacatgcgaaaaattgcaaagatggtatggtgagacagatgaagaggtgaagcaaaccatgtgtgatttgagggccattgacgttgatattctgaccttgggacaatatttacagccaacagaaagacacttgcgggtcagagaatatgtgactcctgagaagtttgatttctggaaggagtatggggaatctctgggttttctttatgttgctagtggacctctggttcggtcttcgtatcgtgcgggagagctctttgtgcaaaatttgttctttgatgaaagttttgcattgaagttgtgtgctgatgacaggaatctagccgttactctcctgaaaggagctgattggttcgcgatcctgaattatacaatcatcgtagtgtttcctgttgcaggggtggaggatgcggtggtgggcttcgtcaccggcaagcggaaggccaccgagttagcccacgcaatatggaatgaaagttctgttaacgggaaatgctctctaggattcagcgggagatgtgtaaaagaatacgtgtacacattagctattcacattttgtcttttggttttctcattagggtgtggagaagtattgttcggaaaggggatactgtggttgatgccacatgcgggaacggcaatgatacattcgctatgcttaaaatggtagctgatgaaagagtacaagggcgtgtatatgggttggacattcaggagtccgcgatagccagcacttcctcttttctgaaaatggccgtcaatagccatgagctcgaacttgtcaagttgtttacaatctgtcacagtagaatggaggaggtcgtcccaaaagatttccctgtcaggcttgtagcattcaacttgggctatcttccaggaggagataaaacaataatcactgtacctaagacgactgagctggctttgcaagctgccagtagcattgtcagttctgggggactcataagtgtccttgtctacattggacatccaggtggaagggatgaacttgatgttgttgaatcatttgcatcaagcttgcctattgatacctggatgagctgcaagtttgaaatgctcaatagaccgtttgaaatgatgaatagaccaatggttccggtactcattatcctgcataagaaataatca

SEQ ID NO: 65045 - DNA, 489 bp, Oryza sativa
  Clone ID: PAT_MRT4530_66130C.1
atggatcatcagagcagcggcggcggccattgttccaaccctcccagctgcggcttctgcggccgcgccaccgtcgccatcagcttcgccgccgtccccgccggcttctgcacctgcaacgtctgcctccgcgacctcgccggcgtcctcggctaccgctgcccgctctgcaacttcaccgtccaccgccaaggatgccgccgcccccaccaccaccacccgccgccggtggcctacacgcagcaccagcgggcatcgtcctacaaccaggcgccggtggcggcgtcgtcgccgcgcgcgagcggcagccggaggaagcgggtgaagacgttcgtcatcaggctcgtcgagaaggtcatcgggctggagaagaacggccgcggcggcggcggcggtgggcgcaagaagaaaggcaaaggcaaaggcggcggcggcgaggacgaagaggaggaggaggaggaagaagaggaggagggatatgacgattaa

SEQ ID NO: 65046 - DNA, 1717 bp, Oryza sativa
  Clone ID: PAT_MRT4530_66131C.1
atggagctcctcctcttgtgtacgccgtgcgttattctccttctctcctccctgtacctcctccgtctcttcgtcgacgcccgccgcaacctgccgccgggtccccgcccgcagccgctcatcggcaacatcctcgacctcggctcccagccgcaccgctccctcgcgcgcctcgcggggcgctatggcccgctcatgacgctccgcctcggcaccgtcaccaccgtcgtcgcctcctccccgggcgccgcccgcgacatcctccagcgccacgacgccgccttctccgcgcgctccgtgccggacgccgcccgcgcgtgcgggcacgacggcttctccatgggcatgctcccgcccagcagcgccctgtggcgcgcgctccgcagggtgtgcgccgcggagctcttcgcgccgcgcagcctcgacgcgcaccagcgcctccgccgggacaaggtgcgccagctcgtgtcccacgtcgcgcgcctggcgcgcgacggcgcggccgtcgacgtcggccgcgccgcgttcacggcttccctgaacctgctctccagcaccatcttctccgccgacctcgcggatttcggcgacgcccgagctgagtcgtcggtgggggacttaagggacttgatctcggagttcaccatcgtcgtcggggtgccgaacgtgtcggacttcttcccggccgtcgcgccgctcgacccgcagcggctgcggaggcgggtggcgagggtgttcgagcggctgcaggccgtgttcgacgggcacatcgaacggcgcctgcgggaccgcgctgccggggagccgcccaagaacgatttcctggacgctttgctcgactaccgcagcccggaggatggccggggttttgatcggccaacgctacagtttctgtttacggatttgtttagcgcgggaagtgatacaagcgcagtaactgtagaatgggcaatggctcagctgctacagaacccaccagcaatggcgaaagctcgtgaggagcttgctcgagtgattggctccaaacaagaaattgaggaatccgacattagccagctcaagtacctcgaagccgtcgtgaaggagacattacggcttcatcctccggcgccatttctgcttcctcaccaagccgaaacgaccacacaggttggtggctacacggtgcccaagggcacccgtgttctggtgaatgtttgggcgattggtcgggacagcaaggtgtggtctgaccctgacaagttcatgccggagaggttcctgcagagcgaggtggacctgcgtggccgtgacttcgaactgattccatttggctctggtcgaaggatctgtccggggttgccgctggctgttcgcatggtgtacctgatgctcgcgtcgttgctgcaccggtttgagtggaggcttctaccggaggtcgagaagaacggggtggacatggcggagaagttcgggatgatactagagttggctacgccactccgggctgttgctataccagtttaataagctgatcatcaccatatgctaccttgctacatacaatccgttatctttaggaatggaacacttcactggtaaataaaatcatatactagtacaattctgttgtttatgtctgaaagagagatcaaataggggtgcctgtacggtagtactaaatgccagcagctatctaactgagaaagtcttgagttagtcgttcttctataaaaaa

SEQ ID NO: 65047 - DNA, 1048 bp, Oryza sativa
  Clone ID: PAT_MRT4530_66132C.1
gaaaaagcagaggcttagaaacacctcagccaatgacctagatcaacttatgtttgacatcaatgaagaagggttgttagccaggacagacaaagcttcaccaaacgtccaaagtaagctctcaccaagtatcgtcaaggtaccgctgaagacatcaagggagcagctggagaacatgcctccaagttcccaactagctgtgaccaaccaagattacaaggcaccaagaaatgaagataacccactgtgtaccgccagaaagacaaataatgctcaccttggctcctctgtaccttctgaatccacgtgcataggtaaggtggaagctggggctcatgctgtctccaggcatcatccaggacagagaaatactgctacaaacatgaccagaaagagcaaccaagcaacagaagatcaggtaaaaggatcaccaagaaaacagcgccccaggcatgcacacggcagaggtgtgaatgtagtgtcatcaaattcaaacaacaatagcctaacgatgcatatacgtctacctgtttatgaaaaggttgcatccttatcagggggttcagagaaaacagtcaaccagccaacctcccatgataacaagatgaaactaaaaacatatagcacccaagaagaagctgtgtctcactcagcatcccataataagacggagatgcataaacgtagtcttgactttcctactccaccacgatgccatgatgatacgtacaacagtacgaacagtacaaacctgcatattctggagaagtcaattacaactaacaacaagcagaagcaacagcctgcagtcatgtgcattgacattttgaagaaaaaccatcctcctgaaccgaccaaagtcagatcttcaagtgagcgacaagaacgacccaacagtccaaaaccagatgaacatttatcaacaacagcccgttctcgatcagttggtgcagatagaattagccctcagatcagaactccatcgcaagaatctaaagatcatgttgcaccatttatcgaagagtctgaggcatgtgagaccaagaac

SEQ ID NO: 65048 - DNA, 393 bp, Oryza sativa
  Clone ID: PAT_MRT4530_66133C.1
gacaaaaacatcagcatcctagccatagaacaagcaatagcaaacccaatcttgtctatcttgttcccaacacatgagattccaaacaagcaaaacaatccctcccataaaacacccatggatggttttcccccgttcatgacacaaaacaggcacttacaagcctagatagagctcaagataatgtaagcctactactactgtaccaccaccaccactactactgtacacacactgcaggccttgagcagagcagaaaagaattgcatcagtacaggctgcacagaattggctgcattcttgtgcagatggagattctagaatttgtgggacaagcttctgcgtattctctatcccaggcaattttccttgccacataggactgtggtttac

SEQ ID NO: 65049 - DNA, 870 bp, Oryza sativa
  Clone ID: PAT_MRT4530_66134C.1
ttcattgctcttgtcaatgggctcgtcagaccaggtgaggaattgaaaaagcagaggcttagaaacacctcagccaatgacctagatcaacaagtatcgtcaaggtaccgctgaagacatcaagggagcagctggagaacatgcctccaagttcccaactagcttggctcctctgtaccttctgaatccacgtgcataggtaaggtggaagctggggctcatgctgtctccaggcatcatccaggacagagaaatactgtttatgaaaaggttgcatccttatcagggggttcagagaaaacagtcaaccagccaacctcccatgataacaagatgaaactaaaaacatatagcacccaagaagaagctgtgtctcactcagcatcccataataagacggagatgcataaacgtagtcttgactttcctactccatcacgatgccatgatgatacgtacaacagtacgaacagtacaaacctgcatattctggagaagtcaattacaactaacatcaagcagaagcagcagcctgcagtcatgtgcattgacattttgaagaaaaaccatactgctgaaccgaccaaaggtgatacagcactttcctgctcttatctatcttcagacaagacaactgagctgtagaaaaatattatagtcagatcttcaagtgagcgactagaacgacccaacagtgcacaaccagatgaacatttatcaacagcccgttctcgatcagttggtgcagatagaattagccctcagatcacaactccatcgcaagaatctaaagataatgttgcaccatatatcgaagagtctgatgcatgtgagaccaagaacagtgaggaagctgtatctagcaacaca

SEQ ID NO: 65050 - DNA, 435 bp, Oryza sativa
  Clone ID: PAT_MRT4530_66135C.1
atggatgcgggatggaagggccgcgatgggtggggatgctggcggagggagcggtcggcgatagagggatctgcggggcggaggatgctagggtttggagtcggcgcgacgcggggagagggaggggcagaatgcggaggtggacgacggtggactcgatatcatgaaaggacggcgatgatggcggatgcggtttctgtgggatggggaatacggatcgggaaacgtcacgagcccatcgcgcagggcccaatctccttggcgctttttttctccctcacccaacaatccccatccctcagcgcaggatcaatgatgccatcagcacggcagtccgagtcccttatcccccctcgatggctccagcaagtacctgccctgctgctctccctcccttggtgcatgagcaatggagctgccgtcggcactgcctag

SEQ ID NO: 65051 - DNA, 1158 bp, Oryza sativa
  Clone ID: PAT_MRT4530_66136C.1
ccggccgggatacatatctatgcaaagtctctgaccatgggatacaaaggatggaccataaaaacatttcttctacttcatttgctaatattcagtgtagatccgacaaaagaagaggttgacaacaatttaatcatcaagacgattcagaccgcagatgggcaaacctttgcctgtgttagtttcaaatcgcaaccatccttgaggcatcctttgctgatgaatcataccactcagttgatgccaccaatttcctttcctcacagtaccgatgatgatgaaggatctaaatttggcatctctaatgttgagatgagcgaaattgagtgtcccccagggacggtgccaatcctaacaagctacaatggatccatgagtacaagatcattcgataagattatatacagtgagaacagaaatgacaaaggaaatagacaaatggctgcagttgttatagtgccatctactttttacggactacaaacatcaatttcaatatgggaaacagatcttggtacaggacgtccaccaaggtttagtggggcaattgttgttctaaaaaatggaggaagtcgtgtagctgtaggatggtctgttgatccacatctgtacggagacaatcttgttcatttcgagatcgcgtgggttgataatgataagtcatgtatcaaccttcgttgtgcggggtttgttcagatgagcaaaaaggcaatccctggaataataatcaggccagtttccactgtcaatggaaaacaatacatcattagagttaagattattaagttcatgggagactgggtgctgaaagttggagaagaaatagtggggtactggccatcaaagctcttgactcacatgtctgaagctgcagacgtgatcagttggatgggtgtagtagaagctgctccaggggaaccttttcctcccatgggcagtggccagcctgctgatgaaggagagacaaaggccgctttcttcgccgatgcgaaggtgatcgacgcgtcgggaagctttgcaactcctgctctcaaaacaatcaacacggttgcaactgagccaaactgctacgatgttgggcgtccttacaccacggacgatggcttgcagttctactatggtggagcgggatgctcaccgagtcagcccatcaagtga

SEQ ID NO: 65052 - DNA, 1963 bp, Oryza sativa
  Clone ID: PAT_MRT4530_66137C.1
gcacgagggaagccgtatggggaagcgaccagcaagcgatcgagacaaccgctttcagatgctgggagtctgtacatgatttacacgctggcaaccgggaagtgctccgaggagacgaaaatctggtgccaccacaagctcacgttttggctcagctccaatgctcatcgtcatcataatcctggttctcggggtcgtcctcgccttcccccgctggatccttttcaccgtccacggaatctaatgtgtcctggcatgacagctggcatcgcttatcccctgcaacagccgccaatgacccctttttcggaccatccagaataatgcgtgattttgacatgctccgcatgttttgctccaaagacaaaaacttcttctcccatgtctcatttaacccttgtagagcttgattaatcatctgttgcacctgttcatgtgtgaacatcggaggttgtccttgtccgtgattgctggaacaaccaggggaggactttggcaaagaatcagtctggaccttcttcctaacaccagtgtcgcaatagtatctcccacgcttgcagcctcccatatgttcctgtacaggctctctggcctctgcagtatgttcatacgtggtatcctcagttcgcaatatcttcttgtcaataatccctcctttatcactgttaatcttggtggatggatcaatatcagataccagctttctgccattgtcaatgctcttcataacttcatctttcgcccaatggtcacacaacttctcccaccattttggttgcatccattcagggacgaatggtttccagttaagcggatcatcaagctcaagcaccagaacagactcatctccatgctgctcctctgaatcttccctaccatcgccctcttctaacgactctgcaccacaaggtgtcagcacaggcctgtcagcttctttgcgtggttccattagtaccgcaggggcacggcccctgcgcttttttgatgatttactaacagatgctgacagcatatcaccattccgggcatcctgctccacatgaaccaaatcactggaattttcgccaggctgctgcttgtcacaaacttgatggagagtgtttatctgctcatgctcgatagcactaggggcagctatatgcccagttttctgcttgttgtgcactgcaatcatgccattgtgaaatcctcctcctacagagtttgaaggcattccctgagcccttgatgcatggatggccttactaatatgctcttcctgcaactttccagctggatgagattttggaccagaagcagatgtagttttcttcttgccaggcttggtcatagtcccgttaggtggttctgtgcgtgactcctctcgatcagctgaaggattaacacactcgttttgtaacctccctacatcaggaatttgtgtcctagagtcaactctgaatgaactgaatgactcctctctaaaagaatgcttgtagtattgctctggaataatggacttctgaacctgtccagcaagagttggctgatttgaatttccattcagcacctcggaggtcatcgccggccgattggaggtaatcgggatcgctgccggcggggcaacgactgagacgacggccgcgaggggagggggaggcgcgatctcggcgccgcagagcgggcacgaaaaccgccccgggccgtgcggcacgctgaggacggccgcgcatcccccgcacgagacgcgcgtgggaggggcggcggcggtggcggtggcgggggcgggcacggcggaggggacgacgctcgcgcgcccggggagcgggagcgcgcggcgggggcgcggcggcatgagctccggcgggagcgcctgggccatgccgcagtcggggcaggcgaactccgtcaggccgtgctccacctccagggtctcgccgcacccggcgcaccgcacctcgaggatccccggcggcggcgccat

SEQ ID NO: 65053 - DNA, 204 bp, Oryza sativa
  Clone ID: PAT_MRT4530_66138C.1
atggaggtggaggcggcaacgcggcggttccacctctggctccgcgggctgcgggggctgcagcgcgagctccgggcggcccggtgggcggactctcgagcttttagtgtctgcgcgaacttcgggtaccgtgaatctcgcaggcgagccctcgcctgtggtgatctggcatgtctcctcactgggatggcgttaagctgctaa

SEQ ID NO: 65054 - DNA, 596 bp, Oryza sativa
  Clone ID: PAT_MRT4530_66139C.1
ggcggtggcgatggtggccgcggccgcgtcgtcgtcgtcccgggtgaagggagcggcggcaatggcggcaacggtggcagcggcggtaaggcgggcagcggtggaagcggcggcagagcggggagcgctggcagcggcggcaatggcgggaggccggggacgagaggcgcggtcgatggcgggagactggactagcgcgagaggcgcgtctggtggtggaggaggccggcacggcgcgatgaggcgcggccggcggtaaatgaggcgaccacggtgtgagtaggagtggccggggggtgtggcgtggtcttcggcgcacgaatgctggccgacgggggcgccggtgcagtggttccacatgtcagcagaggttgagcagtggtagagcatcggtgcgtcagccatgaatagtggcggccggtccggtgctagccttcttccggacctatgtgttggcgctgtcggtgtgggtggtagtattttttttcctttttcctgattacgaccttccagggttgtaatcttgtaatttttttctgctctatcaatagaacttcgcaccatctcgtgcgagtcgttcaaaaaaaatagttttg

SEQ ID NO: 65055 - DNA, 283 bp, Oryza sativa
  Clone ID: PAT_MRT4530_6613C.1
gtcttcggccagctgccgtgtaaggcggctacggcggtgtcggtggtctacggtgtgcggtcccttggtgtcgtgcagctacggtggtggctacggcagccgcaggcggctggcaactccgacgggaacttggaggaatctgagcggtggggccctcatggccacagttatgctatctgatctaatcgagctagccatgcatcatgcatccgatcgttgatcatgcgttagtgtttgtgtggaactattctagtttggtgttaactgtgtggttgcccatctg

SEQ ID NO: 65056 - DNA, 849 bp, Oryza sativa
  Clone ID: PAT_MRT4530_66140C.1
cgccccccccgccgcaagcctccaccactcccgctgccgccgccggatttgctccccctcgcgattcctcttgcgccgccgccggattcgctcccctcgcgtgctcgtcgccgttgcgctgcgccgggttgtggttgttcttggcggctaggtcgtggggttttcttgtttcggaggtagggagaggtttcgttagggtttcgggcggggatggaggaggtgacggaggcggtgagcaacctgtccatcacggagccgcacaagaagaaccggatccaggtctccaacaccaagaagccgctcttcttctacgtcaacctcgccaagagatacatgcagcagcataatgaggtggagctctcggcgctcggcatggccattgccactgtggtgactgttgcggaaattctaaaaaataatggccttgctgttgaaaagaagatcatgacatcaactgttgatgtcaaagacgactcaaggagccgtcctatgcagaaggcgaagattgaaattttgcttgggaagacggagaagtttgatgagctgatggcagctgctgccgaggagagggaagccgcggctgctgctgagggcgaggaacaaggctagctaaataaactattttaagttggctgttgagtttaatttagtactcctgctaggtttaagtttccgtttattgtggtcagcaagagacttatcttgtgtaatcaaaaagctctgcttatttgattcgtttgaatgatagttcatggtacctatttttgttaaaaaaaaaaaaaaacaatgttgttgtccttaaagcttttagcttctcggttttctctttaaaaaaaaaaaaaaaaaaaa

SEQ ID NO: 65057 - DNA, 237 bp, Oryza sativa
  Clone ID: PAT_MRT4530_66141C.1
atgaatccaccaacggccgacatgagcgcggcatggcgcggcgagctagaacgcaacgtaccgtacctggaggaggttgttgggagggaagcgagcggcggcgggtgggcgtgcgggcggcggggcgagcggctggatggggcagtggagcgcgacgtgcacggcgagcgacacgaagacggcggcgaggaggcccagctgctgcgccatgccgccgatcgacccaccaatgtgtag

SEQ ID NO: 65058 - DNA, 342 bp, Oryza sativa
  Clone ID: PAT_MRT4530_66142C.1
atggccaccggcggctcgccgccgctcaccggccgccgccgccgccgccgcggcgagaaggtgcggcgctggacaaggccgaagaagggctcggtctcccggtccccgcactacccgtgccccggcggggaggaggagcccccgccgccgctggcgcccggcaccgacgtcgaggtccgcctcgacggggacgggtaccacggcacctggtacagggccgtcgtcgagcgtttccgttcccggcgcagggggccccgcgccccggcgcgctacgccgcctcctacgccgacctcgtctccgacgacggcggcggcgggttcgagcccgagtcaggagattaa

SEQ ID NO: 65059 - DNA, 600 bp, Oryza sativa
  Clone ID: PAT_MRT4530_66143C.1
atggcgagcagccacccatttccaagctggtggggcgccaagcactacatcatggcggccatcgccggaaccctcgccgccagcgccatcgtcatcgtcacctccgtcgtcctcagcccgacgcggatatccttctcggtcaccggcggcggcgcgtccatcagcccttccgccggcggccaggcgtttctcctcaacctcaccatcgccgccgacaaccccagccaccgggccggggtgcagtacctcgccttcgcggtgagcttgcagcagttcaccgcgaggaacaggatggagtcggtggaggcgacggtccaagagggcgtcccgttctaccagccgccggcgagctcgaggagcgtgctcgtgacggcgccgctcgtcgacaagaacttcttcggcgccagccatggcggcggcggcggcggcagaggccctccgctcaccgtggtggtgagaggacaggtaaggttcaaggtctggctggcctactccaggccgtacgacgtcgcggtggagtgcgcgcctgtcgacgtctcctccggtgccggcggcgccaagactagccccaaatccaccatggtcaagtgcatcccctga

SEQ ID NO: 65060 - DNA, 244 bp, Oryza sativa
  Clone ID: PAT_MRT4530_66144C.1
atggcagtgaactggagcggcatcgtctccctggtgatcgtctcctccttagcgcgcttcctcagcggctcagcgcacgcgcctccttgccggacgccgaggtacggcagccgatgtcgccggccgcagagcacgctcgttcccgcaggacgccgagatactccggccaagacgacggactactgccaaggctgggcatggcggcagcggcggcgtgaactgcaggccctcggctcgtgcctct

SEQ ID NO: 65061 - DNA, 717 bp, Oryza sativa
  unsure (1)..(717): unsure at all n locations
  Clone ID: PAT_MRT4530_66145C.1
ccccggggnaacgtcgntgggacancaagaacgaccctcctatgggntgcgnttcgttcaacgctcagggtcatcatccttgacccaccccggccaggtcggtgctggttacgcccccgttttggactgccccactgcccacatcgcctgcaagttctctgagatccttgagaagcttgaccgccgtaccggcaagtccatcgagtccaaccccaagttcatcaagtcgggtgacgctgccatcgtcaagatgattccgtccaagcccatgtgtgtcgagactttctccgagtaccctccccttggtcgtttcgccgtccgtgacatgcgtcagaccgtcgctgtcggtgtcatcaagagcgtcgacaagtcccagggtacccagggcaaggtccccaagtccgctgccaaggccgccaagaaataagctgctcaaccaacagcaacatctaatgtcgagccccgacaagcaggaagcatgtcgtagcatcttgggcacttcctcgttcgcaacgaggtttcggtcaattttgctttatcccaaaagagtactcggtttttattggggcccatgatgaaatgacggtttgggatttcgtaactcaaaaaaattcttgacctgtgctttagtctacatagagtcctcagaagtgatctcggcgtttggtcatgacttaaacgaaatttctttttttctaaaaaaaaaaaaaaaaaaaa

SEQ ID NO: 65062 - DNA, 248 bp, Oryza sativa
  Clone ID: PAT_MRT4530_66146C.1
ttctgacgctgacccctacgctagccacccaggggccatgattacggtaaatctcgtacggcgcatggtggagggggcaacagcaacgtcattcacgtctcccacgagggataggaccaccataggcctacgccgaactacggtggattcgaaggcattcagtcccttgcaagaaacccgcccttaccacggtggcggaggatcgccaccggcgacccataggaactactgtaaggccggtgaggaca

SEQ ID NO: 65063 - DNA, 1124 bp, Oryza sativa
  Clone ID: PAT_MRT4530_66147C.1
atggcagtgaactggagcggcatcgtctccctggtgatcgtctcctccttagcgcgcttcctcagcggctcagcgcacgcgcctccttgccggacgccgaggtacggcagccgatgtcgccggccgcagagcacgctcgttcccgcaggacgccgagatactccggccaagacgacgtgcgtgatggttgccgatgagcagcctgtgtccgctctccttgtccttgtgtttctgtgtttctctcctgtgtctctgtgtatgtctctctagggactactgccaaggctgggcatggcggcagcggcggcgtgaactgcaggccctcggctcgtgcctcttacttgctgcgtatcccacaatacgttagacgtgggtgtagaggtggtgatagccctcaagagcacttaagtcctccctgtgcggaaataccaacaactggcatcccgccatgcctcttgaacgatgctgacctcgatcttgtcggtgatcaggagatgcaagcctactacatgctaaaggatcagatatttgctcacacgcgggcatacgatccggagctactaaaaaagataggtatggatgttaattctcataccatttggaaagttgttggatggcagagatttgcggtggcagatgagcctggttctcgtttgcttactttacaatttcgaggtgatcttaggcctataagagaggataaattgattatcatgtttgtcacagttaggaagattaaagttgctcctgtgaaatgtgcaatggtggatcatatagggacacacgcaacatggcgagaaatgaacaagaaggttcaacatccgtgcaaatgtacgaagccggttaggaaccaactggggatgcacccggatggacccaagctctacaccatagcctcagaggctcggtctggaagagtgccagcgagagccgacagagagcatctcatgacatacactggggaacatgaacattcattccctcagatcaagcacaacagcatgacgaccttcaagcgtactttcgcttccaggggttcaatccttatcaaggaccctgagcgaaaggcaagcttggtgggagacgtctctccccccgctgagatacttttcatgctctatgat

SEQ ID NO: 65064 - DNA, 1543 bp, Oryza sativa
  Clone ID: PAT_MRT4530_66148C.1
acgttagacgtgggtgtagaggtggtgacagcgctcaagagcacttaagtcctccctgtgcggaaataccaacaactggcatcccgccatgcctcttgaacgatgctgacctcgatcttgtcggtgatcaggagatgcaagcctactacatgctaaaggatcagatatttgctcacacgcgggcatacgatccggagctactaaaaaagataggtatggatgttaattctcataccatttggaaagttgttggatggcagagatttgcggtggcagatgagcctggttctcgtttgcttactttacaatttcggtacactttgaaagaaatagaagatggaatttcctttcgctttttccgtaaagaatttacacttacatggaaatgattaagtacacttctttgttttcacgatgactataaaaccgttcttcggaatttctgggttcgagaaaaacagattttgggaaaatatttctggtggtccaatttgcaagaaacctagaacgaatgacatccataatcctacacttaggcttatgcacaaatggattgttatgactttgtttcctagaggtgatcttaggcctataagagaggataaattgattatcatgtttgtcacagttaggaagattaaagttgctcctgtgaaatgtgcaatggttagagagtataaagtttactgctcctgttgagtgcacttccctaattactagcatagcatacagacttggggttatttctaatgatcagattgcttatatttcaacccctcatccgtgtgttgacgagaattatttagtgcaaggtcatattcttaagcatggagtagatggatctttgatattctttttccccggttgtacaaaaaaaatcccattacctaactcgggatatcatttgtacaactgtcatgaactaaccattcccgtatagaccatagaagaatcttgtgcaggtggatcatatagggacacacgcaacatggcgagaaatgaacaagaaggttcaacatccgtgcaaatgtacgaagccggttaggaaccaactggggatgcacccggatggacccaagctctacaccatagcctcagaggctcggtctggaagagtgccagcgagagccgacagagagcatctcatgacatacactggggaacatgaacattcattccctcagatcaagcagtatgccttcatcccccaatgaatggtgaatggtgctcaagttcctctcgttaggacttgggagaaattacaaggaggatggataaaattgacatgcaaacgggagagatccaatacaacctcgatgaacacttaacacagacgcaagaatgacaaccgaatgttgatgctcagttcaccaacaccaacaacgcaacctgatgcagcaacagcatgacgaccttcaagcgtactttcgcttccaggggttcaatccttatcaaggaccctgagcgaaaggcaagcttggtgggagacgtctctccccccgctgagttgctctgttttatatctctcatatatggggtcatg

SEQ ID NO: 65065 - DNA, 171 bp, Oryza sativa
  Clone ID: PAT_MRT4530_66149C.1
aaaaaaaaaagaaaattttttttgggcccaacgttattgcttactgcatttccatgtatgaaaaatgcattttgacaggaccaccaaattttgttaggccaacaaaccgattcatttttccaaaatagaggtaaaaaaaaaggggaaagtttttacgatttacaaacaggg

SEQ ID NO: 65066 - DNA, 397 bp, Oryza sativa
  Clone ID: PAT_MRT4530_6614C.1
aatattcagagatacacggctgaacaaaatattcacagttttaaaattggacaaagagtccaacttacaagtattcagttgacagaagaacacgaaaccttcgaggagaaaagcaagcaagccactctggtacttagaagcagaacctctttttctgcatataatggatgaacacatatgaattggctagctcagtgttatgagatattctttacattttttttcctaatactatatgatgttgttgacttttagatatatggttgaccattcatcttattaagaaaactatgcaagtattatttattttgttatgatttattttttttattaaagatactttaagcataacttatattttttatatttacacttttttttaataaaacgaatggtt

SEQ ID NO: 65067 - DNA, 222 bp, Oryza sativa
  Clone ID: PAT_MRT4530_66150C.1
atggagcggggcgggccctgcgacggcctctgtcgtttccggattcacctaggcacgagaggggactgcccgttgcccgctggggacggggggcaatttggtggatacctggctacaaacctcacccgagcagcccttatccagatgagcgacaagtggttgaggaagggatcctatggtgcgactgcacggctccaattgcgtgaagagacggacagctag

SEQ ID NO: 65068 - DNA, 319 bp, Oryza sativa
  Clone ID: PAT_MRT4530_66151C.1
cccacgcgttcgattacaagttatgtatactgaatcatttggccttcagtatttatttgttggtggctggataaaaatgagggggggagagagatttataaaattaaaataatttattttaataaataattctatataatgaatttattattttaatgaatgggaaaaaaaaaataataagggggggggggttttggaggttccaagctttctgtcccttgggtggaactggtaattttttttttaggggacccaaaaataaattcattgggggtttttaaaaaactgtaagactggaaaaaccgtgttgtttccaaat

SEQ ID NO: 65069 - DNA, 1023 bp, Oryza sativa
  Clone ID: PAT_MRT4530_66152C.1
atgacgaccttctcgtttacaagaaatgagtcttcatcgcggtggcatccccatcgctgccagccttactggaggccacccacgtgggacatgaagggttcaaacgtatgcttcaccgccttggagcagattttgatatcccgggcaccaagaagatggtttaggaacacgtctgcatgtgcgcggtttgctagcgaaacaaatatgagcacctccatccagccggcttgctacaactgctgctcgtaccgacccatggacttcgtcgaaggcctccctcatgtccacaacaagtccgtcatcctcactgtcaacgactggttctccaatttttcccacttcatcccgttagggcactcgtacacggcgacgtcggtggtgcaggcgttcttcaccgaggtggtccaaatttatctcatgcccaactcaattgtgagcaaccgtgatctggtgttgacaagcacgttctggcaagagctctttcgcctggccaaagctgcttcactaccaggatttagctggggcaagctctcgcctaagttctatggaccatacaagttgttggctcgcgagggtgatgtggcctatcatcttcaactatcgacggacactcgcatccacgacgtgtttcatgttggagttcttaagccatttcatggtgctccgcaggtgacaaatccttctcttccggccataaacaatggtcgtgtgctcccagttccgtacaaggtaagtgtttatgaaaatacagtgatgagttttcggacagtgcatagtgtgggtgtctgtcagggttatggataccacataactaatagtagtcgactaaatctcggcaggacccaccacataccatgtcctagacggaaacaacctgcggatataagaggagttccggataaggaaagacaaccagagttctacatggaaacgacaaggactactcggattgtatccatattggttttcctagttcttcttggacaagaagacacctatgggtataaatacaagaccccctag

SEQ ID NO: 65070 - DNA, 238 bp, Oryza sativa
  Clone ID: PAT_MRT4530_66153C.1
cccacgcgtccgcccacgcgtccggcactgctcgcgtgaagaaagacccacgcccggggatgctgagctatcacgcaaagataggtcgagagatgaacaccttagcgaagatgaagactcatcctgcgatgatgctatactatgctaccgagcaccttagtcaaagatgtatccagactatagaagctcatcatatacaatgatcgggtcgcggaggttgcaagctcacaaaccatgg

SEQ ID NO: 65071 - DNA, 402 bp, Oryza sativa
  Clone ID: PAT_MRT4530_66154C.1
atggtggaacggcctcgacggcggcggccaagtgtgttcccgagcgatgcgcccccggggaagtggtcgcccagcgaaggagttagggaggaggccggaacggcgagcgtaaaagcttgcttcggccggttagaggaggtggcgttggcggcttattttggcgggggaaaggaagaggaagtgagggaatggattcgtctcgatgagacgaagctagtggcgcgagagcttggccgacaacgctccgatgaccttgccgactatttatatgtcgtggagaggcggttgccgaaggtggttgtaaaggcggtcgtcgatttggtcacggcgacgggctgggcggtggcagtggacaggcacggaactgctacagtggcggcgcgacttggtgcacaacagtag

SEQ ID NO: 65072 - DNA, 490 bp, Oryza sativa
  Clone ID: PAT_MRT4530_66155C.1
cgcccttttcgcgaggagacccacgccgaaacgcgaggtgacgcacacagagacatggatttagaggagatatgtacagctctagagaggctttatcggtgaggcagagtggggccatggccagaggagattgggaacccgggcgggccgactggacgggccgagaggtgcgaagagagggccaaactgatgactaagagaccttttttttttttctgcagacctcagcgtggtggataccagactgcgtaggggaggcctacgagcctgcgagtgcagcccgtcctgcgttgtgcagcatgatgacctccgtggtgccgaaggacgaaagccacggatacgaggacagcgtggcacgtatgagagacagccgagcaagaatcgagactgagctctccagctgttgggatggcaccttgaacctgcttgcactgcaccttggtcccatgtcctctgcccctgagtgcaaggtgtcttccctcggaacgat

SEQ ID NO: 65073 - DNA, 1557 bp, Oryza sativa
  Clone ID: PAT_MRT4530_66156C.1
ctcctcctcgtcgcgaacacctggcgcgagcgattcttggcttcccaattttgcgacggcgatcgatctttgggttttcttggtgttcgatcgatcagagcagctgaggcgaggcaatggaaggcgttgttgacgggagcggcgcgcagctggtggtggcggagctggtgcgcgtgcaggggctgctccggcagctcgaggcccacctgagcgcgccgtgctccgtcgagctctgccgcggcctcgtcgcgcagatcgtcgcgctcacggacaggtccatcggcatcgccacccggtccttctcctccgcctccggcggcggcgcgcatttcgcggacacggcgccgccgatgccggcgctgacgtcgtgcacgcccagcccgctcagcgacggctccgaccaccagccgttccggaccaccaacgccaagaagaggaagacgacggcgaggtggacgagccaggtgagggtgagcgcggcgggcggcgcggaggggccagccgacgacgggcacagctggaggaagtacgggcagaaggacatcctgggcgccaagcacccgcgcggctactaccgctgcacccaccgcaacacgcagggatgcaccgccaccaagcaggtccagcgcaccgacgacgacgcctccctcttcgacgtcgtctaccacggcgagcacacctgccgcccgggcgccgccagcgccgccgccgccaagaggccgcacgcgcagacgctgctgcagagcctcagcgccagcctcaccgtgaacacggacaccaacacgccgctgacgccggagaaccgcgcgccggcgccgccgctgcagcagcagcagcagcagcagagcgtgtcggcgtcgcccgtggcgtcggactcgtacggcctgggcggcgccgggtacggggactggcgctgctgcgacggcgacctgcaggaggtcgtgtcggcgctcgccaccgtgacgtcggcccccgaccacgccgccatggacgccgccgacttcatgagctactgcttcgacttcgacccggcggtgtacggcggcatcgtcggcacgccgagcttcttcctatgaggaagaaaagccatagcagagcagagcagaggccctgtccatccatggtggcaggagggaagaagaggaaagcttaagctttgctcttcaaggcttgagcttcttcttcctaagtaagatcagtgcaggtgtaagcagtaatttagcttaggatatctcttgtttctattctttctttaatttccttttgtttctcccaactctctctcatggagtttggattttgctggtttctgtcaagcaaaagagaggaaaataagaagattttgttactactgttctgatgaaaaaaaaaaaaaaaaaagtttggagaatgattcacttttttggggagaaaaggttcaacctttctgttatccatcttgccaattagtggatggatgagagagagcctaggcatgaaactgtagggacagcaattcatatcttgacataagtggcaagttggaccaaatcatagttcaaaaaaaaaaaaaaaaaa

SEQ ID NO: 65074 - DNA, 399 bp, Oryza sativa
  Clone ID: PAT_MRT4530_66157C.1
ttctggttgatcgcccataaccgtgggcacggctattcgaatagttttactctggccagaggtgcacaattgtacccacaagacacaatccaccggcatgtaaccatgcccggccggacacgtcaccatgtcgagtgattgtgacaagacctttcatataaccccctctgaccaaacacaccacacctcaggtttcacccgcgcccccaacaggcagcgggcagtcccctttcatgcctaggcaaatcggaaagccgcataggccatcgcagggcccatccgaactccatcacgctcacccttgcctggatccgtcaaccagcggaaagctatacttcaagtcaagcagttacccattcccgcttgtggcaagcgctgtatgtcttccagtgcatcccg

SEQ ID NO: 65075 - DNA, 612 bp, Oryza sativa
  Clone ID: PAT_MRT4530_66158C.1
gaataatttgaaaatatatattaattttctgagaagtgtgtggttagtactaacataataattgtaatggagacaatgcgtaaattcttcccagcaatcgccgtcctcctacttcttgttgttgccactgaggcgttggcgccagcgcaatcatcagtcaggccgtgcgagacgaagagcctccgattcgaggggttttgcatggtggaagataattgcgcaaacgtgtgtcggacggaggggttcgtcgacggcaggtgcagcaccttcgtgcgaaactgtatctgcatcaagccatgctaagatgtacgattctgcatgcatggcaaattcagctagaataaaacaccagctcgcttaatgcatggcgttttctttgctagctcgactaattaattgtacaacagagtcaagcatgcatatgtgtttctctctggttttttacttacatgtatgttgttttccattgtaaggagaagtcataaccattaattattgtcggatatgtggttgtgtaatattgggtgtgtatttgtattagtattttgttgtgaatgtttggtaattgttcaattaatatgattgattaattttgataaaaaaaaaaaaaaa

SEQ ID NO: 65076 - DNA, 709 bp, Oryza sativa
  Clone ID: PAT_MRT4530_66159C.1
atatattaattttctgagaagtgtgtggttagtactaacataataattgtaatggagacaatgcgtaaattcttcccagcaatcgccgtcctcctacttcttgttgttgccactgaggcgttggcgccagcgcaatcatcagtcaggccgtgcgagacgaagagcctccgattcgaggggttttgcatggtggaagataattgcgcaaacgtgtgtcggacggaggggttcgtcgacggcaggtgcagcaccttcgtgcgaaactgtatctgcatcaagccatgctaaggttgtccatcattatctcatgtggtcacttggcaactaattaattgaccatgcaaacaagggtctgcatggagctattaatttctttctttttttactttctttcttttctttttttttttgcaagcagatgtacgattctgcatgcatggcaaattcagctagaataaaacaccagctcgcttaatgcatggcgttttcttgctagctcgactaattaattgtacaacagagtcaagcatgcatatgtgtttctctctgttttttacttacatgtatgttgttttccattgtaaggagaagtcataaccattaattattgtcggatatgtggttgtgtaatattgggtgtgtatttgtattagtattttgttgtgaatgtttggtaattgttcaattaatatgattgattaattttcat

SEQ ID NO: 65077 - DNA, 545 bp, Oryza sativa
  Clone ID: PAT_MRT4530_6615C.1
ggggggtcaccttgccaatacaaaaaacaaaattctccacccaggaagggaacaagcaatccaacccaaccggtgacttggttttgtacttgggggcagtttttattacaaaaagcaaaaataaccttctttgggatgcttacagggccgggtggcactggaaaaaaaaacccttatggaggggccgagcctttcaaaaagccttgaaaaatttatggcccacaggaagtttctgatggccaactttttgacataaggcatttccccggctttgaacccccccctctttaagggaacccccattggttaaaaacattcctttttaaactccggaagctcacttttgggaatttccaattaaagctcttcctcaatcttgggaaaaacccccttggggattccaagctttttggttatcttctcaaactctgccaaaaagaaacccatattcttcttggcactcctaaaaaaggggttcttaaaccccttctaaactttttaaagggcttccattataatagcctcagcacccatattatttataa

SEQ ID NO: 65078 - DNA, 401 bp, Oryza sativa
  Clone ID: PAT_MRT4530_66160C.1
cccacgcgtccgcaccagtgacctgaacctccaagggttgaatacatcactgaattgggaggttcagatgacaccagtgacctgaaagttgcagggatatctccaccttcatctccaatacgagttggcatacctaaccggtcatgaggtggccaaattcttgaggcacttcacagtgatcctgcatcttctttgtctgtggagcaggagaaaagtacaaaaaatttgaaagcgcccaccagcacatcagcactagtcaaactaagcaagggtgccactggggggcctggcaaaaccgtccggactgaaaagaaagaaacaccacaagaacgacttaaaagaataatgagcaaacaacttaacaagcaaattcgaaaggacactgctgctgagatagcaaa

SEQ ID NO: 65079 - DNA, 407 bp, Oryza sativa
  Clone ID: PAT_MRT4530_66162C.1
cccacgcgtccgattttttttctcatgggctcatggcatcatgtttcccattaaggtgcttgatggagtgacacctggttatgttcatcccagactaatctaagaatatatcaaccaaaataccagtgcctggtgaagaatctttctcttgtgctcagcagattatatattccctttcacttttggcataccccctaggaaaggctcttcgatatttcctgggttaaggagtccttcagttgtgtcttattgtcttgcactgaaaaataatgcaaattatgccagcaggcctttacatagtcaaatccccaagtgatcgctgtaatatgtattttgtaatgaaatgcttatttattttacacgtgtgccttttttttgcctgatgtttttacatcatttttattttg

SEQ ID NO: 65080 - DNA, 3152 bp, Oryza sativa
  Clone ID: PAT_MRT4530_66163C.1
caactcggtctctcgaggaagaggtatgagcggggggaggggggacaaggaggaggagcgcaccaccctctcggagaggtcgcctccgttcttgcatcgctctctttggactgtagtagaaattctatagccatgggcggaggggaaggagctggtgctgctcgatttctgggtgagcccgttcggggaagggtgccggatcgccatggcggagaaaggggctggagttcgagtaccgcgaggaggacctcggcaacaagagcgacctcctcctccgctccaaccccgtccaccggaagatcgcagtcctcctccaggccagaccgccccgtctccgagtccctaagtcatccctcaagtacctcgacgacgcgttcccccacgaccaccctaatctgaagtatgaggaggatctaccggtagaccgaacggccatcgttagacgcgtggctggggagactcctctgggcgtactaggttgacctggcagctcaacgacttggcgggtgaaggctataagagcctgcaagggttaggccctctggctcggctgcagggcgcgatatggcggagaccctccagacgctggagccggagctccacgaccgggagttcttcggcggcggcggcggcggcaggctcgggttcgtcgacgtcgcgctcgtgccgttcacggcgtggttctacagctacgagaggtgcggcgggttcagcgtggaggaggtggcgccgaggctggcggcgtgggcgcggcggtgcggccggatcgactccgtcgtcaagcacctcccctcgccggagaaggtctacgacttcgtcggcgtcctcaagaagaagtacggcgtcgagtagatcggtggatgcgaagttgcagggatcgattggcggttgcgttcgctacgtgaacgattcgtccgttgtttcagtggccaagtgtgtgtgagtttgttgttaccgttgagtgcttgtgtgtgggatggttggtggcagcagagagttgcctccgattctctgagattgtcactaaataaagtttgtcctttgaaactaaaaaaaattgaaaaaggtaaggataaaaacaagtccagcaaatactgaatacaagattgttggttttgagtgagagaaactgctatgaacaaatgttcactttgaagcaaagaaatggtgatggtgaacctgaaggtgtggaagtatctgtttacgagtactttgtgaagaatcggggcatagagttgagatactctggtgattttccctgtatcaatgtggggaaaccaaaacggccaacttattttccaattgagctctgctctcttgtgcctttgcaaaggtataccaaggctttgagtacactacagaggtcttcgcttgttgagaagtccaggcagaaacctgaagaaaggatgtcagttttgtctgatgtgctgaaacgcagcaactatgattcagagcctatgttgaattcttgtggtatttcaattgctcgaggttttacacaagttgctggcagggtgctgcaggcccccaagctaaaagctggaaatggtgaagatctttttgcacgtaatgggcggtggaactttaataataagaggctcattaaggctagcagtatcgagaaatgggcagttgttaacttctctgcacggtgtaatattagggatcttgtccgagacatcatcaagtgtggtggcatgaaaggaattaaagtagaagatccatttgatgtcattgaggaggacccttcaatgcgacgagctcctgctgcaagaagggtagatggcatgattgacaagatgcaaaaaaagcttcctggacaaccaaagtttctgctctgtgttcttgctgagaggaagaattcagatatttatgggccctggaagcggaaatgtcttgctgaatttgggattattacacaatgtgtggcccctactagggtcaatgatcagtatattacaaatgtactgttaaagataaatgcaaagcttggtggcttgaactccctgcttcaaattgaaacatccccttccattcctcttgtatccaaggtcccgacaataatattgggaatggatgtttcccatggatcacctggacagtctgatataccttcaattgctgcggtcgttagttctcgtgaatggcctcttgtatcaaaatacagggcttcagtccgttctcagtcacctaagttagaaatgattgatggactatttaagccacaaggagctcaggaagatgatggcctcattcgggagttattagttgacttctataccagtactggtaaacgtaagcctgatcaagtcattatcttcagggatggggtcagtgagagccagtttacccaggtgctgaacattgagctggatcaaataattgaggcatgcaagtttcttgacgaaaactggtctccaaagtttacactgattgttgcacagaagaatcatcataccaaattttttgtgcctggatctcaaaataacgttcctcctggtactgttgtggacaacgcagtctgtcatccaaggaacaatgacttctacatgtgtgcgcacgctggaatgattggaactacaaggcctacacattatcatatccttcatgatgagataggcttctctgctgacgatcttcaggagttggtccactccctttcctatgtctaccagaggagcactacagccatatcagtcgttgcacccatttgctacgcgcatctcgctgctgctcaggtcagccagttcatcaagttcgacgagatgtcggagacgtcgtcgagccatggtggccatacctcggcgggcagcgctccggtgcccgagctgcctcgcctgcataacaaagtcaggagctccatgttcttctgctgagcagccgcttggctgctatgttatggcctgaacttgtggatgttttggtagtcttgtttatgtcgtgtttgtttaagtaccagctggggggtggatgttattaggctggatgccgcacttctgaacctgttaggataactactgaacctgtccatcttaatcgcagcttgttccatgctctgctttgctgcccttaaaaaaaaaaaaaaaaaaaaaattctctctctccctcgccccgattcctgctgcccggggatccactagtttagagcgccg

SEQ ID NO: 65081 - DNA, 204 bp, Oryza sativa
  Clone ID: PAT_MRT4530_66164C.1
gttttctccccgacacgaaagcctgagaccaacggggcgattttaacacatcaccggggtgctccccggcttgacttaaaggataccctcccgccggcaactgacaaattgggagggcgagcgaggtgatagtgactccaacgaagaggacgagggatgaccgacacttgggcgaagaaagcgaggctaggagagaagaggtgg

SEQ ID NO: 65082 - DNA, 237 bp, Oryza sativa
  Clone ID: PAT_MRT4530_66165C.1
atgaaggagatccgaatcagctcagcagagtggtcaataaataagaaggtgattgcttttcctcggattaaagatgctaagaaagaggaaagggacgactggaaaagaaaatacagcgatcttatgatgaagaagagtcttggtataatccacattgggattattattttgaagaagaagatggatcaaataagtgagataaaattcagaatcctcaatggtgtccaagagggttga

SEQ ID NO: 65083 - DNA, 326 bp, Oryza sativa
  Clone ID: PAT_MRT4530_66166C.1
cctgggacccagggttcctccattttttttttgcaaaaccgcccccaggcccttttttttttttcatgggtcccttcccaatcccagggggggccgggcccccccccccccccccctttcccttgacctcccccccacttaattcaacctggaaacctcccaatttcaatcgcccttctttttttaaggaaaaagacccgtccctaggattccaaaccttcctgaaatttctctttttttttttcatctcggaaccccgggtttggaaccaaagcaaagaacctccattcctttcctttttcagagtctcaccctgggtttttgcc

SEQ ID NO: 65084 - DNA, 1886 bp, Oryza sativa
  Clone ID: PAT_MRT4530_66167C.1
cgaggccggccggggaaaaaaccggccggcatcgatcaaattttaacttctccaaatagctatggcaactactacctctctattgtcttcctgtctctgtgctcttctcttggctccgctctttagccaaggtgtagatgcatgggaaagccgacaaggggcttccaggcagtgcagatttgataggttacaagcatttgagcccctaagaaaggtacgatcggaagctggggacacagagtactttgatgagagaaatgagcagtttcgatgcgctggtgtctttgtcattcggcgcgtgattgagccacaaggccttgtggtgcctcgatactcgaacactcctgctctagcctacataatccaaggaaaaggttacgtaggattgacttttcctggttgcccagcaacacaccaacaacaattccaactatttgaacaaagacagagcgaccaagctcataagtttagagatgagcaccagaagattcacgaatttaggcaaggggatgttgttgcacttccggctagtgttgcacattggttctacaatggtggtgatacaccggctgttgttgtctatgtttatgacataaaaagttttgctaatcagcttgaaccaaggcagaaggagtttttattagctggtaacaaccagagagggcaacaaatatttgaacattccatctttcaacactctggacaaaatatatttagtgggttcaatactgaggtacttagcgaggcccttggaataaacacggaggcttccaagaggctccaaagtcaaaatgaccaaaggggagatatcattcgagtgaagcacgggcttcaattgttgaaacccacattaacacaacgacaggaagaacatcgtcaatatcaacaagtccagtatcgtgaaggacaatataatggattggacgagaatttctgtacaataaaggcaagggtaaacattgaaaatcctagccgcgctgactactacaaccctcgtgctggaaggataacccttcttaacaaccaaaagttccctattctcaaccttattggaatgggtgctgcaagagtaaacttataccagaatgctcttctctcacccttctggaacattaatgcccatagtgtagtgtatatcatccaaggaagtgtgcgagtacaggttgccaataatcaaggaagatctgtgtttaatggtgtacttcatcaggggcaactattaatcataccacaaaaccatgccgtcattaagaaagccgagcacaatgggtgccagtatgtcgcaataaagacaatttcggaccctacggtgagttgggttgctggaaagaactccatattacgtgcattgcctgtagatgttattgccaatgcttatcgtatctcgagggatgaagcccgacgtctaaagaataatagggcagatgagattggcccttttactcctcgtttcccccagaagagccagcggggttaccagttcctaactgaaggcctctctttaatcggcatgtaaaacttatagattatgagtactatgcaagcaaaaataataaagcacatcaagcttgttgtggatgctttgcaatagttttatgtactttgttttgcaaagaacaaaattaaaacaaaactgagttcatgaaaaaaaaaaaaaaaaaaaaaaaaaaaaaaaaaaaaaaaaaaaaaaaaaaaaaaaaaacaaacgcgaaggacccccgcggggatgcgcaccagctggacgccaccctcctgaacgcccgggcccgcgggttgcgggatgcctggcccccgaacaacgccctacgccccgcggagaccaggaaaaagacccaactcgggttcatggggtccaaaccccgccccaaggaaacaaggccaaaaaa

SEQ ID NO: 65085 - DNA, 559 bp, Oryza sativa
  Clone ID: PAT_MRT4530_66168C.1
gcgaggcggcgagaaggttgtgcgccgccgcaacttccttgccgcgatcctcggcgatggcgggcgacacgcccacaacaacgatgtcggcggcggcaacgacgatgtgagcgcgaaggatcctccccggcggtccacctcccagctctcctcgatagtccaacacaagcggcggccggatgccaatagcgcggtggagtcgccgcagccgccgctggacgaggcgcccaactcacccgaaggcagtagcaccagtagctggaggttccctttccccttgccggcaaggcaggcaggcagcaccgccgcaggaacactggcatgggcaccagcggtgatgggatctcagaatagaagaaggcagaggtgtgtttgttttgggaattttagtgaagttgcatattatttgtatctttgttgcactttgttctattaagttgtttcgttctgttttgattctttgttgcatacatcgatttttggtgttgcaatccgtatgttcgactattgatttggttgaaacaattttaaaaaagcactgaaacattttttctctgct

SEQ ID NO: 65086 - DNA, 486 bp, Oryza sativa
  Clone ID: PAT_MRT4530_66169C.1
atggaggcagcgtattcggcgccgagcacgtcgtcgacctactcgttccacttctccatggcgcaggccgtgctcaccatctccctcaacgtcatcgccatcggcctctccgccctcgtcaaatcctcctcctcctcctcatcgagttcgtcttcccggcgccgcgccgctgcagcgcccgcggtggcgccgccggcggcggttgacctggacacggttcttggcctgatgggcggcgcgggcggcgccgcgccgtcggaggaggccaccctgggggaggccgcggcggcgttccgcgtcttcgaccgcaacggcgacggcttcatcgacgccggcgagctcgggagcgtgctcgcctcgctcgggttcgccgccggcgccggccacgccgagtgccagcgcatgatcgacgcctacgacgcggacaaggacggcagggtcgatttccgcgagttcctcaagttcatggagacggctgcggcctag

SEQ ID NO: 65087 - DNA, 1870 bp, Oryza sativa
  Clone ID: PAT_MRT4530_6616C.1
atgtcgacaggtgaaaccctgcgtgcagagctatcatccaggacgccgcctttcggtttgaggctatggattgtgattggaatcagtatttgggtggtgatcttctttatactaggtttcatgtgcctctggtccatataccgaaggaagccgaagaagtcctttgataagattccagtatctcaaatcccggatgtttccaaggagattgcagtagatgaagttcgtgagcatgctgttgtcgaaaacttccgtgtgcaagaaagccacgcgatatcggtgcaggagaaacattacgagaaagattcagggaaaatgctggcacacttggttaggagtaaatcgagtgatgccgataatttgagccaatgcagctcggtgtaccaatgtgatagggctggtagctcgtattctggtgatgaaggcagctcgggcaatgctaggaggcacttttctcaatatgcaactgtctcagcatcccctctggttggtctcccagaattctctcatctgggctggggtcattggtttactctgagagatttggagcatgcaacaaatcggttttccaaggagaatgtcattggagagggtggatatggggtagtttaccgtggtcgactcataaatggaactgacgtcgcaataaagaagcttcttaataatatgggccaggcagaaaaggagttcagggttgaagttgaggctattggccacgtcaggcataagaatcttgtccgccttctaggatattgtgttgagggaatccacaggatgcttgtatacgaatatgtgaataacgggaacttagaacagtggcttcatggtgccatgcgccaacatggtgttcttacctgggaagcccgaatgaaagttgttcttggaattgctaaagcgcttgcttatttacatgaagcaatagagccaaaagttgtacaccgggatatcaaatcaagcaacatactaatcgatgaagaattcaatggcaaactttctgattttggcttggctaagatgctgggtgcagggaagagccatatcacaactcgagttatgggaacttttgggtatgtggcccctgagtatgccaacacaggtctgttaaacgagaagagtgatgtctacagttttggtgtgctattactggaagcagtgactggtagagatccagttgattatggccggcctgctaatgaggtgcatctagtggagtggctcaaaatgatggttggcacaagaagatctgaagaggtagttgaccctgacatggaggtcaaaccgaccattcgggctcttaagcgtgctctcctagtggcactgaggtgcgtcgacccagactctgagaaaagacctactatgggtcatgttgttcggatgctcgaggcagaagatgtcccatcccgtgaggtggaccggaggagccggaggggcaacactgccaatgcagataccgagtccaagacaagctcaagcgaattcgagataagtggcgatagaagggactcagggccatcagcaaggtttcaactctaagaagacggtgatcatagtcaagaacaatggcttcaaaactctatgcagtaacatggtggttggcagagaaaaaggggtatttctggagggcattgcattttgtattgtaggtctgcatggcggtagagactggagagagcacagtgtctgatgatggatacccggagacctgtaattcccattcagtattctgtttgttagtcaagcagcttgtacagatcgttgtctgttccattttttcattcttctggtttttttggttaggaggctcttggattacagtacgaaccgctgtctcttttctagaatcaccaacctgggacctatcaatatttac

SEQ ID NO: 65088 - DNA, 170 bp, Oryza sativa
  Clone ID: PAT_MRT4530_66170C.1
tttggttttttagaactattttttttttattcacataaatcacagctagagttcaaacttcttagaagcactttctggggacaacagaaggcccagattcatcatatccttccttggagatccacattcgtgggaatgccgacaaccgaagccacgatagactcctccaa

SEQ ID NO: 65089 - DNA, 411 bp, Oryza sativa
  Clone ID: PAT_MRT4530_66171C.1
aagctgctggatatcgatatcagagataagcctagacatacccatccgatgcctacgaaggctggcaagagggatctagtgccatctctgatctcgcggagtgtggattcgaggaggaagactaccccaccgtcgactacgagttggttatcaaggagcaacaccggcttcggccaacaggagtagggctattacctgtcagataaggggcctgaacctgtataaaatcccggtctccatcttttttacctcaatctcgcatataccttggttccaacggtccccataccatacaaataccgtagtcgcgatctcaaaagtcgatacacttcacccgtgctgcgcgagcttggaggcccgcatcgtcacgggcgggggcggcgacggcgacgcccgcgtcttcgagctcac

SEQ ID NO: 65090 - DNA, 1009 bp, Oryza sativa
  Clone ID: PAT_MRT4530_66172C.1
ccacgcgtccgcgcaagacacaaccggcaacccaacccaactcggagacgcggacgaagcaaaggtatctcccagagctacgactcggacacgcaagacaatctctcgagagaagagaagcggacggaagcaactgattgatttggccatggaggcagcgtattcggcgccgagcacgtcgtcgacctactcgttccacttctccatggcgcaggccgtgctcaccatctccctcaacgtcatcgccatcggcctctccgccctcgtcaaatcctcctcctcctcctcatcgagttcgtcttcccggcgccgcgccgctgcagcgcccgcggtggcgccgccggcggcggttgacctggacacggttcttggcctgatgggcggcgcgggcggcgccgcgccgtcggtggggttcgaggaggcgtccgcgctgttcgaggaggaggaggccaccctgggggaggccgcggcggcgttccgcgtcttcgaccgcaacggcgacggcttcatcgacgccggcgagctcgggagcgtgctcgcctcgctcgggttcgccgccggcgccggccacgccgagtgccagcgcatgatcgacgcctacgacgcggacaaggacggcagggtcgatttccgcgagttcctcaagttcatggagacggctgcggcctagggaatccacaggattcccatggcgtcacttctctgcaaattctttgttctttcgttctatttttctctttaatcgacttcgatcgctcagccgaatgaagaacggcagcatgtgtatgcttatgatcagtttaggtgctgtttggatcatggcattacaaagagccaagaaacgggttgtgttttacttgaactgaaatcgatggaaatcgaattgaaatgacaatttccgtgcttgggttctatccctgaatccattccttacccttgacttaaaaccccgaccgaacagtttttctaaaaaaaaaaaaaaaaaactcgagactagttctctctccct

SEQ ID NO: 65091 - DNA, 364 bp, Oryza sativa
  Clone ID: PAT_MRT4530_66173C.1
aaaaaaaacatggggtgggatttggaacgaaaaaccccgggacccggggtttttttggggggggccccgcccaaaatttcgcaaaggggcgggacccttaaacatagaccccctcccggggaaacaggggggcccaaggcccccccccgaaaatttttaatttgggggggggggggggggttttccgggggaaaaggcatttttccccccccattacgggggggggccctttccaccccccgccaagggggcgggcctggcccggctggggtttttcagggcataaaaccttttaatggaccggggggtccccgccccttaagggggggtttcgtccttccaaaatccggatcccccagggggg

SEQ ID NO: 65092 - DNA, 417 bp, Oryza sativa
  unsure (1)..(417): unsure at all n locations
  Clone ID: PAT_MRT4530_66174C.1
nccggccgggacctcaatccgattaaggtatccataagcagggacaaatagctatcggcgagttaccgttttctctgcggttttctatatccattcgcgctcatctattatgccatggttctatggcacagctacttaatctcagcacaaacccatggcatcgtcctcggctaggaaggtttacaggagtgtagatttgatagactacaagcatttgagccacttcttaaagtgaggtcctaaattggacgtgactgagctacttcgatgatgaagaatgaattaattccagcgcgacgggatacttttggtgatcccgagcgtgacatttcaagcctcaaggccctgtttggcgccctctgattcaacaaataactttcttgggcggtgggatctacaatcattcccaaggggaga

SEQ ID NO: 65093 - DNA, 287 bp, Oryza sativa
  unsure (1)..(287): unsure at all n locations
  Clone ID: PAT_MRT4530_66175C.1
gcaagccaaacatgcctaccgcggtgccaggacgcggatactacggttcctcacacggaaagcggtgtgcattnattagcttcatcgcatacaagcccnnnnnnnttgaggagtctggtggcaactaacctaagatcaatcatcgcgctggtgggnngctgcctatactaatactgtgcaacttcgctctcgcctagcttcatgatatatcaatatatactatgctatctattcgtatctcacacctggcttatgtcccatctcaatggcctatggtcttcacacat

SEQ ID NO: 65094 - DNA, 492 bp, Oryza sativa
  Clone ID: PAT_MRT4530_66176C.1
agtggatcccccgggctgcaggacacacaccactccatttctgagctcttctagtttgagtgagagagcagcagaagggagtagtgcaagatgccgatccgcaacatcgccgtggggagccaccaggaggtgtaccacccgggtgcactcaaggcggcgttggccgagttcatctccaccctcatcttcgtcttcgccggccagggctccggcatggccttcagtaagtcgccgaccttaattttaaccaccttgtgtgttgtcactgccactgcaaatccactccatatactatgatgatactacaaagtccaggacttaattgtggactagtttagcaacgcatgaattaatccctcaaaataacacaagacatgtgggggagaaaaaagtttgggaagatatacaaaacttttttctctccgtccttgcaggagtgagagaaactagacgccgtgctatgataattaagttgaaagaaaattttctttt

SEQ ID NO: 65095 - DNA, 126 bp, Oryza sativa
  Clone ID: PAT_MRT4530_66177C.1
atgtcgggtgatcaagccgacatcgttgggcgcgacaactctgcatttgtcaagaacgttcttgataatggggtgtgctcgaccacaacctactcgaaagagaacagagcgagcccccagcgttag

SEQ ID NO: 65096 - DNA, 1960 bp, Oryza sativa
  Clone ID: PAT_MRT4530_66178C.1
atggggaaggagaaggggaaggggaagtggaagaggcccccgaccgtgaagccgccggtgatggccgcctccgcctccgacgacgacgagatcgacgcctatatggagtctgaggatgacctggaacaccccgtcttcgatctcgagggtatttctgagaatgaaactgatgacagcgagggagatgaggatggcaacatggacaaagctgcttatgatgaatgggatgacaaatttatcgcaaaattaaaaagagcagagagggcagtgaaacaaattgctggaggtgatgacagcatggatgaacatgaggatgatcataaggataaaaattcctggggtagaggaaaaaatgcatattatgatgctggtgaacagtctggtgatgatgaggatgactatgaagaggcacggaggatccagaaagaggaggagagcaagctatcaatgcaagattttggattagaagatggtgaaagtgatgaagaggatagagccattaaggcatccaaccatcaagtcaaagttcctgatggtgaacactcttttgaaacctatgtgaaaatgaaagaggagtttgctgtcttgtcaagagatgagaagatgggtgtgctagacagttctgctcctgaactggttggattgttgtccgagctaaaagatgcccatgaagaactaatggcgataggaccagtcaccaatgaggtgacagctgggcaaagcaaggataagggtaaaatgcagcctttggaagtgaaacgagcttgcctagctgcttattgtcaggctataaccttctacctccttatgaaagctgagggattgtctgtgcaggatcatcctgtaattgctcgtcttgtagagatcaagagtgtagtagaaaagggtgtggaagttgcagagttgacaaagaatgaccactctaacaaggatcaccatgaaattgccaaaagaaagggcaaggatgagcatattggttcgcaaagccttgaaatgttgaaggtgagagcaacccttgaagagagaagtgacctgcaaacgttggatgattttgatgatgaagtgctgaaaaatactcaagccatcaaacctagtaaggtcctggtagctgcggcaaaatccaataaaaacaagtttgtctctggtgatgacgagcttccaaagcgagatgatattggtgaaagacgacgaaagcacgaattacgtgttcttgcaagagtaggagctagtacacttgaagatgatgacttgccagaggaagatgatcatactgaagagagacctaatcaattaagtgaagaaaatggcagtgatgatgacattggaccatcagagtctgaagatgagttttacaaggatgttaaaaggcggaggactgaaaagctctcgagtaaagaacagaaatactcgccgaaccctgttattgaatcactggaggaagaaactgaaggagatggcaagaggaagatctcataccagatggagaagaaccgggggttgactcgctcgagaaataagaagcttaagaatccacggaagaaatacagggttaagcatcaaacaaaacttgttaagcggggaggtcaagtgcgtggcgtgaagaagccctcaggaccatacggaggtgaaatgtctggtattaatccaaatgtgagccgtagtattaggttcaagggctgatgaatcgaattgattacccccatcatggaaattttatccttatgcttgtcattcatgcgggacaacatgcttgatggaatcgtggttgaggatttctcagaatgaatgcatggattgtctttcgattttgtaccaactagagtgtagagccctcccagtcccaggggtgagttgccggaagcatgtagaggcgcctggagcacgtcgtgcaggggaatccggatcggaggatccggttgcagagaatgagatggaccatttggataaaaaaaaaaaaaaa

SEQ ID NO: 65097 - DNA, 1356 bp, Oryza sativa
  Clone ID: PAT_MRT4530_66179C.1
atgacagacaaagaaaagcaggaaactctagcaaagcgtcgtgaagcctataagctcaaaaaggagtcaatggcccgtgcaaatgctgatgaactacattgcatcacttttcggggtgatcaaccagggtcattgcatactgcacattccgaacaagaagacccagcagtagacccaaaagttatccaagaaaaacacacacgtgaaaggatgagatatagaaatatggaactgaacaaaaaacaagttgtgatagaacggatcaaagataagcgtgcatcacggcgcaacaatccaaccgatggtgaggtcatatttgacgatgatactgatgaggaaagcgacatgcttgatgatcaaggttgggaggaagatcaggacatacaaatcatagatgttgtcgatgccatcactgagagccctagcatccctgatctagacaagatcgtgtacagcaacttaccacaaagcactcatatgctgaaacccatgtatcacaatatacgttcattcggtactgatggttcaaaccctaagcgtctggaattgtacttttacgatgatgatcctaccctagagcatcggtaccgtcattgtcggccagatctatacgaacaagatcaaaaagtaatcagcactataactaacattctacgtggtaatccatactctgagcagtttaggagtttggggcaagccgagaatctcgaggactaccgtgtgatattgaaccttgaccaatggttggatcagaggacaggtgaattgggttggcataccgatataccaaagtttggtgttaacctggaagatgtgctgaaggctcgtcgtaatcgcaaaaacaacgacaacaatgacaataacccagattcatgtatacgacgacatccaaatggtgaaaaagataaagggaacaatatcaaaacactatctagacatgcaattttgggcgcagaggccccagatctggtgattgccaccgcaacgacgaagcaggagagggcatccagccgcggagaccccagatccagtgattaccgctgcaaggccctagatccggacgagaggcttgtcggaagtagatccggacgagagactgaccggaagtataccaccgtcgccgagtccaatccgtgccgctgccgaggccactccaccccgtcgactgctcgagctgcgctgtggccgaggtgcatgaccagatgccgccacgaggtgaagatggggagccagcagggagagaaagagcttggagatggggggttgggggaccagcaggcatggcatggaaggaccaggcgatacgctagaggtggccggtggtgggaaggaattgggggaaacaggagtacatga

SEQ ID NO: 65098 - DNA, 897 bp, Oryza sativa
  unsure (1)..(897): unsure at all n locations
  Clone ID: PAT_MRT4530_6617C.1
gcacgcttacgtcagctcggaattcggctcgagaaaaaaaatcatctacgttttggcgctataccctcggaattttttcagcattntaggntcttccactaacagagccattaaatcttctctcaaaatatttgtgattccatgcccaacgccctaccctgaaaatatggtagccgagagagaggttaacggtaacggcgtcggagagggaagaacaacgctaatattcacctacggaaccctgaagcgaggcttctccaaccacccccttctccaagacctcattcgctccggcgacgcctccttcgtcggaacctaccgcaccgccgccaaatatcctctggtctgtgggccctacaaggtccccttcctcctcaacattcccgggtcgggtcatggggtccatggggagctttactcggtctccacgcgcggcctcgagcgcatggacgagctcgagggaacctcacgcgcccactacgagcgtctcccgatcaaggtggttcctgcggccgaggaagaggacgacgacgggtttgatggggaggaggaggcggcggcggggctaacgtgcgccgaggcgtattatgcgcatgggaactacgcgatggagctgtggaagaaaaacgggaagcgtgggttgaggtgttattcgcagaaagagacaattggttatgtgaagcgcaaggataggcctcagcatttgaccttcctggatcacattcgcttcttcctttcctctaattagcctttctcgttaattaggttactccaatccattcctgcttcctgccctttttttcttcttagcttatgttatgcccttctttgtattttgcccagnccccttcttgntcnnnnnnnnnnnnnnaaggaaggccgccagctagtgngctc

SEQ ID NO: 65099 - DNA, 126 bp, Oryza sativa
  Clone ID: PAT_MRT4530_66180C.1
atggaggaggacgatgacaccgtggcggttgatggcggtggccgcaataaggtattcacctgggccaatagcaacaaccagcggctactccaccacgtcggcggcattgatagaataagcaagtaa

SEQ ID NO: 65100 - DNA, 276 bp, Oryza sativa
  Clone ID: PAT_MRT4530_66181C.1
cctcctggcccccgagcttgctccgcctccaccttccaccggtggccacccgagctaccgctgccacccccgaggtcaagtggtgccacggtcaacggcaaggagcgatgtcctccgccgacgagcgtgtgcgcggcgacgcctctctcgtctctgcctccattctgggcgctctcgtgctcctcctccgtggcgagcgtgtgcgctggttggccaccgctgcgagctcgccgtggaggcggcgagatcggcggcgagctccgctacctgccttga

SEQ ID NO: 65101 - DNA, 1033 bp, Oryza sativa
  Clone ID: PAT_MRT4530_66182C.1
ccggccggcactcgcatatcccgttacctttgccgccgcggcgccgccgccctcttccgctcgccgccggcggagggcgcccgtcgcgcgccgtggagcgagcctagccgcacgagctgaaagcacctaaaaggtcgcgcctggaggaatccctaggggctaggggaggtggctggagatggctggtgggagctgcgacgtgtgcaaggaggcgccgtccaagtacaagtgccccgcttgccgcacgccatattgctcggtggcatgctttaaaaatcacaaagataaattttgccagaagacaatacctctggaagaagttagcaagtcatctcttcaggaggaaattttatcggacacgacttgtcccacacaatatccaaacacattgcactctgcaaaatctcttgaagttgaggatccaagctggcttgttgacaagaatggattaagatctttagcggaatctaatgagatccgagatgctctgaaagattgtaagcttcagcaaatgctacttaagattgatggctctgcagagccagaaaaggaattagagaaattgatggaaggacaagtttttcaacggttcaccaataagattcttgacattgttagcccacaacaatgaacaccaactttctggtggagctattcagcagaagagtgcacgcatcggggcaaatgacaacatgtagagcaacttacctcagatgctgttttcctaccatgatgagattgcctatacccgtgacatttccttctactactttgagaaagttttgtcgtccaatatggtgctagtattttaccatggcatctctggctcaatcaacaactgttcaatttgtctacatccgtgacatcttctttggctaatggctactgtgagagttttgttgtccattatgttttttttgtggtatactccctccagttttaggttttgttgttcagttttgtggtttaccaaagtcaaactactttaagtttgactaacgttatagacaaatacaataatattcacattacc

SEQ ID NO: 65102 - DNA, 726 bp, Oryza sativa
  Clone ID: PAT_MRT4530_66183C.1
atgagtataagatttggatatggacaggatcagttcgtcaagagcatattagtcgacagagttattcaggatacgcatctgtactttcgaattgccacgtccatgttactcgacttagaaattcagaatatggatggagtgaaaataacaaaatctcgtcctaattttgcaatgtttggaggtctcgacaagtttcacgtcgttcgctgtgctgaaagaggggtaggtgtaggctgtagcactgctcaatgtaaaagtgaaactggagtatccccgttcggccgttccaaacatttgctcgaggccgttgagtcagagcagcaactgcatgaacgcctcgccgacggtgctccccctcacgactctgcctcgacctctaccttcctcgccgtcgcctgcactacttccccaacgaggtcaccatcgacgtcgccctatccccgccgccactggacgaggcaagaggtgcgtagccaaccagatagaatagcattgacgccggtggtcaagaattgggcgaagaaaagtaacctcctcaacgtcgctcgaccaggcccgagtccagaaagacgacaaattcagctgagggccacgttacccgagagcaccggcggctacgtagccttgacagggcaatcaacgttgtacggcctgcttgtcaccaagcgatcgatcgatcgagccacttctagttgtgcgttgcgccatcaaactcgcgtgcacagc

SEQ ID NO: 65103 - DNA, 522 bp, Oryza sativa
  Clone ID: PAT_MRT4530_66184C.1
cggacgcgtgggcacgagctgaaagcacctaaaaggtcgcgcctggaggaatccctaggggctaggggaggtggctggagatggctggtgggagctgcgacgtgtgcaaggaggcgccgtccaagtacaagtgctccgcttgccgcacgccatattgctcggtggcatgctttaaaaatcacaaagataaattttgccagaagacaatacctctggaagaagttagcaagtcatctcttcaggaggaaatttgccaagaaaatttatgttaagctcaattttttgtctgtagtatcggacacgacttgtcccacacaatatccaaacacattgcactctgcaaaatctcttgaagttgaggatccaagctggcttgttgacaagaatggattaagatctttagcggaatctaatgagatccgagatgctctgaaagattgtaagcttcagcaaatgctacttaagattgatggctctgcagagccagaaaagattcttgacattgttagcccacaacaatga

SEQ ID NO: 65104 - DNA, 2469 bp, Oryza sativa
  Clone ID: PAT_MRT4530_66185C.1
atgtccttcctggcgcccggacgcggccgcctcctccgggtgctccccacaaggcggcaccgtcttccgcctccccaagggtcaggaggctacgcggcgtgcttccggcggtgcaaggcgcacttcttgctcgatggagtcgaggatgcggtggagggagccgccgagccgcagcagccaccggtgtcacttgcgaagagcctggcctctctcaccgaggagtcggccgtggccgctcagaggcagaggaagcccctgctgcggatggagcggaagaggctggctgagctcaggatcaagaagagggtcaaggcgcagtatttgaacggcaagtttcatgatctcatggctaacgtggtggctagcactgatactttggaggatgcttatgacattgttcggctcaattcaaatattgacatgtcatcggtgagggatgatgtttgctttgctacattggcggagctgctcaggactggtgagttcgatgtcagagcgaatgtttatgcggtggttgcaaagaggcgagatggagggaggcttgttctcccacggttgaacttgagaattattcaggaagcagtaagggtggtgcttgaggttgtttacagaccccatttctcaaagatatcacatggctgtcggagcggccgagggcatcagtcggctctgaggttcatttccaatgaaattgggattccagattggtgctttactatccccatgcataaagaagtagatagaaatgttctctctaagattatctgtctaatacaggaaaagatcgatgacaatcagttagttacattcatgcaacacatgtttgatgcagaggtgatcaatttggtatttggaggatttcctaaaggccatgggcttcctcaagaaggagtacttgcgccaatcctaatgaacatatacctcgacagttttgaccacgaggtgttcaggatttgcatgaggcatgaaggccttggttcagaggcagcagatgtttcagacaaccaggagtcaaatttgcgccactggtttcgaagtcaaatttcaggcttgaaggatagggaggaaaacagtgacaatcaaacagactatccactaaaaacaaaactatatgcttgtagatacatggacgagatctttgttgcagttgttggatccagagatattgcagaagatataaaatcggaaatgattacttacttaagaaaaacactattcttggaagttgatgacaggttgtatcttatgccggtcagaagtaattcccggggcttacagtttgctggctctatggtaagagttacaacaaaggaaagtgctgcactgaaagctgtgcataagctgaaggaaaaggttcatttatttgcttctcagaagcaagagatatgggatgctatgaatcttaggttaggaaagaagtggttggcatatggtttgagaagagtaaaggagtctgagatcaagtcacttggtcttagcacgcctttgttggatcacattgcacagtttaggaaagactgtatgaagacagatcattggttcaaaactttactcaaggtatggatgcaggatatcaatgctaaacgcgaagctgatgagagcatactcctgtcaaaatacattgctgaaccatcacttccgcaggacctcaaagacgcgttcaacaactttcagaagcaagccaaagattacatctcatcagaaactgctgccacagaagcattattgtccagcttaaagaataaagaatcagctattacctgcactgatggtgctgtcattaagatccatgctcctattagctatatccataagtgccttaatcgttatggtctaattaatcttgaaggtttccctaagcacgtttcagcccttgttttgcaagacgatgagctaatcataagttggtttgcaggaataattcaacgttggatgagatggttctcagaggttgacaattttaaagaacttaagcttatgttggttgaatgtgtcaggaaatcctgcatcaggacattatcggcaaagtaccgaatgtatgagaaaataacagaaaagcgatttgaacttgatgattatggtattccaatggccgaggactttgaggcaataatggcacctttagaatctagttcgtcggtttgcactgatgaagctctgatgtatggcatttctagtagtggattgtttgtgctcaccctctcaagagttagagttccttctcggcaatttgactgttttgtcatgggatgccaatctgcatcgctgagtatgtatgttcttcatgtcaaagagagacagcggtttccaggatttaggacaggtttctcatcatcaattcatggcagtttggatggtagacgggttgggttgtgcactcaacatgttaaggatttatatctaggacacatctcccttcagtcagttgattttggtgtgctgatagatgactctaataaaataccttaa

SEQ ID NO: 65105 - DNA, 3813 bp, Oryza sativa
  Clone ID: PAT_MRT4530_66186C.1
atggagccgccgcctcaggcgggcccctccccggccgtccgcgtcctctcccgcacgcccccgccacccgcctcctcctccccctccccgccgccccccgccgccaccccgccctcccacgacggcgtcgtcgccgtcggcttcgtcggcggcgggggcactgcccgcctcgccgaccggatcctggacgcccatgtgttctcccctggtggctccgccaggaccctcgcgggcggagtcaggtaccaccgcgacggggagaagagggtggtgttcctgcacctcgctccgtcgccgccgacacctctggagggggcgggcgatctacgggagctgctcttcatgttctccgtttgccatgtaataatatttctccaagaaggcttccggttcgacacacagattttgaagaaattccgtctgttgcaatcctcaaagcatgctattgcaccgtttgtgaagtcactagtagctcctgcagtgccatcaaaagttgctcgctctaatactccaacaaagcctactcacagggcctcatccatctctcctcctgcacgccgtggaggtcgtcatccctcagcaatctcgttgatgtcaggaactggctcacatccttgtatgctgccagggctatgcatccctgttgttctgtttgtctttgaggatgatatcactgatgctccaggtgctccgacaagtccggatgatacgaacgacacatcatcaaatcaagcttctaacactgatggcttgccaaaacctaacatgacttcaaaaggttctagttcagtggttatgcttgctaggccagcaatcagatctgatggtactttcagcaagaagctgcattcctctgtagaaggtcagatacgtttcttgctaaagaagtgtcggacacttgtgggtctagagccagggcatattgtttcgaggggtgtcagtaatgtgagccacctacctctgttctcacttgatacatcaagggtcgttgcactgttggatcggtcaattagtaagaaacgtgagccattggatatcattgcaggactgtttgaagactctttgacatccaaatcatcattggatgtttcttcgctggagaacaattgccatccagcaacccatgaagatgttcagttcatcaaggattttatatttcgacaatcagatgggctgagaggaagagggggacactcaagcaatacaactgctggtcctgtttctggtgttggaatggtggcagcagcagcagctgctgctgcagcatcagcagcatccgggaagcaaatgagtgctcctgatctccctactttcgatacatggttgtctataagttcatctattttgtctgcactgtttagtggggaagatgggttaagtagttcccaaaacatgaaggcatcacctactcatacaagttcatttccaaagaacgatcaacttccttcagcaggatccaacgcaattcaaactgctttatcttgcttggaaggcaataaggggcttaatgtgaaattttcttcatcatggtgccaaaggatacttccagctgctaaggaggtgtatttgaaagatttgcctgccttttacccaaccagcatgcatgaagtacagctacagaaagctttacgatccttccactcaatggttaaaggaccggctgtccaagtattctccaagaagctaaaagatgaatgccaagcaatatgggaatctggaaggcagcaatgcgatgctgtcagtcttactggcagaccatgtaagcaccagagacacggtaaatcctctccatcagatgcagcgttacagcattctagtggatatgttttcctccatgcatgtgcctgtggccggtcacgccgtcttagggatgacccttttgattttgaggcagcgaacatgacctttaactgcttctctaattgtgaagatctgttacctactcttgtgcttccaagagagaccaatgctggtgcatttccagtatcctcttggcgtttggtgcggcttggaggagcaagatattacaaaccaacaaaaggattgctccaagcaggtttttgctccaaggaaaaatatcttttaaggtggacgatttctcttgggaaaggacaagggaaacatggcactcatgctaccaataaacctttctccacggcatctaatgcagatcctcaggctccccctattgttgctggagaagtaaaatcggccgtgacccaagtcacagcagaaattaaatctatgaaacttgaaaattctagaaaacaacctgaagtcgagtcaatgaacaattcaagtattaattttggtaaaggtcttccaaactttactatgaagaagccttttgctgaagttgttgctggccacacagcaagggattctgagtttcctgctctccaacagaagaggccattaaaacctggcaactggaaagatgagcggcaagtgagtggagcagaccaaactaatggccgtggtcatccagctcttagtcaaggacctatagctgacaatgaatctgagaaagtgagcagagataagagtaatggaagtgctggcggaaagccatttctacagatagggagcaatatagtgccaatggttgtcggaaaagagactaaagaagttaatcaatctatacagcagttcatggtatatgtcggatttgagcacgagtgttcctatggtcatcgtttcttactgtcagagaaacatctcaaggagattgattcgtcttatttgcagtttgaaagatctaatctaaataatgaagcagaaagcaaacatggttcacaaaagttgccccaaaatgcatctagattagcagcaacaatggatgtgaccagcggagggaagctcaataggccaatggattcatcagggagaaacagccagcagcaattgcttaagcccagggttgacgctgagaccttgcagccttctcactggctttcagatccacagaatgaaagaaagggagagctttctcttcattatgttacacttgatgatggtggagaagcattttcacttctaaacagaaatctgcccatatatatgcactgcccacattgcaagagctcagataggaagggaaatcaagatgcaaaggttgctgctgctgtgtcacaacttcaacggatttttattgcctcatgtttgccttcaaatgcttctgaccatgatcaacaaggatcgttcagtcttggttgtcgagttgtccttccacctgagagctttcttaccatgagacttccatttgtctatggtgttgagacaagagatggaaatacagctcccctgaaataccttgaggaacaaccagaactcacagcttggcttgttggaggcacagctttgcagattgtatcagttccagcattgaatttcaggattccggcaagtgtaatggctcatgatgtttacatggagcttccttttgcattgagaaacaggagctctcttgacaagatgaatgatgcacaatggatgcattggagtgagctggtgatgcagatgggattggtatatccagtgaacccgatgtttgttattgatgcagggaactggacatgtacattaataggtgtcagcctttattggagagatgaacgctccaggttggcatggcagcagccccttcttgtagcctggaggttggagaatgttgaaactggaaggaaacgcatgaaccagtcctgtttgacaagtgtaaaggcacagaaagaaagtgacgagatcacagttgagccaagcctgtgcgacgatgcctgctttttcttcacctgcaaaacaaccgtttccacgtga

SEQ ID NO: 65106 - DNA, 798 bp, Oryza sativa
  Clone ID: PAT_MRT4530_66187C.1
atgtttttgaccggaataaaaaagttcaaaaagcaccaaaacatgatttttggacatattgaagtgtgttgggtgcgttcgtggcaaaaaatcacttcgtgactcgcgcggcgaacttttgtgaattaatgccaatattgccatagatgggtgcgatgttttagaccggaatgaaaaagttcaaaaagaaacaaaacatgatttttggacatattggagtgttttgggtgcattcgtggcaaaatatcacttcgtgattcgcgcgctgaacttttgtcaattactaccaatattggcataggtgggtgcgatgtttttcaccggaatgaaaaagttcaaaaagcaccaaaacatgatttttggacatattggagtgtgttgggtgcattcgtggcaaaaaatcacttcgtgattcgcgcggcgaacttttgtcaattaatgccaatattgccatatattggcacacgtgggtgcgatgtttttcaccggaatgaaaaagttcaaaaagcaccaaaacatgatttttggacatattggactgagttgggtgcgttcgtggcaaaaaatcactttatgattcgcgcggcgaacttttgtcaattactgccaatattggtataagtgggtgcgatgtttttcacccgaatgaaaaagttcaaaaagcaccaaaacttgatttctcgacatattggagtgtgttgggtgcgttcgttgcaaaaaatcacttcgtgaattgcgcggcgaacttttgtcaattaatgcccatattgccataggtgggtgcgatgtttttcaccc

SEQ ID NO: 65107 - DNA, 497 bp, Oryza sativa
  Clone ID: PAT_MRT4530_66188C.1
atgtttttgactggattcaaaaagttcaaaaagcatccaaacaggatttttggacatattggaatgtattggttgcgttcgtggtaaaaactcacttcgcgattcgcgcggcgaacttttctgaattaatgccaatactggcacacgagggtgcgatgtttttgacaggaatgaaaaagttcaaaaagcaccaaaacatgatttttggactttttggagtgtattgggtgcgttcgtggcaaaaactcacttcgtgatttgcgcggcgaacttttgtcaattaatatcaatattggcatatattgagcccccacgggtgcgttgttttcgaccagattgaaaaagttcaaaaagcatccaaacatgatttttggacatattggagtgtattgggtgcgttcgtggcaaaaactcacttcgtgattcgtgcggcgaacttttgtcaattaatgccattattggcatatattggtacacgtgggtatgatttttttgac

SEQ ID NO: 65108 - DNA, 321 bp, Oryza sativa
  Clone ID: PAT_MRT4530_66189C.1
ttggcgatggggtagaaaacaatggttgtgtttagttacctttaaacttttaacttttccgtcgcatcaaatgtttagacatatttatagagcattaaatgtggaaaaaaaaaactaattgcacagggatcggcggtggcggtggcggggcggcggaggctggtggggccggggtcgtcgccgccgacgtgccggagccggtgcggcggctgccacccatgccggccggtgcacgtggccatccagccaggccggagcttcccgctcgagtactacccggaggcgtggcgctgcaagtgcggcgacaagctcttcatgccc

SEQ ID NO: 65109 - DNA, 2311 bp, Oryza sativa
  unsure (1)..(2311): unsure at all n locations
  Clone ID: PAT_MRT4530_6618C.1
gcaagcatagcaaactacataaattgatcagggatcgatcgaaattaatggcgggcaggagcaggaggaggtcgttttggtccgtgggcgttgcggctgctctgctttgtctgctggccgcccatggctgcagcgccaagcatcacaagcccaagcctactcccggtggcatcagtggcgggcctgcttggtcctcctccaattccagcacccccagtattcctcctcctgttgcccctactcctactgctcctactcctcctattcccagccccggatctggntgcagtctcggcagcngtggcggtggcggcggcgggtggctggtacgtagtaatacaggcttctgtacgtacgtatcacagggagttcccaaaatggctggcctgtgccaaggtcgtggcgatgctgctctccgtgctcgccacgtacggcttcgccggcgcgggggtacaccaacgactgggtcccgcaccgcacatcgctatcatcatccccaccgccggccccgacctgcctcgcccccactcatctcacttcactctctttctcttctcttcacttcaccaccgccacctctctcatcggatccctgcagaggaggagagggcagtggcggcgaaaggcgacatgggctcgctgtcctctctcgccgccgcggcggtgtttctctccctcctcgccgtcggccactgcgccgccgccgacttcaacgccaccgacgccgacgccgacttcgccggcaacggcgtggacttcaactccagcgacgccgccgtctactggggcccctggaccaaggccagggccacctggtacggccagcccaacggcgccggccccgacgacaacggcggcgcgtgcgggttcaagcacaccaaccagtacccgttcatgtcgatgacctcctgcggcaaccagccattgttcaaggacggcaagggatgcggctcttgctacaagatcagatgcaccaaggaccagtcgtgctccggcaggtcggagacggtgatcatcaccgacatgaactactacccggtggctccgttccacttcgacctcagcggcacggcgttcggcaggctcgccaagcctggcctcaacgacaagctgcgccactccggcatcatcgacatcgagttcaccagggtgccatgcgagttcccggggctcaagatcggggttccacgtggaggagtactcgaaccctgtgtatcttccgcggtgctggtggagtacgaggacggcgacggcgaccgtggtgcaggtggacctgatggagtcgaagacggctgcacgggcccgccgacgggggacggtggacgccggatgagggagtcgtggggctccatctggaggctggacaccaaccacaggctccaggcccccttctccatccgcatccgcaacgagtccggcaagacgctcgtcgccaacaacgtcatcccggccaactggaggcccaacacattctaccgctccttcgtccagtacagctgaaccgccgctcgccggcggcgaccctcggcgccggcatcgccgccgctgctgctgctagtaatactactactgctatgatgtaattgtgttaccggttgggttctttgagtttgttggggttggggattgtgtggtcggtctgtgttgcgatttgcagaaaccgggcgagcgaaagaagaaaaaaaaagctgtgtgggaaatggaggaggtaggcgtacaaggttacgctctcccgcccactctcgcttttataatttatcattttcaaatggtgatgatatgatgattaatcaaaaggattatattgctacttaaaaaaaaaaaaaaaaaaaaaagcaccctattttatgcttctatctgcccccttccaggccggaggagctacggtaagccaatgatcaagaacaagcataattcatgcctactatagcagcagcagaagcagcattagctactatacatacctctacgtacgacatttgagatcgatcgtttggccatttttatctgctcgggtattgattagctctccctcggtattgtatggatttgcatggatggttcattaatctgtcatcaggagttcgttttgagtaggtgagacgtcggttgttgggtgtcatatagacatcgctcggtgtcttgaggttgagagtgggataaggaggaggcaaagtttgcatgtgctgtcccgcccactctcactgtaccagtgtcactgtttgtgtaaccagaacaaaggtcataaattatactactagtatacagtttgctgcctggcattcagtatgatcaatgcttccctttttcc

SEQ ID NO: 65110 - DNA, 498 bp, Oryza sativa
  Clone ID: PAT_MRT4530_66190C.1
atgtttttcaccaaaatgcaaaagttcaaaaaacaccaaaacatgatttttggacatattgcagtgtattgggtgcgttcgtggaaaaaaatcacttcgtgactcgcgcggcgaacttttgtcaattaatgccaataatggcacacgtgggtgcgatgtttttgactggaatgaaaaagttcaaaaagcaccaaaacatgatttttggacatattggagattattgggtgcgttcgtggcaaaaaaatcacttcgtgattcgcgcggcgaacttttgtcaattaatgtcaatattggcacacgtgggtgcaatgtttttaaccggaatgaaaaagttcaaaaagcacgaaaacaagattgtttgacatattggagtgtattgggtgcgttcgttgcaagaattcacttcgtgacttgggcggcgaacttttgttaattaatgccaatattagcacacgtgggtgctatgtttttgaccggaatgaaaaagttcaaaaa

SEQ ID NO: 65111 - DNA, 291 bp, Oryza sativa
  Clone ID: PAT_MRT4530_66191C.1
gggccaaaaaaacagaccaaacagccaaagaaaaatgaaaaaacttccccaccccaaaccttcttttaggcgggaccaacgaccttgcaattgccaagggggggggacccatgaagaaccggcagacccccggaccctggccaaaggcgttttggtccctcactgggggggcccccttgaccaccccgggaatttccacccgtgaccggcagggcaaccaactttcccaagaaggggcacgatagcaacccgggagacaacacagaaaggaacggactccagagataaagg

SEQ ID NO: 65112 - DNA, 766 bp, Oryza sativa
  Clone ID: PAT_MRT4530_66192C.1
atgtttttcaccggaatgaaaaagttcaaaaagcaccaaaacatgatttttggacatattggactgtgttgggtgcgttcgtggcaaaaaatcacttcatgattcgcgcggcgaacttttgtcaattactgccaatattggtataggtgggtgcgatgtttttcaccggaatgaaaaagttcaaaaagcaccaaaacttgatttctcgacatattggagtgtgttgggtgcgttcgtggcaaaaaatcacttcgtgattcgcgcggcgaacttttgtcaattaatgccaatattgccataggtgggtgcgatgtttttcaccggaatgaaaaagttcaaaaagcaccaaaacatgatttttggacatattggagtgtgttgggtgcattcgtggcaaaaaatcacttcgtgattcgcgcggcgaacttttgtcaattaatgctaatattgccataggtgggtgcgatgtttttcaccggaatgaaaaatttcaaaaagcaccaaaacatgatttttggacatattggagtgtgttgggtgcattcgtggcaaaaaatcacttcgtgattcgcgcggcgaacttttgtcaattaatgcccatattgccatatcttggcacacgtgggtgcgatgtttttcacccggaatgaaaaagttcaaaaatcaccaaaacatgatttttggacatattggactgtgtgggtgcgtcgtggcaaaatatcacctcgtgattcgcgcggcgaaactattgtcatatactgccaat

SEQ ID NO: 65113 - DNA, 817 bp, Oryza sativa
  Clone ID: PAT_MRT4530_66193C.1
gcacgagggccagctacagggcggggcaaactcacagaagacgctggcgctgatgagacgagacccgacgtcggcggcggcatgggactttcgcgcgatgccatgcacatccgccgggccacgggcggcacgcggtcggcatggcaccaaacgcgaaagtctgagctgggctggccgcctgcctacaccaagttgtcaagcaacaagaccgcctggagggtgcgtgtacgcggccgtcctgttgagtggagggccctccgcttgtatactgtcagctacttacgttgtattgttggcgtccccccccccgtccctattttcatctgccggccctctttgtgtatctccgcgatactcccccgcacttctcatttttttaatggcgttctttttgcacctatctcctcgtccctttgttttcgtctttttttattataacctctgctctctttatttaatttttatatttctggatatttgcgtctccgtagtgctgctccttatttatttttttgtcgcctatttttaatcttcttattctattccctcgcagcgtcttaatattatattccaaatgcgctgttgtttacccttcatacactctttcatatattctcccctatcccttcactcccattcactgtgcccgcttcatttgttctctctccttccccacttcctcctcattctcactcgcccttcatcatagttcgactgccgtctcaatctcactatcaagatgccgatcttaatatttctctctctcgcctatacatgtttaagatgtttttttctctcttacttatttttttccttt

SEQ ID NO: 65114 - DNA, 669 bp, Oryza sativa
  unsure (1)..(669): unsure at all n locations
  Clone ID: PAT_MRT4530_66194C.1
gtccagtgattcaagaagaagcagaaaaaaacctgctccaagttaaggtctttccaacatttcgtctcatttgcacatcagttacctgtttgcctggccgcaatattctccagatgatagcacggtaatctgctgtcattcgcacttctgtgaacggagcagcaagatcaacatgcgaaggcgagaccttgtaagtacatgtccactgttgaatagcatgactgaagcggcgatccatgattcacctctgacaccattgacacattagcctgccattggctcgtgagaaagcgttctacttatggtgggcacacagagatcgttgagtagttaattgcttttgattgacttgactgagtttgtgtcctcgtcctctccactctccaggaaagtctcagcgagtcatgcgttgtgttacagcttgtaacatgagccaatgtgttaatagttttgtgaagttggcgtagcgccatggccattgacgctataatgttagtaaagttgattagtgcatggcttatttggttgcacatccattttcctacctgcacgcgcacatatcttcaacctgtacgcttgttatgtagagagctcactgcaattacatattgcaagcttgtaaatatttnttcaagaaggcatttcattcccttaaaaaaaaaaaaaaaa

SEQ ID NO: 65115 - DNA, 510 bp, Oryza sativa
  Clone ID: PAT_MRT4530_66195C.1
atgtttttgaccggattaaataagttcaaaaagcaccaaaacatgaattttggacatattggagtgtattgggtgcgttcgtggcaaaaactcactccgtgattcgcacgacgaacttttgttaattaatgccaatattggcatatcttgagcccgcacgggtgcgatgttttttgaccggaatgaaaaagttcaaaaagcaccaaaacatgatttttggacatattggagtgtattgagtgcgttcgtggcaaaaactcacttcgtgattcgcgcggcgatcttttgtcaattaatgtcaatattggcatttattgagcccccacgggtgcgatgtttttgaccggattgaaaaagttcaaaaagcatccaaacatgatttttggacatattggagtgtattgggtgagttcgtggcaaaaactcacttcgtgattcgtgcggcgaacttttgtcaattagtgcaaatattagcatatattggcccacacgagtgcgatgtttttgacc

SEQ ID NO: 65116 - DNA, 660 bp, Oryza sativa
  Clone ID: PAT_MRT4530_66196C.1
atatttttgaccggattgaataagttcgaaaagcatccaaacatgaattttagacatattggagtgtattgggtgcgttcgtggcaaaaactcacttcgtgattcgcgcgggtacttttgtcaattaatgccaatattggcatatgttgagagcccacgggtgcgatgtttttaaccggattgaataagttcaaaaagcaacaaaacaagatttctggacatattggagtgtattgggtgcgttcgtggcaaaaactcacttcgtgattcgcgcgacgaacttttgtcaattaatgccaatattggcgtatattgagcctccacgggtgcgatgtttttgaccagaacgaaaaagctcaaaaagcaccaaaacatgaattttggacatattggagtgtattgggtgcgtttgtggcaaaaactcacttcgtgattcgcgcgggtacttttgtcaattaataccaatattggcatatcacgggtgcgatgtttttgaccggaatgaaaaagttcaaaaagcaccaaaacaaaatttctggacaaattggagtgtattgggtgcgttcgtggcaaaaactcacttcgtgattcgcgcgggtacttttgtcaattaataccaatattggcatatgttgagaccccacgggtgcggtgtttttg

SEQ ID NO: 65117 - DNA, 491 bp, Oryza sativa
  unsure (1)..(491): unsure at all n locations
  Clone ID: PAT_MRT4530_66197C.1
tttgccactaaatatgtgattgttaagccaccgccaatgcccantgcctcttagataatgaccaattatttaccttatctgaaaattgtttatgaacctttattntcttccactgatccctccacgaaatgttaataagagaaggaagatgatgaggattgtagcacccttccaggtcccacttatctccggctagcacaaattggcccgagagaaatgttcctcccacccacgcttagttcatccagctgtgcaaccttggctatctctttccgtccgatcctattgatttccactcggcacacactacttcatctactttggatcgacatgttgttctcagatcagttcccatgtatcatcacttttgtcacaccgttattttgcacaaccatgtataattactattgttatagtgttatgtatcaggtttcggtgacttcatagttccacatgatatcatcttgtttatttaaaaaaaaaaaaaaaaa

SEQ ID NO: 65118 - DNA, 486 bp, Oryza sativa
  Clone ID: PAT_MRT4530_66198C.1
atgtttttgaccggaatcaaaaagttcaaaaagagccaaaacatgatttttggacatattggatgtattgggtgcgttcgtggcaaaaactcacttcgtgattcgcgcggcgaacttttgtcaattaatgccaatattggcacacgagggtgcgatgttttctgctgcaatcaaaaagttcaaaaagagccaaaacatgatttttggacatattggagtgtattgggtgcgttcgcggcaaaaactcacttcgtgattcgcgcggcgattttttgttaattaatgccaatattggcacacgagggtgcgaagttttctactggaatcaaaaagttgaaaaagagccaaaacatgatttttggacatattggactgtatcgggtgtgttcgtggcaaaaacacatttcgtgattcacgtggcgaacttttatcaaataatgtcaatattggcatatattggcccatacgggtgcgatgtttttgacc

SEQ ID NO: 65119 - DNA, 195 bp, Oryza sativa
  Clone ID: PAT_MRT4530_66199C.1
atggcgtggacccccgccgcccctactcctcgctccgaggcggcgctggccggtgagctccggggccgacgcacgacaaggcaccatgcgggccggcaagctctgggtcaatgcagcggattaaggctgggcggggccttcttccggtggtacatcgagctcgaggagtttttcctctgctcccgactgttctag

SEQ ID NO: 65120 - DNA, 330 bp, Oryza sativa
  Clone ID: PAT_MRT4530_6619C.1
tcgtatacgcacacatatgtccagagcgagcagggcggtcattttagaaaacaatgcggctacagttgctctaaactatcgccattactactactgtatgcagccaatgctactagacatgagcatctcttagacctataacggattcactctatccagatggggcacataaataatgatataatacagacgtacttcaacagtatgggcatgttgtaacttatgaacagttaaactttggtctcttgacgtaagcatccattatataccattacatcaactgaactcataaccctgaagacaccaaaaatggccttttcatcatcataa

SEQ ID NO: 65121 - DNA, 897 bp, Oryza sativa
  unsure (1)..(897): unsure at all n locations
  Clone ID: PAT_MRT4530_661C.1
aaaaaaatccccaatcccgtccccggcgcgccgcccttccccagccacacgccgcccttcgccggccacgcgccgccacccgccgtcggctgccctgtccccgcccttgcgtctcccgcgcgccgctgccctgtccccgcccgcacgccgtcctcgccagtcgccgccctggactcgccgcggcgacggacgagcgagctccacggcaatagcggacgagcgagctccgccctgtccccgcccccgcgtcatccctgccagtcgccgcccgtgcgccgtccgctcgtcgtccccgctcgcgccgcctgtgcgcccgtgcgctgtcccgcccacgcgccgccgcccgctgccaccgacacccaccaccgacgtccgccgctgccgcgtttggcacagctccagctctaggtaagttggagttgagagctggagctgccttagcttcagtgcgaagccacgtggcccccctcctcctcctccagcccccgcgcggtaggcgacacggacgccgacggtggggcccactcgacatccccaattccttccgcttggctccctcgtgggccccacccccaccacgctggcctccctcctccctcccccgctgcccccccccccccccacctcccccgcgccccgcccgcccgcccgcgcgccccacaccgagaggcgccgcgccaccatcaccacccaccccgctcctcgcgccgccgacgcgccacccgccggcgacggcgaggaccgcgccgccggtgtcatcgtgccgtgccgatccctcccccggcggatccacgggctgagccgatcccgtccgtggagaggagaggaggaggggagggggaaggggagagggggggagatggagaagtacgaggcggngagggacatagggtcggg

SEQ ID NO: 65122 - DNA, 469 bp, Oryza sativa
  Clone ID: PAT_MRT4530_66200C.1
atgttttagaccggaattaaaaagttcaaaaagcaccaaaacatgatttttggatatattggagtgtgttgggtgcattcgtggcaaaacatcacttcgtgattcacgcggcgaacttttatcaattactgccaatattggctcacgtgggtccgatgttttagaccgcaatgaaaaagttcaaaaagcaccaaaacatgatttttggacatattggagtttactgggtgcgtttgtggtaaaaaatcacttcgtgattcgcgcggcgaacttttgtcaattaatgccaatattggcacaggtgggtgcgatgtttttcaccggaatgaaaaagttcaaaaaccaccaaaacatgatttttggacatatttgagtgttttgggtgcattcgtgggaaaaaattacttcgtgattcgcgcgacgaactttcatcaatttctggcaatattggcacacgtgggtgcgatgt

SEQ ID NO: 65123 - DNA, 637 bp, Oryza sativa
  Clone ID: PAT_MRT4530_66201C.1
ccgggcggctccacccggcacccctcctccttctctccaagtcctcgtcttggttgtcgcaatcattcgtggggcgcgttaatccctccccaaattctgtggcagccagcttccccgcttgcttggattggatttctccaagattgatttgttccctcctctcttctcctcccaattcacttcctctatccatttccaatccaatattggttttttgcattgtttcctcccgatttgtcttcctctccctctccctctcccaccatatcttggactcggtcctatctgtccgtgcctcgcttccatcgccattgctcttctgctactaaagtcttctcctccggagggagagactgggactgggagctagctcgcccgtgttgtgttgttgttcagggagtaaatgcgcgtccttggtggtgcttggtcccagcattttccgccccaaatctcgtccttgctgccccgacttaagtggtggagattccgtcaccggcggtcgtagatgaggaggaggagatcctcctcctgatctactcttcttcttcttcttcttcttcttcttcttcagctcctggctgctgctgctccactccccctgatccccctgcaggagcatggatttcttggcctgcgt

SEQ ID NO: 65124 - DNA, 1416 bp, Oryza sativa
  Clone ID: PAT_MRT4530_66202C.1
atgtttttcaccagaatgaaaaagttcgaaaagcaccaaaacatgatttttggacatattggagtgtgttgggtgcgttcgtggcaaaaaatcacttcgtaactcgcgcggcgaacttttgtgaattaatgccaatattgccatatatgggtgcgatgttttagaccggaatgaaaaagttcaaaaagcaccaaaacatgatttttggacatattggagtgtgttgggtgcattcgtggcaaaatatcacttcgtgattcgcgcgctgaacttttgtcaattactaccaatattggcataggtgggtgtgatgtttttcacccgaatgaaaaagttcaaaaagtaccaaaacatgatttttggacatattggagtgtgttgggtgcattcgtggcaaaatatcactttgtcattcgcgcggcgaacttttgtcaattactaccaatattggcataggtgggtgcgatgtttttcaccggaatgaaaaagttcaaaaagcaccaaaacatgatttttggacatattggagtgtgttgggtgcattcgtggcaaaatatcacttcgtgattcgcgcgctgaacttttgtcaattactaccaatattggcacacgtggttgcgatgtttttgaccggaataaaaaagttcaaaaagcaccaaaacatgatttttggacatattggagtgtgttgggtgcattcgtggcaaaatatcacttcgtgattcgcgcggcgaacttttgtcaattacagccaatattggcataggtgggtgcgatgtttttcaccggaatgaaaaagttcaaaaagcaccaaaacatgatttttggacatattggagtgtgttgggtgcattcgtggcaaaatatcacttcgtgattcgcgcgctgaacttttgtcaattactaccaatattggcacacgtggttgcgatgtttttgaccggaataaaaaagttcaaaaagcaccaaaacatgatttttggacatattggagcgtgttgggtgcattcgtggcaaaatatcacttcctgattcgcgcggggaacttttgtcaattacagccaatattggcataggtgggtgcgatgtttttcaccggaatgaaaaagttcaaaaagcaccaaaacatgatttttggacatattggagtgtgttgggtgcattcgtggcaaaatatcacttcgtgattcgcgcgctgaacttttgtcaattactaccaatattggcacacgtggttgcgatgtttttgaccggaataaaaaagttcaaaaagcaccaaaacatgatttttggacatattggagtgtgtataaaaagaggggaagaacgaccatagggtcgtgctccaaccctaggacgcgcccctaatgggcccaacatggatacacagcccattgggccaaaagagatgacgca

SEQ ID NO: 65125 - DNA, 1086 bp, Oryza sativa
  Clone ID: PAT_MRT4530_66203C.1
atggcgaactgggtgagggtggcgtcgacggcgagctgggagaggaggccctgccggcgccaccttgctgctgaacgacgagaacacgacgaagagctcgacagggatgaccagatcttgatgcgacggaagcagcccggcgacgcgccggcgtcggcggcagcgtcggaggccgacctcgcccagctctccatcgccatcgccgctggggaggacctgggcccgttcgtgcggcgcacgttcgcgtgcggggcgccccgagccgctgctcgcctcgctctggaccgctccctcctcgcgcgacgccgacgcgctcaaggactccttctcggcctcccacgcgacggcgacgagcgaggagaggaagatcagcagcagatggagaggttctatgcgcttgtggccaatgtccaggcgctgagagccatgttcaaggaggcagcgggagcagtgccagaagaggccgagggcggcgccgtggcggccggcgttcgagaggaggacaaaggcgaagttaccgaggggaaacaaagtcgccatcgccatcgtcgcagacgggcctgggaagtcgacgacgatgcctcccacgctgcgctcctctcctcctccgcgccgctgctcgcctcgctcaagtccttcctcgcagcgcgtgggctcgccggaaacctctcctccgcgctcgtgttcgtcgcgggaagcggacgggctggaggaggcgaccgcgccgaggccgagcgcttcctccgcgccgtcgcacccaggccgccgttgtctgtgcccgctgccatcggacccaggctgccacccaccgagtccgcgccgaggttgccgccgttgcgcacaggccgccgcccgcggacactccgccgtcgcgcccaggacaccgcccgctgtggccgccgccgtcgcgcccaggccgccacccccggagccctccgcagccgtcgtgcccagggcgctgccgctgagtcgcgacgaagaagccgcccgccgtcggcaacagcgctgcgtagaacggaagcaggtagtcatagggggagaaatagatatttaagggaagaagcagggaagaaaaaacaaaagtaa

SEQ ID NO: 65126 - DNA, 962 bp, Oryza sativa
  Clone ID: PAT_MRT4530_66204C.1
atgtttttgaccggaatcaaaaagttcagaaaacgccaaaacatgattattggacatatttgagtgtattgggtgcgttcgtggcaaaaactcacttcgtgattcgcgcggcgaacttttgtcaattaatgccaatgttggcatacgcgggtgtgatatttttgacaggaatcaaaaagttcaaaaagcaccaaagcaagatttttggacatattggagtgtattgggtgcgttcgtggcaaaaactcacttcgtgattcgcgcggcaaacttttgtcaattaatgccaatattggcacacgagggtgcgatgttttctgctgcaatcaaaaagttcaaaaagagccaaaacatgatttttggacatattggagtgtattgggtgcgttcgcggcaaaaactcacttcgtgattcgcgcggcgattttttgttaattaatgccaatattggcacacgagggtgcgatgttttctactggaatcaaaaagttcaaaaaacgccaaaacatgatttttggacatattggagtgtattgggtgcattcatggcaaaaactcacttcgtgattcacgcggcgaacttttgtcaattaatgccaatattggcacacgagggtgcgatgttttctactggaatcaaaaagttcaaaaagcacaaaaacatgatttttggacatattggagtgtattgggtgcgttcgtggcaaaaactcacttcatgattcgcgcggcgaacttttgtcaattagtgccaatattggtatatattggcctacacaggtgcgctgtttttgaccggaatgaaaaagttcaaaaagcaccaaaacatgatttttggacatattggagtgtattgggtgcgttcgtggcaaaaactcacttcatgattcgcgcggcgaacttttgtcaattagtgccaatattggtatatattggcctacacaggtgcgctgtttttgacc

SEQ ID NO: 65127 - DNA, 116 bp, Oryza sativa
  Clone ID: PAT_MRT4530_66205C.1
ttctcgtctgcttcctcctcattaccggggcctcctccgtgcaggtgccgagctccagtgaggagctattgatatgtatggcggaggagacagatagtggcccatcatcactagcc

SEQ ID NO: 65128 - DNA, 1673 bp, Oryza sativa
  Clone ID: PAT_MRT4530_66206C.1
tttgtttaatcccctctcccaagccccaatccgacgcaatccatacgattccccactcccaagccacaattgcaaaccgtcaacgcaagccagagaggcgtatcttttctactcatgttctccgctgagaggccgtgcatctcgagctgccattcgagtgatgaggtaaggggggtgccggcgcgagaagcgaggttggctggccggcggagggcgggctgtcggtcgcgggtgcgccaggatggggctgatctcggggatggtgatggggatggtggtcggcgtcgcgcttatggccgggtggagccgtgtgatgcagcggcgcagcaggaagcgcatcgctaaggctgcggatatcaaggtcgttgggtctctcggtagggacgatctcaatggggctgatctcggggatggtgatggggatggtggtcggcgtcgcgcttatggccgggtggagccgtgtgatgcagcggcgcagcaggaagcgcatcgctaaggctgcggatatcaaggtccttgggtctctcggtagggacgatctcaagaagctgtgcggcgacaatttccccgagtggatatccttcccgcagtatgagcagatgattttctgggtcatagttagcgcagttggatggaaatggtataaaaaggagctttgcaaattttttggtgatattgaagtgaaatggctgaacaagcatctcagcaaactctggcctttcgttgatcaaattttagttcttctgggggctactaaacttttagttccatttcaggctgccactgcagtagtcaaggaatctgttgagccactgctagatgattatcgacctccaggaataaaatctctgaagttcagcaaattctctcttggaactgtttcaccaaagatagaaggtattcgcattcaaaatattcagccaggccaaatcataatggatatagatcttcgttggggtggtgatccaagcataatccttgctgttgatgctgttgttgcatcacttcctattcagctcaaagatcttcaagtctacaccattgtccgtgttgtatttcaactatcagaggagatcccttgcatctctgctgttgttgttgctcttcttgcagagccagagccgaaaatacaatacactttgaaggctattggaggaagtctgaccgctgttccaggactctccgacatgattgatgacactgtcaattcaattgtttctgacatgctcaagtggccacacaggcttgttgttccacttggtgtcaatgttgatacaagtgagctggagcttaaacctcagggaagacttactgttactgtagtaaaagcaacttcattgaagaataaggagttgattggtaaatcagatccatatgtgatactatatgtgcgtccaatgttcaaggtcaaaacaaaagtcatagatgataacctaaatcctgaatggaatgaaacattccctctgattgttgaagacaaagaaacccagtctgtcatttttgaggtatatgatgaagacagacttcagcaagacaaaaagcttggtgtagctaaactagcagtgaacagtcttcaacctgaggctaccagtgaaatcactttgaaacttcagcaatcactagattctcttaaaattaaggacaccaaggatagaggaacattacatcttcag

SEQ ID NO: 65129 - DNA, 462 bp, Oryza sativa
  Clone ID: PAT_MRT4530_66207C.1
atggcgtcagcgtcggcgaagacgatggtgagggcggtgatggtggcggccgtgttgctgcagtgctgcggcgtgctcctcgcggcgaggccgttgaagggcgacgtcgtcgccgccgccggcggtggcggaggcggtggcggcgagatgttcgtcatgcagatactgaagaccagcaccccaaccacgccgctgaattcgatcatggcgtcgtcgtcggcgatggtggtgagggtggtggtggtgggcgtgctgctgatgcaatgctgcaacgcgatcatggcggcgaggctgctggaaggcgacttgtttggcagcagctggctgcagggcgaggacggcgtcgccgccggcgagctcatcttgcaggtgctcaaggtagtgccatcgggaccaccaggcaatgattgccaccaaggtggcgccggctccggaggccagtgctaccagccgcctaagtag

SEQ ID NO: 65130 - DNA, 463 bp, Oryza sativa
  Clone ID: PAT_MRT4530_66208C.1
gtgctctcgaatccctggttttgattatcactgaaggccgattccggtccctcatttcccctttctttaattgatttaaacctttttttttcttattctgtaataccacaaaccgcccaacatgtctgtctgggatgccataaccggacgcaagaacaagcccgcacaatcacctccccctgcgccagcgccgacagcgaccgagcctcatcatgtatcttctcacttcgacccctcagccgctcaaggcgtagacgcgttcctcggaacctccagcttcgccgatccttcagttctacaccccctcgctgggctgaacaaggagacgctggattacatctcgctcgaggacggagcgatcgctaccccaggttcacaggccggtctgccgtcgcgcggcttcaccgacgatctctgctacggaacgggcatcacatatctctcgggtttgacgataggtggc

SEQ ID NO: 65131 - DNA, 1484 bp, Oryza sativa
  Clone ID: PAT_MRT4530_66209C.1
gcacgaggaccggcatggaagtaatggtgcgccccgcctcgccgccgccgcgccaccacgacttccggttcgacagcccggcggcgagcccgtacgccacggcgctgtccagcccgcgtggccgcctcgccacggccacgttcttgacggcgccgccgtcgcctgacccgttcgaggccgtcatggcggcgcagcagcagccggagacgccgcgcctcacccacgccaacccgttcgacctcttccagcacttcagcagcgcgccggccagccccaggcgcgccgccgccatctacgcgcacttcgccgaggggggcaacgggggtggccgcgatgacggcgaggatgaggaggaggaggacgacgacgacgacgaggggttccggccgcgggcgtcgtacaccgttaacgcctcgtccgtgccgttcgattgggaggagaggcccgggacgccgaaggccgggctcggtggcggcggcggcggcgcggcgtgggatacggacttcgaattcggcacggtcgtcgacaaggccgcgccggaggagaatctgacgaccgccgacgagctcttcgagaagggtaaaatccggccgctgaaggcgccgctgccgaagacggccgacgagctcttcgacaagggcaaggtccggccgctgaagccgcctcctgggctgctcgacggcgggagcgtcgcgtcgtcgccgcggtcgccgatgtcgagaggcggcggcatgtggtcgcctcgccgacggagcagggtcggctccggcgtcgacttcgacccgttcgccgctgctctgctggaggcgaccaaggcgccgtcgccgtcgccgtcgccgctcggcgtcgccgcctcaggctccccggccaagaaagccgaccagttcaccacccgtccggcctccaagagcgccgggtggaggaggtggcggctcagcgacctcctcctgttccggagctcgtcggaacacggccgcgtgaccaaggacccgatcttcaagagctcgccggcgagacaccccgactcgccggtgaagaaggcgagcgcacggcccacgacgacgccgggcaaggccaatggcaaagccgacaccgcgagcaagccgaggaagcacgccggcgacaagaacgccgcggcggcggcggagggcatcctcgggtccgtcaggctgagcccgctgcagcggctggcgagagggctcagaggaagctcgtggtaccacggccatggcggcatggcgaagcttgggaccaaagggtgctatggtacgaggcggtacgaggcacaagcaccgtctgatgcgcggcgtcgggtagtcgtggtggcggagaacgatgctgactccgcgatggcgacggcggacactacgggctttcatgcttcctcctcctacaggacctcgagcgccgctaggatgtcgagcccgaccccgcccgcatcacggtggcgccacccgccgctgcgcggcgacgacgccgcgtga

SEQ ID NO: 65132 - DNA, 152 bp, Oryza sativa
  unsure (1)..(152): unsure at all n locations
  Clone ID: PAT_MRT4530_6620C.1
atgcgnctnncnnatnannnggnccccatccccgtggtgatcgaagcttatgggagaggtcaccgcggaagacggggagtggagcaccatgcctgccccaccatccccgatggtgatgagttttgcaccattagattccccgtgaatggcag

SEQ ID NO: 65133 - DNA, 388 bp, Oryza sativa
  Clone ID: PAT_MRT4530_66210C.1
aaggccaggaaggtggatgccgatttcccggccacgcccaaggccgagcacgtcgttgacatggagaaggaggtgtgggcgagcttctacggcggcggcttctggaggagcccctcacaacgagaggacaggaggtgatcgccgccggcgacggcgccgccgccgccgccctcttcttcttctccttcaccacggttgttggtttcttggcttttctcctcccttttcttgggaaaagagaagacagataactcgatcttgtgattaatttagccgcaattgaccaattttttttggcaattggctgtgttcttctctctttccaaaaattttgtcgattgggaggaaagaaaagaaattgatagggaaaaaacaaaattgtggagtc

SEQ ID NO: 65134 - DNA, 322 bp, Oryza sativa
  Clone ID: PAT_MRT4530_66211C.1
tacgacgggaggtctggtagcagccaagataatccaaaacgtcttgaatctggtgaagaagttctgcaagataggcggtccaggcgaataaatgatgcaagaaggcatcatgatggagaagaccgcaattctcgtcggaaggatgagtaccttcgaggacatcaaaccacgatgtggaaagatcacatttggcctccacggagtagggatgatacctaccaccccttagtgccaaccacgagaccacgggacatgcgtggcagaattatgatagggtaagagatacagaaatttggcagaagaaaaaaaaaaaaaaaaaaaa

SEQ ID NO: 65135 - DNA, 781 bp, Oryza sativa
  unsure (1)..(781): unsure at all n locations
  Clone ID: PAT_MRT4530_66212C.1
gttctctaagcaaaaactgtggggatgttgtttaccagcaaatcattgagcgagacatattaagtgaaatggttaagatagtaaagaaaaagccagatttaaatgttcgggagaaaatattgagtttgattgacacatggcaagtggcttttggaggtgcatctggcagatatccccagtatcacgctgcttaccaagaactcaggaatgctggtgttgattttccacctcgtgaggagaacacggttccactgtttacacctcctcaaactcaaccattgaggcacgtccgtctatatccacctccaggtcaaagctatgaagatgcagcgatacaagcttctcttcaatctagcgccccttctgcacctgccttgagtctaagtgagattcagagtgctcgaggaattgtggatgtgttggatgagatgttaaatgctttggaccacaggcaccctgagggtgtgagggaggaggtcattgttgaccttgttgggcagtgccgatcttatcaaggtcgagtcatggaccttgttagcaatactggtgatgagagccttctatttcaagctctcggtttaaatgatgaactgcagcgtgttcttcagcgtcatgatgacatcgcaaagggagtgcctcccggttcaggcccagctcctgctgctgctaatgtaaaccgaggaacagcccctcctaggcctactggggtttcattttncccacttcttaatgtgcaccctgaagacgatgagccagaagacgagcgcctctgctctttccc

SEQ ID NO: 65136 - DNA, 2630 bp, Oryza sativa
  unsure (1)..(2630): unsure at all n locations
  Clone ID: PAT_MRT4530_66213C.1
caaagaaaaagtctacggccgcgttcccttctcttcctccttccttcttncctgctgcctgcctagtctagtctaccaccctcctctccaacctttctccttcctcctcatctcctcctccaagccgagccaccgaaattcctccaatcctacagttcgctcgcatctctccctctcctccccgtcccaggcgcggccaggacctccggatcggtgaaaagaggccgccttggtgcttcttggcgccgaatcttggggaggaggtcgctcagattcggatttagggtttttggtggtgagagggggaaaatggcgacggccgtggcgtgcgcggagagggcgacgagcgacatgctgatcgggccggattgggcggtgaacatcgagctctgcgacatcatcaacatggatcccggacaagccaaggatacactcaagctcctaaagaaacgcctgggaaacaagaattcaaaagtgcaaattctgacgctttatgtgctagagactctaagcaaaaactgtggggatgttgtttaccagcaaatcattgagcgagacatattaagtgaaatggttaagatagtaaagaaaaagccagatttaaatgttcgggagaaaatattgagtttgattgacacatggcaagtggcttttggaggtgcatctggcagatatccccagtatcacgctgatgaacaagatatcctgcccttgtgtgcagaatgctggtgttgattttccacctcgtgaggagaacacggttccactgtttacacctcctcaaactcaaccattgaggcaaccacatctatatccacctccaggtcaaagctatgaagatgcagcgatacaagcttctcttcaatctagcgccccttctgcacctgccttgagacagcagaaagcagtgtccaagttgcttctggacgatttgtgtgcctccaaggctccaaccctgaggacttgccgctcagcacaactggagagtacggaaagaagtctaagtgagattcagagtgctcgaggaattgtggatgtgttggatgagatgttaaatgctttggaccacaggcaccctgagggtgtgagggaggaggtcattgttgaccttgttgggcagtgccgatcttatcaaggtcgagtcatggaccttgttagcaatactggtgatgagagccttctatttcaagctctcggtttaaatgatgaactgcagcgtgttcttcagcgtcatgatgacatcgcaaagggagtgcctcccggttcaggcccagctcctgctgctgctaatgtaaaccgaggaacagcccctcctaggcctactggggtttcattttccccacttcttaatgtgcaccatgaagacgatgagccagaagacgagttctctgttctttcccgcaggtctgcaagggatggcacagcagcacagggcaatctaccttctgctccaaaaagtgaaaggccttacccaagcccacttcttcctccgccaccatcatcaaagaggccagttttcacggaggcaagcagtgttgactatcttagtggcgactcctacaagacagaaaaagtatcagatgactttattaatccaactgccccagccaatatacctgcgccgtctcattcaaaaacagaaacgaatccgccgccaagttatgatagccggtcagaaagtgtgtctgatgacttcataaacccaactgcagcacccagcttctctatgccttctcgtcctatgagcgagtcaaatcgtcctgctgtcaataggcaggagagtctacctgatgatgattttataaacccaacagctatccctggtttttcttcgtcttcaaatgctaacaagtatggagactccggtgaagatcttccaaaagctccatgggaagcgcaagctccaggttccttaccgccacctccagcaaggtatggccaaagacagcagtacttcgagcaacagcacggccttcctagtggtaacaacggtgccgggtacaatggactggtgagccaaacagaaggcctttcgcttaatcagaggaataccgagaatgagagaggttcatcagttccgaccgcatcacggcagaccaaacctgaagattctcttttcaaggatcttgtcgatttcgctaagaacaaaccgtcttctccatctaaaccagccaacagccgcaggactcgctgaccaatgggtgctagggaagcactttgaggagttgccaagctatttggctttacaggtttagcggctttagagatgatatataccatcaaataagagtttcagtctggatttcattaccttgggaattactttggctgtgcaaggtgttattgtgcattcgacagttagaattcacagatatcagatacattcagtcatgatcataatgggttgtgtgttgtgtagtcaggatgtttttttttttggaacctttgccacattttttttccttttccattcatgctcctactttcctttgctgtatatattactccatttggcagcaatattcatagttcaggttgcaatttgaaaaaaaaaaaaaaataaaaaaaaattcagcaagaagaaactgtaacatggcctttgaaaagctgtcagttttgcccgtggatcc

SEQ ID NO: 65137 - DNA, 290 bp, Oryza sativa
  Clone ID: PAT_MRT4530_66214C.1
tttgactcgtgggctcttgcgccggcggcgacgtcgaccgcctggagcaatggaaggcatagccagcggtaagaacaagcgcatctacaaggcgaggatgggaaccaagaagacgaccgaaaaggcatatgctaagaaggactggtattatctcaaggtcccataagagttcaatgggcgtaacatccgcaagacccttgaagccataacacatgggacagagaatgattgtgagggcctaaagcatactgcgtcagcggtcatactagcttgtctgcataccgactatg

SEQ ID NO: 65138 - DNA, 204 bp, Oryza sativa
  Clone ID: PAT_MRT4530_66215C.1
atgatgaagcccattaacagcggcgaagtccgccaaccgtataggcaaaaacaccagtcggcagcggcgaaggccagccggtcggcgaagacgtggacgcccatgaacggtggtgcggaggcaccactcggcggcaacggaggcaagccggcggcggaggcaccactcggcggcaacggaggcaagccggcggtgaagtcgtag

SEQ ID NO: 65139 - DNA, 612 bp, Oryza sativa
  unsure (1)..(612): unsure at all n locations
  Clone ID: PAT_MRT4530_66216C.1
ctgcaggaattcggcacgagggtggtgttcgggcctccaccgttgctctccgccgaagagccagccggatccaggagctacaacacgacgacaacctcccgcacccagctctacccacgtcgggctgcatcgatggtccagaagaggggtgtcgccgccgtgagccttgccgccggatccagtgtatccggcgccacctccccccccgacgtccctcctgccatggtccggtagctccggcatgcagtgcgtccgtgctatcttactccagctcctcgaggtcccgcaatgcccagatctaggggagacgagagtgggacgaacgacgatggtaagcggggctgcagagcccttcctctcgcagctttcctgttgtcggacgacgtccacgacgaaggcgaatttgctgggggccgattgatccccaccacaacatctttgctggttcctagcggttcaagagctgctatagccgttgaccttggtggttccgagcagaggatggctgcctggcaatctggaagctgctctccatccgccgcccgcccctacaanccgagatgcaggccttgtgcgatcgagatgcttgatttggatctgctgctttatgcc

SEQ ID NO: 65140 - DNA, 288 bp, Oryza sativa
  Clone ID: PAT_MRT4530_66217C.1
atgggtggaaagaaacccttcaacaggcacgagcagtgcagagcctcggtggggaagaagacaacgattggctcgaggaagagaggacaacgacatcgacgagctggctcccggagggcgggacgtggtcccgtgcgcggcgaagtcggatgctccgattggatcacggccgctggaggcgagggatcaatgggctggaggcctggtgcaatgctggcgaagaaggcgtgccggcttgcggttctgattcaagaggctacagtaggaggtggccaggggcggatctag

SEQ ID NO: 65141 - DNA, 794 bp, Oryza sativa
  Clone ID: PAT_MRT4530_66218C.1
atgtttttcaccggaatgaaaaagttcaaaaagcaccaaaacatgatttttgaacatattggagtgtgttgggtgcattcgtggtaaaaaatcactccgtgattcgcgcggcgaacttttgtcaattaatgccaatactgccatatattggcacacgtgggtgtgatgtttttcaccggaatgaaaaagttcaaaaagcaccaaaacatgatttttggaaatattggagtgtgttgggtgcattcgtggcaaaaaatcacttcgtgattcgcgcggcgaacttttgtcaattaatgtcaatattgccatatattggcacacgtgggtgcgttgtttttcaacggaatgaaaaagtccaaaaagcaccaaaacatgatttttggacatattggtgtgtgttgggtgcgttcgtggcaaaaactcacttcgtgattcgcgcggcgaacttttgtgaagtaatgccaatattgccataggtgggtgcgatgttttagactggaatgaaaaagttgaaaaagcaccaaaacatgatttttggacatattggagtgtgttgggtgcattcgtggcaaaatatcgcttcgtgattcacgcggcgaacttttgtcaattactaccaatattggcataggtgggtgcgatgtttttcaccggaatgaaaaagttcaaaaagcaccaaaacatgatttttggacatattggactgtggttggtgcattcgtggaaaaaaattactacttgattcgcgcggcgaactttggtcaattactgccaatattggcataggagggtgc

SEQ ID NO: 65142 - DNA, 968 bp, Oryza sativa
  Clone ID: PAT_MRT4530_66219C.1
aacgccagctggcgaaagggggatgtgcagcaaggcgattaagttgtggccgcgggttttttttttttttttttcacagtagaaactttattcttacatgtattattaatggatgatgctataaagtataaagattacactctcgaggagatgggttatttcatactaacatgctaatacagcgaactgccatttcactatatatatcggctattggcgaatattgcaatgtagtccttcaaatctcaacctgggtcgtcgtcgtcgtcgtcccaggctgttggatttcctgcatgaatgattggtaggtttcaaccctggacttggattcaggctgttcgaggccatccatgaacccgtgggtcatcgcaaggaaatctttcatgtgcaacctcttccattcctcaaaatcccattcaccataaagatttggatcctctgcatcagcccatacataggtgtcagcaagcattgtctctgaagtatcagttaatgatatctcaactcttgtcctcacgtactccacatcttcaaattcatccagaatctggagctctgcatcagtaacaccggtgatgaccttgccagcaactttcttgctttgaacaggtaggattgcaggataaatcctacccttgatgttgaacctgtggtagttggggaggagcgccggggaggagggcgggacgcgcttgatgatggtgcgcaccacctcgtcctgcatcaggctcccgtacacgaacacgctgtgcgccccgaccccgaccccgactccgtccacggcggcggcggcggcgggtggcggcgccatggcgaggtgggcggcggcggcgataaggactagcggctgccacgtggcgagcgaagggagatggaacgaactctcaactctggctcactcgattcttgtgcgtgtgtgcagactgcgtgcccggacgcgtgggcggacgcgtgggcggacgcgtggg

SEQ ID NO: 65143 - DNA, 333 bp, Oryza sativa
  Clone ID: PAT_MRT4530_6621C.1
atggggcgcccgcctgcaaaactccctcagcgaccagcaacaggggcggtagaaacgcgtggaggcggcgggtcggcgacggcgaggcgcgaggtcgacgacggcaacagcgaggcggcggggtcggcgcggggtggcaacggggcagggcggggcggggcggggttgggctggaataccctcaccccggccccgcaaaggaagtcgggtgaaaaacatcacccgtccccacccgacccgacgggatctctccggatcaccaacgggttaattctaatccgcgctgccatcgccggaattttgcgggccctctccccgctcaaccgcggatga

SEQ ID NO: 65144 - DNA, 485 bp, Oryza sativa
  Clone ID: PAT_MRT4530_66220C.1
atgtttttgaccggaatgaaaaagttcaaaaaacgtgaaaatatgatttttggacatattggattgtattgggtgcgttcgtggcgaaaactcacttcgtgattcgtgcggcgaacttttatcaattaatgccaatattggcacacgagggtgcgatgttttcttcaggaatcaaaaagttcaaaaaagtccaaaacatgatttttggacatattggagtgtattgggtgcgttcgtggcaaaaactcacttcgtgattcgtgcggcgaacttttatcaattaatgccaatattggcacacgagggtgcgatgttttcttcaggaatcaaaaagttcaaaaagcaccaaaacatgatttttggacatattggactgaatcgggtgtgtacgtggcaaaaactcattacgtgattcgcgtgggtaacttttgtcaaataatgccaatattggcatatattgtcacacatgggtgcgatgtgaacga

SEQ ID NO: 65145 - DNA, 1368 bp, Oryza sativa
  Clone ID: PAT_MRT4530_66221C.1
gcggccgcgcgctgtgtcagtagtgcgtgttggggtcggagagctagcgcggccggcacagcatgggagctgggattcggattctggtggtgatgttggcggtcgccgccgccgggagcggcgtcgtggcgcagctcaggcgggactactacgccagcgtgtgccccgacgtcgagaccatcgtgcgcgacgcggtgaccaagaaagtgcaggagacgtccgtcgccgtcggcgccaccgtccgcctcttcttccacgactgcttcgtcgagggatgcgacgcgtcggtgatcgtggtgtcgtcggggaacaacacggcggagaaggaccacccgaacaacctctccctcgccggcgacggcttcgacacggtcatcaaggccagggcggccgtcgacgccgtgccgcagtgcaccaaccaggtctcctgcgcggacatcctggtcatggccacccgagacgtcattgcgctggccggcgggccgtcgtacgccgtggagctcgggaggctggacgggctgagctcgacggcgagcagcgtcgacgggaagctgccgccgccgtcgttcaacctggaccagctgacatcgctgttcgccgcgaacaacctgtcccagaccgacatgatcgctttatctgcggcgcacacggtggggttcgcgcactgcggcacgttcgcgagccggatccagccgtcggcggtggacccgacgatggacgccgggtacgcgtcgcagctgcaggcggcgtgcccggccggcgtggacccgaacatcgcgctggagctggacccggtgacgccgcgcgccttcgacaaccagtacttcgtcaacctccagaaggggatgggcctcttcacctccgaccaggtgctctactccgacgaccgctcgcgccccaccgtcgacgcctgggcggccaacagctccgacttcgagctcgccttcgtcgccgccatgaccaacctcggccgcgtcggcgtcaagaccgacccgtcgcagggcaacatccgccgcgactgcgcgatgctcatctgacgccgccgcgggcggcatggtcgtcggcacgacgacggcggtcagcggcggccactgcggttctctcaattgttcataaatagttttagctgcagcctgcagcgctgaagttctgaaaaatatacaactagctttttagagcaaaagttttaatcagttaattatattggaaaccaggaattaagattattttgtgcatctgatagtggtgaatcaattaaattacctagctaggccaaatgtattgtgttttttaactatgggagcaagataaattatctgaacatgttgtaaaaaaaaaaaaaaaaaaaaaaaaaaaaaaaaaaaaaaa

SEQ ID NO: 65146 - DNA, 477 bp, Oryza sativa
  Clone ID: PAT_MRT4530_66222C.1
atgttttagaccggaatgaaaaagtttaaaaagcaccaaaacaagatttttggacatattggagtgtattgggtgcgttcatggcaaaaaatcacttcgtgattcgcacggcgaaattttgtcaattactgccaatattggcacaggtgggtgcgatgtttttcaccgaaattaaaaagttcaaaaggcactaaaacatgatttttggacatattggagtgtgttgggtgcattcgtggcaaaaaatcacatcgtgattcgcgcggcgaacttttatcatttactgccaattggcacacgtgggtgcgatgttttagaccagaatgaaaaagttcaaaatgcaccaaaacatgatttttggacatattggagtgtattgggtgcgttcgtggcaaaaaataacttcgtgattcgcgcagcgaacttttgtcaactaatgctaatattggcatatattggcacaggtttgtgcgatgt

SEQ ID NO: 65147 - DNA, 469 bp, Oryza sativa
  Clone ID: PAT_MRT4530_66223C.1
tccattttttttgacatttgtgaactattttttcaaatcaagtcttataatgtgtaatacagggagccacacataatgcatcaattttcagatgaaaaagccgagtgcacacagatacgccattgggcccaaagcggtttttcttttcgtttggtttggatccgttcttggaccggttgtcatagtactaggtttgcaatgggtaggctcctattattctccgtctcaaccacttggcagttagtcagtttaagacttagcaacagtctcaagatcgaaattctcctgccccccataaattaaccccacagctcgtgtagtcgtgtgctttaattactttatttgcatctactgatcatgatctttctctttgtgctaactatacatgttagtagctggtattgtatgatgttaatggcctgaatgagaatgaatgaactgttaaccggaaaaaaaaaaaaaaaaaaaa

SEQ ID NO: 65148 - DNA, 487 bp, Oryza sativa
  Clone ID: PAT_MRT4530_66224C.1
atgttttctataggcatcaaaaagttcaagaaacaccaaaacatgatttttggacatattggagtgtatcgggtggatacatggcaaaaactcacttcgtgattcgcgcggcgaacttttgtcaattaatgccaatattggcacacgagggtgcgatgtttttgaccggaatcaaaaagttcaaaaaacgccaaaacatgatttttggacatattggagtgtattgggtgcatacatggcaaaaactcacttcgtgattcgcgcggcgaacttttatcaattaatgccaatgttggcacacgagggtgcgatgttttcgaccggaatcaaaaagttcaaaaaacgccaaaacatgatttttggacatattggagtgtatcgggtgtgtttgtggcgaaaacacatttcgtgattcgcgcggcgaacttttgtcatataatgtcaatattggtatattttggcccacacgggtgcgatgtttttgacc

SEQ ID NO: 65149 - DNA, 828 bp, Oryza sativa
  unsure (1)..(828): unsure at all n locations
  Clone ID: PAT_MRT4530_66225C.1
gttctttccatgcatggtcttcctcttccagctccggaaacaagtaggagtatctatatatctgaaggtgcaatgcaaatgtctgaaaagaaggcgcttaccttggcacccgacatccaggagtggctggccttcgcgtccgtgccccccgcccccccggtgccccaggtggtttatgcttgctgccacccgacggcccatcagcgtgtttcctccccggagaaggcgaacggccttccccggcaaggtcccatgaagtcccggttccgttggcctctgtgcggttgccgaagggnaggggagcattcaggcagctaacgttcgggtttagcggcagaggccagggtgtcgaccgcccgccgacgctgctgcaggcgttcgacacgttgctctatcgatgatcgacggaggcaagcttggacgacgaacaagaaaggccgtgcgtgcatggccggacaatggttgggtccgtctcgtgtagtgtaactagtgaagcgtgcaacaccgtgcgtgtgagttgtgatgcgcccgttcactgacgtccaaattaggggccttgacgagatgactggggaatgtggaagtctttggcctgcgaggttgtcctggtctccaaggtctccacgaggcgccaacaggggctggttttaccatgtgcggatattgaagcatgttgcatgttttgttcaaatttgcttttctgtaagttattctagcctggctttgaactcatcgagacttatttactctgagatccagttgagttacatcgtcgaagagcttataagttataagcaatgctcatacgtttaaaaaaaaaaaaaaaaa

SEQ ID NO: 65150 - DNA, 489 bp, Oryza sativa
  Clone ID: PAT_MRT4530_66226C.1
atgtttttgaccggaatgaaaatgttcaaatctcaccaaaacatgatttttggacatattggagtatattgggtgcgttcgtagcaaaaactcacttcgtgattcgcgcgacgaacttttgtcaatgaatgccaatattggcccacacgggtgcgacgtttttgaccggaatggaaatgttcaaaaagcaccaaaacatgatttttggatatattggagtgcattgggtgcgttcgtggcaaaaactcacttggtgattcgcgcggcgaccttttgtcaattaatgctaattttggcatattttggcccacacgggtgcgatgtttttgaccggaatgaaaatgttcaaaaagcaccaaaacatgatttttggacatattggagtgtattcggtgcgttcgtggcaaaaactcactacgtgattcacggcgaacatttctcaactaatgccaatattggcataaattggctcagacgggtgcaatgttt

SEQ ID NO: 65151 - DNA, 528 bp, Oryza sativa
  Clone ID: PAT_MRT4530_66227C.1
atgacggttctgtccaccatccattgtgatcccaaggatagcttcccgtcattgagtcgttatggttttctgaggacgtccacattcccgcctctcaggaagtggctccatcaacataaaaatcatcatgacgcgacggcaacgcggtgcggcagcggcaatgggacggcggcgcacggcggcaatgtgacggcgcgcggcgcgcgggcggagatgacgacggcgcggcgcggctcggggcgtaaggcggcgcggcacgtggcagcggcgcggggcgcgaagcagcgggcgcgcggcgcgaggcgatgggacggcgcgcggcgcggcagcggcacggctcgaggcggcgatggaacgcgcacgcggcgatgggatggcgacagcgacggcgcggcagtggcggcgatggcgacggtggcgcggcggcaggcgatgatggcgacggcgcgcggcggctcggggcgcgaggcggcgacgcgtggtgacggtggcgacagagagagggggaaagaggaggagctgggttag

SEQ ID NO: 65152 - DNA, 321 bp, Oryza sativa
  Clone ID: PAT_MRT4530_66228C.1
cctgttcgtaactaatcatgcgatcacactggaggggcctaactttactcacggcggcgcttggcctctagagcttccatccggacgacaactaccacgccaccgtcagctgccacgacatggaggacgtcggggtcaacaccagcgcggtcgactttctgaacccgtcgtgcaagaggctcgaccacgttctcctgagcagcatcaagaaaagcgtatgccacaacaacgacaacaaccatgacgtcgtgatggtgcatgtgaggaccaggatcgcgagggcgttcccggcaacgatatctgtgatgggcaagggcaggc

SEQ ID NO: 65153 - DNA, 807 bp, Oryza sativa
  Clone ID: PAT_MRT4530_66229C.1
atgtttttcaccggaatgaaaaagttctaaaagcaccaaaacatgatttttggacgtattggagtgtgttgggtgcgttcgtggcaaaaaatcacttcgtgattcgcgcggcgaacttttttgaattaatgccaatattgccataggtgggtgcgatgttttagaccggaatgaaaaagttcaaaaagcaccaaaacatgatttttggacatattggagtgtgttgggtgcattcgtggcaaaatatcacttcgtgattcgcgcggcaagcttttgtcaattactgccaatattggcataggtgggtgcgatgtttttcaccggaatgaaaaagttcaacaagcaccaaaacatgatttttggacatattggagtgtgttgggtgcattcgtggcaaaaagtcacttcgtgattcgcgcggggaacttttgtcaattaatgccaatattgccatatattggcacacgtgttggcgatgcttttcaccggaatgaaaaagtttgaaaagcaccaaaacatgatttttggacatattggagtgtggttggtgcattcgtggtaaaaaatcacttcgtgattcgcgcggcgaactttttgtaattattgccaatattgccaataggtgggtgcgatgttttagactggaatgaaaaagttcaaaaaacaccaaaacatgatttttggacatattggagtgtgtataaaaagaggggaagaacgaccatagggtcgtgctccaaccctaggacgcgcccctaatgggcccaacatggatacacagcccattgggccaaaagagatgacgca

SEQ ID NO: 65154 - DNA, 476 bp, Oryza sativa
  Clone ID: PAT_MRT4530_6622C.1
aaagagcttatacttataccatcttattgagtcacagagttaccaacgaagtacaataacctgtgtttagctgggagaaactacctggcgtgagtaaagtatacactccgaacgaatcatatactttaattcagcgctttatcataacacggcgagcattataagattgaaactggacgggggactcctgcggctgtatggggaagttgtttttgtctttgctttacacatatacgaggtggagctcgcgcgctggcccgagctggcggctctggtgcgacggtgatctcatggtgttcttatccttcagggagaagctgaggtggatgacggacgagctcgccgtgtacagcacctgctggcgggtggccgaggccgtgctgttcagctgccacatgcacgcctcgacgtggacggcctggaacgtggccactaacggcgtgcgtgatgagtccgttgtcatcctgtcgtcctgc

SEQ ID NO: 65155 - DNA, 763 bp, Oryza sativa
  Clone ID: PAT_MRT4530_66230C.1
atgtttttgaccggaatgaaaaagttcagaaagcgacaaaacatgatttttggacatattggagttattgggtgcgttcgtggcaaaaactcacttcgtgattcgcgcggcgaacttttgtttattaatgcgaatattggcacacgagggtgcgatgtttttgaccataatcaaaaagtttaaaaaacgccaaaacatgatttttggacctattggagtgtattgggtgtgttcgtggcaaaaactcactacgtgattcgtgcggtgaacttttatcaattaatgccaatattggcacatgagggtgcgatgtttttgaccggaatcaaaaagttcaaaaaacgccaaaacttgatttttcgacatattggagtgtattgggtgcgttcgtggcaaaaactcacatcgtgattcacacggcgaacttttgtcaattaatgccaatgttggcacgcgagggtgtgatgtttttgaccggaatcaaaaagttcaaaaaacgccaaaacatgatttctggacatattggagtattttgggtgcgttcatagcgaaaactcacatcgtgattcgcgcggcgaacttttgtcaattaatgccaatgttggcacgcgagggtgtgatgtttttgaccggaatcaaaaagttcaaaaaacgccaaaacatgatttttggatatattggagtgtatttggtgcgttcgtggcaaaaatcacttcgtgattcgagtgatgaaatttttgaaaatattagcacacgaaggagc

SEQ ID NO: 65156 - DNA, 1175 bp, Oryza sativa
  Clone ID: PAT_MRT4530_66231C.1
aaatttttgaccggattgaataagttcaaaaagcatccaaacatgaattttggacatattggagtgcattggatgcgttcgtggcaaaaactcacttcgtgattcgcgcgggtacttttgtccattaataccgatattggcatattttgagaccccatgggtgcgatgtttttgaccggattgaataagttaaaaaagcatccaaacatggattttggacatattagagtgtattgggtgcgttcgtggcaaaaactcacttcgtgattcgcgcgggtacttttgtcaattaataccaatattggcatatgttgagaccccacgggtgcggtgtttttgaccgcattgaataagttcaaaaagcatccaaacatgaattttggacatattggagtgtattgggtagcgttcgtggcaaaaactcacttcgtgaatcgcgcgggtactcttgtcaattaataccaatattggcatatgttgagaccccacgggtgcgatatttttgaccggaatgaaaaagttcaaaaagcaccaaaacatgaattttggacatattggagtgtattgggtgcgttcgtggcaaaaactcacttcgtgattcgcgcgggtacttttgtcaattaataccaatattggcatatgttgagaccccacgggtgcgatgtttttgaccggaatgaaaaagttcaaaaagcaccaaaacaagatttctggacatattggagtgtattgggtgcgttcgtggcaaaaactcacttcgtgattcgcgcgggtacttttgtcaattaataccaatattggcatatgttgagaccccacgggtgcggtgtttttgaccggattgtataagttcaaaaagcatccaaacatgaattttggacatattggagtgtattgggtgcgttcgtggcaaaaactcacttcgtgattcgcgcgggtacttttgtcaattaataccaatattggcatatattgagagcccacgggtgcgatatttttgaccggattgaataagttcaaaaagcaacaaaacaagatttctggacatattggagtgtattgggtgcgttcgtggcaaaaactcacttcgtgatttgcgcgacgaacttttgtcaattaatgccaatatttgtatgcgttcgtggcaaaaactcacttcgtgattcgcgcgggta

SEQ ID NO: 65157 - DNA, 116 bp, Oryza sativa
  Clone ID: PAT_MRT4530_66232C.1
atgacccccaaagatttattatgatggattctaatgtcaaacttctcccttttgggatacgaaagagacaaaattctaatagtgaaatgatgaccgataaagttttcaaatctttt

SEQ ID NO: 65158 - DNA, 233 bp, Oryza sativa
  Clone ID: PAT_MRT4530_66233C.1
aggaacacgacgaatccaataaatggttaaccccatttcttaaagatgaaaccagcgacagcggatcccatatttaaaaaaaaacaggttggtcctatattaagttaaacaccctggtatcatgcttgatttagggagacgactgaaaaaagggttatctcttcggagacaatatggtgcaaccaacgtttggggcacgaacatctatttcactaggagccggacgcgtgggt

SEQ ID NO: 65159 - DNA, 557 bp, Oryza sativa
  unsure (1)..(557): unsure at all n locations
  Clone ID: PAT_MRT4530_66234C.1
agaaagggagaaagattcctcactaaatatcaagtttttgcactagtggtgatcaccaaaagtgctcttgctacacaccaaaattaaccaaagtactgtgttgagaaaatatttacatgcttttcattccatttcacatctagctaagctaccactaattactgtattaataaagaacttaatcagccttgctaatctgggtatatctctctacagcaaaggccaacaaaaataaaaccttaaaaattaaaattaaaacaacatcatggtgcagacaaaagaggagaaataatcaagcaatccatatgatgcttggttgatcatgtaattaaagagccttaactaatggcatctttaattcaatttctctctctctaattagcacttgatgcttaccttaattacccaaactaatcaagtgcgaggttggctaattaatcatccgaagttgtagccattagcgttgttagcgaggtgggtgcggnngnctngccgncggcaggatctgcgccgcctggatgctctgcagcagcagccttttcttcgccggcgacgac

SEQ ID NO: 65160 - DNA, 843 bp, Oryza sativa
  Clone ID: PAT_MRT4530_66235C.1
atgtttttgaccggattgaaaaagttcaaaaagcaccaaaacatgatttttggacatattggagtgtactgggttcgttcgtggcaaaaacacacttcgtgattcgtgcggcgaacttttgtcaattagtgccaatattggcgtatattgagccccccacgggtgcgatgttttttgaccggaataaaaaatttcaaaaagcaccaaaacatgatttttggacttattggagtgtattgggtgcgttcgtggcaaaaactcacttcgtgattcgcgcgacgaacttttgtcaataagtgccaatatttagcatatataggcccccacgggtgcgatgtttttgaccggattgaaaaagttcaaaaataaccaaaacatgatttttggacatattgcagtgtattttgtgtgttcgcggtaaaaacttacttcgtgattcgcacgaagaacttttgtcaatttatgccaatattggcatatattgagcccccactgatgcgatgttgttgaccggaataaaaaagttcaaaaagcacccaaacatgatttttggacatattagagtgtattgggtgcattcgtggcaaaaactcacttcgtgattcgcacgaagaacttttatcaatttatgcaaatattggcatatattgagcccccacgggtgcgatgttttttgaccggaatgaaaaagttcaaaaagcacccgaacatgatttttggacatattggagtgtattgggtgcgttcgtggtaaaaactcacttcgtgattcgcgcggcgaacttttgtcaattaatgccaatattggcatatgttgagcctccagggttgcgatgttttctg

SEQ ID NO: 65161 - DNA, 984 bp, Oryza sativa
  Clone ID: PAT_MRT4530_66236C.1
atggctatcattggtcggaggcagcagcagggtgtcgcggcggcggcggcgacgttggtggcgttgatggcggtggtggtggcggcggcggcggaagcgcagccgtcgccgggggtgtacccgagcaggatgttccgagcgcgggagttcgggcgcgacttccggagcctgtggggggcggagcaccagcagcaggaggcggcggcgccggagacgggggtgacggtgtggctggaccggcggtcggggagcgggttcaagtcgcggcgggcttaccggagcgggtacttcggggcgtgggtgcggctgcagcgcgggtacacggcgggggtgatcaccgccttctacctgtccaacggcgaggcgcacccggggtggcacgacgaggtggacatggagttcctcggcaccacccccgggaagccctacacgctgcagaccaacgtcttctccctcggctccggcgacccgccccggtccctcggccgcgagatcaagttccacctctggttcgaccccaccgccgacttccaccactacgccatcctctggacatccgaccacatcatcttcttggtggacgacgtgccgatccggcggtacgggcggcggagcgcggggggcgcggcggggttcccggcgaggccgatgtgggtatacggctccatctgggacgcgtcgtcgtgggcgacggaggacggcaggtacagggcggactacagttaccagccgttcgtcgcgcgcttctcggccttcctcctccggggatgctcgccgcacgcgccccgcacctgcgccgcccccgtcgccggcgacctcaccgccgcccagctcgccgccatgcgctgggcgcagcgcttccacatggtctacaactactgctacgaccccaagcgggatcattccctcaccccggaatgccgcacccacctgcacccatcgtcctcatcctccaactcctcctcgtcgtcgtaccacggctag

SEQ ID NO: 65162 - DNA, 809 bp, Oryza sativa
  Clone ID: PAT_MRT4530_66237C.1
atgtttttgaccggaatgaaaaagctcaaaaatcaccaaaacatgatttttggacatattggagtgtattgggtgcgttcgtggcaaaaactcagttcgtgattcgcgcggcgaacttttgtcaattaatgccaatattggcccacacgggtgcgaggtttttgactggacctaaaaagttcaaaaagcaccaaaacatgatttttggacatattggagtgtattgggtgcgttcgtgacaaaaactcacttcatgattcgctcggcgaccttttgtcaattaatgctaattttggcatattttggcccacacgggtgcgatgtttttgaccggaatgaaaaagttcaaaaagcaccaaaacatgatttttggacatattggagtgtactggatgtgttcgtggcaaaaactcacttcgtcatacacgaggcgaacttttgtcaattaatgccaatattggcccacacgggtgcgaggtttttgacccgaatggaaaagttcaaaaagcaccaaaacattatttttggacatattgtagtgtattgggtgcgttcgtcgcaaaaactcacttcgtgattcgcgcggcgaacttttgtcaatcaatgctaatattggcccacacgggtgcgatgtttttgaccggaatgaaaaagttcaaaatgcaccaaaacatgattgttggacatattggagtgtattgggtgcgttcgtagaaaaaactcacttcgtgattcccgcggcgaacatttctcaactaatgccaatattggcatatattggctcacatgggtgcgatgtttttggccgg

SEQ ID NO: 65163 - DNA, 160 bp, Oryza sativa
  Clone ID: PAT_MRT4530_66238C.1
gtctatatatgagtgctcccgggtacagtggtgtgtcagctggactggtacgaccagatgcacacgggaaccctgatcctgcttggtgtcttcacagccgcgatcagtagggcggatgggatgacatgcgcctgaaccagagtaaagggaattgtggaga

SEQ ID NO: 65164 - DNA, 1778 bp, Oryza sativa
  Clone ID: PAT_MRT4530_66239C.1
ctatatctgcgagcggccgaccttgtgtttttgggctgacaccaaatttattgacaccctggcctactcttcaaggcttttttttttatttttttttatttttttttttttttttttttttttttttttcaatcataatatgttatattttatatgacccagattgacagtagtatggagagacgctctaagacttatcccctctaccaaaaaaaaatggtttttttcttgacgagattgaatggaacaaatcttaactggtacaagcaaacacttcattgtgcagagaacccctctagacttcctcattggacaaaccagcatagattgttccatccatgagcctcaaagctggtagcacaagaagagtggtgattcttttgtacacctatttggaaagaatttggaaggaagatggtgacaaaagttggatttttctctggattgtacaaggactggaacagcgaaggatggacacttggtactttatgcacttatgctgcagcaagggcatggtaggtaagaagggagaagcagatggaagaattggaggatgaatggtggaggtctgggcaaggctctggaaagaccaactcagagtatccggagatgttggagcaagaccaagagctggattgtgtcgaatcagctagggagaaactgatgttggagaggcagatattggtgaatggatcaccgtttattcccgacaaaactccagcaactgatatgtttgttccaaccatgttcttcagtgtgattcggttgatcatcgggagcgcagaaggatcaaaatggttatctgggtgtgtcgaccaatcgccagtgaatttaatggcgacattaacatcttccatttggacatctgatattacaacatctcttatataacctccacggccgggtgcagtcttgaagaggatgcctctagaggaaccatggatattaaggtgatcaacatgaatatccgaaataccaccagacatctcactcccaaatgcaagagcagctccaagtgaggcttggagatctactctgcttatgtgaatgtctgatgccggccttccaatggtaatgccatagttatcccacccactttttaacgagatagcatcatgagcgacgctaatactgctatcttcaatgcacatattagagcatgaatcccatgcaggggaattcaataatgtcaagtttgaaatcacaatatcttccgaatccacaaactccacaagatgagggcggctatagttcaacttattcgagcgaaaccagttccaccatgtcaaaccctggccatctatgattccattgttccctgtaattacaacatcagtcacattgtgtccatttattaagctgcgatgcctcgcacctggaagatcgattccttggccatatgatggcaacggttctacaattggccattctgatacctccttggcgccgatgatgacggcgtccttctcgaggaagatggtgaggtggctggtgaggttgaagctgccggtgagccacctcccccggggcacgtacagctgcgcgccgcccttgtcggcgaacgaccggagtagaagatggcgttctggaacggcagcgtgttcaccgtctccccgtcgcccaccgccccgaactccgagatcgtcacgctgtgcggccgcggccgaggccgccgcgcacacctcgccgccgccgcctcctcctccccactcgccaccccaaccgccaccgccaccgccgccattgccacaaccagcacttactactagccccgccat

SEQ ID NO: 65165 - DNA, 444 bp, Oryza sativa
  Clone ID: PAT_MRT4530_6623C.1
gcatagacctataccgacacctctcctctactcctctgggctcctccgccgatggggaggatgccttggattccatgcgcgcatccggtggctctgcggaagcccagtttcgtgtactgcgactgaacttggccatggccagttcggagcaggatcgacatagcactctagatgacacgaaggtatgtcaccatcctgcaaagcacagagaaaagcagcgctgtatgctacagcatggatgctcaccgatgcgacagtcagctggtatcatacatggccgacatggtattagtggccactcatggctctagttttgctacacattgactggattgcatttcgcaagcacaaccttggatgacattacacaatggaaatggccaggaacatatttcacacatcctattttaccatctgccagaactcgctaaatataagcttttt

SEQ ID NO: 65166 - DNA, 479 bp, Oryza sativa
  Clone ID: PAT_MRT4530_66240C.1
attccgggtcgacccattttccgcccagcgtccgcggccgcgtggggggggggcggacacgacgtggctggtcgacgcggtgggccgcggcgcggtgatcctgacggggtgcataggcgagagaagctggtgctggaacgcggcggggcgaggggcacagcggttcgtcgtttggtggccaggagcaccaacccggctatgacgaagacgcttggagtgcgcgccaaggtgaccgggtcggcaagcgccttggtccttagcccaggctgctgagggggcagcgggctcaccaaccccctcatcggggcgatcctctacctactgtctggcgatctgggggggggctccttccggggcgcgctgcccgctctcggggggcacgtgtacgcggtccgcctcttagctctcgtgcagagcgtggagacctccggcgccggcccgccggcccgtgccgtccttgagactcctgtgctgggcgt

SEQ ID NO: 65167 - DNA, 408 bp, Oryza sativa
  Clone ID: PAT_MRT4530_66241C.1
gctaaattatttctactcggtggcttacataggtccaaattatcacctttaaaaatggctacccatttaattcaaatgccaatatttaaccagattgatggcatctacacaaaaactattgaaacttcagtccagttatctgccatggtgaaacttgattgctgtacactttcaactgattgttttgtggaaggagtatgctatgtgcctggctgttttcctttcgaaatactttcattgaattaatcataaaatgaattcagctcttcaaaaatataaaatttctaactatatatgtatgatctatgggactacgcaaaccttgtaaatactaaatagttgtgcaagacaattgtcagagcatgggaaatgtggtcctgttcactatgttttagcaaacctgtcatt

SEQ ID NO: 65168 - DNA, 233 bp, Oryza sativa
  unsure (1)..(233): unsure at all n locations
  Clone ID: PAT_MRT4530_66242C.1
ccctagccttncggatcgatcggcggcggcggccatggagagctgggcaagctgggtgggcgccanntcacctccgncttcttcgcctccctcgagcgntgctcctgcatcaacctctccaccnacgacgacgacgacctcgccgacgcccacgaatncaaggaccgaccnntcagtgctntccgacgncaacgaccacgcccacaccgacgancatcccgatcccaacgccg

SEQ ID NO: 65169 - DNA, 480 bp, Oryza sativa
  Clone ID: PAT_MRT4530_66243C.1
actactactactactatttcctcctctctctgtgtgtttgtgtcacactcacgctgagcttgcgagcttgcttgctcaaaagaggtaaagaaaccgaccgcgagaggtctcgtcggccggcgtgcggcggcggcggcggcggcgatggtgatatggcgatggatgacgacgaggacatgtgggcgaacacgagcagccccgagcgcgtcgccgccgcggccgatggggttcatctccaccgcgctgagcctcaactcgacgcacctccaaggcctcctcccgtcgtccttcgtcgacgccgccgcctcgccgtgccacgccagcggcaacaacaacggcggcggcgacggccgcaatgccgcgccgatgtcgtccatcttcttcgcctccgcgtcgtaccagcagcagcagcaccacctccctgcccccgcgccgctctgacggcgccatcctccccgcgcgccggttcgggctcgacat

SEQ ID NO: 65170 - DNA, 605 bp, Oryza sativa
  unsure (1)..(605): unsure at all n locations
  Clone ID: PAT_MRT4530_66244C.1
cgggctgcaggacagtacgtcggtagccgaagcagacggcggcgattccggcgggcggcgggggcggccaccggaggcgacgaggcggcgccggcagcactgaccagcgcggccgggtcaccggggccatcgccgccgcgagctccttgctatcatatcaagctgagcagctgagggagacggcgagagatggacgcaactcgctgatcttgggtttttctacggnctgcttcgcctcgccggcgacgctcgtgaggagtntggtttggttggtggtggcagacgaaattggggccgtcctaggcttgaatatttccttatggcctactggaatgctatatttctttttcttagcaagaagtccaagtctcgtgtggcatggattgttggaatccacgtgagaagaattatccatccggcgttggacgatcgccgccagggttgttgggaatgaacagtacaatctcaatcaaatagcacaatcttatcaagaatatcaaaggcacaatctgatcaagtgcatatcttctcaagcaggactagggggctcaaaactgccagaactctgaactcacaattggtcctgaaggattcagatttcatgg

SEQ ID NO: 65171 - DNA, 240 bp, Oryza sativa
  Clone ID: PAT_MRT4530_66245C.1
atggtgcgaattccaaggaacggagagaaatccccgctggaaatttctagtcgcgaatggtcgtacgagttcattgttgagcagaagtcgggggctactgtcagggttacgggtcaggcataccctctacccttcggtgaaccccccggggaggccatggatcatcgaatctcagagccaacacaacccacacagcctacgaagccggagcctgcgaggagccaagtcgacgagagctag

SEQ ID NO: 65172 - DNA, 213 bp, Oryza sativa
  Clone ID: PAT_MRT4530_66246C.1
atggcgctcagaactgcgttcaccgtggcagtgcccgtcctggcgaccggcgtctccatgaacaaattccgttcagttttcgcgacatgttcttgcgaagttttccttgacaacgtggaggctgtactgctgtatgccttcctgctgttcagatttttggcccagcttgatgaagcaggctgtcatcctattctaaagagattatcaggctaa

SEQ ID NO: 65173 - DNA, 347 bp, Oryza sativa
  Clone ID: PAT_MRT4530_66247C.1
ctctataagagatatgacagcggcatgcgcgcgcgcgcaagctcgggtcctctatttagcgcgcgctcttttttttttttttttttttttgatttcattttataattttttttttcgcgccacataatgttttatgagtcgttcaaacgctttcaattgatatagggaggaccccattttgttgctcaagcacgtgagttgagcaaaaccaggaactttggggcctttgcagggaacaataacgccttccttctggtgtccccccttacagtataccatgacactccacatctttgattgcggaatattagtataaggtgacggtgggattggaagccgtgacaccg

SEQ ID NO: 65174 - DNA, 232 bp, Oryza sativa
  Clone ID: PAT_MRT4530_66248C.1
ttctttattctacgagcccaagatgtaattagcgtgggtcctgggacgcatccgtataacatcagctcggttggcagagcattatcaggaccagggccgatgttgagatgtatggcaatcctgattcagtccgttaaggataaggagcaggagggaatgatggcgaacacaaggacgctgccaatacgcgtcgtattgtggtacaccaacgggcactgtatcggctagtaca

SEQ ID NO: 65175 - DNA, 234 bp, Oryza sativa
  Clone ID: PAT_MRT4530_66249C.1
atgctggctggatggtggaaagcgtctcaaactctcaaggaacaagtagcagagcgcttcagaagctcggacggctggagagctggagagagatcatgcggaagttctggcaagcagcagaagagcgggccgttttgcactccacgccaatttgggtcggaacggcgtccccaagtacctgttgggcccaaacagaactcccacgtgagtggtccatattttactgggccttaa

SEQ ID NO: 65176 - DNA, 200 bp, Oryza sativa
  unsure (1)..(200): unsure at all n locations
  Clone ID: PAT_MRT4530_6624C.1
ccttcgcgccccgncgcccggctattaatttccccccggccttcgcccgnttgnccgncccgnccgncggggaaagcgaagggcgaanccgaaggggaaccgncgntctaagantcccggcanccgggccgaaaccgaacccaaggcttggccttttccccggtcgncccggcancgncantcantcccgggcttcttgg

SEQ ID NO: 65177 - DNA, 177 bp, Oryza sativa
  Clone ID: PAT_MRT4530_66250C.1
atggctttgggtggcaggtcgaagctcgacgaggccgagttgcaactcgcaagcttaacgaggtcggtggcagctcaggagccggtgctcaactatcacgtggctaggtggcttgaccagaccagggacgtacttgaccaacggatcgagtggcgcacggcgcaggccctacgctag

SEQ ID NO: 65178 - DNA, 450 bp, Oryza sativa
  Clone ID: PAT_MRT4530_66251C.1
ctacagggactacacaaacacctgagccacagggcttgtgttctttttacaaagcccatgtttagctatgtgggtagattgtgttgaggatatatagtttgagaagactataagcagtttctacggtttttgtctacacgtgtcacctatggaccaatcagctagcaggtaactattgtgaggacatccactacttaaccatgacgacgattaacctcaaccaagcgtcggttcctcgcgtaaaacttggtggtcacggactgcgagccagtgacggcgcgagcgtttgaccaatttccacaccatatccctgtccacctcgttcgcagcacctctcatcctgcttcgcccgagacttggattgccctaaagaccgatgttagcaagataggggcaaatgccccgaggccagaagagctacgatgaaaaccacctcgattttgatcagga

SEQ ID NO: 65179 - DNA, 438 bp, Oryza sativa
  Clone ID: PAT_MRT4530_66252C.1
ctagcgtgcgtaaggttggcgcaccccaaactcgatcttcggtagatctttgatcggggggccgccaacgacgctcgtaagggtgtgatggaggagattggcgaactgggagagtctgttctcccgttctttgaagagtagggcctcagctcctctgtaatcgactacactttgtataagatttgtcggcttcgactgcctttcttcgcgcaatcgctgccttgatctctgttggcaccctggtcctgagtatttttggttgtcgtttgtagggatgtcgatgtcgaggatgtccagcagcgtgggcagccgagttaccagtggtcgttccggcgattgccctccaaacgcctgtgtcgcaggacgagatgggacgaaactcacccgtggaaatgggtgtggcgatgacctccttaggttggtgatctttgtttccat

SEQ ID NO: 65180 - DNA, 144 bp, Oryza sativa
  Clone ID: PAT_MRT4530_66253C.1
atggccgagcatagaggaggccgtgcttttagcaacttcttcctcgccgactgtagggttggacaaaaagctcgaaactccgactgcttcctcgccgacaacgagtgtgatagcggcgatgatgtagcagccgttgtatgctag

SEQ ID NO: 65181 - DNA, 225 bp, Oryza sativa
  Clone ID: PAT_MRT4530_66254C.1
atggctgtcatgttaaagtcctattttggctccactatgatctggaatcatagttatgaggatcagaccatacgtcaaaccgttgaagccctcgatttagtgttcgctcagtctgaccgggatgtggaaggatctacttgcaaaaagaagtttcatgaaggaccacaagaagattccaccgatgcaacaatccaacggttcgcatcatctggagtgaagatctga

SEQ ID NO: 65182 - DNA, 818 bp, Oryza sativa
  Clone ID: PAT_MRT4530_66255C.1
atgtttttgaccggattgaataagttcaaaaagcatccaaacttgaattttggacatattggagtgtattgggtgcgttcgtggcaaaaactcacttcgtgattcgcgcggcgaacttttgtcaattaatgccaatattggcacccacgggtgcgatgtttttgaccagattgaataagatcaaaaagcatccaaacttgaattttggacatattggagtgtattgggtgcgttcgtggcaaaaacgcacttcgtgattcgcgcggcgaacttttgtcaattaatgccaatattagcataaattggcccacacgggtgcgatgtttttgaccggattgaaaaagttcaaaaagcatccaaacatgatttttgtacttattggagtgtattggatgcgttcgtggcaaaaactcactccgtgattcgcacgacgaacttttgtcaattaatgccaatattggcatatattgagcccccacgggtgcgatgtttttgactggattcaaaaagttcaaaaagcatccaaacataatttttggacatattggagtgtattgggtgcgttcgtggcaaaaactcacttcgtgatttgcgcgacgaactattgtcaattaatgccaatattggcatatacgggtgcgatgttttttgaccggaatgaaaacgttcaaaaagcacccgaacatgatttttggacatattggagtgtattgggcgtgttcgtggtaaaaactcacttcgtgattcgcgcggcgaactttcgtcaattaatgccaatattggcatatgttgagcctccagggttgtgatgttttctg

SEQ ID NO: 65183 - DNA, 1059 bp, Oryza sativa
  Clone ID: PAT_MRT4530_66256C.1
atgtttttcaccggaatgaaaaagttctaaaagcaccaaaacatgatttttggacgtattggagtgtgttgggtgcgttcgtggcaaaaaatcacttcgtgattcgcgcggcgaacttttttgaattaatgccaatattgccataggtgggtgcgatgttttagaccggaatgaaaaagttcaaaaagcaccaaaacatgatttttggacatattggagtgtggttggtgcattcgtggaaaaaaatcacttcgtgattcgcgcggcgaacttttgtcaatcactgccaatattgccataggtgggtgcgatgtttttcaccggaatgaaaaagttcaaaaagcaccaaaacatgatttttggacatattggagtgtgttgggtgcgttcgtggcaaaaaattacttcgtgattcgcgcggcgaacttttgtcaattaatgccaatattgccatatattggcacacgtgggtgcgatgtttttcaccggaatgaaaaagttcgaaaagcaccaaaacatgatttttggacatattggagtgtggttggtgcattcgtggtaaaaaatcactgcgtgattcgcgcggcgaacttttgtcaattactgccaatattggcataggtgggtgccatgtttttcaccggaatgaaaaagttcaaaaagcaccaaaacatgatttctggacatattggagtgtgttgggtgcgtttcgtggcaaaatatcacttcgtgattcgcgcggcgaacttttgtctattactgccaatattggcataggtgggtgcgatgtttttcacccgaattgaaaaaattcaaaaagcaccagaacatgatttttggaaatattggagtgtgttgggtgcattccgtgcgaaaaatcactttcttgattcgcgcggcgaccttttgtcaattaatggcaatattgccatatatttgcacacgtgggtgcgttgtttttcaacggaatgaaaaaatccagaaagccccaaaacatgatatttggacatattggtgtgggtaggtgccttcttgcaaaaactcactctcggatcgccg

SEQ ID NO: 65184 - DNA, 1269 bp, Oryza sativa
  Clone ID: PAT_MRT4530_66257C.1
tgcatgcgattcgctcctatcctccggaacccgcgccgccgccgcctcctccgctccgtaaaccctagcctcgccgccatgtcgccgccggccgccgcccacctcgccaccgcctccgatcccgacgaggacctctgcttcaccaccgaatcggtcgcgcccgcggaggagaccgccccgcccttgcccgcccctccgccgccggtgtccgcggaggagagggtggagcgcgcgtgggcgcactggaggcggctgggctccccgaagatggtggtggcgcccatggtggacaactcggagctccccttccgcatgctgtgccgccgctacggggcgaccggggcatacacgcccatgctccactcccgcatcttctccgagaacgagaagcacagggccatggagttcaccacatgcaaggaggaccgtccactttttgttcagttttgtgcaaatgatcctgacattttgttacaagcagcaaagattgtggaaccgtactgcgactatgtcgatatcaattttggatgcccacagcgcattgctagaagggggtactatggtgcgtttctcatgaacaaccttcctctcgtaaaatcccttgtacagaatctatcagcaaacctccatgttccagtatcatgcaagattcgcatattcccgcgactggaggacacactggcctacgcaaagatgcttgaagaagctggtgcttctctggtagctgtgcatgggcggactagagatgagaaggatgggaagaaatttcgagctgactgggatgccattaaagctgtcaaagatgctcttaggatacctgtacttgcaaatggaaacattcgccatttggatgatgtgaaggattgccttgaacatactggtgctgatggtgtgctttcagctgaaactcttctagaaaatccagcattgtttgctggtttccggacaaaggaatggaaagaaaatggtgatgaagatgaagctagtggcttagaccaggctgatctagtcattgagtatttgaaactgtgcgagcagtaccctgttccatggagaatggttcgatcccatgttcacaagatgctaggggactggtttagggtgcatcctcaagtgagggaggaactcaatgctcagtccaagctcactttcgagtggttgcatgatatggtaaagaggctgaaggatcttggtggaggaataccgctttacagaaacaataatgctttacagactacatcaaatgggctagctgcaagcaacgcctga

SEQ ID NO: 65185 - DNA, 804 bp, Oryza sativa
  Clone ID: PAT_MRT4530_66258C.1
atgtttttgaccggaatgaaaaagttcaaaaagcaccaaaacatgatttttggacatagtgtagtgtgttgggtgcattcgtggcaaaaaatcacttcgtgattcgcgcggcgaagttttgtcaattaatgtcaatattggcacaggtgggtgcgatgtttttcaccggaatgaaaaagttcaaaaagcaccaaaacatgatttttggacatatctgagtgttttgggtgctttcgtggcaaaaaatcacttcgtgattcgcgcggcgaacttttgtcaattaatgctaatattggcaaacgtgggtgcgatgttttacaccgcaatgaaaaagctcaaaaagcaccaaaacatgatttttggacatattggagtgtgttgggtgcatttgtggcaaaaaatcacttcctgattcgcgcggcgaacttttgtcaattaatgtcaataccaatattggcataggtgggtgcgatgttttagaccggaatgaaaaagttcaaaaagcaccaaaacatgatttttggacatattggagtgtgttgggtgcgttcgtagcaaaatatcacttcgtgattcgcgcggcgaacttttgtcaattactgccaatattggcataggtgggtgcgatgtttttgaccgtaatgaaaaagttcaaaaagcaccaaaacatgatttttggacatattggagtgtgtttggtgcattcgtggcaaaatatcacttcgtgattcgcgcgggcgaacttttgtcaataatgccgatattggcacatgtgggtgcgatgtttttgaccgtaatgaaaaa

SEQ ID NO: 65186 - DNA, 1450 bp, Oryza sativa
  Clone ID: PAT_MRT4530_66259C.1
agcaccacaacaagatttttggacatatttgatgaaccctgagttcctctcaacactcaaggctattgttggcccgatctttcggtgagttgtgataacgagacgttgtgttgcgccttagcgattgatacacctctccgagggttgttgatcttgccggtgcagatcaaccctattcctgcatataaataggggtgggaggacgacctaggggtgcctagggtcgtgctccacctggctggggcgcaccccacatgggccccacctgggccgggatcccaaatgaagttacaagcccataggcccattataggtgacgcagcaccttgtacgtgtgattccagccagacgagatagaattcggagatgaggctagatccgttggaaagagggctccgagagctttccatcaagtactcacgggccgaaaacggaggttgtatgctgattcggcggccgttctaagtcagcagtgtagtaggtggccgaatcggattctggcacttggaggactcgaacttgatatcttgttgttcatccatgatgtgagcaacggatgtatccgtagtagccacatttcgtgattcgcgcggtgaacttttgtcaaataatgccaatattggcatattttggcccacacgagtgcgatgtttttgaccggaatggaaatgttgaaaaagcaccaaagcatgatttttggacatattggagtgtattgggtgcgttcgtggcaaaaactcacttcgtgattcgcgcggcgaacttttgtcaattaatgccaatattggcacacgagggtgcgatgttttctgctggaatcaaaaagttcaaaaagagccaaaacatgatttttggacatattggtgtgtatcgggtgtgttcgtcgcaaaaacacatttcgtgattcgcgcggcgaacttttgtcaaataatgtcaatattggcatattttggcccacacgggtccgttgtttttgatcggaatgaaaatgttcaaaaagcaccaaagcatgatttttggacatattggagtgtaatgggtgcgttcgtggcaaaaactcacttcgtgattcgcgcggcgaacttttgtcaattaatgccaatgttggcacacgagggtgtgatatttttgaccggaatcaaaaagttcaaaaaacgcgaaaacatgaattttggacatattggagtgtattgggtgcgttcgtggcaaaaactcactccgtgattcgtgcggcgaacttttgtcaactaatgccaatattggctcacaagggtgccatgttttctactgaaatcaaaaagttcaaaaaactcgaaaacatgatttttggacatattggagtgtattgggtgtgttcgtggcaaaaactcactttgagattcgcgcggcgaacttttgtcaattaatgccaatatcggctcacaagggtgcgctgtttttgaccggaatc

SEQ ID NO: 65187 - DNA, 282 bp, Oryza sativa
  Clone ID: PAT_MRT4530_6625C.1
atggaggtcattcagaaaaaagtgcacagacgccctcgcgtcgcatcccccgccctggtggccagatggggagagggcgagctcgcggcggcaatgcgacctgagcttggcggtggcaggaggcgcatgctggtgcggcacaacccaagctcgcggcggcaacgatggtgcggttcggtggaggctcgcaacggcatgacggttgtggctggtggcggcacaccaaggctggtcggcgaggggcgccggtgctgtggtgcccacatgtcggcgggggtttag

SEQ ID NO: 65188 - DNA, 796 bp, Oryza sativa
  Clone ID: PAT_MRT4530_66260C.1
atgtttttgaccggaatgaaaaagttcaaaaatcaccaaaacatgatttttggacatattggagtgtattgggtgcgttcgtgacaaaaactgacttcgtaatacacgcgacgaacttttgtcagttaatgccaatattggccgtcacgggtgcgatgtttttgaccggaatgaaaaagttcaaaaagcaccaaaacatgatttttggacatattggagtgtattgggtgcgttcgtggcaaaaactcatttcgtgattcgcgcggtgaacttttgtcaattaatgccaatattggcccacacgggtgcgaggttttttgacaggaatgaaaaagtttaaaaagcaccaaaacctgatttttggacatattggagtgtattggatgtgttcgtggcaaaaactcacttcgtgattctcgcggcgaacttttgtcaattaatgccaatattggcacaaacgggtgcgatgtttttgaccggaatgaaaaagttcaaaaagcaccaaaacatgatttttggacatattggagtttattgggtgcgttcgtggaaaaaactgagttcgtgatacacgcggcgaacttttgtcaattaatgccaatattggccgacacgggtgcgatgtttttgaccggaatgaaaaagttcaaaaagctccaaaacatgatttttggacatattggagtgtattgggtgcgttcgtggcaaaaactcgctttgtgattcgcggcgaacatttctcaactaatgccaatattggcataaattggctcacacgggtgctatgttcttcgcc

SEQ ID NO: 65189 - DNA, 495 bp, Oryza sativa
  unsure (1)..(495): unsure at all n locations
  Clone ID: PAT_MRT4530_66261C.1
ctgccttgcaagcttcagaagaatttctgaaagaaagcaaaagggcttctgaagccttccatgcaacgtgcctccaacatcaaggagccccactcctttcggaacagctaagtacatgcttgacaagattccaaaagatgcttcaagcaaggtcaagatcaatcaggacctgtatacgcaagagagggtcattggaacaccgcctccattgccggattttgcgttggctctaaaacctgacgactacgatcttcctccattagatccactttggaacaaagaagacagccgtcagtagcagtatattcagcaagaatgtgaatgttgtctttcagaggttcaagctctagtataccatgtcgaagccagacgtggtacgaatgaagtgtacaaaatttgtcccaacaaaattgggtgtcagcaaaatttaaacaaggcctggagataatctcaagagcatngtacaggcgaatcttattctgacaaaggaaatgc

SEQ ID NO: 65190 - DNA, 1903 bp, Oryza sativa
  Clone ID: PAT_MRT4530_66262C.1
tttttatcctctctctctgtctccgtccccaacccagcgcgagacgatcccctcccctgcacggttcaaaacggggatcggtagtgttctgcatcagtgatgggctggagatttgcgttgttactgttacatgttcttctgtgccttgtcaatggcgtctcctgtggccgcacgagctcttacgtgcgtacggagtacccatcgactgatatacctctagaaagcgaatggtttgcggttccaaacggctacaatgcgccacagcaggttcatatcactcaaggtgactataatggaaaagctgttatagtatcatgggttactgtagcagaacctgggacaagtgaggtgctctatggtaaaaatgagcaccagtatgatcagagagtggaaggaacagtaacaaattataccttttacgactataaatctggatatattcaccattgccttgttgatggtcttgagtataacaccaaatattattataagattggaagtggagattcagctcgagaattttggtttgaaactcctccagcaattgatccagatgcatcatacacatttggcataattggtgatctggggcagacatttaattccctctcaacccttcaacattatgagaaaagcgaaggtcaaactgttttatttgttggggatttgtcatatgctgatagatatcaacataatgatggtgttcgttgggattcttgggggcggcttgtggaacgtagtaccgcttatcaaccatggatttggagcgctggtaaccatgaaattgaatacaggcctgatctgggagaaacttctacatttaagccatatctgcatagatgtcacactccatatttggcatcaaagagcagttctcctatgtggtatgcagtcagacgtgcatctgctcatatcattgtgctttctagctattctccattcgtaaaatacactcctcaatggacctggttgaagtatgaattgaagcatgtggatagagagaagactccttggcttattgttctcatgcattctcccatgtacaacagcaatgaagcacattacatggagggtgagagtatgagggctgcttttgagaaatggtttgtgaagtacaaggttgacttggtatttgcagggcatgtgcatgcttatgagagatcgtatcgtatctctaacatcaactacaacataacatcgggtaatcgatatccagtgccagacaaatctgctcctgtgtacataacagttggtgatggaggcaaccaggaagggcttgcttcaaggttcagtgatccacagccagactactctgcattcagggaggctagttatggtcattcgatcttgcaactgaaaaacaggactcatgctatctaccagtggaatagaaacgatgatgggaagcatgtacctgcggacaatgtggtgtttcacaaccagtattgggcaagcaacactcgccgcaggaggctgaagaagaagcattttcacttggatcaaattgaggacttgatatccgtgttctaggagttgatctttcagaacactgcatcgcagactttctgaaacggtggcggaatagctctgttgccctttggtcttgagcctcgaccgagtgaggcagaggctctcggctctcatgtaaaggaaccatgcacaggtttgtgggattactattattgagcactgtattgtatgatgaagacaatccgatcagcagatgattagtgctgtacacatgtagcatttcacagccagcgacagtttcgcaatgtgacagtatcttcaataaagtttcaaagggttgtgaaccgaaataaaaacattagctgccctctgttcgtaaaagatcttatttctacagagatccaagtacctcggcccgcgaccacgctaagcc

SEQ ID NO: 65191 - DNA, 1575 bp, Oryza sativa
  Clone ID: PAT_MRT4530_66263C.1
atgttttagaccggaacgaaaaagttcaaaaagcaccaaaacatgatttttggacatagtgtagtgtgttgggtgcattcgtggcaaaaaatcacttcgtgattcgcgcggcgaagttttgtcaattaatgtcaatattggcacaggtgggtgcgatgtttttcaccggaatgaaaaagttcaaaaagcaccaaaacatgatttttggacatatctgagtgttttgggtgctttcgtggcaaaaaatcacttcgtgattcgcgcggcgaacttttgtcaattaatgctagtattggcatatattggcacatgtcggtgcgatgtttttgaccggaatgaaaatgttcaaaaagcaccaaaacatgatttttggacatattggagtgtattgggtgcgttcgtggcaaaaactcacttcgtgattcgcgcggcgaacttttgtcaattaatgccaatattggcacacgagggtgcgatgtttttgaccggaatcaaaaagttcaaaaaacgccaaaacatgatttttggacatattggagtgtattgggtgcgttcgtggcaaaaactcacttcgtgattcgcgcggcgaacttttgtcaattaatgccaatattggcacacgggggtgcgatgtttttgaccagaatcaaaatgttcaaaaaacgccaaaacatgatttttggacatattggagtgtattgggtgcgttcgtggcaaaaactcacttcgtgatttgcgcggcgaacttttgtcaattaatgccaacattggcacacgagggtgcgatgtttttgaccggaatcaaaaagttcaaaaacgccatttttggacattttggagtgtattgcgtgcgttcgtggcaaaaactcacttcatgattcgcacggcgaacttttctcaattaatgcgaatattggcacacgagggtgcgatgtttttgaccggaatcaaaaagttcaaaaaatgccaaaacatgatttttggacatattggagtatgttgcgtgcgttcgtggcaaaaactcacttcgtgattcgcgcggcgaacttttgtcaattaatggcaacattggcacacgggggtgcgatgtttttcgaccggaatcaaaaagttcaaaaaacgccaaaacaagatttttggacatattggagtgtattgggtgcgttaatggcaaaaactcaattcgtgattcggtcggcgaacttttatcaattaatgccaatattggcacacgagggtgcgatgttttctactggaatcaaaaagttcaaaaaccgccaaaacatgatttttggacatattggagtgtattgggtgcattcatggcaaaaactcacttcgtgattcgcgcggcgaacttttatcaattaatgccaatatttgcacacgagtgtgcgatgttttttgacaggaatgaaaaagttcaaaaagcaccacaacatgatttttggacatattggagtgtattgggtgcgttcgtggcaaaaactcacttcgagatttgcgcggcgaacttttgtcaattattgccaatactaggatattttggaccacacgggtgcgatgtttttgacc

SEQ ID NO: 65192 - DNA, 1634 bp, Oryza sativa
  Clone ID: PAT_MRT4530_66264C.1
gagaaaatggatccacgagtcatattggaatcttttgaaatggttagtttttttcttcttttttttttggcaaagcatttcctttgtcagaataagattcgcctgtacaatgctcttgagattatctccaggccttgtttaaattttgctgacaccacaatttgttgggacaaattttgtacacttcattcgtaccacgtctggcttcgacatggtatactagagcctgaacctctgaaagacaacattcacattcttgctgaatatactgctactgacggctgtcttctttgttccaaagtggatctaatggaggaagatcgtagtcgtcaggttttagagccaacgcaaaatccggcaatggaggcggtgttccaatgaccctctcttgcgtatacaggtcctgattgatcttgaccttgcttgaagcatcttttggaatcttgtcaagcatgtacttagctgttccgaaaggagtggggctccatcttggtaaagttcttatgctgagaataaaacataagaaaatttgaaaagcgaaatgctcaaaaggtaaaatgtcttgccttgatgttggaggagttgcatggaaggcttcagaagcccttttgctttctttcagaaattcttctgaagcttgcaaggcagctactgccattccatgagatttctctgtgtttccctcgtctagaatcaaaccatggaaatagtatgctgcagcctttgcttcaacatacttccacttaacaaacaataaatgctttttcccccatccatcggataccggaatttctggaatgctctcctgaatttgatgccaatatttgaccatctcgcaagctaagcgccgttttaccgctagagtggcctttgggctatcaattgccagaccaagttgcatgtcgactccctgacccagagcttgcaggctaagagctttgagatttccttcagccagatctactggaagttgtctccttaactccgacgatatttggggtagtacttgtctaattgcgcagtctaggtagccagatgccttcaagaaaacatcaacagtagctcgtctgctctcttcagaaacccttggcgcataaccatcaccgtatgacctgggaagaagcagagaattggcctcagcattatcctcttggttagtccagacgaagtgcactccgtgccgcaattcgctaccttccttcaccaatcctagcagcactggcagatagtcttccagagcctgtaggagattagcagtgctcgaaccgtgccgcgccgccgcccgccgcttcggcttcagcgccgccgccgattcttgcattgccatgtcgacgacccgcgcccgcagcgacgacagcctcgacgaggcctcgtcgaggcgaccggcgagcgcctgggagaagtccacgctcctcggcacccggagccccgggaggaacacgaccacgtcgccgacgctccccggccgccgccgtgggccgccgccggcgtccttctccctcgacagcccacaacccatggtacgcgcgcggcagacagcctacgacttagctcacctcaccctgcaagaaccacggtgcaatagaacacccagcaatcgaaaatatcagcctgcagcccggggatccactagt

SEQ ID NO: 65193 - DNA, 204 bp, Oryza sativa
  Clone ID: PAT_MRT4530_66265C.1
atgtgccgggtggcggatctgacgacagcaacgcgcatgggcgatggatctgacgagggcaaggtgacaatgtaccctcctcgcgctgctcgtggtcgtcttcctcgtcgtcatggtggagaaagtcggcttccggatcagatcctcggcgaagatggcggcatcctccctgcgacaatgaccaccaccacggcgtccaactga

SEQ ID NO: 65194 - DNA, 1437 bp, Oryza sativa
  Clone ID: PAT_MRT4530_66266C.1
atgttttctactggaatcaaaaagttcaaaaaacgccaaaacatgatttttggacatattggatgtattggttgcgttcgtggcaaaaactcatttcgtgattcgcgcggcgcacttttgtcagttaatgcaaatattggcacacgagggtgcgatgtttttgaccggaatcaaaaagctcaaaaaacgccaaaacgtgatttttggacatattggagtgtattgggtggatacatggcaaaaactcacttcgtgattcgcgcggcgaacttttgtcaattaatgccaatgttggcacacgagggtgcgatgtttttgaccggaatcaaaaagttcaaaaagagccaaaacatgatttttggacatattggagtgtatcgggtgggttcgtggcaaaaacacatttcgcgattcgcgtggcgaactttttttcaaataatgtcaatattggcatatattggcccacacgggtgcgatgtttttgaacggaatgaaaatgttcaaaaagcaccaaagcatgatttttggacatatcagagtgtattgggtgtgttcgtggcaaaaactcacttcgtgattcgcgcggcgaacttttgtcaattaatgccaatattggcacacgagggtgcgatgttttttgaccagaatgaaaatgttcaaaaagcaccaaagcttgatttttggacttattggagtgtattgggtgcgttcgcggcaaatactcaattcgtgattcgcgcggtgatcttttgtcaattaatgccaatattggcacaccagggtgcgatgttttctactggaatcaaaaagttcaaaaaacgccaaaacatgatttttggacatattggagtgtattgggtgcgttcgtggcaaaaaatcacttcgtgattcgcgcggcgatcttttgtcaattaatgccaatattggcacacgagggtgcgatgttttctactggaatcaaaaagttcaaaaaaagccaaaacatgatttttgtacatattggagtgtatcgggtgtgttcgtggcaaaaacacatttcgtgattcgcgtggctaacttttctcaaataatgtcaatattggcatatattggcccacatgggtgcgatgtttttgaccggaatgaaaatgttcaaaaagcaccaaagcatgatttttggacatattggagtgtattgggtgcgttcgtggcaaaaactcacttcgtgattcgcgcggcgatcttttgtcaattaatgccaatattggcacaccagggtgcgatgttttgtactggaatcaaaaagttcaaaaaacaccaaaacatgatttttggacatattggagtgtatcgggtgtgttcgtggcaaaaacacatttcgtgattcgcgtggctaacttttgtcaaataatgtcaatattggcatatattggcccacatgggtgcgatgtttttgac

SEQ ID NO: 65195 - DNA, 408 bp, Oryza sativa
  Clone ID: PAT_MRT4530_66267C.1
atggacgcctctgcggtggcatcagccgacgaggcaaagaagacgacggcggcggcggccgccaccgccgccggcgagccgcagaagccagccgccgttgcgccattattggcgcaggggtacgtcgactccatcctggcgttcgagagggtgcaatggccggtcttctccgacgacgacctgaagcacctctcgccggagcagcgccgggagatcgacaagatggccgccctgcacaaggctttggacgacgacctcgccgtgttccaggccgaggtcagccgccaggtcgaggacaacggctgctacgtcgtcggcgagagctacctcgccgatcaggccaagctcgaggctctgatcaacgaagaatgggccaagatcgactggagcgccttcgaattcgagtag

SEQ ID NO: 65196 - DNA, 1167 bp, Oryza sativa
  Clone ID: PAT_MRT4530_66268C.1
atgtttttgaccggattgaataagttcaaaaagcatcgaaacatgaattttggacatattggagtgtattgggtgcgttcgtggcaaaaactcacttcgtgattcgcgcgggtacttttgtcaattaatgccaatattggcataagttgagagcccacgggtgcgatgtttttaaccggattgaataagttcaaaaagcaacaaaacaagatttctggacatattggagtgtattgggtgcgttcgtggcaaaaactcacttcgtgattcgcgcgacgaacttttgtcaattaatgccaatattggcgtatattgagcctccacgggtgcgatgtttttgaccggattgaataagttcaaaaagcatccaaacatgaattttggacatattggagtgtattgggtgcgttcgtggcaaaaactcacttcgtgattcgcgcgggtacttttgtcaattaatgccaatattggcatatattgagccccacgggtgcgatgtttttgaccggaatgaaaaagttcaaaaagcgccaaaacatgaattttggacatattggagtgtattgggtgcgttcgtggcaaaaactcacttcgtgattcgcgcgggtacttttgtccattaatgccaatattggcatatattgagccccacgggtgcgatgtttttgaccggaatgaaaaagttcaaaaagcgccaaaacatgaattttggacatattggagtgtattgggtgcgttcgtggcaaaaactcacttcgtgaatcgcgcgggtacttttgtcaattaataccgatattggcatatgttgagaccccacgggtgcgatatttttgaccggattgaataagttcaaaaagcatccaaacatgaattttggacatattggagtgtattgggtgcgttcgtagcaaaaactcaattcgtgattcgcgcgggtacttttgtcaattaataccaatattggcatatgttgagaccccacgggagcgatgtttttgaccggactgaatgagatcaaaaagcatccaaacataaattttggacacattggagtgtattgggtgcgttcgtggaaaaaactcaattcgtgattcacgcgccgaactttttgtaataagtgccaatatttagcatatataggcccacacgggtgcgatgtttttgacc

SEQ ID NO: 65197 - DNA, 1811 bp, Oryza sativa
  Clone ID: PAT_MRT4530_66269C.1
atgtttttgaccggattcaaaaagttcaaaaagcatccaaacatgatttttggacatattggagtgtattgggtgcgttcgtggcgaaaactcacttcgtgattcgcgcggcgatcttttgtcaattaatgccaatgttggcatatattgagctcgcacgggtgcgatgtttttgactggattgaaaaagttcagaaagcatccaaacatgatttttggacatattggagtgtattgggtgcgttcgtggcaaaaacacacttcgtgattcgcgcgacgaacttttgtcaattaatgccaatattggcatatgatgagaccccacgggtgcgatgtttttgaccggaatgaaaaagttcaaaaagcaccaaaacatgatttctggacatattggagtgtattgggtgcgttcgtggaaaaaactcacttcgtgattcgcgcggcgaacttttgtcaattaatgccaatattggcatatattgagcccccacgggtgcgatgtttttgaccggaatgaaaaagttcaaaaagcaccaaaacatgaattttggccatattggagtgtattgggtgcgttcgtggcaaaaactcacttcgtgattcgcgcgggtactttttgccaatatttagcatatatgggcccacacgggtgcgatgtttttgaccgcaatgaaaatgttgaaaaagcaccaaaacatgatttttggacatattggagtctattgggtgcgttcgtggcaaaaactcatttcgtgattcgcgcgggaacttttgtcaattaatgtcaatattggcaaatattgtgcccccacgggtgcgatgtttttgaccggaatgaaaaagttcaaaaagcaccaaatcatgaattttggacatattggagtgtattgggtgcgttcgtggcaaaaactcactttatgattcgcgcgggtacttttgtcaattaataccaatattggcatatcacgggtgcgatgtttttgaccggaatgaaaaagttcaaaaagcgccaaaacatgaattttggacatattggagtgtattgggtgcgttcgggcaaaaaacccactttgttgattcgcgcgggtacttttgtcaattaatgccaatattggcgtatattgagcctccacgggtgcgatgtttttgaccggaatgaaaaagctcaaaaagcaccaaaacatgaattttggacatattggagtgtattgggtgcgttcgtggcaaaaactcacttcgtgattcgcgcgggtacttttgtcaattaataccaatattggcatatgttgagaccccacgggtgcgatgtttttgaccggaatgaaaaagttcaaaaagcgccaaaacttgaattttggacatattggagtgtattgggtgcgttcgtggcaataactcacttcgtgaatcgcacgggtacttttgtcaattaatgccaatattggcatatattgagcctccacgggtgcgatgtttttgaccggaatgaaaaagttcaaaaagcgccaaaacatgaattttggacttattggagtgtatcgggtgcgttcgtggcaaaaactcacttcgtgattcgcgcgggtactcttgtcaattaataccaatattggcatatgttgagaccccacgggtgcgatatttttgaccggaatgaaaaagttcaaatagcaccaaaacaagatttctggacatattggagtgtattgggtgcgttcgtggcaaaaactcacttcgtgattcgcgcgggtacttttgtcaatttgtatggggtgcgttcgtggcaaaaactcacttcgtgattcgcgcgggta

SEQ ID NO: 65198 - DNA, 666 bp, Oryza sativa
  Clone ID: PAT_MRT4530_6626C.1
agggttagaactcgtggtaaattatccattgtctcatcatcgtagcttgttgttttgaaagagttagcctagttagattagaacctttctggatataacttctcaccattcatggtcatatttcagaatcaaaccccatgaaggcataggagtagtgcgccaacttctgtatgattcctgcagagacaaatgaattgaattgttccaatagaatacactctgtctgtcaaagaaaaatactcatgaataatttagtaggcactagaagttacattttcctggcagttcaatattccagttgattgctgcagtctgtgcctttacgtgaacttgcgataagtcactaagtctgtgcctttatagggatgtcttactgagggaacctgtattcaagatgcaagaagctaggagtggagaactagatgaaacttgaccttttcctacctaatccattacgctataatcaaactcagattggattacgcgttttccagctgcaaagttgataatccaggttgttattcagtggatttagctgattggaaatgtcggacctgtttcaattatatttgttgaatttttctaactgatcatgaactgaatccgtttggtccgatattaacctgaagctttaggaaattgctgtacttagctgctcgatattgt

SEQ ID NO: 65199 - DNA, 1443 bp, Oryza sativa
  Clone ID: PAT_MRT4530_66270C.1
atgttttagactggaatgaaaaagttcaaaaaacaccaaaacatgatttttgaacatattggagtgtgttggtgcattcgtgtcaaaatatcacttcgtgattcgcgcggcgaacttttgtcaattactaccaatattggcataggtggttgcgatgtttttcaccggaatgaaaaagttcaaaaagcaccaaaacatgatttttggacatattggagtgtgttgggtgcattcgtggcaaaatatcacttcgtgattcgcgcggcgaacttttgtcaattactaccaatattggcataggtgggtgcgatgtttttcaccggaatgaaaaagttcaaaaagcaccaaaacatgatttttggaaatattggagtgtgttgggtgcattagtagcaaaaaatcacttcgtgattcgcgcggcgaacttttgtcaattaatgtcaatattgccatatattggcacacgtgggtgcgatgtttttgaccggaatgaaaaagttcaaaagacaccaaaacatgatttttggacttattggagtgtattgggtgcgttcgtggcaaaaaatcacttcgtgatacgcgcggcgaacttttgtcaattaatgcaaatattggcacacgtgggtgcaatgttttttcaccggaatgaaaaagttcaaaaagcaccaaaacatgatttttggacatattggagtgtgttgggtgcgttcgtggcaaaaaatcacttcgtgattcgcgtggcgaacttttgtcaattaatgccaatattgccatatattggcacacgtgtgtgcgatgcttttcaccggaatgaaaaagttcaaaaagcaccaaaacatgatttctggacatattggagtgtgttgggtgcgttcgtggcaaaaaatcacttcgtgattcgcgcggcaaacttttgtcaattactgccaatattgccataggtgggtgcgatgtttttcaccggaatgaaaaagttcaaaaagcaccaaaacatgatttttggacatattggagtgtgttgggtgcgttcgtggcaaaaaattacttcgtgattcgcgcggcgaacttttgtcaattaatgtcaatattgccatatattggcacacgtgggtgcgttgtttttcaacggaatgaaaaagtccaaaaagcaccaaaacatgatttttggacatattggtgtgtgttgggtgcgttcgtggcaaaaactcacttcgtgattcgcgcggcgaacttttgtgaagtaatgccaatattgccataggtgggtgcgatgttttagactggaatgaaaaagttgaaaaagcaccaaaacatgatttttggacatattggagtgtgttgggtgcattcgtggcaaaatatcgcttcgtgaatcaagcggaaaacttttgtcaattactaccaatattggcataggtgggtgcgatgtttttcaccggaatg

SEQ ID NO: 65200 - DNA, 1013 bp, Oryza sativa
  Clone ID: PAT_MRT4530_66271C.1
ggccgccccttttttttttttttttttttttacaactaaactcggccataatacccgaatacattcgttaagatatttttcccccacttaacctctgggcagttcatgtttcgtttacactgcgtgatggttcaaattttagcaactcaaaatatgatcacaatttttgtatgcaattctcaacaaatacaccaactataaactttacatttggcgtgagtagtaagatctcttattgcataaagaatggaattacaaagttacccatcttctcttttctctcaagctcttccttttcagcaatctgtttcagcgtagtccacccctttcttgcccgcttccttgaactaccagacatctgagcagaaccacttgctacagatttatttttcacacggtcctttggagctgacttggtaggcattgtaggggccttgccagtaactgaacttggcatctcccctttcttgttctgaatgcttcttgtcttgaccagttctgcagaatccttatggtccgtcacatccaccagtttgttctttcgaggagtaacaaaacttgatccgactggaaattctgcttttgaaggaaaatcgggttggcatattgcaattttgttagcagaaacaggctcagtttcatgcatacctttttcacttgtgattgttaccactattttctgtgagacattctcctgatcagtagctgatgctgactgattcagttccaccgatgaacacgctacctccttttccatagattcgtcaagaagattgggtactggactttcctcatactcattcttttcaagattttgttgtttcaacccagatgttgactctagttgtgagaccgctgcctgagaatattcaaagccctcttttatagttactaatctcttgttattactgtcccctttcaactttatgctggttacatccatgccaactggctttcttgatgataacaagcccttcataatattctttccgctgccggacgcgtgggcggac

SEQ ID NO: 65201 - DNA, 441 bp, Oryza sativa
  unsure (1)..(441): unsure at all n locations
  Clone ID: PAT_MRT4530_66272C.1
ggcctttagaattctaggcctttagcgtttccccccatagggcatagacacgaggcacaggtcaggcagacctcctgtttgtctcatttctattatgcagctcacaccatttattagttacacttagtacttgtattcagttttgcggttttcttcattacaccgctcaatgtttaccacatcttcttcagatttctgaatgtaatgtacattggtttctcagcttcaaggtctctgaaatatttcccacacttttgctggcccatttcaatttattggcccttggcaaactgtgctcaccacaagttaatttcttttcatttgccaccagttaatttcttcgcatntcccaccattcggatatgcaactcatgctacttcaatgaatattttacacaatattttacagcagaaactagtggtctgcatgtggtagggtcc

SEQ ID NO: 65202 - DNA, 453 bp, Oryza sativa
  unsure (1)..(453): unsure at all n locations
  Clone ID: PAT_MRT4530_66273C.1
cttataaaagaaatgttacacgaccaaattccatccagctatgagtagtcaccagttggcaagaaccaaaacaaaaccatgagtgcagtgtaccatacataaaatagtattgacagctaataaaatccaggatccaactggctggattagattggggcagttgtttgtttctttccctctactgtgcagtcacaatgaccagaaggcagaagcatccaccactcattgtacccaatcaaattatggaaacaaatatactgctaactgatcagatggatggatggttcatccaagcttactggcatcccaattttgcctcattaccaaatacaacgaaaaggttattgttgctggtatcaagccaggaaaaacataccatggncaaaatttatttttatgactattgttgtggttacctggtccagcaaaaggcacacgaataggttgagcaaa

SEQ ID NO: 65203 - DNA, 636 bp, Oryza sativa
  Clone ID: PAT_MRT4530_66274C.1
atggagataggcggcgacagcgcagaaaggagacagatggagcctggtggtggcgttcggcggcggcgaggtgaccggcgggagcggcagccggcgtccggcgggcggcgacaggattggcgacgggagctagaccggcggcgcagtgaggcgttcggcggcggcgcggcgaggccacgaggcggcaaccgacggccgaccagcgacggcgggagcgaggccgcgaggggcaaggcgccgcggccagcggctgcggctcaacaggacagcgcccggcggcaagcacaacttcagccgattacatatgcaaatgtgagtccagttcagattcagattactgcagttgaggttgtgcctgagacgggaatacccaactttgaaatcctgactctgctgaggctcgtctcacgcagggagatttccgctttcctccgcgatttcctccacattcaccaccggtgttcgctcggctccgcgcctggcacacgacggccacgaaacctgtcaacctcaccgccgctgccatatgccacgccatgccactattcctggcacgacaaccggatggacgaacacactgacacgccagggacagaactgcagagcggtgctattggctgctgcggccatcaatag

SEQ ID NO: 65204 - DNA, 2022 bp, Oryza sativa
  Clone ID: PAT_MRT4530_66275C.1
atgcctgtccctggcgagaatcgtcggtgctttcttgcggtactccatttcttcaccatcatcctgataattatcacgtttccatcctccactgcagccattggcgatggtcagttcgggtactatggcttctccaacagcagtctcaccgtcgatggagctgccatggtgctgccagggggcttgctacagctgaccaacagtacggccaatatgaaaggccatgccttccatccgactcctttccggcttcgcaagtcgcccaacactacggtgcagtccttctccgcctccttggtgtttggcatcatctccccttacattgatcttgggtcacaaggcatggttttcttggttgccccaagcactaatttttctgatgcgttagccgcacagtacctgggtctgttcaacattagaaacattggcaatcgtagtaaccatgtttttgccgttgagatcaacaccatattgaatagcgagtttatggacatcgatgacaaccatatcggcatcgacatatgtgatcttcgctccgtgacatctcattcagcgggctactacgacaacagcaccggtggcttccataacttgagtctaatcagtggtgaggcgatgcaaatttggatcgactacgatggaggggcaaagcagattgacgtggccttggctccattcaaaatggccaaacccaccaagccactactgtcaatgccctatgacctctcatcagtgatctcagatgttgcatatgtaggtttatcagctgcaacaggcttagcagggtcgagtcattatattctaggctggagctttagcatgaatggacccactcctcctttcttcactgctcaactaccagatctacctcgtagagctcaagaagcttcacggcgcaaggtattgccgataattgttcctatagtaaccgccacatctgtcttactgataaccttggctgtcttcctatttgtgcggaggcgtttgagatatgctgagctgcgagaagattgggaaattcagtttggaccgcacaggttctcatttaaggacctatattttgcaactgaagggttcaagaatagtcacctcttaggcacaggaggatttggaagagtgtacaagggtctcctttccaaatctaacatgcagattgctgtgaagcgtgtgtcccatgaatcaaggcaaggcataagagaatttgttgcagagattgttagcatcggtcgccttcggcatcggaatattgtgcagttacttggctattgccggcgcaaagatgaacttatattggtctatgaatatatgccacatggtagccttgataaatacttgtattgtcatagcaaccatcctactttagattggattcaacgtttccgaataatcaaaggcgttgcatctggtttattgtaccttcatggagactgggagaaagttgtcatccatcgagacgtcaaggctagcaatgtgcttcttgatgcagaaatgaatgcacgcttaggtgattttggccttgcaagattatatgaccatggtactgacatgcaaaccacacacctagttggcactataggatatcttgcccctgagctagtacgaagaggtaaagcttcacccctcaccgatgtcttcgcctttggcatatttgttcttgaggttacttgtggacgaagacccattgaacataagatgaatagtgacaagctcctgttggtagactgggtgatggattgttggaacgagggatcacttcttgagacaatggatccaaagctccaaaatgagtatgatgctgatgaagcatgcctagcgctgaaactaggattgctttgctcacaccaatcccctgctgcaaagccaagcatgtggcatgtcatgcagtatcttaaccatgacttgccatttcccgagttggcgccaatggacatggtgcagaaccgtcaggtggactcacccgttgcatattgccaatcagtggtgagcgatggcaccatctctggcctctccgaagggaggtag

SEQ ID NO: 65205 - DNA, 878 bp, Oryza sativa
  Clone ID: PAT_MRT4530_66276C.1
ccggcgctcgcagccagcctccccccggcccgcaggacgcgcccttaatgctgccgccttcactcttctcgctggagcagcaggaggaggaggagatagagtgaggccgtgacggcgacggcgaggtctgggggcggggcgcgatgggagacggagcggaggcggcgggggcgaccgcggcgagcaggttcgggacgatctgcgtcttctgcggcagcaacgcggggcgccgcagggtgttcggcgacgcggcgctcgacctcggccacgagctggtgaggcggggcgtcgatctggtctacggcggcggcagcatcgggctgatgggcttgatcgcgcgtacggttctcgacggcggccgccgtgtcgtcggggtgattcctagagctctcatggctgtcgagatatcaggtgagagtgtgggagaagtaatagttgtacaggacatgcatgagcggaaagcggagatggctcggcgatccaaagcgttcattgctcttcctgggggctatggaacaatggaggagctgttagagatgataacatggtgccaacttggaattcatgacaagccagttggattgctaaatgttgacggttactacgatccactgctcgcgttgttcgacaaaggcgaggcggagggcttcatcaactctgattgtagacaaatatttgtatctgcaccaactgcaagtgaattgctgacaaagatggaggcttttcttttggggctaagaatgatgatgatgatgatgcgagatcgcgagggtgatgcactggattctcatcgctttgaaggaaaatttcgatgtaatggaaaagttggaagtttgaagaataactttagaactaaacacggcttaatgaagcattag

SEQ ID NO: 65206 - DNA, 339 bp, Oryza sativa
  unsure (1)..(339): unsure at all n locations
  Clone ID: PAT_MRT4530_66277C.1
cccacggtccngtccaactctccctctccacctctctttcgtcgtcggccgccgaaaagggggacgccgccgatcgccaacgacgacgggaacgcgacctcgtctacgggagctctggagcgcgctcaagccgccgcagccgacatcgtgccgttccgagcgctgtagaccgagccaagccgagccgtcacgccaacgccttctccttgaagtcctcctcaaaacccctcaattaatcccagggcaatggcgcagaaggtgcgggaggatcggccaccgtctttctttcaccttcggtttgccgtcggcatttgtcgttttcgncttcttcgcagctng

SEQ ID NO: 65207 - DNA, 195 bp, Oryza sativa
  Clone ID: PAT_MRT4530_66278C.1
atggtcacacgagttcattttgagcagaagtcgggggctactgtcagggttacggacgggaagagtccttctcggacgaggactgggtcgcctacgtatcgtgccgggtctggcgtgttcgagtcctactcggagagcaccagacccgcgcctacgaagccggagcctgcgaggagccaagtcgtcgagagctag

SEQ ID NO: 65208 - DNA, 429 bp, Oryza sativa
  Clone ID: PAT_MRT4530_66279C.1
atggcggcggcggcggctgcagcttccggggcacaggcgagggcgaggctggcagcggcggcagcttccggggcgaaggcgaggctggcggctggcggcgaggctcgcgccgcggcggctcctctcctccggcggcgacgcgtgatgttgattggtggaatgctccaagcgctgaaggacgaacagcgtttcataaggcatgaattcgaggcgctgcagaagtttacgaaatcagagctggacttgaaagtggcaaagatggaaaccgtcgtggccacaatgaggggtcttcacgaaaattctcagaaggagtgcttgaaaaatagtgtcttgctgttgggagtcaccgccgcagtcttcggggttttgcagcagcaggctgagcgtccaggtgtggagattccaaccaccggcaaaagcgaggcttag

SEQ ID NO: 65209 - DNA, 1291 bp, Oryza sativa
  Clone ID: PAT_MRT4530_6627C.1
cactgtttgcgaaattgcggcggcggcgcccaatctcgcggtgcaggggcggcgcctagttccatggcgagatagcattccggtttgccggaggagattgccgtcaagagcgagagagagcatcggcgaatcattttgagtctggtgttcctcctcttcctcccggcgatggggaattggaatcaccatcggcggccatggtacaggaggacccgccacatgctggtattttgggatttgacccgtccaaaatctgcaggacacaattgccacccaatcccattatgggaaagggaattttgcatttatgttggcggcatttcttggcacaggttctgtgacaacaagagatatgtctgcatgtataagaacatagagcaatgggatgactcagaagcctttgataattttaagaatgcaaaggctagattctgggctaattaccatggtcaaccttcagacatatctttgccagaccctgatatgtatattgacaaggttgaccacaatagcaagatcgaccctgagttgatagctgacctgaatatggtacggttaccattcgagatggatgatgagttactcccagctgatggattgggcagcactgatacagataacaagtgccagcagaggcagaaccaatctagaaactgggacatctatgtagaaaagcccaccgaagttaacaagtgggagcaagattcaagatccaacatggactggggaacaaagcatgaatcttggaatgagtggagtaaaaattgctctggttggggtagtgccttggcggattctagtgccttggcggattctagttggggcaattggaataatagtaacaatcatcattcatcaaataacagggctagcttcaatgggatcaacaggaatagataccaggacccaagcagcatatctggaaggaaaaggaatagtggtgggtacattcagcaaagaaacagtagacagagaaaccagattgagggctaccaaggaagtagatggtgagaccctaaagaaaagaacatctctttacataatagtgtaaatggccacacaatagaatgtggcttcttagttagtagtttgaaagattggatgagaaatgaatccttgtgatctttttgtctggagcagttggcaatacttagcagtttgaacaattatacatgtaaagagatgtttgagttatttttcctgttagtctatggaaagaaagtttcttcatgttgtttgaaacattttgtttttgggtaatggaagcagaatgctgccatttcgttgtaac

SEQ ID NO: 65210 - DNA, 401 bp, Oryza sativa
  Clone ID: PAT_MRT4530_66280C.1
caatttgcccatttgccaaaatgggccaaattttttacacgctgacaactgggagccaaacgaaaggagatgggagaaaatcaaggataggctacatacagtcgttgattccttcaaaatcgaggcaagagtatgacggaggtgcaacatatattgtgctgatttttcttgttggttttcttcgtttcaggaggtgaggttcaatggtaaatgtcgagaacatggatcttactgatctgttttattttgaaatgtgtggcacaaattctatttgtacgtatgtatatcttgccaatgtcgatcctgatctttctatttgtatgtactggtgaggttaagaaaatacgtaaatgatccttcgaataagcaatgttgattataaagccaaaaaaaaaaaaaaa

SEQ ID NO: 65211 - DNA, 363 bp, Oryza sativa
  Clone ID: PAT_MRT4530_66281C.1
ttttggttttttttttttttttgttttttttttttttttggtttttttttttttttttttttttttttgggagctgattccacattccaggaaataatatataaaaaattcaaacaaagccctagcaccaccaattgggggctttttggacagggaaaggggcaaaggctcccagttcttcactatcccaaaactggaacccgctagggtgaggcttgggcatccatgccataccaaacgggtcggcgttttcaaaccccccggggttggggaaagggggacagccaggaacatacacgatgacgaggatgaccagccccaccattttgaggatgggaaccttacaccagttttttttgatgc

SEQ ID NO: 65212 - DNA, 521 bp, Oryza sativa
  Clone ID: PAT_MRT4530_66282C.1
gggaaagactgtggttttggatggtgtgccttcgcaccaggacaattgattggatcattgcgcacaaacatgtgatagctgtgcttgaagaaacgcagagcggtggaagggatggcccaatgatgatcgccaatgcaaagaccaaacgctgaacgcctgtgcagtgcagcccaccttggcagggaaaaactgcaagtgatgtgccgtggccctggccaagttggatgtgagtgggctaatggcgtatgcgcatctcaagggagcaagcccgaagcctgcaagaacaaacaggggagaagagcacggtggccttgcactgcctagatttgcaacctactctatactacccccggattgatcgaatggagtgccgaaagcgagacttcagagtaatgtaattgagaactagtatcggcgtagagtaaaataaaccccaccaagtatgacacttggtggtgattctattcgatatcagtactaaataaaggttaccaatttcttaaaaaaaaaaaaaaaaaaaa

SEQ ID NO: 65213 - DNA, 833 bp, Oryza sativa
  Clone ID: PAT_MRT4530_66283C.1
gaggccccaggcgcgagcgcagcgcaaaagatggcgacgatgtccctcgccgcggcgtcccccctcgcctcgactccccgtgggctcgccgtctccactccccgcacggccttcctcggcctcctgaccggaggggcgtcgctggcgccgttcccgggactggcggcggcggcggcgccgccgcggctgccagcggggaggggcgacgcggccgtggccaggatggcgaagagggagcaggagctggaggagattcgggccatgccgacggagaagatcgaggaggaagtggtggacctgaagggggagctcttcatgctccgcctcaagcgctccgcgcgccaggagttcaaatccagcgagttcggccgcatgcgcaagaggattgctcgtatgctgactgtcaaaagagaacgggaaattgaacaaggaatcaacaagagattgtctaggaagcttgacaggaaatggaagcaaagcatcgtggttagaccaccaccatctctaagggagaacaaggaggaatagagagccacaaaagcagacagtctgtagaagtcatttcatgcatgtcttgaaggaaggtttctttctccctgtggtttcattccttataatggattgatatgtaattcacattaactgatttccaagtccttgctgtcaaaaccaaaagttctattaccaattccatttgtgtaaatttcagtttattcaaaatgtgttgtccatatatgcacttatattactgatatatgaaactgtgcttaacgagtgtatgctatacacttgttgaaactcaaaaaaaaaaaaaaaaaaaaaaaaaaaaaaaa

SEQ ID NO: 65214 - DNA, 265 bp, Oryza sativa
  Clone ID: PAT_MRT4530_66284C.1
aaaaaaaaaaaaaaaaaaaaaaaaaaaaaaaaaaagaaaaaaaaaaaaaataaaaaaaaaaaaaaaaaaaaaaaaaaaaaaaaaaaatggggcggcgggtttcggttttccaggtttccggccgcgtgcctgcggcttgatgcttcttttttcttttctcctgacctcaattttctgtccgtggtttgccattgtcgcctctgtgacggccttgccctcccgattttaatcgtattgcgcctgatcccctttttccctgttgggg

SEQ ID NO: 65215 - DNA, 204 bp, Oryza sativa
  Clone ID: PAT_MRT4530_66285C.1
atggggaggcggatggacggaggggagcggtggcgcgagagctcgcacgttgatttggcaccgcgctggcggatgcattacggtgataatcggattgggtatagcagccttcgttttcttttcgatgtcaaacaagtcggcgaggccattttggccaacgcgtgggtggagatacgcgcgcgcatgtcgagctacagcacatag

SEQ ID NO: 65216 - DNA, 217 bp, Oryza sativa
  Clone ID: PAT_MRT4530_66286C.1
cacttcaagggcactgccttaccttgccgcttaccgacctgccaaaaccccgttctatcaaacttccaaagccaccaaggcccgagaaagaaagggccattcaaaggaccattcacacaggcaacttctttccgcccaccattgacgggccttgacccaatccaaccaaagattcaaaagaagcccaccgataagaaggccggaagaaattactccc

SEQ ID NO: 65217 - DNA, 757 bp, Oryza sativa
  unsure (1)..(757): unsure at all n locations
  Clone ID: PAT_MRT4530_66287C.1
gtgtggtcgtaggctagggtttctcacgtctctcgctgccgccgccgccgccgccgccgccgcgagaagccgtaggaggaggagagagagggagggatggcggagaagaagcagcgccccggcggcgcgaggaaggacgaggtggtcacccgcgagtacaccatcaacctccacaagcgcctccacggatgcaccttcaagaagaaggctcctaatgccatcaaggagatcaggaagtttgcacagaaggccatgggcaccattgacgtcagggttgatgtgaagctcaacaagcacatctggagcagcggtatccggagcgttccaaggcgtgtccgtgtcagaattgcccgcaggaggaacgacgaggaggatgcgaaggaggagctctactctctggtcactgttgctgaggttccccaagaggggttgaagggcctgggtaccaagcttgtcgaggacgatgagtaaatatgcctaggttttgatcttacctgcatcaaagcaattttgtgttcacgagttgtttgaactagaatgatcttgattagtaaactagcagaggtttttggtactgaactatngagtattcagtgcagttgtttctggttgccatattgttgaggtcaggtgcttagtttgatcagtgatgttgctgctctttagtcaggtatgatttcattgcggcaaccaaaacctcccgcaaaacatcagaactcgaacgaatggtggctgtgtctgatttcattgtccatga

SEQ ID NO: 65218 - DNA, 1719 bp, Oryza sativa
  Clone ID: PAT_MRT4530_66288C.1
atgtttttgaccggaatgaaaaagatcaaaaagcaccaaaacatgatttttggacatattggagtgtattggcacgctcgtggtaaaaactcacttcgtgattcgcgcggcgaacttttgtcaattaatgccattattggcacacgtgggtgcgatgtttttgaccggaatgaaaaaattcaaaaagcaccaaaacatgatttttggacatattggagtgtattgggtgcgttcgtggcaaaaactgacttcgtgattcgcgcggcgaacttttgtcaattaatggcatttttggcacacgtggggggtgatgtttttgaccggaatgaaaaagttcaaaaagcaccaaaacatgatttttggacatattggagtgtattgagtgcgttcgtggcaaaaactcaattcgtgattcgcacagcgaacttttgtcaattaatggcattattggcacacgtgggtgcgatgtttttgaccggaatgaaaaagttcaaaaagcaccaaaacatgacttttggacatattggagtgtattgggtgcgttcgtggaaaacactcaattcctgattcgcgcggcgaacttttgtcaattaatgccattcttggcacacgtgggtgctatgttttttgaccggaatgaaaaagttcaaaaagcacccaaacaaaatttttggacatattggagtgtattgggtgcgttcgtggcaaaaactcacttcgtgattcgcgcggcgaacttttgtcaattaatgccaatactggcacacgaggccgcgatgtttttgacaggaatgaaaaagttcaaaaagcaccaaaacatgatttctggacatattggagtgtattgggtgcgttcgtggcaaaaactcacttcgtgatttgcgcggggaacttttgtcaattaatatcaatattggcatatattggtgcgatgttttttgaccggaatgaaaaagttcaaaaagcaccaaaacatgatttttggacatattggagtgtattgggtgcgttcgtggcaaaaactcacttcgtgattcgcgcggcgaacttttgtcaattaatgtcaatattggcatatattgagcccccacgggtgcgatgtttttgaccggattgaaaaggttcaaaaagcatccaaacatgatttttggacatattggagtgtattgggtgcgttcgtggcaaacactcacttcgtgattcgtgcggcgaacctttgtcaattagtgccaatattagccccccacgggtgcgatgtttttgaccggaatgaaaaagttcaaaaagcaccaaaacatgatttttggacatattggagtgtattggggtgcgttcgttggtaaaaaacccttcgtgattcgcgcggcgaacttttgtcaattaatgccaatattggcacacatgggtacaatgtttttgaccggaatgaaaaagatcaaaaagcaccaaagcatgatttttagacatattggagtgtattggatgcgttcttggcaaaaaatcacttcgtgattcgcgcggctaacttttgtcaattaatgccaatattggcatatagtggcatacatgggtgcgatgtttttgaccagaatgaaaaagttcaaaaaacaccaaaacgtgatttttggacatattggagtgtattgggtgcgttcatggcaaaaaatgacttcgtgattagcgcgacgaacttttctcaagtaatgccaatattagaac

SEQ ID NO: 65219 - DNA, 192 bp, Oryza sativa
  Clone ID: PAT_MRT4530_66289C.1
tcgatcttacttataagagaaacacttgagtagcaaggtgaaatcctacaggaccgggtgctttaatactattgtgcaggatgtaaatgtactggctacaccggtaagatttggaaaaagtgcgaacttagttaaattcaaatatgtaagaactttaatacgaaaaatcattacgtataactcaacttaaaa

SEQ ID NO: 65220 - DNA, 518 bp, Oryza sativa
  Clone ID: PAT_MRT4530_6628C.1
tttttcccaaatgggccgccggcctatttcctccccctccctgcgctcttgctgggccgaccgaaggccacggcccagccgctcgcccgagctccccctctccccctcggacgctgacaggcggggcccgcctgtcaggcccatccccaacctccagtcgccgccaccgcgccttgcaaccgccgccgcgcccacgctcccgcctcctccgggccgcgtcggccacgtcggccacgcccgcgcgtgcgcccgaatctcccgcgcccactccctctctctctcgcccgcgccggcgctcgagacggccgggattcgattttcgaatcccgcctctctctcctctcccactcccccacgtcggccggcgattcccagcctctctcggccacgtccggacccctcttcccctatttaagcaccaccaccatcccctctctctttttcctcatctcgccgagtcctcccgtgctctctatcgccctagtgccgttgccctcctctccgccgccgccgccgcc

SEQ ID NO: 65221 - DNA, 1356 bp, Oryza sativa
  Clone ID: PAT_MRT4530_66290C.1
atatttttgaccggattgaatatgttcaaaaagcatccaaacatgaattttggacatgttggagtctattgggtgcgttcgtggcaaaaactcacttcgtgattcgcgcgggtacttttgtccattaatgccaatattggcatatattgagccccacgggtgcgatgtttttgaccggaatgaaaaagttctaaaagcaccaaaacatgaattttggacatattggagtgtattgggtgcgttcgtggcaaaaactcacttcgtgattcgcgcatgtacttttgtcaattaataccaatattggcatatgttgagaccccacgggtgcgatatttttgaccggattgaataagttcaaaaagcaccaaaacaagatttctggacatattggagtgtattgggtgcgttcgtggcaaaaactcacttcgtgaatcgcgcgggtacttttgtcaattaataccgatattggcatatgttgagaccccacgggtgcgatgtttttgaccggaatggaaaagttcaaaaagcaccaaaacaagatttctggacatattggagtgtattgggtgcgttcgtggcaaaaactcacttcgtgattcgcgcgggtacttttgtcaattaataccaatattggcatatcacgggtgcgatatttttgaccggaatgaaaaagttcaaaaagcaccaaaacaaggtttctggacatattggagtgtattgggtgcgttcgtggcaaaaactcacttcgtgattcgcgcgacgaacttttgtcaataagtgccaatagttagcatatataggccaacacgggtgcgatgtttttgaccggaatgaaaaagttcaaaaagcaccaaaatatgatttctggacatattggtgtgtattgggtgtgttcgtggcaaaaattcacttcgtgattcgcgcgggtacttttgtcaattaataccaatattggcccacacgggtacgatgtttttgactggaatgaaaaagttcaaaaagcgccaaaacatgaattttggacatattggagtgtattgggtgcgttcgtggcaaaaacccacttcgtgattcgcgcgggtacttatgtcaattaataccaatattggcatatgttgagaccccacgggtgcgatatttttgaccggaatgaaaaagttcaaaaagcaccaaaacatgaattttggacatattggagtgtattgggtgcgtacgtggcaaaaactcacttcgtgattcgcgcgggtacttttgtcaattaataccaatattggcatataccggtgcgatgttttttgaccggaatgaaaaagttctaaaagcacccaaacatgaattttgtacatattggagtgt

SEQ ID NO: 65222 - DNA, 1448 bp, Oryza sativa
  Clone ID: PAT_MRT4530_66291C.1
gtgtttttgaccggaatgaaaaagctcaaaaagcaccaaaacatgatttttgcacatattggagtctattgggtgcgttcgtggcaaaaaatcactccgtgattcgcgcggcgaacttttgtcaattaatgccaatattggcatatgtttgcacacgtcggtgcgaagattttaaccggaatgaaaaagttcaaaaagcaccaaaacatgatttttggacatattggagtgtattggttgcgttccttccaaaaaatcactccgtgattcgcgtggcgaacttttgtcaattaatgccaatattggtgggatacacacgtgggtgtgatgtttttgaccggaatgaaaaagtttaaaaagcaccaaaacatgatttttggacatattggagtgtattgggtgcaatggttgcaaaaagtcacttcgtgattcgcgcggcgatcttttgtcaattaatgccaatattggaatatattgccacacatgggtgcaatatttttgaccggaatgaaaaagtttaaaaagcaccaaagcatgatttttggacatattggagtgtattgggtgcgttcgtggcaaaaaatcactccgtgattcgtgcagcgaactttcgtcatttaatgccaatattggcatatagtggcatagaagggtgcgatgtttttgaccggaatgaaaatgttcaaaaagcaccaaagcatgatttttggacatattggagtgtattgggtgcgttcgtagcaaaaactcacttcgtgattcgcgcggcgaacttttgtcaattaatgccaatattggcacacgagggtgcaatgttttctactgaaatctaaaagttcaaaaaacgccaaaacatgatttttggacatattggagtgtattgggtgcattcatggcaaaaactcacttcgtgattcgcgcggcgaacttttgtcaattaatgccaatattggcacacgagggtgcgaagttttttgaccggaatcaaaaagttcaaaaaacgacaaaacatgatttttggacatattggagtgtattgggtgcgttcgtggcaaaaactcacatcgtgattcacacggcgaacttttttcaattaatgcgaatattggcacacgagggtgcgatgtttttgaccggaatcaaaaagctcaaaaaatgccaaaacatgatttttggacatattggagtatgttgcgtgcgttcgtggcaaaaactcacttcgtgattcgcgcggcgaacttttgtcaattaattgcaacattggcacacgagggtgcgatgttttttgataggaatgaaaaagttcaaaaagcaccaaaacaagatttttggacatattggagcgtaaaaggtccgttcgtggcaaaaactcacttcgtgattcgcgcggtgaacttttgtcaattaatgcaaatattggcacacgaaggagcgttgtttttgaccgg

SEQ ID NO: 65223 - DNA, 2050 bp, Oryza sativa
  Clone ID: PAT_MRT4530_66292C.1
atgtttttgaccggaatgaaaaagttcaaaaagcaccacaacaagatttttggacatattggagtgtattgggtgcgttcgtggaaaaaactcacttcgtgattcgcgcggtgaacttttgtcaattaatgccaatgttggcacacgagggtgcgatgtttttgaccggaataaaaaagttcaaaaaagccaaaacatgatttttggacatattggagtgtattgggtgcgttcgtggaaaaaactgacttcgtgattcgcgcggcgaatttttgtcaattaatgccaatgttggcacacgagggtgcgatgttttctactggaatcaaaaagttcaaaaaacgccaaaacatgatttttggaaatattggagtgtattgggtgcattcatggcaaaaactcacttcgtgattcgcgcggcgaacttttgtcaattaatgccaatattggcatatattggcccacacggttgcgatgtttttgaccggaatgaaaatgttcaaaaagcaccaaagcatgatttttgaacatattgcagtgtattgggtgcgttcgtggcaaaaactcactttgtgattcgcgcggcgaacttttgtcaattaatgccaatattgacacacgagggtgcgatgttttctgctggaatcaaaaagttcagaaagagccaaaacatgacttttggacatattggagtgtatcgggtgtgttcgtggcaaaaacacatttcgtgattcgcgtggctaacttttgtcaaataatgcatatattggcccactcgggtgcgatgtttttgaccagaatgaaaatgttcaaaaagcaccaaagcatgatttttggacatattggagtgtattgggtgcgttcgtggcaaaaactcacttcgtgattcgcgcggcgaacttttgtcaattaatgccaatattggcacacgagggtgcgatgttttctgctggaatcaaaaagttcaaaaagagccaaaacatgatttttggacatattggagtgtattgggtgcgttcgtggcaaaaactcacttcgtgattcgcgcggcgaacttttgtcaattaatgccaatattggcacacgagggtgcgatgttttctactggaatcaaaaagttcaaaaagagccaaaacatgatttttggacatattggagtgtatcgggtgtgttcgtggcaaaaacacatttcgtgattcgcgtggctaacttttgtcaattaatgccaatattggcacacgacaagggtgcgatgttttgtactggaatcaaaaagttcaaaaagagccaaaacatgatttttggacatattggagtgtatctggtgcattcgtggcaaaaactcacttcgtgattcgcgcggcgaactttgtcaattaatgccaatattggcacacgagggtgcgatgttttctactggaatcaaaaagttcaaaaagagccaaaacatgatttttggacatattggagtgtattgggtgcattcgtggcaaaaactcacttcgtgattcgcgcggcgatctattgtcaattaatgccaatattggcacacgagggtgcgatgttttttgaccggaatgaaaatgttcaaaaagcaccaaagcatgatttttggacatattggagtgtattgggtgcgttcgtggcaaaaactcacttcgtgattcgcgcggcgaacttttgtcaattaatgccaatattggcacacgagggtgcgatgttttctgctggaatcaaaaagttcaaaaagagccaaaacatgatttttggacatattggagtgtattgggtgtgttcgtggcaaaaactcacttcgtgattcgcgcagcgaacttttgtcaattaataccaatattggcacacgagggtgcgatgttttctactggaatcaaaaagttcaaaaagagccaaaacatgatttttggacatattggagtgtattaggtgcgttcgtcgcaaaaactcacttcgtgattcgcgcggcgaacttttgtcaattattgccaatattggtatatattggccccacacaggtgcaatgtttttgacc

SEQ ID NO: 65224 - DNA, 384 bp, Oryza sativa
  Clone ID: PAT_MRT4530_66293C.1
atggaagttaaaaacaaatgttttcggatgctcttgatcaaaagatgggaagggttcccaagaggtaagtgtcatggttacgggaaatcgacaaaagattatggaaataatcctcataggcaagtgtataacatagtcctactcggaaaaggatcgggattcaggattgtactgtatcgtggtgagttcggtatctccgagttctacttggagatcaagatcatcgtaccaacgtaccctaaaaccctattcatcctgtcttggggtatccacgtcggcaatgaacgtggaaagaggaacagaggaatgactagtctgcccagtataaccgctggcactgtgagtgtgatggagacatggaaattaagggcctgttcactttga

SEQ ID NO: 65225 - DNA, 984 bp, Oryza sativa
  Clone ID: PAT_MRT4530_66294C.1
atggctgatgaaatcgagagggaggtgggcgccagcaagtgcaccacgtggcaccgacgaggtagccacacggacagcgaggtggacggccccgatgtgccgaggggcaaattggactctagtgaagtggcaattagtggcttgccgtcccgacttggtggcggcagcacatgcggcccgaggcgagcgtgcggagcggcagtggaagaagaggaagggaaggtgcagctcaccgagggctcacgacggcgagatgcagcgcgagaacgacgacaacaaggtggaaacagcggcggttctgggatggcatcgacgacggggaaatggggttgcgcggcagcgagcattgtcggctggagagggaaaggaaaggcgaggctcaccggcatcttgggagaggcggggttccggtggcggaatggaacgatcatgtggcggcccgaggggctccttgacctcacgaagctggtggcggtgacggacgtcggcgtttggggcgcgaaaggtgtgccagagacgacggcgtggctgacatcatccctgcccctctcggctagaggctggtcgcccgacgaggacgcggcatactacacgccggggcagtgctcggccggctccgatggccacagcggtggcagtggcaagggcggtgggatgtggagcgaggcggcggtagagacggcggtagagacggcggcgggatcctccttccccaccatcgcagcggcgcagagctcgggcacagcggagttgaagaaattggacacgctagcgctgctgcagccacccccttccccttccctttcctacgccctccccgcaacgctgcctccatcatcctccttggcgtgtcccaccggctgctgcctccaacgccctcaccaagctcgagatggatgcttcgacatccaaggcttcttggctctccggtccgtgctgcgatcctcatcagctgaaggctccacagggtgtctaaacaggtga

SEQ ID NO: 65226 - DNA, 1942 bp, Oryza sativa
  Clone ID: PAT_MRT4530_66295C.1
atgtttttgaccggattgaataagatcaaaaagcatccaaacatgaattttggacatattggagtgtattgggtgcgttcgtggaaaaaactcactttgtgattcacgcggcgaacttttgtcaattaatgccaatattggcatatattgagcccccacgggtgcgatgtttttgactgtattcaaaaagttcaaaaagcatccaaacatgatttttgaacatattggagtgtattgggtgcgttcgtggtaaaaactccattcgtgattcgcgcggcgagcttttgtcaattagtgccaatattagcaccccacgggtgttatgtttttgaccggaatgaaaaagttcaaagagcaccaaaacatgatttttggacatattggagtgtattgggtgcgttcgtggaaaacactcacttcgtgattcgcgcggtgaacttttgtcaattaatgccattattggcacacgtgggtgcgatgtttttgaccggaatgaagaagttcaagaatcaccaaaacatgatttttggacatattggagtgtattgggtgcgttcgtggaaaacactcacttcgtgattcgcgtgacgaacttttgtcaattaatgccattgttggcacacggtggtgcgatgtttttgaccggaatgaaaaagttcaaagagcaccaaaacatgatttttggacatattggagtgtattgggtgcgttcatagcaaaaactcacttcgtgattcgcgcggcgaacttttgtcaattaatgccaatattggcacacgaaggagcgttgcttttgaccggaatcaaaaagttcaaaaaacgccaaaacatgatttttggacatattggagtgtattgggtgcgttcgtggcaacaactcacttcgtgattcgcgcggcgaacttttgtcaattaatgccaatgttggcacacgagggtgcgatgtttttgaccggaatcaaaaagttcaaaaaacgccaaaacaagattttttggtatattggagtgtgttgcgtgcgttcgtggcaaaaactcacgtcgtgatttgcgcggcaaacttttgtcaattaattgcaacattggcacacgagggtgcgatgtttttgaccggaatgaaaaagttcaaaaagcgccaaaacatgttttttgggcatattggagcgtattgcgtgcgttcatagcaaaaactcacttcgtgattcgcgcggcgaacttttgtcaattaatgtcaatattggcatatattggccgactcgggtgcgatgtttttgaccggaaagaaaaagttcaaaaatcaccaaaacatgatttttggacatattggagtgtgttgggtgcgttcgtggcaaaaactcacttcctgattgatgcagcaacgggggttcccgatctttcgatgagaggaggataaactttgatttggggaaggatacgacgttggcggtccgactacaactaccacaagggtgctgcgccttagcaaccggtacaccgactccacgttgttgctgttcttgccgtgccaagaacaaccttgaaccttcctattttctttcacaactacaggaagttccatatctttcaaacactctttagataaagtaggtgcatcaatcttctctttcttcttgagcgatgggtctcggatatcaatcatgtcattttcctctgtttgctgaatgcctttaactccctcctttgtcgggcagtgtgttgaaccccatccagaagcatttgtgtcaggaagggaggaaccttcttttgccaagattgaatccaagccttcaacatcttctggtctgactaaagagtcctccgtggagccatcgttcacgaagactccaacatcacacacttggtttttgatgtcttgcgacaccaaagtccaagtgtggggggaggtcgatgcgcttgcatgacgagttccatcaaccaaggccat

SEQ ID NO: 65227 - DNA, 2840 bp, Oryza sativa
  Clone ID: PAT_MRT4530_66296C.1
atgtttttgaccggtatgaaaatgttcaaaaagcaccaaaacatgattttaggacatattggatgtattgggtgcgttcgtggcaaaaactcacttcgtgatacacgtggtgaacttttgtcaattaatgccaatattggcccacacgggtgcgatgtttttgactggaatgaaaaagttcaaaaatcaccaaaacatgatttttggacatattggagtgtattgggtgcgttcgtggcaaaaactcacttcgtgattctcgcggcgaacttttgtcaattaatgccaatattggcccacacgggtgcgatgttttttgaccagaatgaaaaagttcaaaaagcaccaaaacatgatttttggacatattggagtgtattgggtgcgttcatggcaaaaactcacttcgtgattcgcgcggcaaacttttgtcaattaatgccattattggcacacgtggctgcgatgtttttgaccggaatgaaaaagttcaaaaagcacgaaaacgtgaattttggacataatggagtgtattgggtgcgttcatggcaaaaactcactttgtgattcgtgcggcgaacttttctcaattaatgccattattggcacacgtgggtgcgatgtttttgaccggaatgaaaaagttcaaaaagcaccaaaacatgatttttggacatattggaatgtattgggtgcgttcgtggcaaaaactcacttcgtgattcgcgcggcgaacttttgtccattaatgccaatattggcccacacgggtgcgatgtttttgaccggaatgaaaaagttcaaaaagcaccaaaacatgatttttggacatattggattgtattgggtgcgttcgtggcaaaaactcacttcgtgattcgcgcggcgaacttttgtccattaatgccaatcttggcccacacgggtgcgatgtttttgaccggaatgaaaaagttcaaaaagcaccaaaacatgatttttggacatattggagtgtattgggtgcgttcgtggcaaaaactcacttcgtgattcgcgcggcgaacttttgtccattaatgccaatattggcccacacgggtgcgatgtttttgaccggaatgaaaaagttgaaaaagcacgaaaacatgatttttggacatattggtgtgtattggatgtgttcatggcaaaaactcacttcgtgattcgcgcggcgaaattttgtcaattaatgccaatattggcatatattggccgactcgggtgcgatgtttttgaccggaaagaaaaagttcaaaaatcaccaaaacatgatttttggacatattggagtgtgctgggtgcgttcgtggcaaaaactcacttcatgattcgtgcggcgaacttttgtcaattactgccaatattggctgacacgggtgcgatgtttttgaccggaatgaaaaagttcaaaaagctccaaaacatgatttttggacatattagagtgtattgggtgcgttcgtggcaaaaactcgcttcgtgattcgcagcgaacatttctcaactaatgccaatattggcataaattggctcacacgggtgctttgttcttcgccagaatgaaaaacttcgaaaaacaccaaaacttgatttttggacatattagagtgtattggatgcgttcgtggcaaaaactcacttcgtgattcgcgcggcgaacttttgtcatttaatgctaatattggcccacacgggtgcgatgtttttgaccggaatgaaaaagttcaaaaagcaccaaaacatgatttttggacatattggagtagtgtattgggtgcgttcgtggcaaaaactgacttcgtgattcgcgcggcgaactttggtcaattaatgccattattggcacacgtgggtgcgatgtttttgaccggaatgaaaaagatcaaaaagcaccaaaacatgatttttggacatattggagtgtattgggtgcgctcgtggaaaaactcacttcgtgattcgcgcggcgaacttttgtcaattaatgccattattggcacacgtgggtgcgatgtttttgaccggaatgaaaaaattcaaaaagcaccaaaacatgatttttggacatattggagtgtattgggtgcgctcgtggtaaaaactcacttcgtgattcgcgcgacgaacttttgtcaattaatgccattattggcacacgtgggtgcgatgtttttgaccggaatgaaaaaattcaaaaagcaccaaaacatgatttttggacatattggagtgtattgggtgcgttcgtggcaaaaactcacttcgtgattcgcgcggcgaacttttgtcaattaatgccattattgggacacgtgggtgcgatgtttttgaccggaatgaaaaaggtcaaagagcaccaaaacatgatttttggacatattagagtgtattgggtacgttcttggcaaaaactcacttcgtgattcgcgcggcgaacttttatcaattaatgccaatattggcatatattggcacacgtggatgcgatgtttttcaccggattgcaaaagttcaaaaagcaccgaaacatgattttttgacatattggagtgtattgggtgcgttcgtggcaaaaaatcacttcgtgattcgcgcggtgaacttttgttaattgatgccaatattggcacacatgggtgcgatgttttcgaccggaatgcaaaagttcaaaaagcaccaaaacatgatttttggacatattggagtgtattaggtgcgttcgtggcaaaaactcactttgtgattcgcgcggcgaacttttatcaattaatgccaatattggcatatattggcacacgtggatgcgatgtttttca

SEQ ID NO: 65228 - DNA, 3403 bp, Oryza sativa
  Clone ID: PAT_MRT4530_66297C.1
atgtttttgactggattcaaaaagttcaaaaagcatccaaacatgatttttggacatattagagtgtattgggtgcgttcgtggcaaaaactcacttcgtgattcgcacgacgaacttttgtcaataagtgccaatatttagcacatataggcccacacgggtgcgatgtttttgaccggaatgaaaatgttgaaaaagcaccaaaacatgatttctggacatattggagtgtattgggtgcgttcgtggcaaaaactcacttcgtgtttcgcgcgggaactttcgtcaattaatgtcaatattggcatatattgagcccccacgggtgcgatgtttttgaccgcattgaataagttcaaaaagcatccaaacatgaattttggacatattggagtgtattgggtgcgttcgtggcaaaaactcacttcgtgattcgcgcgggtacttttgtcaattaataccaatattggcatatgttgagaccccacgggtgcgatgtttttgaccggaatgaaaaagttcaaaaagcaccaaaacaagatttctggacatattggagtgtattgggtgcgttcgtggcaaaaactcacttcgtgattcgcgcgggtacttttgtcaattaataccaatattggcatatcacgggtgcgatatttttgaccggaatggaaaagttcaaaaagcaccaaaacaagatttctggacatattggagtgtattgggtgcgttcgtggcaaaaactcacttcgtgattcgcgcgggtacttttgtcaattaataccaatattggcatatgttgagaccccacgggtgcggtgtttttgaccgcattgaataagttcaaaaagcatccaaacatgaattttggacatattggagtgtattgggtgcgttcgtggcaaaaactcacttcgtgaatcgcgcgggtacttttgtcaattaataccgatattggcatatgttgagaccccacgggtgcgatatttttgaccggattgaaaaagttcaaaaagcatccaaacatgaattttggacatattggagtgtattgggtgcgctcgtggcaaaaactcacttcgtgattcgcgcgggtacttttgtccattaataccgatattggcatatgttgagaccccacgggtgcgatgtttttggccggaatgaaaaagttcaaaaagcgccaaaacttgaattttggacatattggagtgtattgggtgcgttcgtggcaaaaactcacttcgtgaatcgcgcgggtacttttgtcaattaataccgatattggcatatcacgggtgcgatgtttttgaccggaatgaaaaagttcaaaaagcgccaaaacatgaattttagacatattggagtgtattgggtgcgttcgtggcaaaaactcacttcgtgattcgcgcgggtacttttgtcaattaataccaatattggcatatgttgagaccccacgggtgcgatgtttttgaccggaatgaaaaagttcaaaaagcaccaaaacaaaatttctggacaaattggagtgtattgggtgcgttcgtggcaaaaactcacttcgtgattcgcgcgggtacttttgtcaattaataccaatattgccatatacgggtgcgatgtttttgaccagaatgaaaaagttcattaaggcaccaaaacatgaattttggacatattggagtgtattgggtgcgttcgtggcaaaaactcacttcgtgattcgcgcggcgaacttttgtcaattaatgccaatattggcacacgagggtgcgttgtttttgaccggaatgaaaaagttcaaaaagcaccaaaacatgatttttggacatattggagtgtattgggtgcgttcgtggcaaaaactcacttcgtgattcgcgcggcgaacttttgtcaattaatgccaatattggcacacgagggtgcgtttttttttgaccggaatgaaaaagttcaaaaagcaccaaaacaagatttttggacatattggagtgtatttggtgcgttcgtggcaaaaactcactttgtgattcgcgcggcgaacttttgtcaattaatgccaatattggcatatattgagcccgacgggtgcgatgtttttttgaccagaatgaaaaagttcaaaaagcaccaaaataagacttttggacatattggagtgtatttggtgcgttcgtggcaaaaactcacttcgtgattcgcgcggcgaacttttgtcaatttatgccaatgttggcaccgacgggtgcgatgtttttttgaccggaatgaaaaagttcaaaaagcaccaaaataagacttttggacatattggagtgtatttgataagttgggttttcgaatacaagcagacggacggtctagccgacacgtgcactgcaagcgaagtagcaatggctaaacttacaattaatcaaaacccgcgatactctgaaggggtaccaagctatttatagagataggaggaccctaggtcgtcctccacctgattggggcgcaccccacatgggccccacttgggccggggtcccagacgaagttacaagcccataggcccattacaggtgtcgcagcaccttgtttcttcagttgttactgactgagatgaaatttggcaatgaggcttgatgcattggaaagaggactccgagagctttccatcaagtactcacgggctgaaaacggaggtcgtatggagcttcgacccaatacattccaatatgtccaaaaatcatgttttggtgctttttgaactttttcattctggtcaaaaacatcgcacctaggtgtgccaatactggcattaattgaataatgttccccacgcgaattacgaagtgattttttttgccactaatgcacccaatatactccaacatgtccaaaaatcatgttttggtgctttttaaactttttcatgccggtcaaaatcatcgcacccacgtatgccaataatggcattaattgacaaaagttcgccgtgcgaatcacggagtgattttttgccacgaacacacctaatacactccaatatgtccaaaaatcatgttttggtgctttttaaattttttcattccggtcaaaaacatcgcacccacgtgtgccaatattggcattaactgacaaaagttcgccgcgcgaatcacgaagtgagtttttaccacgaacgcacccaatacactccaatatgtccaaaaatcatgttttggtgctttttgaactttttcattccggtcaaaaacatcgcacccacgtgtgccaataatggcattaattgacaaaagttcgccgcgagaatctcgaagtgagttttttccacgaacgcacccaatacactccaatatgtccaaaaatcatgttttcgtgctttttgaactttttcattccggtcaaaaacat

SEQ ID NO: 65229 - DNA, 1374 bp, Oryza sativa
  Clone ID: PAT_MRT4530_66298C.1
atggaaagtgaagataagttggatttgattttgaggcggatggaggaattcgaacggaggcgggtggaagcagatcagagaaggagagctgaataccagtctctcaaggtggcggtagaatcgtggatgcctgaaatccataagaatgctgaagacctgcagattttgtgccccaatggcagcagcccgagcacaacagcgagatccatctacgacgacgaggggactactccgacgatcatcctggagcttggggatggtgaggacaagattcatgaccctgacatcgtcgccaaggtctctcttgaggtcacacccaccatgtgttcgatgaaatgctctgtccccgacaccgagtccaatctcatcatggttgcggaggtgacctatgccagcacagccactgtctctatggagttggtagctgctcaggaagccattggtgccacgtacagcgacacctctgaccattccaagttgacgcacaccaagtgtttgacggttgtcctcgatgccattggtgacaccgtgcataagatattttggagtgtgatgatcaaatcagtgagacatgtaccaagcatcagtagtgagctggatgacatccaagggaaatccactaggatatttattgttgttaaaattcctgaaggatgtaatccaaagaaatcaagctctgcgacaacagaaacacaagtatcacatttattcaactcattctcagaactattagatgtgcacttgaccactactgaaatgagccaagaagttcgttgttggcagggagctcttgagttgcaagtcagtgtgatcttctggttactggcaaggaacatccatcctcctaaaattgaagtacaagtactggagtttttattgagggtgctcattggcagtttaagtgaaaaatactctgaaaagtggacttcaggatcagtaccatcctcatatattgctcttgctgacaagtacaagacttcaagtttttccatggtctattgcagtaaactgaatcactctcacaaaacaataattgtgcacttactgatcaggaacaagctcaagacatggatatctgaaatgattggaagaactgatcgtgttgatgctaagttcacaattgtttgtcagctatcaagatcacttcaatctgggacacatattcttgacctttattctgcagaggagcacatttttgacaatttccttaatgctatcatgtggtgttcagttcctatcaagaatctacataaacagtgggaccctggtggctctggtgatactttgcatcggcttggggacaagccgaaatttaaggagaggagattgttaggaacccaaatgggctgtcaaccactttcaaagcaaggctga

SEQ ID NO: 65230 - DNA, 510 bp, Oryza sativa
  Clone ID: PAT_MRT4530_66299C.1
gggtttggggttttttttttttttttttttttttttttttttttttttttttttttttttttttttttttttttttttttttttttttattaaaaacctaaaagaaattatgggaacccaagccttgggattagagttccccaaacagggcggctgggatggggtaaaacagggcggggaaagaacaaccaacaaagggaaggcccccctttgggggtctttttaaaagggtgggggggcttgcaactccataaaccaatataccccccctataggcccaggctatgggccccaaagagaccaccctacttataaactcacacttgctgggaataaaacccaactaaaggaatgggcttggtcttttttaaaacaagtcacaaaccccaattgggtagggaaaaatgaatggccaagaaaagagaacaaaatctttccattcgggcatcaaaggacttgaggggcggctttaaaggcgacattaaaacgggtttccatgggttgccaccc

SEQ ID NO: 65231 - DNA, 474 bp, Oryza sativa
  Clone ID: PAT_MRT4530_6629C.1
cgccatcatgaccccgcggaagcgcgccgcgatgcgcgcgttccgcgcgcggcacatgacctacaccgtgtgctacgacgcggtgcggtacgcggccgggccgttcccggagtgcgacgtctctgacgtggagaaggagtccttctcggcgtggggcgagtccaagaacgtcgtcatgaaggcgcgtggccgcgggcgccgccgaggacgcaaggccggcgtcgccggcgccggagccatgtcgcgcctcgacgtgtccagcagctgaagtgtcaacttgggaagctaatggcatatgatggttactattacactactagattctattaattttgcggtattgattgattaattgtagtatggttttccatgtatgtatagtttgtaaaggtagtaggtgctagggattaagttcggtaccaatttcgactattaaaaaaaaaaaaaaaaaataaaaaaaaaaaaacctcgtgc

SEQ ID NO: 65232 - DNA, 295 bp, Oryza sativa
  unsure (1)..(295): unsure at all n locations
  Clone ID: PAT_MRT4530_662C.1
tggttttttaaatctttggggttataactttctctnnatttcattttgtctattattttttttcatactccctacagctccttaatcttgccctaaacctactaggcctcccagagctgcctgctttcaacccaaatcnnggcatcccttgacagcgaactcgaacttcctattgtcggccaatggcagcacaggacaccatcccgtaaaatcttgacggcgcaacagatgttttctaacaaccttgtcgagcgagaaccccggcttaccgcacaaatttgtgatgaccgcccta

SEQ ID NO: 65233 - DNA, 1604 bp, Oryza sativa
  Clone ID: PAT_MRT4530_66300C.1
ctccctttgtcccattgtaagtgtagtgggttttcgtcttccaaagctgtcaccaccggcaccggagaaatcaccaccgccagtggaacctccagcatcaccaaagcttccagctgggtttccaccaaaactaccatcaccacctaagttgattccagagaaggcatctgcagatccttctgcaactccataaccacctccaccaccacccctgttgccataccctccattgttgccaccataaccaccgccgcctccttggtagccgccgccgccaccaccaccaccactgtagccaccaccgccatagccaccaccaccactgtagccaccaccaccatagccgccaccgccgccgccatagccaccgcctccatagccaccacccccactacggaagccaccacccatggtgacatctactcaccctcctccaccattcaagccccctccatccctccagccaaaaaaaccataaaccccacgagccgagcaacaacagcgcaacactaatagatcgtctatcttacgaaccacggagatctccacgaaccctaacgcaccccgcacaccgccaaccaactaaacaaacgcatccacccacccagccaccaaaaagccccccaaaagaatgggggacagattcgcaccaaatcgctggatcacaccgacgcgcgaagaaccccgcaccaccaccaccccctccaaggcctccctcgccgccgaccaggcccgcaccatcaagcgatcccactcctcctcctcctccccttgttcgtcgtctccgcggaatcgatcgcgccgcgcgcccacgcccttcctccctcccggatccggcgcgtaaggtgcgtgcccttcccgaatccgcgtccccaccccgcgggccgtttcgagcccccccgccgccgccgtggtgcgtctcgaagctgagccccacggcgccgtcgccgccgccgcaggccgcggtctgcaggtcctgttctccaccgaccccgccaccaccacccgctgctgcagccgctctgcaacgctgccgccgccgccacggcgcagagctcggccaagtccgcgccaccgacgccgcagccgcaccagcagttgcccgccgccgccgcgcacctatccgccacgacgcacctgtccgccatcgccgccgcggcggccgccccctcccccggcctccccgcccgcgcccgagagccatcgcccgccgcgctcgagcgccgccaccccgccacgcccgagagccgccgtcccgcctcacccgagcgctgccgccaggtccgcctgtcgtcgctgccgccaggtccgcctgtcgtcgctgccgcggcggccgccgccccctccccctgtgggccccctacccccctcatctctctccaacgtacccacacagcgtcccacctcgccgccggagccgcccacgagatcgccgtcctctgcgacgtcgacgtcgccgccatcgtcttctccgccaagggcaacctcttccactacgcctcctcccacaccaccacgccaaccgcggcccccacgtccgcggtcgcggccacagttggttgccatggcgcgttgccgacggcgacccattgcccctgatgagg

SEQ ID NO: 65234 - DNA, 2293 bp, Oryza sativa
  Clone ID: PAT_MRT4530_66301C.1
ttgtttttgaccggaatgaaaaagttcaaaaaacgccaaaacatgatttttgcacatattctagtgttttggcaccgttagtggaaaaaactcacttcgtggttcgcgcggcgaacttttgtgaattaatgtcaatattggcatatgttgagcccccacgggtgcgatgtttttgaccggaatgaaaaagttcaaaaagcacaaaaacatgattttctgacatattgcagtgtattgggtgcgttcgtggcaaaaactcacttcgtgattcgcgcgacgaacttttgtcaattaatgccaatattggcacacgagggtgcgttgttttttgttcggaatgaaaaagttcaaaaagcaccaaaacatgatttttggacatattggagtgtattgggtgcgttcgtggcaaaaactcacttcgtaattcgcgcggcgaacttttgtcagttaatgccaatattggcatatgttgagccccaggggtgcgatgttttatgaccggaatgaaaaagttcaaaaggcaccaaaacatgattttttgacatgttggagtgtattgggtgcgttcgtggcaaaaacttacttcgtgattcgcgcggcgaacttttgtcaattagtgccaatattggcacacgagggttcgttgttttttgttcggaatgaaaaagttcaaaaagcaccaaaacatgatttttggacatattggagtgtattgggtgcgttcgtggcaaaaactcacttcgtaattcgcgcggcgaacttttgtcagttaatgccaatattggcatatgttgagcccccacgggtgcgatgtttttgaccggaatgaaaaagttcaaaaagcaccaaaacatgatttctggacatattggagtgtattgggtgcgttcgtggcaaaaactcacttcgtgattcgcgcgacgaacttttgtcaattaatgccaatattggcatatattgagcctccacgggtgcgatgtttttgaccggaatgaaaaagttcaaaaagcatccaaacatgaattttggacatattggagtgtattgggtgcgttcgtggcaaaaactcacttcgtgattcgcgcgggtacttttgtcaattaatgccaatattggcatatattgagccccacgggtgcgatgtttttgaccggaatgaaaaagttcaaaaagcgccaaaacatgaattttggacatattggagtgtattgggtgcgttcgtggcaaaaactcacttcgtgattcgcgcgggtacttttgtcaattaatgccaatattggcatatattgagcccccacgggtgcgatgtttttgaccggaatgaaaaagttcaaaaagcaccaaaacatgaattttggacatattggagtgtattgggtgcgttcgtggcaaaaactcacttcgtgattcgcgcgggtacttttgtcaattaataccaatattggcatatgttgagaccccacgggtgcgatatttttgaccggattgaataagttcaaaaagcatccaaacatgaattttggacatattggagtgtattgggtgcgttcgtggcaaaaactcacttcgtgattcgcgcgggtacttttgtcaattaataccaatattggcatatgttgagaccccacgggtgcgatgtttttgaccggaatgaaaaagttcaaaaagcaccaaaacatgatttctggacatattggagtgtattgggtgcgttcgtggcaaaaactcacttcgtgattcgcgcgggtacttttgtcaattaataccaatattggcatatcacgggtgcgatatttttgaccggaatgaaaaagttcaaaaagcaccaaatcttgaattttggacatattggagtgtattgggtgcgttcgtggcaaaaactcacttcgtgattcgcgcgggtacttttgtcaattaataccaatattggcatatgttgagccccacgggtgcgatgtttttgaccggaatgaaaaagttcaaaaagcaccaaaacatgaattttggacatattggagtgtattgggtgcgttcgtggcaaaaactcacttcgtgattcgcgcgggtacttttgtcaattaatgccaatattggcatatattgagcccccacgggtgcgatgtttttgaccggaatgaaaaagttcaaaaagcaccaaaacatgaattttggacatattggagtgtattgggtgcgttcgtggaaaaaactcacttcgtgattcgcgcgggtactttggtcaattagtgccgacctgcaggcatatattgagcccaacggtgcgatgtttttg

SEQ ID NO: 65235 - DNA, 1731 bp, Oryza sativa
  Clone ID: PAT_MRT4530_66302C.1
atggaaggtgaggataagttggatttgattttgaggcggatggaggagtttgaacggaggcaggtggaggcagatcagaggagagctgaataccagtctctcaaggcggcggtagaattgtggatgcctgaaatccagaagaatgctgaagacctacagtttttggttggggatgagcagtccaaggtgacgctcaccacctgttcgacagagtgccctaatggcagcagcccgagcagaacagcgagatccatctacgacgacgaggggtctactccaacgatcatcctggagcttgggggtggtgaggacaagattcatgacccttacatcatcgccaaggactctcttgaggtcacgcccaccatgtgttcgatgaaatgctccatccccgacaccgagtccaatctcaccatggttgcggaggtgacctacgctagcacagccactgtctctatggagttggtagctgctcaggaagctattgatgccacgtacagcgacacctctgaccattccaaggtgatgcacaccaagtgtttgacggttgtcctcgatgccattggtgacaccggtcaagctatggttgtgttccagacctggacagatgcattcaaggatgttccgacctccgttcagttcatggactttttctcatcaagtatgatggctaacatcaagtggaacacaccaatacccattaagtattcggtgcagttccttgggcatgacatgttggctacaaacgctcttgatgttaactcatggccacctccttggtcagatggagtgattagagaagccaagaaattcgttgttggcagggagctctttgagttgcaagtcagtgtgctcttctggttactggcaaggaacatcaatcctcctaaatttgaagtacaagtactggagtttttattgagggtgctcattggcagcttaagtgaaaaatactctggtaatactattgatcttgaggtgtgcttttcgaaaataggtatatgtttacacagagatgtccttaagttcccaatttcacaatcaacaaatgcctgcattacaattttgtgtgatcgacatgctgctttcagttttgacacaagcatggagtggaatagtgatacaagaaaaatcatacaagaaacaatgagcttactggagcattcagtgatgatttttaccagcatgctggacctacattggtctgtaattaatacagaaaagtggacttcaggatcattaccatcctcatgtattgctcttgctgacaagtacaagacttcaagttttgccatgctatcaagatcacttcaatctgggacacatattcttgacctttattctgcagaggagcacatttctgacaatttccttaatgttatcatgtggtgttcagttcctatcaagaatctacataaacagtgggaccccggtggctctggtgaaactttgcatcggcttggggacaagccgaaatttaaggagaggagattgttaggaacccaaatgggctgcctgtgggctgtcaaccactttcaaagcaaggcccaagcaagcaaatcaggagcacatataaacagcaggagcagcaccagagaggagatcgaacagagaacaacagaaccggttgaggggcttctcggcggcgacggcggcggcggcgacctggaaccgggcttggttccttgtcgatctttactctccctcttcttctacttgtctagaagctag

SEQ ID NO: 65236 - DNA, 397 bp, Oryza sativa
  Clone ID: PAT_MRT4530_66303C.1
tgaggacagattcatgacccttacatcatcgccaaggactctcttgagtgtcacgcccaccatatgttcgatgaaatgctccatccccgacaccgagtccaatctcaccatggttgcagaggtgacctacgctagcacagccactgtctctatggagttggtagctgctcaggaagccattgatgccacgtacagtgacacctctgaccattccaagatgatgcacaccaagtgtttgacggttgtcctcgatgccattggtgacaccggttaagctatggttgtgttccagacctggacagatgcatttcaaggatgttccgacctccgttcagttcatggactttttctcatcaagtatgatggctaacatcaagtggaacacaccaatacccat

SEQ ID NO: 65237 - DNA, 2631 bp, Oryza sativa
  Clone ID: PAT_MRT4530_66304C.1
atgtttttgactggattcaaaaagttcaaaaagcatccaaacatgatttttgagcatattggagtgtattgggtgcgttcgtggcaaacactcacttcgtgattcgcacgacaaacttttgtcaataagtgccaatatttagcatatataggcccacacgggtgcgatgtttttgaccggaatgaaaatgttgaaaaagcaccaaaacatgatttttggacatattggagtctattggctgcattcgtggcaaaaactcatttcgtgattcgcgcggcgaacttttgtcaattaatgccaatattggcatatattgagccttcacgggtgcgatgtttttgaccggaatgaaaaagttcaaaaagcaccaaaacatgaattttggacatattggagtgtattgggtgcgttcgtggcaaaaactcacttcgtgattcgcgcgggtacttttgtcaattaataccaatattggcatatgttgagagcccacgggtgcgatgtttttgaccggattgaataagttcaaaaagcatccaaacatgaattttggacatattggagtgtattgggtgcgttcgtggcaaaaactcacttcgtgattcgcgcgggtacttttgtcaattaataccaatattggcatatgttgagaccccacgggtgcgatatttttgaccggattgaataagttcaaaaagcatccaaacatgaattttggacatattggagtgtattgggtgcgttcgtagcaaaaactcacttcgtgattcgcgcgggtacttttgtcaattaataccaatattggcatatgttgagaccccaccggtgcgatatttttgaccggattgaataagttcaaaaagcatccaaacatgaattttggacatattggagtgtattgggtgcgttcgtggcaaaaactcacttcgtgattcgcgcgggtacttttgtcagttaataccaatattggcatatgttgagaccccacgggtgcgatatttttgaccggattgaataagttcaaaaagcattcaaacatgaattttggacatattggagtgtattgggtgcgttcgtggcaaaaactcacttcgtgattcgcgcgggtacttttgtcaattaataccaatattggcatatgttgagaccccacgggtgcgatgtttttgaccggattgaataagttcaaaaagcatcaaaacatgatttctggacatattggagtgtattgggtgcgttcgtggcaaaaactcacttcgtgatttgcgcgacgaacttttgtcagttaatgccaatatttgtaccccacgggtgcgatatttttgaccggattgaataagttcaaaaagcaccaaaacaagatttctggacatattggagtgtattgggtgcgttcgtggcaaaaactcacttcgtgcttcgcgcgggtacttttgtcaattaatgccaatattggcatatattgagccccacgggtgcgatgtttttgaccggaatgaaaaagttcaaaaagcgccaaaacatgaattttggacttattggagtgtattgggtgcgttcgtggcaaaaactcacttcgtgattcgcgcgggtacttttgtcaattaataccaatattggcatatgttgagaccccacgggtgcgatgtttttgaccggaatgaaaaagttcaaaaagcaccaaaacatgatttttggacatattggagtgtattgggtgcgttcgtggcaaaaactcacttcgtgattcgcgcgggtacttttgtcaattaataccaatattggcatatgttgagaccccacgggtgcgatatttttgaccggattgaataagttcaaaaagcatccaaacatgaattttggacatattggagtgtattgggtgcgttcgtggcaaaaactcacttcgtgattcgcgcgggtacttttgtcaattaatgccaatattggcatatattgagccccacgggtgcgatgtttttgaccggaatgaaaaagttcaaaaagcaccaaaacatgaattttggacatattggagtgtattgggtgcgttcgtggcaaaaactcacttcgtgattcgcgcgggtacttttgtcaattaataccaatattggcatatattgagccccacgggtgcgatgtttttgaccggaatgaaaaagttcaaaaagcaccaaaacatgaattttggacatattggagtgtatagggtgcgttcgtggcaaaaactcacttcgtgaatcgcgcgggtacttttgtcaattaataccaatattggcatatgttgagaccccacgggtgcgatgtttttgaccggattgaataagttcaaaaagcatccaaacatgaattttggacatattggagtgtattgggtgcgttcgtggcaaaaactcacttcgtgactcgcgcgggtacttttgtcaattaataccaatattggcatatcacgggtgcgatgtttttgaccggaatgaaaaagttcaaaaagcgccaaaacttgaattttggacatattggagtgtattgggtgcgttcgtggcaaaaactcactttgtgaatcgcgcggtacttttggcaattataccgatattggcatatgttgagacccacggtgcatattttgaccggatt

SEQ ID NO: 65238 - DNA, 174 bp, Oryza sativa
  Clone ID: PAT_MRT4530_66305C.1
gagcattgatgtcatcatctgaggcagagggcgcaacaatatagtcggcaggctatttgccagaaggggcaatcgatgatgcagcaggtgccggctgatgctagctatgtcaggacagccagatggtcaggcccaggcgcagagaggctatcatcctggcctccatgtgtggag

SEQ ID NO: 65239 - DNA, 398 bp, Oryza sativa
  Clone ID: PAT_MRT4530_66306C.1
cggcacgaggcttaatttgtcggacggctggaacctacgaaatcacatttatctatatactcctatggatctagttagtgtagtttatcatttcgcctatctttgtcatgcaatattattagattaattatttatttatcatagcttctatcatttttcttaaccgtgttaataaagtggctgacctggcactactggaaaatcatttttttgtgagggccccacagatttcgtgatggcgatgtaaacacagtcaccaagaagacatatcatgacaggcattagaacaccatcacgaaattgggtgtttcgtgactaggaagagcagccagtcaacgagttatagagttggtgacggtgcagtaatataaagccctcaccatactgtgtgatggact

SEQ ID NO: 65240 - DNA, 381 bp, Oryza sativa
  Clone ID: PAT_MRT4530_66307C.1
atgtccatttccatgacgtcgacggcggcggcggtcgccgtggcgctcctcgtcgtcgccggcggcgccgggctcgcggcggcggggacgtcggacctgtgcggcctcgcggagacggcgttcggcgagtgcacggcgtacgtcgccggaggggagcccgcggtgtcgcgccgctgctgccgtgccctcggcgacatcagggacctcgccgccaccgccgcggagcgccgggccgtgtgcgcgtgcatcctgtcggagatgctcgccgctggcgacggcagggtcgactccggccgcgccgccggcctccccgccgcctgcaacgtccgagtcggcttcatcccgaccagcccaaacttcaactgcttcagggttcgttga

SEQ ID NO: 65241 - DNA, 838 bp, Oryza sativa
  Clone ID: PAT_MRT4530_66308C.1
gcacgagatgaagatcatcccggtcgcttgcctggaggacaactatgcctacctgtaccctcctgaatccatccttgtcagttgtctaatcgtggacgagagcaccaagtcggcggcggccgtcgaccccgtggagccggagaaggtgcttgcggcggccgcggaggtcggcgtccgcatcgactgcgtactcaccacccaccatcactgggatcatgctggtggcaatgaaaagatggcgcagtcagtgccagggattaaggtctatggaggatccctggacaatgtgaaaggatgcactgatcaggtggagaatggaaccaaattgtcccttgggaaggacattgagatactatgcctgcacacaccgtgccacacaaaaggacatatcagctattacgtcactagtaaagaggaggaagatccagcagtgtttactggagacaccttgttcattgctggttgtgggagattttttgagggcactgcagagcaaatgtaccaatccctttgtgtaacactgggctcgctgcctaagccaactcaagtttactgcgggcatgagtacactgtgaagaacctgaaattcatactgacggtcgagccagataacgaaaaagtgaagcagaaactagaatgggctcaaaagcagcgtgaagcaaaccaaccaactattccatcaactataggagaggaatttgagacaaacaccttcatgcgtgttgatctgccagaaatacagataatgccatcgatcttgcaggcaaagtttggtgccaagtcgccagttgaggccctgcgagaagttaggaagaccaaggataactggaaaagttaa

SEQ ID NO: 65242 - DNA, 1227 bp, Oryza sativa
  Clone ID: PAT_MRT4530_66309C.1
atggctaaggcaatcaagttggtccttactaaagcacaccacaggatttgtgtttggcatatgaaccaaaatgcatgcaagcaccttgctggagtggtgaaagattataagaagttcaatgctgcattccagcactgtacctatgatattgaagaggaagatgaatttttgaatgcatggcatgcaatgctcaatatgtttgaattacaggacaataaatggctcgaaagactatttgacaaaagagagcattgggcactagtgtatggaagaaatactttttccgctgacatgagtagtacccagaggagtgaaagcatgaacaatgaattgaaagtagtattaaataaaagattagaggaggtgaagtgtgacttcaaagcaacccaaactactcccaaattgaaggcagaactaaatatattgaggcatgcatcaagagtttatactgcagcaatgttcaagattttccaggatcaagtgctacagacattgaattgcgacatattcttttgtgctagtagcgatgcagagaaggtgcttgatattaataacgtaaagtatatccctgaacattatatcatgaaaagatggacaattgatgcaaaagctctacagattacaaggaattgtaacctgcaggaagattcaaaaacaattttgtctaaccgctacaaggagttatgcagaatgtttgttcaaatagctgcacgagctgcaaactcaaaagagtcctactttatggctgctaattgtgcagagaaattagcacaggatgtggaaaaatgcttacaaattagatctgatccagatatggatgacttgcctacttcacaagatgcaactgttcacgctagtataattccaaaacaaaacgaagaggttgttaaaccaagaggtataaaggtcaagccaaagactattttaggatcaagaagacatgttagtggtttagataaatcaaaaagaaggagaacaaagaacaaagttcaatctgtaccagaagcacatcacattgacacactgacgccaatagcaaccacttctattcgaatgcctgaacaatatgataacttcatgggtcattttcaggtcccaatgacgcaaccttacatgttttggccacattacaattcagtcccaagtgcttcaccgcagccattcgttgatataactgctctgatgactgaacaaaataaaggcttgcagcaacagaagccattttaa

SEQ ID NO: 65243 - DNA, 294 bp, Oryza sativa
  Clone ID: PAT_MRT4530_6630C.1
cgcgcattctctcatccacactgctcttcccccccgcgcgccggccatggccaccgcgacgctgcccctccgcctgctagcgtacaaaaccctaggggtcccctccgccccgtccctcccggcctcgcgatgctccctccccgtcgccgcgtccgcgccccgccgctgctggcggctcctcgcttccgccgaggagccggcgcccgcacccgtggaggcccacgcccatgcggacgtggcagaggaggaggaggctgaagaagaagaagctgcaacgcacaaatcagacaaggt

SEQ ID NO: 65244 - DNA, 444 bp, Oryza sativa
  Clone ID: PAT_MRT4530_66310C.1
ggtcatctcaagtatgaggataatgatgacagaagamtcgaataamgcagagaggcarttcttttctttgctgggacgawgawwtcaagcawtccgtttttcartggatagatatctcaaaagtcaatagaaagaaaattgaggttwacagatagtttgacatagcccgccwtttgatcagrggagaacwcttkgcttttacmtttyctacactwaaaaargrctattcwaagagtwkgtggathmcttttcaatagcgaaaamaaactttcctcwtactwcctttttgtgyccaacwacatwctyycaacawtgtggcgataaacwacatmgtgacatmactcacrmgtggcscgtkttttgysccttttttwhcaaaaaaacacataggggctagtvmtgkggtgcagtgaaaacgtktwgggsctcattttgtgtatttat

SEQ ID NO: 65245 - DNA, 252 bp, Oryza sativa
  Clone ID: PAT_MRT4530_66311C.1
atggcgcatccatctccctccctcctgtttctttctcagatccggttctccccttcttcagtggttgttcttcctgtgctcactggcggtgaaaacccggttcctttcggaatgagcattgatagcatccttgatgttgttcccttgttagaggctctgcttagaagaccaacgtatatccacaacaaaaacaatgatcctttgggaaacttaaggttccaatttgtgtttgctagtataaacaggtactaa

SEQ ID NO: 65246 - DNA, 2349 bp, Oryza sativa
  unsure (1)..(2349): unsure at all n locations
  Clone ID: PAT_MRT4530_66312C.1
ccctttttcctcctctctcctcttcccctctccaagggtcccggtctccttcctcctctcttcccggccgcctcgcctcgcctccgccttcccgatcgcaattcgcctcctcctcctcccacccatggcgcggcgatccgcccccctcctccgccgcatcctctcctccccggcccccgccccggcgcaccatggcggcgccggcgcgcgccgcacggtgacctacatgcccaggccaggggacgggaacccgcgcgccgtgacgctgatcccgggggacgggatcgggccgctcgtgacgggggccgtgcagcaggtgatggaggtgatgcacgcgccggtctacttcgagacctacgaggtccgcggcgacatgcccaccgtgccgcccgccgtcatcgagtccatccgccgcaacaaggtgtgcctcaagggcggcctcgccacccccgtcggcggcggggtctcctccctcaacatgcagctccgcaaggagctcgacctctacgcctcgctcgtcaactgctccaacttccccggcctccccaccaggcaccaggacgtcgacatcgtcgtcatcagggagaacaccgagggggagtactcggggctcgagcacgaggtcgtgcccggcgtcgtcgagagcctcaagttttgctctgagaggattgccaaatatgctnttgagtatgcttaccttaacaaccganagaaagtcacagcagtgcataaagcanacatcatgaagcttgctgatggtttgttcttggaatcttgccgtgaggttgcctcaaagtatcctggtattcagtataatgagatcattgtcgacaactgctgtatgcaacttgttgcaaagcctgagcaatttgatgtcatggttacaccaaacctttatggcaatttggttgctaacacggctgcaggtattgctggagggacaggtgttatgcctggaggtaatgtgggtcaggaccatgctgtctttgagcaaggtgcttctgcaggaaacgtcggaaacgagaacatcttagagcagaagaaagcaaaccctattgcgctgcttctatcatccgccatgatgttgaggcatttgcagttcccgtcattcgccgaccggctggagacggcggtgaagcgtgtcattgcggaaggcaatataatggcataccatggacagctggatggacgccaagcttcaggtttgatgcgtgatggcgccttccctgcagccagcctttctggccgccaacctttggatcgcgctgccaccgctctggagatcttggaaaagaaacttgctgagcagaccgccgaggcagaaaagcttatcagagagaatcagcgattggcatctagccatgtcgtcttgaggcaggatattgttgatactgagaaagaaatgcaaatgatccgtgctcacctaggtgatgttcagacagagactgatatgcatatgagagatttgatggagagaatgagattgatggaagcagatatacaagctggtgatgcagtgaagaaggaacttcatcaagtgcatatggaggcaaagagacttattgctgagaggcagatgctcactgttgagatggataaagtaactaaagagctacataagttctctggtgacagtaagaaacttcctgaattactgactgagctagatgggctccgaaaagagcatcagagtctaagatctgcttttgaatatgagaaaaacacaaacatcaagcaagttgagcagatgcggacgatggagatgaatttaatgactatgaccaaagaggctgacaagttgcgtgctgatgtggcaaatgctgaaaaacgagctcaagggtacacacaggccgctttgcccggttatcctagtgcgtatgctgcaccgcagcaaccaataagcagtggtgtagctacagatgttgcaagcatgtatggcgcgatcagtagtgctggatatcctgctggagttgttcagtcaagcagtggagctgccaatgcaggacaagcaccagctacttatcctgtcgcatacgacccaaccagagcaggccagaggtgaaatcgtagtttcagtctcagacccaaatcactatttgctaaacccattttgtggtgtagctgtagtaagatccttggagaggccaacaacagcatggctctagttcgtttttcttgtagattccttccctatacattttagcggtcaatgaaaattagttgtatatcgaattgctgctcttggttcgatacttgaatttaattagttgtataccgaatagatcacggtcaacttgaatctctgtaattcccggttaagaacgacacccggcaattttctgaatgctt

SEQ ID NO: 65247 - DNA, 1946 bp, Oryza sativa
  Clone ID: PAT_MRT4530_66313C.1
ctcgaagaccgatcgcatccgcctccaaaccctagacgcggcggccatggcgcggcgatccgcccctctcctccagcgcctcctctcccccactccctccccctccccctccccgccccatcctctcgccgccgccgccgtctcccgccgcaccgtcacctacatgccgcggccgggggacggcgccccgcgcgccgtcacgctcatcccgggcgacggcatcgggcccctcgtcaccggcgccgtgcggcaggtgatggaggccatgcacgcgccggtctacttcgagtcctacgaggtccgcggcgacatgccgacggttccccccgaggtcatcgactccatccgccgcaacaaggtctgcctcaagggcggcctcgccaccccagtcggcgggggtgtctcctccctcaacgtgcagctccgcaaggagctcgacctctacgcctccctcgtcaactgcttcaacctcccggggctccccaccaggcaccacgacgtcgacatcgtcgtcatcagggagaacaccgagggggagtactccgggcttgagcacgaggtcgtccctggcgtcgtggagagccttaaggtgatcacaaagttctgctctgaaaggattgccaagtatgcttttgagtacgcgtacctcaacaacagaaagaaagtgactgcagtgcataaagcaaacatcatgaagcttgctgatggtttattcttggagtcttgccgtgaggttgcaacaaagtatcctggaattcaatataatgaaatcatcgtggacaactgttgtatgcagcttgttgcaaagcctgaacaatttgatgttatggtcacgccaaatctttatggcaatctggtggctaacacggctgcaggtattgctggaggcactggtgtcatgcctggaggtaatgtgggtcaggaccatgctgtcttcgagcaaggagcttctgcaggaaatgttggaaacgtcaaagttgtggagcagaagaaagctaaccctgttgctctgctcctctcatctgccatgatgttgcggcatttgcaattcccatcattcgctgaccggctggagacggcggtgaagcgtgtcatcgcagaaggcaagtacagaaccaaagacttgggcggcagcagcaccacgcaggaagtcacggatgcagtgatcgcgcatcttgattaattgctggccggctgcgttcttttgaaacaaaattttccctttggactaggtgtctagtcccgactgattttcgtttcttatagcgttagatcatcatttcgttcgtcacagccttgtacaatcttcaggtgtcttgtgtctggtggattttgcttcggaatgatggagcaaatcaccaggaatccaggatcgatttttaacgcaatgtttttgcggtcttaactggaaataagagagaacgattctcttaactgtaacactattgcgttgattacttctacttattattacatattctgatctttactataatgataatgtctgcctgatttccttgtcctgcttctgagcctggcgcatccgtccccaccccgccgcgccggcgccgtggtcctcgtgtccgtcgctgccccaaatcactatttgctaaacccattttgtggtgtagctgtcgtaagatccttggagaggccaacaacggcatggctctagttcgtttttcttgtagattccttccctatacattttagcggtcaatgaaaattagttgtatatcgaattgctgctcttggttcgatacttgaatttaattagttgtacaccgaaaaaaaaaaaaaaaaaaaatctcgagactagttctctctctccctcgtgccgaattcctgcagcaagaggaaggttctcttaaaaaaaaaaaaaaaaaaaaaaaaaaaaaaaggagggcgacaactctggaggataccagctgacggacggggtgcat

SEQ ID NO: 65248 - DNA, 345 bp, Oryza sativa
  Clone ID: PAT_MRT4530_66314C.1
gtgaggggaccgctgctaacatgaactctttgcgatctcacatgcaggaactgcctgtcattttaggacatatcatgtcacacccagttctttgaaggggagactacatcagggaaaacaacctctaggaacaaactgatcatatgctgctacaggaggcgacaagtcacaggttatagatctctatactgaagactgcgtgaagtgcatagtatacagactgcgtgaaggtgtcctccttatcacctatggggaccttgtcctcgtcgatgttgctgacactcgtgacatgtgagccccgatggtcctggagatagaagtacctgagcgtgccaagcttcatgt

SEQ ID NO: 65249 - DNA, 1221 bp, Oryza sativa
  Clone ID: PAT_MRT4530_66315C.1
atggcataccatggacagctggatggacgccaagcttcaggtttgatgcgtgatggcgccttccctgcagccagcctttctggccgccaacctttggatcgcgctgccaccgctctggagatcttggaaaagaaacttgctgagcagaccgccgaggcagaaaagcttatcagagagaatcagcgattggcatctagccatgtcgtcttgaggcaggatattgttgatactgagaaagaaatgcaaatgatccgtgctcacctaggtgatgttcagacagagactgatatgcatatgagagatttgatggagagaatgagattgatggaagcagatatacaagctggtgatgcagtgaagaaggaacttcatcaagtgcatatggaggcaaagagacttattgctgagaggcagatgctcactgttgagatggataaagtaactaaagagctacataagttctctggtgacagtaagaaacttcctgaattactgactgagctagatgggctccgaaaagagcatcagagtctaagatctgcttttgaatatgagaaaaacacaaacatcaagcaagttgagcagatgcggacgatggagatgaatttaatgactatgaccaaagaggctgacaagttgcgtgctgatgtggcaaatgctgaaaaacgagctcaagtggcagcggctcaagcagtagcagcacaggcgggggtggcacatgtgactgcttcacaaccaggggcagcacaagctgtggcagtgccagctgcctcaaacccatattcaagtgcatttaccggtcatccctctgcatatcaccaaggagccacccaagctggggtttatcagcaagggaccacccaagctggggcatatcagcaaggatctacccaagctggggcatatgcttacccaacttatgatgccgctactgcttaccagatgcatgctgcgcaagcaaatgcatacgcgggctatcctggttatccagttgcagggtacacacaggccgctttgcccggttatcctagtgcgtatgctgcaccgcagcaaccaataagcagtggtgtagctacagatgttgcaagcatgtatggcgcgatcagtagtgctggatatcctgctggagttgttcagtcaagcagtggagctgccaatgcaggacaagcaccagctacttatcctgtcgcatacgacccaaccagagcaggccagaggtga

SEQ ID NO: 65250 - DNA, 1028 bp, Oryza sativa
  Clone ID: PAT_MRT4530_66316C.1
ggcggcggtttaggccgacctgctcccccgccgcctctcctgctcctcctcctcgcgcgcgcgccgccggcgaacggccgccgtatacttacccgcggtgcggacgggctcctcttatctcctcccccgaccgcatactaccccctctctctcccttgtgagccctcctcggcgcgcacggcccccgccgccggcgagcaggctcggaaccagggggggtgggggactcgacgcgacgagccctcgttccatcggcctctgtctccgttgagtctagcacgctctgtgggaggttcaaggtattcagtataatgagatcattgtcgacaactgctgtatgcaacttgttgcaaagcctgagcaatttgatgtcatggttacaccaaaccctttatggcaatttggttgctaacacggctgcaggtattgctggagggacaggtgttatgcctggaggtaatgtgggtcaggaccatgctgtctttgagcaaggtgcttctgcaggaaacgtcggaaacgagaacatcttagagcagaagaaagcaaaccctattgcgctgcttctatcatccgccatgatgttgaggcatttgcagttcccgtcattcgccgaccggctggagacggcggtgaagcgtgtcattgcggaaggcaagtacagaacaaaggatctaggcggcaccagcaccacccaggaagtcactgatgcagtaatcgccaatctggattagataccagccggtgcacgcctgagagattaattcttttgggggactagctcatttgtcccgactcccgattatttttgtttcgtatagagtttagatcgtcaatttgtacgacgcttcccaggaaggaatcgtgaggcaatatctgtttcttagttctgttccacaaataattcaggaacccacgaggagtattcttcacacgatgctgtgtaacaaggtaaagagaacaccttttgttgcaaagggaaatgctggcagccttaattcctttaactgaaatgattatgagagttgatt

SEQ ID NO: 65251 - DNA, 308 bp, Oryza sativa
  Clone ID: PAT_MRT4530_66317C.1
cctggagcaaaactatagcgctcaagcttatagacagctttcttttttaagagaacattttaaaggcaagggggttgccttgaataagttttaacatatgaaagcctccccaccaaatactggttactggattaaagtgacctgaacacatatataatttggtaaccgggctatgaacacccaattaaactaacggcggcaccattgacgattggcgtgaccaggggaattgacaggggcacgacctcgctgtgaccggggttggtatcctcccccaaaaacggggggggtggcaaaaacttcatgcg

SEQ ID NO: 65252 - DNA, 282 bp, Oryza sativa
  Clone ID: PAT_MRT4530_66318C.1
acatggaagataaatcagtctgacgatgtcgagaatcagacttatgcatgaatgggccaagaactcagaattaacacgtcaaactgggccaaaattcataagtctacaaaaaggagcaacagaggtggccgccagccgaaaggtgggctggttgggccggcccctagttcgaccgaacctccctcgcctccgttggatccaggttttggctggacggttgagatgaagccccaatgacggttggagggtattaccgaccattccaaccgtcacaaccgtcat

SEQ ID NO: 65253 - DNA, 291 bp, Oryza sativa
  Clone ID: PAT_MRT4530_66319C.1
atggcgaaggacaagaggtgcacggatcgctccggatatcgtggccacggccgcgactgtcccgcccgcacgacggcaccgtccggcatgatcttgcggggaaggctaaggtgcctgtctgctgtgatgcgggaggaagggaacactgtgtcgccggtgtcttgggccatggcaaccggcggagaaatggcggagagcgtggagcgcgagacatggcacactcaaggtgaagtgcgcaacggccatgagcgcaagttgagcaaaccgtcacaactaccgccgcaggagtag

SEQ ID NO: 65254 - DNA, 157 bp, Oryza sativa
  Clone ID: PAT_MRT4530_6631C.1
tttctaaataccactccgtgtttggactgtgtcgcaactcttacatctagaggattgatatgaaatcctgtagggacattgctacacacacctctgctcaatatcaactagagcccagggagtcctatccccaattgcgcattaacgatcacaggtc

SEQ ID NO: 65255 - DNA, 2385 bp, Oryza sativa
  Clone ID: PAT_MRT4530_66320C.1
atgggcatcgacctcaacaacaccgcgagcggcggcgaggaggacgcgccggcgccggggccggtgtgccgggatctgtggcacgcgtgcgctgggccggtggtgtcgctgccgcggcggggcagcgcggtcgtgtacctgccgcaggggcacctctccgcggccggcgccggcggcgggatccgcggggaggtggcggttgccctccctccccacgtggcgtgccgcgtcgtggacgtcgagctatgcgtatttgagaggaacttgcatggtggtggaatcgaaagggaggatgacatggaggatggtgatgaggaaaggaagtccaggatgctgcacatgttctgcaaaacactaacggcctctgatacaagcacacatggagggttctctgttcctcgtcgggctgctgaggattgctttccacctctggaccacaaacagctaaggccttctcaagagcttgttgccaaggatttgcatggagcaaagtggaggttccgccatatttatagaggtcaacctcgcaggcatcttttaacaactggatggagctcctttgtcaataaaaagaaactggtctcaggggacgcggtgttatttctccggggtgatgatggtgagctaagattgggtgttcgaagagctactcagcttaaaaatgaagcgattttcaaagcttttagtagcgaaagttcaaagatgcgcacactgtcggctgtggctgattccttgaaacatggaagtgtttttcacatttgttacaacccaagggctactgcttctgagtacgttgttccatattggaagttcgtgaaaagcttcaaccatccagtttgtattggaatgaggttcaagtttcattttgagagtgaagatgttaatgagaggcgttctggaatgattgccggtgttagtgaagtagaccccatcagatggcctggttcaaagtggagaagccttctggttcgatgggaggatgctactgactgcaacagccaaaatagagtatctccatgggagattgagatagttggtggttcaatctctgttgctcattctctgtcggcatccagttctaaaagaaccaaattatgccctcagggcaatttggacgtgccagctctgtatggaaatggtcgtccagactcggtggaaactgaaaagttccccagggtcttgcaaggtcaagaattgatgggttctaggacccatcgtgctacttgttctcctcagtcaatcgacattacaaaaagtaagtcttttgatgcttggagattccttactgatacacgaagctgcatgttgggcagttcaacaagcagacttccagtgcagtactctggctatacccaccaatctgtaagcttcggtgaatctattggattcccagaggtcttgcaaggtcaagaaatttctcagacagttcctccgtttcaaggaatgttgcctgatgcatgttcagcgaaaagcagatatgaattaaagaattatgtgtgcaccccagctaccatgaatggactatcatctgcaaatgaaggatattgtctctccctgtcaactgtgccaccttctccaccttccagtcttatgttataccaaacaggggtaccacagcttgaattggcaagcaagaacaatgacaaaagtggaaatgacagccaaccagccttgcgacagcacaagttgctcagtgaaactagctgggaccagtttaaaattggaaaggcttcaacacctgggaatgctactaagcctggtaatggtggaagggaggttgacagaactagttgccgcctttttggtttttccttgaccgagaagattatcccaacagacaaagatggtgaaaaggaagtgagttatgaaactgattgccaaaatccacggatgctagacttgtttgggtacaattgcagtacgcctggtgctcttcatgccctttgtgctgctcctttgggaatatgatgctacttgagtaactgggagggatacgtacatgtggagacgcagccactccacgcttcatcccagatgtaaacggcatcggtctggttatggtcccaccgttcctgatgctttgcatgtaggtattgctgcctcacgcctgaatacctacgtgcggtcaggcgaataaagcgactcgattgtatgtttgactgcagctctagctgtcgagtcggaagggcgatgatgtttatcgtcgttaatgtaccatcggcaccctgtttatgcagaaatgtagacctaattattatgaacctatttccttagttctatgtatggttagcttctgatctagacctagttatgagcctatttcagaagtgctatgtatggtttgcttgtcaacatttgtttctgtatcggtacaaatcctcgtgc

SEQ ID NO: 65256 - DNA, 246 bp, Oryza sativa
  Clone ID: PAT_MRT4530_66321C.1
atggagcgagccgaccgcgcggcaggtggccgtgcggcgaacgggtggcggcagccgggtggtggcggagcgaggcggacgcgcgacaggcggccatgcggtggacaggtggcggcggcggccgggtttgggcgggcgacggcgggcatgggttcgggcatggttttgctctacccgtgcccgacccgacccgctgccatccctgatccccgctacaaggacctcatctttatggactactgctga

SEQ ID NO: 65257 - DNA, 213 bp, Oryza sativa
  Clone ID: PAT_MRT4530_66322C.1
atggcggacgaggaggaggaaggagaggagggggaagggacgcagcggcgcgtggagttcccgattaatggacgcccacctgaggggcagtgcgggggctctcccactggcgtgtggggacacgggcgcaacgcggcggcggcggcgcggcggtacgggcccaactgctcctggactggggcgtttgttacttgtcgtgtgggtatgacctga

SEQ ID NO: 65258 - DNA, 474 bp, Oryza sativa
  Clone ID: PAT_MRT4530_66323C.1
cggaaatcgtccgcgacatcgatcccgtcgtgcagctcatcaaggatatcctccactccgacaggtatggagatggtgaatgtctcagcccaaaggatgaaaatattatcgtcgagaagcttcttgcttaccatccacgtgtggatgataagattggttgtggacttgatgctataatggttgataagcacccccagttcagaaagtcaagatgcctttttgttgttcgcacggatggtgtttggattgatttttcataccaaaagtgcctccgtgcatacattcgagaaaagtatccatcacatgcagagagatttatacgagaacatttcaagcgaacctgaaggtaatagaaaagaacgctggtatccttcagcaatacagggatgttgtaagttttggaatccgtttgtgtaaattattgagcctaatggcatgtttgcttcaaaaaaaaaaaaaaaaaaaaaaaaaaaa

SEQ ID NO: 65259 - DNA, 201 bp, Oryza sativa
  Clone ID: PAT_MRT4530_66324C.1
atggtgtgctcaccgaagaaggcggcatgctggcgcacgcggagacagtgtggcacgcagcacgaagaaagggcggtgcaggcggtggatccgacaccttctagcgctcccgcagatggccctagggacggtgaaagcttagctcgacatctccctgagccagcaacggtgatgccttctagcaacgtgaccctctattag

SEQ ID NO: 65260 - DNA, 327 bp, Oryza sativa
  Clone ID: PAT_MRT4530_66325C.1
atggggaggcgcagatccggtcccctcttcctctccctctccgtcggcctcatcggaagcagccagatctggggagggggtggtcagggtggtgggttggtggcggcgatgtgcggtggcagcggtggccaaggaagtatcggagatgaagatgggatcaaagaggaattcgagatggagatcgctccggaaacagagaagggatcggctgaagtccgaatcggctgcaaccaggatcggcagagtctgagttggacaaggatcaaatcaactggcacgctcatacacctaaaggcaagcttttggacctgcactggagttaagtag

SEQ ID NO: 65261 - DNA, 765 bp, Oryza sativa
  unsure (1)..(765): unsure at all n locations
  Clone ID: PAT_MRT4530_66326C.1
gnnntcntnnnnnnnnncttcnngnggggttgnnnnggaatttcccgggnaacgaaaggntggttaactggtccatgggggttcctaaatttttccgttggtttactccccccttggaagcctnaaaccttngaattggtccccttttccttggcgttttccgggaaaaaattttatccacaagggcaagtgggaacactttcccctttttgnactttccagaattgccatttccaaagaaaaggtttatccactggggcccagggccctccaaaagggatgttnaattgctccanccatttggtgccattgccgaanagcctccgggggtgggcttgaatcgcctggcacccgtttcgccactttgcttgcgccttgttacattgggtttttccacccccnttgtttttcnaagcctttattgggtccnaacagggtttgggnggggggttcccgttccaaattcccaaagggaacgcccnattcaaaatttaantgttnncccnttgaatgttnggaaaaaattgattcttgttcccaatnacaaacnccttccttgaaaancctgtttttattattccaatttaataaattttggtccctgttcccnccnnaattggaaaaattgggtcccccngcccaacattttttggctggggggccatcccctggaaacncccttgtttttnaaaacaaaaattcttattctttccnnaaaggcnttattnttnaatgaaattccanccntttntttggcntttcccn

SEQ ID NO: 65262 - DNA, 194 bp, Oryza sativa
  Clone ID: PAT_MRT4530_66327C.1
aaaatatcaaccaatctccttcgctgccggcgctcagcattttggctgccgcgactgcgcggggagggagcatcgttacgcgactgcccgccatggcgtctcctcgctgcgccccccgcccctcctccacccccggagtccccccgcggcggactcccggctgcctcctctcaccaaacgccgtgtgggactga

SEQ ID NO: 65263 - DNA, 456 bp, Oryza sativa
  Clone ID: PAT_MRT4530_66328C.1
atgggaaaacggtaataccaatcgttatagacttgattgatatacgaatgcaagtgttacatgtaaataattggggccagcagcaagataagataaggtatccatctaaatatctaattgacggactaaatgttgaaacgataactttacattacttttttacatggggaataatccttcctgatgcttttcagcttcacgaccacattgtttatttccaacctttttgcaggtgagctgttgcaacacatcaagccaaccttgaatactgccacaagagggtcttcattggcccaagtagttgaacaaggcaaggaagtaacattgttctcaagaacaccttgttgtatcaatatttcaccttgcagaagaatatcattcgcaacatccgcaagcactggaaatgcttcagaaacccacttcctaaggctcatatcaccagcaaacatgggatca

SEQ ID NO: 65264 - DNA, 1054 bp, Oryza sativa
  Clone ID: PAT_MRT4530_66329C.1
tccccaaccgcctcctccccccccccccattaatccagccatcgattccctcctcaagacctcaacaaatccaccccgaagcagcagcatccaccgccacgcagagagccagcatttgcggcggcgcggaggcgactgtgtgtggtgtggtgtagatcggatcggaggagagatggaggtggaggtggtggaggggacgacgatggtggggtgggtggtgtccggggtggcgttctggtggacggcgttcctgctggcgcgcggcgccttccccaagcgctcctacgacttctgcaaccgcgccgtctccgccgcccacgccgccgccgccgtctccctcgcctgcctctccgtcgccgactggtcccgccccctctcccccctcgccgccgcctcctcccctccccagatgaaggcgctggcggtgacgctgtcgtacatggtgtacgacgcggcgtgctgctacctcaacgacgacgtcagggtggacaacaccgtgcaccacctcgtcagcatcgtcggcatcgccgccggcctcgcctaccggaggtgcgggacggagatggtggccagcctgttcgtcacggagatctccagcccgctgctgcatctccgcgagattctcaaggagttcggcatcaaggacaccgacctcaacctcctcgtcgatattttattcgccgtgatattctcggtggcacgaatgggttttgggccatacctcacgtacgtcaccgttacggcagacaaccccatcctcattaaggcgatggcgacaggcttgcagctggtgagtgcctactggttcctgaggatcctaaggatggtcaggcacaagctggggaagaaaagaccagcgccgaaagttgccggcgattgatgcaaaatcttgtttgggatcgagccgtgcttgtaacatagtattgtttcatggcaagaaatcaagaatgtctcaaacaatggatatgatgatttgtactactctagtaatttaattagttttaccatataattgcccactgaattaattaggaacgatttcttttgtgggttc

SEQ ID NO: 65265 - DNA, 135 bp, Oryza sativa
  Clone ID: PAT_MRT4530_6632C.1
atggatccaaatggccaacggaacggcgacgacagtagtgaaggaaggaacgtgtgctgggagaaggaccgacgtggacaaacgcggatggctagcgaggaagtgacttgggggccgatattcatccccgcctag

SEQ ID NO: 65266 - DNA, 114 bp, Oryza sativa
  Clone ID: PAT_MRT4530_66330C.1
atggcggcggttgcttgtaaggcattccacgttgggcaaagggcgacggtggtcacgccgctgatgatggcagctagcagcttgtttgacgacgacaactggcagcttgcttaa

SEQ ID NO: 65267 - DNA, 711 bp, Oryza sativa
  Clone ID: PAT_MRT4530_66331C.1
atgcatgatttaccaaatttcatcgttaacagtagggtccgcatagaggacgtcgctgtcgagcggtcactggtggcggcggcctctagcgcaaggaggtctggacattgttacgaagatgttgacgggatgctggacgtcgttcaatacagcgtccagtgcatcttcaacctccagccagagccgagctcctgtgcccgtgtcctgttgccgccgcctcctccttccaaatccgacctccccgttgctcctctttccaaattagttgcggaatggaatcctctcaatctcctatacaatttccccacgaaatcctcaaatgtttctatggaaatcctttccaatttcgcggatcaatctttccttttcccggcgaggatcctaaactttcccggagtttctcccgtcgatttgggcccggacccgagctcccgtgcctatataaaggaccctctagtcgtcctccacctatcccctcaagtcccgtcttccaccgtcgctggaaacgctctccccgcgagcaccttctctctccaccgccggccgccgctccagccgcgccgttcgtcgtcgtccatcgtcgccttaggtcgccgctgccaccgttgggttcgcgaggaggagaagaagatcgtcctccacttccccgaagccgaaatccaccggagctccatcgtcgccgtcaacccgaagttcgccgtcgtgttttga

SEQ ID NO: 65268 - DNA, 174 bp, Oryza sativa
  Clone ID: PAT_MRT4530_66332C.1
gttagatttacatgacagatcaataatgcagggagcgcaaacaagtacagaaatataacagtgtccatatgttgttggttacacgggggcttccgtggagttgtattttcattacgtggcccgacttgtgacattttgaaacacggtctataaaaacggattgcattttacttc

SEQ ID NO: 65269 - DNA, 194 bp, Oryza sativa
  Clone ID: PAT_MRT4530_66333C.1
gcgaatttgtgcggttgccacctcatcacttaaacgagctcaatgccggtaatatccaccatttcacgtttgttcccgttcatcaaaaccgcacgcccaccgacataaaagtcaaagcccgtggtggcaatggaaactttaaattcaaaggttcgacgggggataaccgtttagcaatacgttgttccgcaccg

SEQ ID NO: 65270 - DNA, 654 bp, Oryza sativa
  Clone ID: PAT_MRT4530_66334C.1
atggagatggaggaggcggtagacggcaagcacccgaagcgtgggaggggcaggccgaggggacgacggggcaggggcaggggcagggggaggggcggccgctccctcgcgtcgccggcggcggggcccggagaccaagggccgcggcggcggcgcggggtcgtcccggcggcggcggcggcggcggggggaagggcgctgagggagaggaggccggcgcctggtgcctaccgcgagagcggagctgataatgacgatgatggcggcggcgacgatgagcacgacgagcagaatgatgatggtgctgaaaaatcggataatcaagttgtggattctcttaatgaacccaacagaagtaatacagggaagaagcggggaagaccaaagaaagtgaaagcagagcaggaggacagtaaccaactctccaacgggaaacaccttggcgaaaacaatgggatattttacccccctaagcggtattacactagttttgatacagttgaacactacatcagcatggagtcccaccagccttcctccctccactcctgccaagttctctcccactatagatcggccatcctccacggcatttggtggcacagaactggcataaccattgtaggtgttgcggtcgacaagctgacggcgtag

SEQ ID NO: 65271 - DNA, 733 bp, Oryza sativa
  unsure (1)..(733): unsure at all n locations
  Clone ID: PAT_MRT4530_66335C.1
ccggccgggacccagctgcggcaaaagcccctctcgcaaacaaactagggtttttaggcgtcagctcgccgagggcaggaaggagagcgcgcgaggtcgaggagaagcgaactccgccgccatggcgtccaccaaggtgcagaggattatgacccagcccatcaacctcatcttccgcttcctccagagtaaagcgcgcatccagatctggctcttcgagcagaaggacctccggattgagggcagaatcatcggctttgacgaatacatgaatttggtcttggatgaagctgaggagatcaacataaagaaggacactagaaaatctctgggccggattctcttaaaaggagacaacattacattaatgatgaacacgggaaagtgataacagctcgccgtgccctccattgcaagaattactgataacctatctatcccaaccttctatgaagttagaatttgagcctgtagtagtctttttttgtttgttcatctaaatcgattgtaatatacagtatcagcgagagatgatgagttctgtgaaagcaagtgtttaaccaggacatgagtttggttactatatcaggtctggttttgctctatagttgagcaaggtatcaatgttctgccgctgttctgtgaaaaaaccctttcattgtcatgcacatgttggccaaatattcctcttttgnnggactgatgattcgaaaaaaaaaaaaaaaaagcggcc

SEQ ID NO: 65272 - DNA, 246 bp, Oryza sativa
  Clone ID: PAT_MRT4530_66336C.1
atggcgccattggcatcgtttggtctgcgggcggcagatccgcagatgcctcatcgacacatcgtctctactcgacgcaggtatatgctcgtggcagttgaagttcgtatatatgcacggaatgcgccggattggctaatggcaaccaagtctttgggaatatcggttaagctcgaagaaaaaaatatacttgagaatgttgttggactttttggcgctgtaggtttcgcgcagcctgctcgttaa

SEQ ID NO: 65273 - DNA, 426 bp, Oryza sativa
  Clone ID: PAT_MRT4530_66337C.1
atggcgtccaccaaggtgcagaggattatgacccagcccatcaacctcatcttccgcttcctccagagtaaagcgcgcatccagatctggctcttcgagcagaaggacctccggattgagggcagaatcatcatgtatgtcaactctgtactgtatgttgtatttattcacaatatctcatgggataggacagatgacaaaacttttgaggatttaattcttctcacccgtgagttgctattctttacaactataattgttgtgtctgtgaccttgcacgtgcatgctaagggctttgacgaatacatgaatttggtcttggatgaagctgaggagatcaacataaagaaggacactagaaaatctctgggccggattctcttaaaaggagacaacattacattaatgatgaacacgggaaagtga

SEQ ID NO: 65274 - DNA, 624 bp, Oryza sativa
  Clone ID: PAT_MRT4530_66338C.1
atgacgacgacgtgcgcgagtggaggaagatggcgagtctgcgatggaaacgatgccgtgcgagtggaggaggacggcgaggagaggcgaggcaacgcgcatgagggcaggagaacggcgaggcggcggcggctacggcgcatgcgaggggaggagccgaggaggagagcgtggcggcgcgcagagggaggagggcgagtgcgcgtgcgagggtggggggcgacggggctagggtttggtgcaagccggccaaatccacaccgtccgttccggatccaacgatttcacggattgagtcggcagttcaattacattgacggcagccaccacgacacatggggagtcgtgctcttggacatggagcagagggtcctcaaggaggagattgtcacgttgctccctattgagaggggcatcgccatgatgaggtttgtgctcggacttctctgcaccgacatgatcctgcatgctggcatgtaccgagacacgctggagaaggaggcaacgcatgaggaccttctgatccccaacaccggcaactttgtggaaacgccctacgacgtggactgcatggaacggatgcccacgaacacgtcagtgctcgccacctcgccgaagatatag

SEQ ID NO: 65275 - DNA, 251 bp, Oryza sativa
  Clone ID: PAT_MRT4530_66339C.1
gcacgagggctggcctcctctcatctcctactcctactgctcccaccgtgtcagtgtgatccccgcggcaccattaaactgcctgcatttgcggtttcttgattccccccattggagtggttcttcgtttgtttggaggagtggttggattagttggtggccggccgaaaggagagggccgtgaattggtgagcctgcttcttctctgctctgtggttcttggaagaggcagagagagagagagagagaga

SEQ ID NO: 65276 - DNA, 400 bp, Oryza sativa
  unsure (1)..(400): unsure at all n locations
  Clone ID: PAT_MRT4530_6633C.1
tcgttgtgcgctcaccgtcgttcccctccctncccacgcgctccctcccttccaccgctccgcaccccacgcccgtngccagcgccgctgccgccatcaggtcgccatcactccctcttgcagacatggatcttcacgccagcgccgccactcccccgtgccctcatcgctgtgccgctccgtcaccctctgccccttctgctcacggctcaccacgccgcctctgtnatctacgggcgcttgccctataggccggcacggtgctagctagctaggtgcgtggaggagggtggggatnacgaaagggtgggagggtgctaaaggcgaggcattccgggcagtcgtggacctaggtgccatcaatttcccttttaagggttgaaaaatttgcaaaattttt

SEQ ID NO: 65277 - DNA, 273 bp, Oryza sativa
  Clone ID: PAT_MRT4530_66340C.1
atggagctaacggtggagtggtcgggtagtctaggtggtgggggcgagtcctcaatgcttggtaggaatcagagcttctcatgttggctatgttgtggtgttgtggacgacgagagtggagaacagagggagtgcctatccggtgagttgggtggggattgccggatcggacttgtggaagagatgacaaatagtgagagggagaaggaagaagggggtgaagggaggaggaggggggcatttgtccaattttttaattgtgttgaagggtag

SEQ ID NO: 65278 - DNA, 429 bp, Oryza sativa
  Clone ID: PAT_MRT4530_66341C.1
ggtctgagagaaacagaaactatgtgatggaacttaaaagaatcttttatgcaaaaacacgggagcgggcaaggggtaaaaaaaaaaccctctgggtattgctcacctttagttgaggcatgagaaaaaaagacgaataatactccgactgctcctgggcagttaaaaaacaacttcttgcgggagaactcgtaaaaaggaagaccctgggggggcgtccattcgccaccactgcatgggggggggaacgaggagaacaaaaaaggcggcgcaccatgcgaaccatgaggagtacacacccaaggacacaaaggggggggtcggagtgccaaaaacccaatcacgaatgtgatcgcatgcagagctggaaatagatagggcactgccaagaaaaactcgccttgaagaaggccgcaccacgctgctgga

SEQ ID NO: 65279 - DNA, 181 bp, Oryza sativa
  Clone ID: PAT_MRT4530_66342C.1
gccggccgaggctgttgccgaggaggcgtgacccgccgaggccgaggtggcggagaccaatgaggcggagccagatgcggccgagccagcggcgtaggatgttaaggaggccgaacccgagccggccgagccggaggccgagcctgccaaggatgaagtggcgccagagcccggcgccgtc

SEQ ID NO: 65280 - DNA, 2315 bp, Oryza sativa
  Clone ID: PAT_MRT4530_66343C.1
tcgacccagcgtctgcccaaaacccgagcaagaatggcggccactccggccaccgccaccttcccgcacctcggcctccgccccaagcccctcctcaggcgccgcctccgccgcatcgccgtctccgtctccccctccggccccgacgagacccccgcggatgacccgccggtgatcccctcgatcctcgtcaagaacaccgagcccgaggacgtcgcccgccgccggagctgggtggagcacgggtgggcgccgtgggaggagatcatgacccccgaggtcgcgttcgcgcggcacagcctcaacgaaggggaggaggtgccgctccagacgccggagtcgcaggaggcgttccggatgctcaccccggcgtaccgggagaaggtggagtccgagcccgggtacgaggagcgcctcttcgccacgcgcgacacgcccgagcccctcgagacctcgtgggccggcgagctcccgctccggctcgtgccgccgcgggactggccgccgccggggtgggaggtggaccccggcgagctggagttcatcagggaggcgcacagggagttcacggagaggctggacatggcggcggtggcggccaagggggtgacgcacgtggacaaggtggagaacgcgccggatgatctggggctggatcgatacaagatgttcttgaagcagtacaaggaatgggtggaagccaatcgggacaggttggaggaggagtcctacaagtttgatcaggattactaccctggcagacggaaaagaggtgaggactacaaagaggacatgcttgaactcccgttcttctatcctggacagatctgtcgtggtcgagtgatcagtgttcacctctatcagggagcttttgtggacatcggttgtgttcatgatgggtgggtaccaataaaaggaaatgattggtattggatccgtcatcacatcagacctggcatggaagtccatgtagagattctggccaaacgagatccctaccgcttccgtttcccactcgaaatgcgctttgtatatcctaacattgatcatctaatattcaataggttcgactatccaccaatatttcaccgcaaggaagatactaacccagagcagttgtggcgtgaaggtggaagaccacctattcctaggaaaaaacctttgaaagatatggagaaagaacctttggtatcagaccacccctttgttgaaacgctttggctgtggcataatgcagagcaaatgattttagaccatgaggaggaaaatccagataaattcaaggatacgacatatgagtccacagttgatagttccattgttcatgaagaaaatagagttcaacatactgaagggtatttcaaagacacactgctgaaaaaggaagttgtgaatatagatatcaaggagcttgatctggatgccgctcgtgctgagcgtcagctgataaaaaaactaagaaaggaagcagaggaaagaggagaggaatacaaagtagggaagctccgacgaaacaaagaaatggatgagtacgatctaatgcaatggcgccgttctttcgaagagcgggaagctcttatcagagacatatgctgccgtaaagcatttgggcttcctgtcgacgaacctgggcgatatgacgtggatgagaccgaagtttatggcaaagattactacgacccgagtaagcctatgtaccgctacgactactggggagagcccaagaacaccgagaagaccaagctagagagggaggtggagcttcacaaccagcaggttatcggagacgcgaagaaatggtgcgagatgtcgtacgacgactatgtccggcagaaggtgcggatggaagccgctgaagccagggagaggcagaggaaggcatcggagccacaggaggaggacgagaagtatgaggatgagatggaccttgacttgaagaagatgatggatccccaggcgccacacaatcggtgtttcatcacaaaatgacaggttagaatgttaggcacactatgatttagacatagtagctctttttttgggtgttgtatgtgcaaattttgtaggagatgtaacactgttgatgatagaccagcaatatgctttgcctggcatagccctggatgaagccacagttgaagctagactgctagaggctatgctgtttgcttggtcacctgttcaaagctgtaattttggcaattttatgtgtgatggttttctgaagaatgccaaattcagttggtattggaaagggagccagagaaaaaaaaaaaaaaaaaaaaaaaaaaaaactgcagcccgggggatccact

SEQ ID NO: 65281 - DNA, 375 bp, Oryza sativa
  Clone ID: PAT_MRT4530_66344C.1
atggccatcaccgaaagcagtaaaggtgctaagcttctggagttcatttcagcaggattgcagcaggacaccgtttgtcccttgctgatgggagcatgtggtgtgagaacgatcgacaagccacactcggcacctaacataacaacagcagctgagagcatttattggtatgcagacactcttcatgctgcatcatcaagaacttccatttggttgctgggagcacaacaaaagctatccttccagaatgcagaggatgggagcattcaacagtggtcaactggtcaagtatccaggattcctaaagaaataggttatgcaatggtgcaagcacaagtttacagtgccagatgttacaaatattctcggcagtga

SEQ ID NO: 65282 - DNA, 414 bp, Oryza sativa
  Clone ID: PAT_MRT4530_66345C.1
atgtcactctcgcgcgcgctcacggcctcacgagccgcggggtcgcgcgcggtcgcggcaacacacgataggaaggcgacgtcccgcggaccacgacacccaccggccaactgcctggacgacagcgtgcgggcagcgggcgggggcggggggcgtggcggcgcgcggtacacgacacagccgcaagatggcacccgccgcaacgacgtcttcatcctgctctgcccattccaggttctccgcacgaccgcacaagtggagtggccaagctgcctgccgatcgtacagaccgttaattcccgtacccggggcacggacgcgctcgccgacctcaggttgccacccggtggcgagctacccggcctccatgccatgtcaactgtgcggtatcgtcaacttcactacagcgaatag

SEQ ID NO: 65283 - DNA, 369 bp, Oryza sativa
  Clone ID: PAT_MRT4530_66346C.1
atggaggaggatgatgaatgggccgacgacgaggggatggcttcggcgatcttcaggcttggcaaagaggcggaggacgacgggcttggcgctgcggactcgaagatgatgatgatgggcaactcttcgtcatggcgggaacaacgaccggaggaaggcgatggtgttggggtgggtgcagggtttacgattccgacaggcccttccgttttgggcgctggtggaattcggaatttcgcgaaattcggtggaaaatcgaatgtttttttcaacactccagagcacaacttcgccaatattagagaagaattggctgactttaccctacaagaaattatatctttgaagggcacctaccgtactagatga

SEQ ID NO: 65284 - DNA, 2054 bp, Oryza sativa
  Clone ID: PAT_MRT4530_66347C.1
atgatgctgtgctgcggcgtggattgctggtgcggcgcgctgcggctgtggcgcagggtggtgcttcgcaagtggctcaacgtcggctccgggtcgggcgactccgacttcagcgccgacgagtgcgacgccagcgacggcgagctcgacggcgaagacagggataatgaatcatatggtgaagggacgagtttagatggacttggtgcaggaacaattggcagggctgattggttgccttatgtgcagcacaagcacttgtttgataaaactgacatggcaggggatgaaattaaatctatgccttacaggcttagaagacgcaaatcagagacccttcgcgctcagtatattgacatcagagaactcaggatttgtgtagggacatggaatcttgcaggcaagtttccacccagtgatctggacattcaagactggttggataaggaggagcaggctgatatttatgttcttggatttcaagaaattgttccattaaatgctggaaacatatttggttctgaggataacagtccaattgcagtatgggagcatattattcgtgaaactttgaataagatttgtccagataagccgcagtataaatgtcacagtgatcctccttcaccatcaaggtttaatccatcagattatgttatggtgatgaaagatgaattgcttagcgagtctgacagtgacaattatggtgagcttcatccattgattaaacaaaatgatgatatagctattgacaatgatgtagttcatgataaaacatatgaaaacttcagtgctgcttccaacggaagagttcataaaggcaaagatttcagcaggatggattcagtaaagacttctgatcagtcccccaacttaagttatgaaaaagacagatcaaaactggaagagacaaccaaattactctatcatccagaaaggcttggaatgatttggcctgaacagccattggatatgatggctcagtgtcttcgggctagcacttcactgaaggctctagcaactccagcatctttgaaatcaacagtgaattttccaaatgatgatttatcccatcaagttaacagtgacaatggagtgattaaaagtaaaaggccatgctttctgcgaatagggtcaatatcagtcagcatgtctatacatcagacacatttttgctttgtatgttgccacctaacttctggagaaaaggatggcgatgaactgaaaagaaatgcagatgttgaagaaatcctccgaagaacagtatttaacccacttcctggacttagcacgcctaagggaatattgggtcatgaaaggatcatatggtttggagatctcaactaccgaatcaacttatcatatgaaagagcacatgaacttatctccaagcaagattgggatggattgtttgagaatgatcagctaaaaagagaattgagtaaaggacacacttttgatggttggatcgaaggagatatcagcttccccccaacatataaatacgagtttgactcagaaaagtatgtaagtgatgagccaaaatctggaaggagaacaccagcatggtgtgataggattctttcacgaggaaagggaatcaggttaatttcctacaggagaggagagcttaagctttctgatcaccgccctgtgactgcagtcttcatggcagatgttgaggttctctgccacagaaagttgcagaaagcattaacatttacggatgcagaggttgagtatcatctggcaagttaagcagctggagctcgctgaaaaatatatatatttgattgtgcaggcaagttcttcagctgaaggtcgctgaataacctgcctgattttgctgttcacaattgtaaaaaaaaaaggagttagtactaggtaaatgcatagccccccctttactatagctataggttttcttctgaaaagtgtatagcgttttttttttttgatcataagtgtatagcgttcttgtttcttttgaaaactgtaaatgattaccacacgggtgtaccccttctctgtttgagcctaaaacacacacaccc

SEQ ID NO: 65285 - DNA, 173 bp, Oryza sativa
  unsure (1)..(173): unsure at all n locations
  Clone ID: PAT_MRT4530_66348C.1
cacagcgctgtatacacccgactgcccccaaagtcgaccgaagggtggtgatcttcgctatggcaatnttgtaccttaccgagcacaattatgttacggaactatttagatgtgttttactgagatgtttcgcttgtaatgatcaatatctcttgtccaaaaaaaaaaaaaaa

SEQ ID NO: 65286 - DNA, 368 bp, Oryza sativa
  Clone ID: PAT_MRT4530_66349C.1
ccttgtctgtttgtcttaaattacggataaagaggtaacaccggagggaaaaaaaaaaaaaacccaaaaaaaagaaggaaacgcggggaaaaaaaagcaaccattttttttggggaggaaaaaaaaaaaaaaaaaccccaaaaaagctaaaaaatctttggccccccaaccaaaagaaaaactggggacgcggggggaaaacccgaaaaaaccgaaaaggaaccggccggggggccaacttacccaaaaaggaggggggtaaaaacagggggaaaaaaggggcaaaaagggggcctgggtgaaaaggggaaaaaatcccaatttcacccaacaaacgagcggggagaaaaaagggaaaaaacgggggg

SEQ ID NO: 65287 - DNA, 1428 bp, Oryza sativa
  Clone ID: PAT_MRT4530_6634C.1
atggacaacgctcgagagagtgaggatgagcattgcctgtacgcgcaggagctcgtgttcgcctacaaccgctccatggtgctgcgagcggcgatccagctgggcctcctcgacgcgctcgccgccggcggcgacgcgctgaccaccgacgagctcgccgggaaaatccaggccacggacggcgtcgcggtggatcggattctccggttcctcgcgtccttcgacgtggtgaggtgctcaacagagacgagccccgacggtggcgcggctctgatccggcgctacacgccggcgccggtgtgccggtggctcaccaagaacaacggcgaggggtcgctggctccattctccatgtttattatcgacgaagaccacctattgccctggcaacacatagcggaggcggtggcgagcggcgggccggcgccgtccgagaggacccacgggatgccctaccacgagtacatagggaagaacaagaggctgggcgggctgttcgaccacgccatggcgcagcactcggcgatccgggcccgcaagatgctcgaacgcttcgaaggtttcgatggcatccagcggctcgtcgatgccggcgtggaacatatagctggagatatgtatgagagtgtgcccaatggagatgcaattcttttgcagtggatgctccttatgttcagtgacgaggactgcatcaagatactgaagaactgccaccaagctctccctgaaggcgggaaagtgatcattgtggaaggtcttctgccagagaccccaaatactactccagctgcgcaggattcattcaccatggatatgatcttgtttgtcctcttcaaggtagggaagcacaggacagagcaagagtttgcaaagcttgccaaggagtctggctttaccggattcaccgctggcctcaatgttggtatggactctgaatcaaacacaataaaatcagctagaaggagtccaaggattaaaagttcgagcaaatcacaaagcaatacacaatatccgaccttgattttcgtcttgcccatgacggtggtgcctctgtatggtggcggcagaatcgatagagaagatgatcacatcggtgaaaagaacgtgatggcgttcactgctccgccgccaacgtgtgccgccgttgtcgaggttgttgccacatgtgcctgcctgccaccccacctcaatgcccgtcttctcgtcaccggccgggagaggaagagagtaggggcgccggcaagggaggaggagagaagggcccctgcgcctggacgacatggaggaagcagaggatccaacgacaaagttaaagacgacattggagggaggcgatgccagtggagatggagagagctagagggaaagaggtgtggtccaccttctacctccaagccgggcccgggccccgattcacgcatgcggtaa

SEQ ID NO: 65288 - DNA, 104 bp, Oryza sativa
  Clone ID: PAT_MRT4530_66350C.1
ccgaccgaccagcagcgtcaatcgtggcgcctcatctggccgtcgctggatttcctgctacggcagcgggagcagtgacaccgtcgatgacaggtgcatggagg

SEQ ID NO: 65289 - DNA, 1428 bp, Oryza sativa
  Clone ID: PAT_MRT4530_66351C.1
atggacgcggctacagttgcaggatatttcaaggacaagagcattttgatcactggctcaactggatttcttggaaaaatattcgtggagaagatactgagaattcagcctgatgtgaagaagatttttctcctggtgagggccgccgatacatcatccgcggagcagcgtgtgctgaatgaggttatagggaacgaactctttgggcccttgcgagaaaactatggatctaatttctatagcttcatgaaggaaaagatatcacctttagccggagatatcattaatgagaatttaggccttgagagcttggaaatattaaaattgtcaaaggagattgatatcattgttaatggagctgcaacaacaaatttttatgaaagatatgatgtttccttggcatccaatgtcttaggagcaaaatatgtttgcaaatttgcaaagaagtgtgcaaatctgaaaatgttcctccatatttccactgcatttgtatctggagagcaagaaggacttttattggagaaggtatttcagattggggaaacactgaaggaaggatgccatttagacattgcagctgaattacaattggttgagtctgtcaaggcagaacttacgcactccaccaatgctagacaatttgggtggcccaacacgtatgtgttcacaaaggcaatgggtgagatgctagttggacactttgggcgtgaacttccggttgtgattattcgcccaagtattgtatccagcatttaccatgatccgctccctgggtggatagaaggaactaggacaattgacagtataatttctgcttacgccaagcaaactattccacatttcatcggtgctggtcatgtcatccttgatgtgattcccggtgatatggtggtgaatgcgatgttggtagccatggccgttcactggagtgagagaggccaagttatcatccatgtgacatcatcccagcagaacccgttgtcaacctctaccatgctggacttgatgtatcgctattttactgctaatccacagacaatgggaaagaacggaaaagtcgtcaaaaccaaaaggctcaacattaccaataaaacaggtttccgagcatacatgtttcttaaatacaagctacctttagaggttctgcatttggtgaatccactattgggtggatatttttctcagtattacaataaatccataagaagctacagatatttcgttcttctggccaagttatacatgccatatgctttcttcaacgcctgcttcaatggcacaaacttggcaagactgcagacggcgacaactcaagaccagagcaaagaagcctgtgtgcttaattttgatcccaagtccattgactgggagtactatctgtacaacagccacatacctggcgttatgaagtatgcccacaaaaagtag

SEQ ID NO: 65290 - DNA, 154 bp, Oryza sativa
  Clone ID: PAT_MRT4530_66352C.1
atggagcgtagcggcggccgctcgaggagggagcgagcagcggcttcggcgcacggaggaagcagtggcgtcggcacgcgggaggagggagtggcgtcggcggcggctgctgtgctcgaagcggagagagggagcagtggcgtcggcggcgact

SEQ ID NO: 65291 - DNA, 502 bp, Oryza sativa
  Clone ID: PAT_MRT4530_66353C.1
gcacgaggtgacagtagattagtaaaacgtgttaccattgatgagtaaagttaatgcgttgttgtctcgtgatccgaccgccagcccaacccaccgtacctgtcgtcgtagctagtatctttgttacgcccgtgattcttaaaggccttcaaattaaacgtacccttttttgtgcatggtacaaatctaccaatttgtaccattttgaacgacctattgtacgataccatgaatgcaaaggaatttaccaattgtacgagcatgcagtaattaacagtccaggtatcagtgataggtaaagtgtgtctattttatggtacttaattagaaacctagcccttgtacatttgtttttccagctttattcgatataacatgatgcaataagtattagcatacctataactaaaatgcctaaccctaatcgtacagtaaaatttaaattttaaaacctaatttaagagttgatttgattttgatgttttttcatcgtatagttgaa

SEQ ID NO: 65292 - DNA, 354 bp, Oryza sativa
  Clone ID: PAT_MRT4530_66354C.1
ccccccagggcccaggggtcgactttttaaacaaaaaaggttaaagggccccggttttttttttttcccccgggggcttttacaaagggaaaaaagggaaggagaaaaattgttggcccaaatttttataaaaaaaaaaaccggtgaaactgggaacggggccgggcgtcaaccaagggggggggggaaaaaaaaaacctttatggaagggggggggggggctaaggaggcaataccccccatagcagccccttggaaggattcatccatcaactaaaacttggcaggggggggggcataaaggacagttttagctgtttttttggaggcaagggaagttgcagcaattttttt

SEQ ID NO: 65293 - DNA, 783 bp, Oryza sativa
  Clone ID: PAT_MRT4530_66355C.1
tcttctcaaattgcctatttctcgctatgctgatatgattttagtattaattggtctatacggtttaagaattctttgcaattactattacctattcatcaaatcgatgatgaaacgcttgatagtttttattctgaaaatagcttgctgctattagattcattacgtcaaaatttcattgatgtgcaacaaccctttttttatatttggggcgctaaaagttgtgggaaaagccatcttttgaaagcggtaagtaatcaatatcttttaagtcaaaaaccggctagctatattcctttaactaaatcacattatttttcacctttggtattagataatattgagcaaatggatgttatttgtttagatgattcacaagcaatagcaaataatgaggaatgggaattagctatttttgctttgttcaataaaattcgtgagcaacacagtttatttaatcaagggcataaggcattattattgatcagtgcgaattgttcgcctcatcagttaaagattagatcacctgatttgaaatctcgcttaacttggggggaggtctatcagttatatgatttaacagatgatcagaagattgttattttgcaacgtaaggctaatcagaaaggtatagagttatctgaagaagtggctatttttttgttaaaacgcttggatcgtgatttgcctgtgttattagcggaactgaataaattagatcgtgcatccttacaagcaaaaagaaagttaacgatgccgtttgtaaaagaaattattggcttg

SEQ ID NO: 65294 - DNA, 182 bp, Oryza sativa
  unsure (1)..(182): unsure at all n locations
  Clone ID: PAT_MRT4530_66356C.1
ctacctctgatgtgtcaatggaacgagctctcgtggtcataatttgtatagaatccataggtgcattattcnatatttataaagacactccaaatgaacgggtttttggcatggnngcttcaacttgtttgagttaaaaggaatgaatcgattgcttataccaaaaaaaaaaaaaaaaaaaa

SEQ ID NO: 65295 - DNA, 671 bp, Oryza sativa
  unsure (1)..(671): unsure at all n locations
  Clone ID: PAT_MRT4530_66357C.1
ccacgcgtccggcgggagatgtcgatccggaggctgcaggaggaggcggggacggggagcagcaggagggagttcgccgtgttcgagacggccaggggggacgctctcttcacgcagtcgtggaccccggtcgccgccgccgatcgcgtcaagggcatcgttgttctgttacatggactaaatgagcatagtgggaggtacaaccattttgcaaatttgttaaatgatcatgggcttaaagtttatgcaatggactggattggacatggtggaagtgatggggtgcatggctatgtttcatcgcttgatcatgctgttggtgacctgaaagaatttctagaggatgttgtactggaggaaaactatggtttgccatgtttcttatttggccactccacaggtggagctattgttttgaaggcagtcctggatccttgtgttgaagttcatgttgaaggtgtgatcttgacatctccggctattcatgttcaaccatctcatccaattatcaaagagaggacctcctgtttcccgtgatcctgaggctntgaagatcaagtatgcagatccacttgtgtatactggacccattagagttagaactggcaatgaaattctttcgatatcatcatatttgcaaagaaacttaagcagagtaactgtcccttttt

SEQ ID NO: 65296 - DNA, 2877 bp, Oryza sativa
  Clone ID: PAT_MRT4530_66358C.1
atgactggtgaaacaaggaaagaacggtccaagtgggatacaaaaggacctcctgatatagtggagatcagtgaagatgagtctcttcctatgaatatggatgatcataaaaagggcaatgatgatcatagaaagggcagtgatttgctcccttctcaggattttggtcatggtaatgacaagcaaattggtgaatctctgaacctcaaatctactgtctctatgcaccatggtagcgctggacatgagcaggatcgagctgatggactcaacaaagatatcaaggaaaggtcatccaaggcatcctctgaaaggttgcctcttagaatgggtgatgaggatcataataaaaatgactggcacaacagaggctttgaaaaggcagctggtaaccaaggtatgagcagatatgcagatgacagaaggcgtggtgatgggtggggtacaactcttagccgtggttattcttctaggatatcatcatctggtccagatgcgtggaagagaagtcgcagtccactatctccaagaggtggttggaacaggtcacgcaggaacagaagccgttctagaagtagaagcaggagcatagggcgaggtagaggtagaagcagaagcagaagcagaagtccttatttcagtgaccgtggatctgaatggagggttgagagaagcagatcatctggaggacctgctcttccctgtagggattttgtagctggtagatgcagaagaggctcaaattgcaggttccctcatgaagatggtgtgcgcaggcagtttgatgagcattatcctgtagattcaagggaaaagtatgggcatcagaatagggacttcatggatccacgagaacaagatgactatttaaggaataggccacctcgaggtggccattatgatgaaggaacttgggaaagatctgaacctcgaagggagtatcggtctacgatgccatgccatgattttgtcaaaggaagatgcagtaggggtgcgaattgccgatatgttcatgatgattccacccctcatggtggatggagagatgaggttagagataatgctattggtagaagtggccctgattcatcatatgggaacaggactgagcaccgtagaacaaataaaaacccctgcaaattttttgctaacggtggatgccgtcgtggccaaaattgcccatatctccacgaggaagcttcccagagccaaatgggactgggtgcacctgatgagcctggttacactggtgggcctacaacaagaggagattacttgagctggagtgaacaaaataattctgtgcaggcaagttctcatgttttgtcaagagatgacagagaaaaccctgttcctcagggtactggcagaaatgattctcgatatgagaacaaaaaccggcattccaaagatgctggaagtagtcagtaccagatattccctcaggatgattttggttcagtagggcaaaacaaacctgaaatagctgcttcacaactgccacagttcataccttctgtccaaacaggcacagagagcataaacattgacaaggtatctgacatgggtggtcagagtggacctggaaccgttggcaatttgagtatgcaaatcgggatgcattctgctaatcttttaggagggcataacttgggccaaaaagcagagagccaagatgcaatttctcaaatttctgctgcaccatctcttccgggcgccacccaattgcagaatactacatcctcagtgcctttgaatagccaagttcagcaaagtgacttttcattacatccaaataggcaggaccagtttgcagttcctcatgcaactacaaataactctgctcctagcatgcagagccagccagttgctccttatatggggcacagccaacacggctacattatgggggcacaatcattaccagatctctctgtgcataatggacaaattttcaatgttggtcaagttccacagaatcttccaacaatcgtgcatgctgggcagaatcaggcaacaagtgacacacccaacctgggccgagatagtggtgatcaaggcttgcaaaacacacataatttccagcctgttgctccaaatgagcaaactcagagtcaaaccttgcaagggttatcagtggtggccagttccagctcagttgatatggctggagctcctctttctcacaatgcagtgtcaagtcaggaagaagtccgtcgtgttactgcatctttggcccagtactttgttccttctctgactgctgatacctctgggctgcagtcgtctcagcctgatccaaattcgagtttgatgaacaattcgtctgctgcacctcaagcagttcaacctaatcactggccttggttacaacaagcaggaatggtccaaccttcacatattgttccacctgaacaaccagctccccagacatttcaggcaccaatggctgctggtagtagtaatggcaaccctctgcttttaccccattcggttgcaccgactgttcctgctgctgccttggcgaccaatgaaactacacctgcagaaaataagaaagaagaaccaaaggacactgatgctgaggctaatgaagatggtgagaacaagaagagcaaggattccaaggcgttgaagatgtttaagcttgcactggctgactttgtgaaggatgcacttaagcccacctggaaagagggtcaaatgagcagagaggttcataaaacaattgtgaagaaggttgtcgacaaagttacgaccacagttgaaaatactcctcaaacaaaagagaagattgatatttacatgtcctactccagagaaaagctaaacaaactcgtccaggcatatgttggcaagtatgccaagaaagattga

SEQ ID NO: 65297 - DNA, 1374 bp, Oryza sativa
  Clone ID: PAT_MRT4530_66359C.1
aagcttctcaacgactataccaatcatcagcatcagcacataaatctatagaacattttgttttagattgctgcctttgcctttgtgtagatggtttttgtttagttatttcaatcatggtgggaaattaacccacctgagatgtaagtagggtggagcaaggcggtggagctggacgcggcggcgaggcgggagatggcgatccggaggctgcaggaggaggcggggacggggagcagcaggagggagttcgccgtgttcgaaacggccaggggggacgctctcttcacgcagtcgtggaccccggtcgccgccgccgatcgcgtcaagggcatcgttgttctgttacatggactaaatgagcatagtgggaggtacaaccattttgcaaagctgttaaatgatcatgggcttaaagtttatgcaatggactggattggacatggtggaagtgatggggtgcatggctatgtttcatcgcttgatcatgctgttggtgacctgaaagaatttctagaggatgttgtactggaggaaaactatggtttgccatgtttcttatttggccactccacaggtggagctattgttttgaaggcagtcctggatccttgtgttgaagttcatgttgaaggtgtgatcttgacatctccggctattcatgttcaaccatctcatccaattatcaaagttgttgcacctatcttctctgtgttagctccaaaataccgagttgctgctttgcacaggagaggacctcctgtttcccgtgatcctgaggctttgaagatcaagtatgcagatccacttgtgtatactggacccattagagttagaactggcaatgaaattcttcggatatcatcatatttgcaaagaaacttaagcagagtaactgtcccttttttagttctgcatggcacagctgacacaataactgaccccggagcatctcaacgactgtaccaatcatcagcatcagcacataaatctataaaactgtatgatggatatttacatgatcttctctttgaacctgaaagggatgatatagcaaatgacatcatcaattggttaagctcaagacttgatgttctccagagatggtgaagtgaatcagctatatggtgctcccacttatgtcagatattggaacatggtatagaagagaaaggctaattgtaaaacattttgttttagattgctgcctttgcctttgtgtagatggtttttgtttagttatttcaatcatggtgggaaattaacccacctgagatgtaagtagtgcaagattagagtcatgttgaaaatcatgtacttcattatggtattagtaaatactaattctaaaaaaaaaaaaaaaaaaaaaaaaaa

SEQ ID NO: 65298 - DNA, 452 bp, Oryza sativa
  Clone ID: PAT_MRT4530_6635C.1
ttttgggggaaatacaattatacaaacgattcaggaagcactacatatgaaataaaagagcattcagatctgtaggattttgcgtaccaaataagagagtattttcttttaaaagccctctatcctaacctagatgatgataataaaaataatgtccgaggaagaagggccacagacatctgcacgtgtgaaccatagcacatccgttaacaaaattatccatgcagtcataccaacaatgatatgtttgcagttcagcctaagaaatacaaccctgctggcattatttgatgaccatgcagagagacccgtgggcggctattttcaggcttgctctgccgctgcactagatttggaggcaattttcaggctggcttgctctgccactgcaatacaccttgttggcctaatgaccagcaaaggcttgccgacagggccgagcacctcacaat

SEQ ID NO: 65299 - DNA, 237 bp, Oryza sativa
  Clone ID: PAT_MRT4530_66360C.1
atggtttacggcagaggctcggtacggcaaacaataggccggaagggggttagggatgcacctacagaggaatcggatgtacttgatttctgcaagctgggatgtacttcctccgtgtgcagcaccattaacatttttgctgtcaatgaagaagggaatggtgccgtggatagttgcaacaatgcacgctaccgcttctgctccaaggaagctgaggtcgtcactgttgcttcctaa

SEQ ID NO: 65300 - DNA, 324 bp, Oryza sativa
  Clone ID: PAT_MRT4530_66361C.1
gttgtttttttaatttttggtgttatctttttatttatttttttttttttttttttttaacagggaacaaggccggatttttatattagaacaaggcggaatgcaaattaatttaaatgcaatacaagaatggcacaaagggagccaaaagtttttacatttccccttttaataatccaataaaggaattcccatgggagtatttaattaggcaagcgggcccacattaggcaaacctaggggcgatttattataaaatagcccgggaaaaaccttcattagtccaaaacaaaacccagggggggcaaccggaggcccacaaaa

SEQ ID NO: 65301 - DNA, 294 bp, Oryza sativa
  Clone ID: PAT_MRT4530_66362C.1
gtgtccgattattcggttgctctaggtcggttgcaaggatgtagagtagtattttactaatgtaagcgcggtgcttaaattattaggtaccactaattggggttatatactgcggatgagaggtgggccgctgatggttacagctaagtacgggtattcctccgcgccagtatataatcctaagttaattacttggggagggtactcctccgtatttagccctggttgtatggtcatgacgggctagggtggcttctcgaaacaccaagaggacactgggtacggggtattggt

SEQ ID NO: 65302 - DNA, 288 bp, Oryza sativa
  Clone ID: PAT_MRT4530_66363C.1
ggcaaaaaatggggggggccaccgcggggaaaaaggtgaaaagggggggaattcccagggaaaaatgggccgggcgcacaaacccttccaaaataaaagcaaccccccgtttgaacactcagggggtgttctggagggccaatagggcgagccccaaaaaaggaggacaggggggccccgccccccaaaccaaaaagggaggggggggatccccacagccggggagaagcggcaaagcccaaaagagacgctcccctcaaacgcgcgcacgacccccgaaggccaaaa

SEQ ID NO: 65303 - DNA, 1606 bp, Oryza sativa
  Clone ID: PAT_MRT4530_66364C.1
ctctctctaaattctctctcctcctcactatttcttcctcccctttatctttccggggcgctgccggcctcaagtctcctcttccacccctccacttgctggtgcggtgctgcgggccgacgaggccgagaaggaattttggactttgatgagggagctgctgattgtgagtcaagaacagttgtgaagagtgagaagaaagctagagaagatcaaatggcagctgaatcctccctggttccacaaacctcctctgaatcgattgcgcagaagatgggcttcttcagggtccctgaccttcttgtcaaactgagcagcaaatgtttgattgagctggatgcagtccgcagcccaacatcgcccctagacctcatattcttcccaggcctcggtgccaaatcgccgaggtcgtctttccttggcgacagggttgggcttggactggtggattcacttactgatgatagctccactcccttgggcagcaggaaggttcttcttggatctgagatgaggattactgataatgtaacttccaagaacagcttcactgctcctgtcgaagctggggtggttgatcagaaggatgagagtatgtgtgatgacctgaagggtagtttcatgtctctggatgacattgtcaattcagaggattacacccgtgttgtttgtcgtggtcctaaccctaggacaacccacttctttggagatcatgttttagaatttgaaggtgagcagctgatgcctgatgagagtaagagtgaggagagtttgccccctcgtctggaagaggccgccgccgaggccggcggatggggggagctccacggggagcgggggggcctcgacgccgccatcgccgaacagggctccggctgcgtcggcggcggcgggggtggcgaggtggagaagctcaggcgggagctccaggccttcgcgagggcaaacccgttcctgttcgtcgacggccgcgtccccagagacgacgcgcgacatggtcaagctggacatcgaggaccacgagcgccgccacccttgcatcgacgtctcgggcttgctcgcgcgctacgacgagcgggaggagaggaggcttcgcgccgggaacaagcgggctaagctcctcgccaagtttgtgttaggaaccctaacgaggaatctctcaattaactggaattacgatgataatcaaggaattggtggggtatctgcaagtggtctagagtggcagcccgtgattcagagcaggcacaacacggtcattcatattgatgccaaagtggcttgggctatacccatagagaactttaaatggtgttttacccagtgtggagtggtggtaggaaacccagagtggccacctataggtgtggcatgcaaagcatcaattacttgtgctgaagttctgcatcttgccccaaccagattttgttctcgtatttcaaaatgccctgctacaggccagagagatgtttcagactatggtggtcagtcaaaattaggaactccccatgttgtaggggaatatggtgatcacaagctcttggaggaggagttgaagtccggcggttcgaaatggaaaattggaacgtccatgaccacaacgtag

SEQ ID NO: 65304 - DNA, 270 bp, Oryza sativa
  Clone ID: PAT_MRT4530_66365C.1
atggacctttttctctcttcccccctcaagcgcagcccgtgggccggtgtcatccgagccgagccgtcgtcgccgcggctgctagagatcatcgccatcggcttttgctgcggcgcacagctacgacaggtcacacgcagccgccgttgcgggcaccgcgccgcccatatcgccgcgccgcgcggttgtgccacttacatatgggccattaccacgtaccgctccctccacgcgcagcccaatcccccgccaccggcgatcgaggcatag

SEQ ID NO: 65305 - DNA, 712 bp, Oryza sativa
  unsure (1)..(712): unsure at all n locations
  Clone ID: PAT_MRT4530_66366C.1
ctcacgcgccgccgccgataatccgccatcgccgcccatgctgataatcgccatcgctgcccacgctgcacctcgcccttcgcctccccggcggcaccaccctcggcaccgtcgattaatccctctatccccctcacgcgccgccgccgatcttcaccgtcgcgccgccgacgcccttcacctctccgccgacaccgcccactcctccgccccgacgcagcccgcgcctccgcgcatcgcccttcgcctcgccatcaccgccgccgtcgattgcctccaccctctttgacgccctatccccgccacacgcagctgcctcgccggggatgacctcgcgtcggtgacagtggtccagtgcccaatctgcttctcggtctgtgttgacactactgaggtctacggcgaggctactcccctcagccagcttgacaagcaaaaatttctcagtagcctcaattggcaatatcaccacacttctaggaggaggaaaggctgctccgcgggctntcgtagggatcccggcgagctcgcccccgtgactcctgcttcctctgtcacttgaatcaggacctagcatacatattcagaacaggaggtctacggcgaggcagtggnntgcnggtcacaaagttccaccactgaacgggctaactgagacatggggatgatcatgtcattntgaaggatcnngcatggttgtaagcatcggcag

SEQ ID NO: 65306 - DNA, 490 bp, Oryza sativa
  Clone ID: PAT_MRT4530_66367C.1
gtctagcagtccatggccgcgtcaccgatctccgcgccggcgacgctcaggctcttcttccacgactgcgccgtcaggggttgtgacgcgtcgatcatgatcgtgaactcgaacggcgacgacgagtggcggaactcagacaaccagtcgctgaagccggaggggttcacgacggtgctcaacgccaaggccgccgtcgacagcgatccacagtgccgctacaaggtgtcctgcgccgacatattggcgctcgccgcaagagaatccgtctaccagagcggagggcccaactaccaggtggagctggggagatacgacggcagggtgtcaaccagagacagcgtagtgctgccgcatgccaacttcaacctggaccagctcaacgctttcttcgccggcctcggcctctcccagactgacatgatcgctctctcaggtgggcacacgttcggcgcggcggactgcaggttcttccagtacaggatcggcg

SEQ ID NO: 65307 - DNA, 849 bp, Oryza sativa
  Clone ID: PAT_MRT4530_66368C.1
ttaggcctcaattcctccatcaccttgggccaggttagtgggctgtagggaatcgacaatgcgattggtggtaagcttgtcatactcaataggaataagtttatcataggtccgtgggccccacatgtcaatctcactcccctccccttcttcctcctctctccccatctcctctctcaggcgcaacagagagggcgcagcgcacgccctccgccgcaacccgcctccaccaccgtcgtcatcctccaccacctcgaccccgccggcgccgacatcgcagtagacgagcaatgacacggggacgagacgaaggaggacaaaaacgggaggctggcggcctgcatctccttggcatgcttccatgtcccatcgaggagtagcagcgtcgggttggctcgcgcgggcggaggcgtgtatcggcaccaggaagcgaggtcgacggcgtccggcgaagggaagagcaggaggacgaggctcaagatgagggggccggagcccggaggaactaggaagggaggaggcggcggccggggatgatgaggaggttggagaggaagcaggtgaggaggggccgctccctcctctaccgccgacatctccgcgcgccgctccctcctctcccgccgacgtggcgtcggaggagcgcctccgtcgcggggaggacgagcacgagcacccgcgctgacgtggctcttgtggctcctcgccgcgaacccgcgctgcgagcgtcgcgtgcacgaggaggtgtcgcggcacgcggacgctcgccgcgccgacgccggagaagacggcgaggtcagtcgggcagtcattgacaccggcggcaatggcggcggccttggcgagcat

SEQ ID NO: 65308 - DNA, 1152 bp, Oryza sativa
  Clone ID: PAT_MRT4530_66369C.1
atggcggcgagccttgctgggttggcattcctcgccgtcacgtcggccgcgctgctgtcgccgctcgccgtggttggccagctgaggacggactactactccaccatctgccccaacctggagaccatcgtccggagctccgtcaagcagtccatggccgcgtcaccgatctccgcgccggcgacgctcaggctcttcttccacgactgcgccgtcagggtacatctagagattgcaacagataatgatcgatcgaccgccatagatcgatgcaagcaatgtggtgatcagaatatcagatcagtagaaggttgtgacgcgtcgatcatgatcgtgaactcgaacggcgacgacgagtggcggaactcagacaaccagtcgctgaagccggaggggttcacgacggtgctcaacgccaaggccgccgtcgacagcgatccacagtgccgctacaaggtgtcctgcgccgacatattggcgctcgccgcaagagaatccgtctaccagatgaaggcattacgcccagctttcactaaaaagcataagagttcatacattgaaaaaagaggaaaagcagtaaaaactagggaaactgttttaagcactcggagcggagggcccaactaccaggtggagctggggagatacgacggcagggtgtcaaccagagacagcgtagtgctgccgcatgccaacttcaacctggaccagctcaacgctttcttcgccggcctcggcctctcccagactgacatgatcgctctctcaggtgggcacacgttcggcgcggcggactgcaggttcttccagtacaggatcggcgccgacccagccatggaccagggcttcgcggcgcagctgcgcaacacctgcggcggcaaccccaacaacttcgcgttcctcaacggcgcgacgccggcggcgttcgacaacgcgtactaccggggcctgcagcaaggcagggggctcctcggctccgaccaggcgctgcacgccgaccagcggtcgcgcggcaccgtcgactactacgcgtggagccagagcgccttcttcggcggcttcgccgccgccatgaccaggctcgggagggtcggcgtcaagacggcggccaccggcggcgagatacgccgcgactgcagattcccgaattga

SEQ ID NO: 65309 - DNA, 10427 bp, Oryza sativa
  Clone ID: PAT_MRT4530_6636C.1
atgttcgaggatttggtgagcaaggtgctcccggccctcctcggccgctacgtcagcttccagaaggaccagctcaccattaacatctggaatcaggaaataatattggtagatgtagagctgattctggaagccttcgactacctgcagttgccattcgcattgaagaaaggacggattggcaaactaagcgtcaggattccatggaaaacacttgggtggggtgccataattattgccatagaagactggagttcagattctctggataagagagagttagatggaaaattggctaaacttaaagctattgagcttgctaagatttccagaagaattacagataaccaaacggggcaatcacttttatcctacatattagcaaagatactggacaacatccaagtttctatacgaaatgttcatatcacctatgctgataactacaaagatcagatgaaaaagaaaagctatgaagtattcaaagttagtgatcgctgggatatatctagtgcaactgcaaacacaaatctttggatgctgtcacttgagaccattgtatttaatttgtatttgttagatttaagttggtggaatgcctcttacatcattctcaaaccatatgaaagcttggaagttataatatcttcactttatcagttttgtttacaacaaggagactatcttggaatagtcctgttcggaaattctaccatgggaaatttcatgtttggtttggaattctccagtctctcgatacaaacggatccgaagaaacaaagttttgccatgtctttgatggtcatgtcaagacaagatgaagtaaacaagacagtagagatatccaatgttggcatttactgtcatcacttggatgaacagcagggttcatgtgatactggtggtcttactgaaactaatttcagtttcagtcatgaattggcccatccaagagatgcttatcttctaaatccatttaacgtgactatatttgtgcttgctaacaaagctggaaagcttgatggtgcacctcggtataacataactgtagagctaactgctctgatcctatcgattgatgaaatccagattcaacaaatcttgaatctttgtgattacttctccatctgtgctttgcgaacaaagtatggccgttatcgtccctctcaaagttctttatctaagagacataaaggttggcagaggatgtggtggcactatgctcagagatccgttttagcagatgttcgcagagaactgaggaaaacttcatggaattacttggggcaacgactggactgccgtcggaaatatgtcaatttttacagaatgaaattggagcttttgcagaaaggacagcttgttagtgaagacattctacaagagctggaaaatatggacagagaaggcgatatagatgatatacttaactacagaactattgcagagcagaaattacaggaagcattggtgaaatctaccaaagataatttttctagtccaggaagtcctcgaattgatgatcagtcagctggggcaggccaaggatggttaaagtggctttctcgtggaatgcttggtgctggtggaacagctgataccagctcatttgctgatgtttcagatgacattattaaggatatatacgagggaacggaattccatcctatttcttctgctgaaaatcatttgacaaaagaaaaccactattctttatttgttaggaaaattggcatgaaacttgtagatgcaatgttcactgggcttggtgttgaatgtaaaatatgggatgattcaacaactatccttgcctgtcttgattcacttgagatcatcaacccattaaatgaaaataaagtcttgctggctgaaaagtgtagcactggtgatggtctggggacacctgttatcagtgttcaagttgactgtcctaagtcaaaccatagcccagaagctttgacacgggttgttgtccaggaattcagtgccatatatgaaccagtgttcatctataatctcatgcacatctatgatttgttttcctccttccagtttcagcatgatagggtgggtgcaatttggtgcaataacttgaaaaatgagcgttctagtgcaacaacttggcatgtactttcctcactaaatcgttttgatagttttggagcaagacttctctccaaactaaagtatacgtctgcaaaccgaaaaaagcttctttgggatttaaggattcaccactttgttgtcaggctaccatcacgaaattgtggaacggaagagcttattatggtttttgaggctggagatgtatccatgcaatccaaagatacagttagggatgcttcacggacacaagaaagaaattctttccttgattacatatcgaaaactcttcctagtaatttttctgatgacctgctcattggcgtcaaattggatgatctttataatcattttgaggtgaaggtattgatgccggataagcatgatatttcctccacatttgtcaaactggatgcttccattgtatttggattgtgcatattcttagatgaaccagtgctgaagcaattggaggtttcgtttattgtgccatttgccaacatgtacttttgtcagacattgtacagtgcttttattaatttgtgtttctactatgcgaaagaaaccgacctaatcagaaataacacttcggatgatactaagagtgaacccaagaagctagccttaaatatgtttgcatctctaaaattagccaagctgagtttaagggttgaccttgaggaccatcacgaggaaagttcagctataactgtttgtattggagatgttgatatcaggtatgctatccaggaattgtcagatatatgggtcattgtgaagatggttcaaattacttccaataatctgaaggaggaatcatattcatgtgtgctatgtttatcaggaaactgcaaaacctgtgtaaacttgacaggatttcctgaaagttccacttctgatgcttgcttaaagctgcattacaggactcttaaatatgaagatcaaatgcaccatgtgtaccagctgaacctaaatgatgttgatctgcatcttattccttctgtttttggtcagataaggaggtttctaaaaagtcttgatgcagcatatccagatggcactaatgttgtgctctcagaactggatctgggttcaatgaaattaggatcagccaataccaaatttcctaagtttgctctttctagtttctgtggtgtagacggcacattatttgcaggaatccctgttgatcactttccctttgtacggatggatttcatatctggacatcaggcatcaggtggttcatcttcaaagggtaaatgcaatgagacttctgatttaaattgttactgtgcacaagggcctgcaagcaattcactgtgcaaaaccaagcattccaattgttcatccaactcatctcagaactccatgaatgccagtttaactgttctagatctatctcttgtttctgttagggtgcatttccatgaatcatgtggtattttagctacacttagtgttcccgagtctatagctgcactctcattgtctgatgcaagctcatgggacttgttgttgtctgctaaagatataatgctttcttcatcatggacctctccaagtgtccatgaactactatggagtagatcttcacatggtaatgctaatattctcaacatccgtattaaaaaggactttcctgcactgtcaactgaagtatgtattggaattcaaaatgtttgctgtgtattaccatcaaagttactcgctatgtttattggattctttttgttggacgattggacttctttgccagaagagcatcactctgtggaaaatcacaatcttgagagctctggagaatcacttgacagtatgacatatacatttgagttatgtgattgtgttgtgctttttcctgtggaaaatcaacatttttttggtctaagacttggtgttccatatttttttggtgagttcatttcaactggaagcactgcagaatttgcaaatcgtatccccaaagaattcttcagttcagagtgtatggtttccagcagagttgacatcatcagcctctgtgtagttaaggcatccatatcacttttatttccagatgaccaagcaaattttatcctgaagcttgatgaaaacatgcctagaagaatccaatctcttgtggaaaagcttgacgctggtatatggattcaaattccttgcatagaactatcctgctctgagcaatcatctttgcccacattcattatgagcaaaatatcaaaatgcaacttaattgctgaagatctttattttgtggatggaatggaggcagtttttgctgttactgatgagttaatttctattggcaaagcaagtaaactgtacaaaggcaacgccttgcagtttttagaacaaagaattttaaatgaggagagccctggtcctaatgattccattaatatcactgtttctgtcagtgatctggcgattttcttctgtcactcaaaagataagggtttggcattggagaagattgccaatgcaaatatgaagtttgatgtctctgctgtattggttagtgaaaaaccagagcgcattgacatggatattgtttcattagcccttcagtcatctgacagtcacactcttgtctccattatgtctgatgggtcgttgtctcctgttttcatcaagtttgcgaagcatgatggacgagatgaaatattaatgtctgtaccttcttttgagttcatgtacctatctggcagaaaacagaaaattgtgcaagcaatgttatgcctgggacttatggttcttgtacaatgcaagctaccagtcatcactttgcagatgatattcgatctcctgaatcaaaagattgcaagtgatagcaggatgaacttcagatgtgatttagataggatgaagataatactggagatgattcaaggggataagggtacctctgttccgttcatgcatatatccaaggctaaagctgctggttatattcatcaaccggaagggaagccgctacatctttctgttgatttacaagcagaatacatggatgttggtttttcacatcagatatttagcttttgtcgcagtatggaactcaagtttcctgtatcgtcatcatctgcttcctcattttattctgtgacattcaaagtgggattaagaaaaggttctatcctgctaaatgatggaaggtggggcagtcatgggcctgtcatagagaccctagtgaagaacttactggtgcaatttagtcaaatgagcgatcggattgaagtttctgcttttgttgaccttttagtaaactacaacaacattgataaggttatgtgggagccttttatagaaccctcaaaatttcagttaaatgttattagaaaatgtgccaatcatgcgctggatatatctcctagtactgaggtgtggttaaattcaagcaatcagcttaatctaaatatatcagagcctttgattgaggctatcctcaggcttggtcaaatgattacaaattctcttaatccagttagtgaaggtggtcttcgagaagatattgggatcctgaggttaagtcgtgatgatgtgcataccagaagatatgcaccatacatcctcgcgaatgacacgtcactaccatttaagttcagggtgtaccgtggcgctgtcaattcagatgacattgatagtttctcagtagtagatgaaaattctgtgccggcagggtatgcagttccaatttatgttgaagaagctcttgatgaattcttctttcaacacagggaagcacgatcttctgagcatcttattgagaaacggatgagtgcagtctcacattatatgatatccatcgagtttgatgcaacttctgggtcctctaagccaatgtcaatggatcttgtgggcatttacttctttgaagtaaacttctcatccagtaagaagcctcttagtgaagaaagctgggaagcatttgcatctaacagaaagggtagtcatgaaagcggcttaattgtgcctgtggtactcgatgtctccttacacaactacagcaagcttatacgagtttactcgacggtcaaactctacaatgcaacatcaatgcccctcgaattgcgatttgatattccattcggtgtatcttcaaaggtattagggccaattcttcctgacaaagagtttccactgccagttcatttgtcagaggctggccagattaggtggcatccagtaggcagaacttatttgtggagtgaaacccactctttatcaagtttgctttcacatgaaagcagggttgggtttatgaaatcatctgtgtgttatccttctcaccctagtaatgatccatttcgctgctgcgtatctgttgaagaatacagtatccctacatccagtagtacccagaaaagccaaccaaactatgggaatcctattccaaaggcttctaagcaaattttggcaaggaaacatttcattcggaaagtcagacttagtacaccacttctcataaagaattatcttcctgtgtgcatttctttgacaatagataatggtggggttgcgaatgaagtttcacttaaggaggtaagctttgcctcaatattttttgttgacccttccaatgatcttggaattacatttcatatacaagattacagatcgttggccataaagttccctcgtgtggaatcattctctactgcagccaaatcaaatggaccaaaattctccttaacagagacaattaccttctactcaaatgaattgaattgtcctctcaatgttactttggagaaagcaatggatgctaattctggtgcaagagaattgtacctttctgtcccatttttgttgtacaactgcacagatctgttgctcactatcacagaaagcagctgtgaaaggaatggatccactcttgtgatcccttctagtttcgagttggatgggcagacaagacatttgcttggcaaaaatggtctttttcttgtttcagaagatccacctatacagtcagtgtctttctggcgcttaaagtcttttgcaaataaaattccacagttggattttgctgatggaggcagctcttattcaaacagaacggctgcaaataacactaaggatgctccaaaagaatgcaacaaagaggctaaagcttacatgttcgctccttctgggcatacacctgcaactgaacttttggtaaagttgaatgcatctgtacctaacagcggaacagaaacaactcgacgagattggtcaagtccatttctccttgtccctgccagtggttcaatgaatgccaccattccacaatcatctagttctggtgcatttttagttgctgcaacatctatacctgtttcaacagaactctttggaagaacaagggctattgctttccagcccagagagttacttgtttcaattcgtttcgatgggccaggatggcaatggtctggtagttttttccctgaccggttaggtgatgttcaattgaaaatgaggaatagtgcctcaggggtgtcaaacatgattcgagttgaagtacaaaatgctgatatcgatgtacacagcaataaatttgcgggaagaaacaatagcaataccggtacaatattgattctgctttctgatgacaaaactggtttcgtaccttacagggttgacaatttttcaatggagaaattgcgtatatatcagcagaaatgtgaatccattgaaacaattgtgtatccttacacatcctgtcaatatgcttgggatgaaccttgctatcctcatcgcctaactgtcgaggttcctggtgaacggagtttgggtacatacaatcttgatattctaaatgatgatattcatgtgtccctacctttgacatccgagttttgtgtggagaaggattttatcctcttaggaccctctcagaaaagattgaaggtgcttagtgttattgattcaaattgccacaacatggacaaaagagaaacaaatctccttggttcaagggaacctaaagatgctgatcagaaacaggagcttgagctgaacttttcagatgttttcagaatacacttgccgtttattgggatatctttgataagctcactttcccaggaattgttgtttgcttctgctagggagacaagaattgttgccatgcagagtttagatcagcaacaaattacgattgaaatgcaatctatgcaaattgataatcaattctctgacagtccataccctgtcatgctatcatttgagggaagtcacaaaggaaagaacatgaatttttttaagagtagagatacgaaggtgagatctccaaatgaaaactcttctccagaacccatattgcgccttgctgcagctaaatggagatctaatgacgcaccatttgtttcgtaccaatgtataaacatgagcatagcaccttttcaccttgaacttgaagaacgacttgtcttcagcatgattgactttatcagatctgtttccactagaatacatcttggacagctggatagaagttttgacttgggtattttagatgatgctacggatatatttggtcgatatgagaaaatttcaaagcgcatatctgggaagccccaaagttcctacatggtggaggcacagcaagaccaacttctgccttctgttgtcccaatcggtgctccatggcaacaaatacacctattggccagaaagcagaaaaaagtatacattgaattgtttgagttgactcctatcaagttgactttcagttttacaagcactccatggctcaataggaatgaaagtagctcagatccgagcacaagcttcaacaacagtaccgcaattcagagaggtcttatggccctgattgatgttgaaggagtaccagttcaccttggagaaatagtggtggaaaatcttatggccagctggcaatccattcaggacattcttgtgaggcattatagcaggcaactgcttcatgaagtttataaggtttttggctctgctggtgttattggaaatcctatgggtttcgctaggaatgttggatttggcttgaaggacttcgtctctgcctcaaggagagggatattgcagagtccggttgaactgttaaatgggatagcacaaggttcaaaaacacttatcggcagtacagtttatgctgttagtagtgccacttctcacttcagtaaaactgcttataagggtcttgttgcttttacatatgatgagcaagctgcttctaaaatggatgaacgggagaggcagctaagtttgcatggggaaggagtgctaaacggatttttagagggtttgaccgggctcctgcagtcaccaatcaagggtgccgagaaacatggtcttcctggagttatctcaggtatagcaatgggaacagcagggcttgtagccaggcctatggccagcattcttgaagcgactggcagaactgcacagagcataagaaaccgaagcaaccctcatgaatcgaaccgcctacgagtccgtttcccaaggcccgtggccagagatcgtccgttgttcccttactcctgggaagaagcaattgggatttcactgcttttccaagctgatggtggtagactgagggaggagacatttgtcatgtgcaaaacgctcagagagcccgggaagtttcttgtgcttaccgagaaactgcttctgctggtttctagcccatacttggtggatctaggatcaccccagtttgttggtgttcctcctgaccctcaatgggcgatcgaaaccgagatgagcctcaaaagcattgttcatctggacagagctcaggaggtagtgaacattgtcgggagcaacggtgaaacatcgccaagggacaaaagagggagcataagaaacaggggtgcgagctcggccttcatcccgctgttccatttcagcgtagagatgccaaacattgaagacgcagagggcacactgcagatcctactggcacttatcgagaaggggaaagcgcgaagatgggataagaacatcattcaccgaagcaacatttactgaagttctataacattcgtttcagtggttgccatcattttgcacctcaaaagatcaccagccaagatcattccacgttttttgatgttctcccggctgaattatgccatagacaattttgtaagactagaacagtgtaggtagataactagatataacgatgatccaccacgcatattatgtagatagtccaattttgtgagatatcggtgccagttgagctaggatggttttattattattattttaggcgtcctgggaattttgtccatagcccccctgtaaatgactagttcttgtaaataaaatcaaaaggcaatact

SEQ ID NO: 65310 - DNA, 355 bp, Oryza sativa
  Clone ID: PAT_MRT4530_66370C.1
gcacgagggagagagagagagaactagtctcgagttttttttttttttttttttagtaaaaccggacatccattttccctcatcagattaaaaatcaccaaccacattaacaaacccccggtggtgtcaccgggcgggactcgggagacgaccaggggggggaattaacagctaatcacccgcatcagcagccactagtcacacccgattctttcactccaactggggctgtgagcgctgacatggtctggccactgggcaccacgggggacgggggacaacgccacaccaccatttaattacttcttccccacttcaattccaaaaaaaggcggaaaaaaaaaggaaggaaaaa

SEQ ID NO: 65311 - DNA, 753 bp, Oryza sativa
  Clone ID: PAT_MRT4530_66371C.1
atggattccctctgcccttcactagcccaccaacatagccatcttgtgacgacaaaggtgccgctgcaagaggacaagcgtctggatcagggcccgtcgcaagcctggaacacccacctcacgacaccaccgtctcgtcgatgcctcaatcggatgacctgcgccaaccggagcactgtccgtgccagctcactgccgccgtctacggcctcccgtcgcccgcgccacagcactctcgacggccactgttgccatgccgatgccccatcgtcgctgcttgcgatgcgctggcctcctactgccgccggcaacgtcgcacgacctcctaccgtcattggccaggctagccttgccgaacgtcctcttgccatcgccagccgagttagccttgccgccatcggccccttgcctaaagccatcagccaaggtgacctcttcgtcgctcccgggcagatccagcgccccgcccccaccgccaccatctcctctgtggcctcctccatcggtgttctcgttggctccgagggagaagacccagggttgggcggcaccgccaccgagcaggcacagaccctagccgttgaagctacctcgaggagggcagagcgccccagtgccgctatcattgtgacctgcccggcttttctagcgatccactcgagcagcggtgaggcgaaggggaggaggagggaggcggcagattttcgccgtctaagttgcccctggggtggagctcttgcacattttcgttaa

SEQ ID NO: 65312 - DNA, 2085 bp, Oryza sativa
  Clone ID: PAT_MRT4530_66372C.1
tcatctacctccagagaggtcagagaaggtgcctgcgctggtggatgtcatcgggtaggacatgacgtaggggtcgaacccctggtcctgcatgagcgccagcatgttgaagctctggtacgtcggcgacagctccggcagcggcacgtcgccttccaggtactgcacaagctgcctcgtccccggccgtgcgccgggcagcgggtgcgagcacagcaggcccagccgcagcacgaggctcgcctcgctctcgacgaagtcgccgtgcaggcgcgggtccaccgtgtccgtgatcgccccggcgcgccaccggtcgagcacccagtcgacgagcacgacgcggttgtcgcgcgcgtcctgcgccacgggcttccgcccgcacgccacctccagcatgaaggccccgaacgcgaacacgtccgacgccttggacgccttgccggtgtgccccagctccggcgccaggtagcccatggtgcccaccacgtgcgtcgtgtgcgggtcggtgccgtggtcgtacagccgcgccaggccgaagtcgccgagccggccgttcatgtcggcgtcgagcagcacgttgctggccttgatgtccctgtgcaccaccacctgctcccagtcctcgtggaggtagagcagcccggacgcgacgcccctgatgatgcggaacctctgcgcccatctcagggtgatcttgccctggtcgtacagctgcttgtccaggctgccgttgggcatgtagtcgtacaccagcaggagctcgcccttgcgccggcagtagccgagcagctgcacgaggttccggtgccggagccggccgatgctgaccacctccgccacgaactccctcatcccctgcctcgacccgtgcgccaccttcttcacggcgacctccgccttggacgacgggagcacgccacggtacacgcgcccgaacccgccgatgccgaggagccgcttgtcgctgaacccgtcggtggcgtggaacaggtccttgtacgagaacctgtgaggcccgaacgtcacctcccactcctccttgagctccgagaacatgcgccgccgccgcatgaacacgaacacggcggcggccaccgcgaagacgagcaccgccgaggctatcggcagcacgatctcaagcgtcttggaccgcggcttggggaacgtgaccggcagggagggcagggatgagatgttgagcgccggcgcggcgccgttcatcttgaagctccagccgagcacgtagtggcggcagaagaggatgccggtcgccgaggagaagccgacgtaggcggtgtcatcaatgacggaggagatgttgacgattttggacagcaggggcttctttggccgcgccacctccagcggcgccatggtgacattgacctgcatggtctggccgtcgaagtccacccacacctgcatcggcctgcggctcaccaggctcatgttcttgaagtcgccggtgccgtcgtcgtagtacccggcgttgtcggcgtcgacggagttgaggccgttgacgtcgatcccgacatggttgccgctcatgtcgttgaactccgagttgaggatggtgtcgaactccacggcgaagaggtggttggtcgcgttgccgttgttggcggagttgacgagccccatgaactgccccggcagcgccgaggtgaggttcttgctcttggcgatgatgaacgccatgccgtggctgctcaggtcctcgaacgcgccgatgatgccgatgacgaaggccgtggagaaggactgcatcgccgtgctgttgggccccctctggaactggagcggcgacgggaagaaggcgtggcccttgagctggttcgtgccgttggtcagcatgagcagcccgttcgaggtcaccgttgccatgccgtcgaagctgaggttggcgccggtgaacccgttgaagacgaaccgctcgtcggtcgccgccgccgggcggaggcagccgaggccgaggaagaggagcaggacaaagaacggcatttctggtttgggaagcaccatgccctgcacttcgcctagtgctgagcttcaatcagtgcctcaccaaatgcccaagcttaaaga

SEQ ID NO: 65313 - DNA, 549 bp, Oryza sativa
  Clone ID: PAT_MRT4530_66373C.1
atggaagtttggcgctgccggccgctgctgcgtaacgcgcggctttgtactaggtggccggcgccgtgggcgcgcaccgcgcgcccgcgcgcgcatgcagggctcccacgaattggtagatcggcctctcgatcgggacacggacgcgacagcgtcgcggtcgcgatcgcgatcgcgcgggcaaatacggcagagagagcacggtgttggacaaaaaatttctgtcggccgggctaccgcggcgagtgcggcccccggtcacggggctcacggcagtcgcgtctagctgctcgcgattcccagccgcctctcgctagggactcgtccgtcactcctatccccacccaggcggccatgcgagagagcgtcctcaggtggtggcgcgcggcttctgctctgctgctcggtttgctctcgtcccgtctctcgcgtcatcgcgtgcggctcccgctgttcaccgccggggggacccgcggacagcggtgtacgtatgcgttcaagaatcacgtgcacctcgtgcacgtgatgcagggggagtacagaaagtag

SEQ ID NO: 65314 - DNA, 174 bp, Oryza sativa
  Clone ID: PAT_MRT4530_66374C.1
ccatgagactggccttgagacgtcgatccgtactgttatgagcaagcaccggaagatgcacaaccgtcttatcgtggaagctctgtcatggccggagggatgggctgatgacatagatgaccgccctattgacccatgtgatgaaccgaagcttctcaccaacatcctgtctgt

SEQ ID NO: 65315 - DNA, 1179 bp, Oryza sativa
  Clone ID: PAT_MRT4530_66375C.1
atggcggcatggcgactccggcacagcggcatcagcggcgttctccggcaacggcgtgcggctgcagcgacaagcagcggcgtcggcaagaggaggcggaggcgaatccggtggcgcagcaccgagcttcgggacgacgtggagatgacccatcgacaacgagcggtggacgccggagttgaggaggagagaggaaaacggcgcggaaggaaaagaggctcggcctcagggctttaccagcggctgcggtgcggtaggaagacggtgacgacgacggcgcggctcctggcggcggcacggagcaacggcggcggcggcggcggctttggaaaaagggggaaaaaggggcggtggccggcgagaggaggatgccgggccgagggcagcacgtgggctcggggcttggcctccccgggcctgcagctcaagaagagagagctggagacgggggagatccaatataacctcacggaacacatagcccagacgcaagaatggcaacagacaactgatgctcagttcgccaacatcaacaacatgatgcagcaacagcacgacgacctacaagcggatgctccagatcttctcctgatggcagttgcggggtacttcagacatttcgcagacgtctacgactttaccgatcggcttgccttcgtcgccgtcgactggtgtctccgcttccacggttggcctattatgctgccattgttgggtgtctacgacttcatcgccggcctgccttcgttgccgctgactggtgttctcgcctatacgaacatcaccattggcttgctgtcgtcgccgccaactggtgtcttcgcttatacggttgggtggtcacaccgtcgtttgttgggcatctacgtcttcaccgaccgacttgccttcgtcaccgactggtgtctccgcctgcatggctggcctattatgccgccgttgttgggcgtctacgtcttcaccgatggctcgccttcgccgccgccgactggtgtctccgcctgcacggctggtttattatgccgccgttgtaggacgtctacatcttctccgaccggccacctccttcatgattctgccagtgttgattggccttatcgtcttcactgccggtcgtctcgtctactgctgtctagtgccctcgcctctacggctggtttataccgctaccactactga

SEQ ID NO: 65316 - DNA, 567 bp, Oryza sativa
  Clone ID: PAT_MRT4530_66376C.1
atggcggtgagtgttgacgtcgggaacaggaagaagcgccggccggattggggtcgaaagctcagcaaggaaaccatccatctgatttccggaacttttgatctttggatttggactgacgagccaagagccatcccgaggggtggtcctttctcccttacatctgctgatgaagaagggttgccgacagacatcccgctccccgacctagagccccatcgcaatccgccgccctctgagcccaaagaaggctggacctacaatgtcctgatccatgtcgacacacttgaagacctccactcgcgcaaggcccgtgcctacaagtgggactacgaagttcaagatgatgggtcaaggtacaaggagtatccgctgccttgcagagcggaacctgatcctgctcggggtcccagggacgacaatgatgacaacgatgaccagtccagggggcgccataggagtcgttccctttggaatcgccttggtggacactcctcaagtcgcagtagggaacctgataggagggatgtgcaaaggcggataggcaaagataatatccccctctaa

SEQ ID NO: 65317 - DNA, 441 bp, Oryza sativa
  Clone ID: PAT_MRT4530_66377C.1
atgagacaatggccgtcgccggcggcgcagcgcgcgacgaggcgccttcccggggcggccgacggcgccggcgcgcgtcctgggcatgcagcggtggcggcgacgcgaccacggaagaaggggagcgcagatctggcggcgctgctgctgctgcggcagcaggcgtcggctccgaatccgcaagcttcccttcccttctcgccggcggacatccacctccgcttaccgcctcaactggatatgtttagcttacatatctgcttctttcgttatgggctgaactctggagtggctgacgagcagcccaaccaccatgcgttccaacgccagccatcaatcctcgtcgcgcgcgaacccgttggagctatcgacgaggacgagccccacctgcccccgttcgccgccgccggtacccaggacgaggtcggcctccggctgtag

SEQ ID NO: 65318 - DNA, 387 bp, Oryza sativa
  Clone ID: PAT_MRT4530_66378C.1
atggcagacattctatcaaaaagacaaaaatatgtcatcaatataatcaagagaagtggtccaatgacaagattttgttctatgtgtatgttggaggcataccacgaaggatcttcggccggacctgccgaaaccaaggacttaagcgacaagcttagactggaggcaactggcgaagatcgagaagggaaccgtgtggtcgaaagtctcatgacaaagaccatggctcggacactcagacttcgccgaacaagaacttcgtcagaaggcggtgtgggtgagggcgataaggtgaaagccttggcaggagggcccgggtttcgccagatgccgaacctcaccgaaaagtggctcaacgggccactgtgcccaggaaggtttcgctaa

SEQ ID NO: 65319 - DNA, 162 bp, Oryza sativa
  Clone ID: PAT_MRT4530_66379C.1
atggagaaagggtggtggatcgggttggcggccgatgcaaaggatgtcgaggccgtcgggctctttggtgccgatgctcagagcaaggcggtgtcgcggcgtgatgttatcctgatggcctcatcctctagtctactctggcctatcgacgcaccttcatga

SEQ ID NO: 65320 - DNA, 190 bp, Oryza sativa
  Clone ID: PAT_MRT4530_6637C.1
aaggcattaaaacacgggcgggggtttgcatagtgtttaagcatcaccatcaaagtttcacagcccaagggaaaaagagcacaggaattcagtggaaggaacttgtaacaccacaacatcaaagggttttctagcccatacaggcaccacagggaaacgttccagatgtccgacagacaaagactataca

SEQ ID NO: 65321 - DNA, 549 bp, Oryza sativa
  unsure (1)..(549): unsure at all n locations
  Clone ID: PAT_MRT4530_66380C.1
aaaaaaaaacgacccatcattacaggaacaccccccccaggaaacccaagcgggggaaaacccacaggaccagaacaaagctaaaaaaggccgggaaaaattttaccccacattaaaggaaaaaaacaaaggcctaaaaacagttcaaaagcaaaaaaacccactagggcccaaaaaaaaaagggcaacggggatccccaggggaagaggggggggaaccccggcaggccccgctaaactacgattaggacctaatcccccccccaacgggtaggcttagggcgggggcttggcccccttaagggggggcgccttttccttttccttaacccccgaccccggggaaggggtaaacccaggggggggggggggccccccggccccaggggagaacaccgggtcgttttgtccgaacaccccaccgaacccttccttgtccgaccgggtgaagtatccccccccaaaagagggggccaacacggcccctggggccttgggcatggccncnncggggaagccgcgcttttcctggtgggggtgggggtggaa

SEQ ID NO: 65322 - DNA, 164 bp, Oryza sativa
  unsure (1)..(164): unsure at all n locations
  Clone ID: PAT_MRT4530_66381C.1
cccgagtngcatgagcagctacgtgctgggtncctgaacttccgtggccgtgtcaccattgcctcagtaagaatttccagctggttgctgcaccaagccctcctcctgctggtnctccaactccttcgaacctggtcagccgcnccgaaaggtattgtgaagtt

SEQ ID NO: 65323 - DNA, 3325 bp, Oryza sativa
  Clone ID: PAT_MRT4530_66382C.1
atgcgtggaggaggaggaggaggagactctgaagtgaactgccatggcgagcatgaagcagcagcagacgccggcgagctccgcggtgaccgcggcggcggcggcctcctcctccgccaccgccgccgtggccgcatgcgaaggggagcggaaggcggcggcgatcaactcggagctgtggcacgcgtgcgccggcccgctcgtgtcgctgccgccggtgggcagcctcgtcgtctacttcccgcaaggccacagcgagcagctactaataactgtacttgttcattaccaaagtggttgggagcattgggcctactggcttcccttttctgttgccctactagtatggtcaatagacagtcttgggaggactaatcctgcaattattcgtgcatttctttttagaaagatgagaaaaaaggtgtacaaaagtaacataatattaagaaatgctttctccatgctattggaaacagcagaatatctacttaatctaagctttttgtttcaggttgcagcttctatgcaaaaggatgtggatgcacatgttccaagctacccaaatcttccctccaagttgatatgtcttcttcacggtgtcaatttgcatgcagacccagatactgatgaagtttatgcacagatgactcttcaaccagtgaatacatatggaaaagaggcgttgcaaatatcagagcttgcactaaaacaagcaaggccacaaatggaattcttctgtaagacactcaccgcaagtgatacaagtacacatggaggattctctgtgcctcgccgtgccgcagagaagatattccctcccctggacttctctatgcaacctccagctcaagaactgcaagctagagatatacatgacaatgtgtggacatttcgtcatatatatcgaggtcaaccaaaaagacatttacttactactggttggagccttttcgtgagtggcaagaggttatttgctggtgattctgttattgttgtgagggccagtcctactgaatttgttatcccatttgcaaaataccagaaggcactgtatagtaatcagatatctttaggaatgcggtttcgcatgatgtttgaaaccgaggaattaggaacaagaaggtacatgggtacaataactggaataagtgacctagatcctgttggctgggatgagtctgcagctggtgaaaggaggaacagagtttcaatctgggagattgaaccggttgcagctcccttttttctatgtccccaacctttttttggtgtgaagcgccccaggcaattagatgacgagtcagagatggaaaaccttttcaagagggcaatgccttggcttggtgaggaggtatgcataaaggatactcaaaaccagaacagtacagcacctggtctaagtttggttcagtggatgaacatgaacaggcagcagagctcatcattggctaacaccgctgcgcagtctgagtacctgcaagctctaggtaaccctgccatgcaaaaccttgctgctgatgaacttgcaaggcaactatatgtccagaacaatctccttcaacagaactgcatacagtttaattctcccaagctccctcagcaaatgcaaaccatgaacgatctgtccaaggcggcaattccgttgaatcagcttggggctatcatcaatcctcaagatcagaaacaagatgctgtcaaccatcagagacagcagaactccatacaagtgattcccctgagccaagctcaatctaatctcgtccaggctcaggtgattgttcagaatcagatgcaacagcagaagccatctccaactcaaaacccgcaaaggattaatggccagcggctgcttttgtctcatcaacagaaggatcaaaatttacagctgcaacagcagcttttacttcagcaaaaacaacagttacagcagcagcagcagcagcaacaacagaatcagcagcagctaaataagtcccttggacagttggtaaatctggcaagtcagcagtctaagttgtttgatgaggagcttcagttgcagatattacagaaactgcagcagcaatcactgatgtcacaatccacatcaacactctcacagccacctctgatccaagaacagcaaaagttaatcacggacatgcaaaagcagttgtcaaattcacattcacttgctcagcaacaaatgatgccccaacaagaaatcaagccttcattgcaagcaacaccattgctacccacggtccagcaagagcaacagcagaagcttttacagaaacaagtctcacttgcagatgtgtcaggagttgcttttcaaccaatttcatcaaccaatgtgatccccaaaactggaggtgctatgatcatttcgggtgctacacaatctgtagttacagaggaaatgccctcttgttcaacatctccatccacagctaatggaaaccactttacacaatcaaccaaaaacagacattgcatcaacacagaaaggctgccaccgtccactgctccaatgttgatcccaacctccattgacgctgtaacagcaactccactaatgaccaaggaattgccaaagccgaataataatgtgaagcaaagtgttgtcaactcaaaattaccaaatgttgctcctggcccacaaaattgtataaaccatgcattgcaaacagacaacttggaaacatcttcatcagcaacttcattatgtccttcccgaacagatggacttgtgcatcaaggtttcccctcttctaacttcaatcaacaccagatgttcaaagatgcacttcctgatgtagaaatggaaggtgtggatccaagtaacagtggcttgtttgggatcaacaatgataacctgttaggattcccaatagaaacagaggacttgctgataaatgcacttgattctgtcaagtatcagaatcacatatcaactgatgttgaaaacaactacccgatgcaaaaggatgctctgcaagaaatatcaacctccatggtttcccagtcatttggtcagtcggatatggcttttaattccattgattctgcgatcaatgatggtgccttcttgaacaaaaattcctggcccgctgcccctctgctgcagagaatgcggacattcaccaaggtgtacaaacgaggagctgtaggccggtctattgacatcggcaggtactctggatatgaagagttgaagcatgctttggctcgcatgtttggtatagagggtcaacttgaagatcgacagagaataggctggaaactggtctacaaggatcacgaggatgacatcctgcttcttggtgatgacccatgggagtaa

SEQ ID NO: 65324 - DNA, 291 bp, Oryza sativa
  unsure (1)..(291): unsure at all n locations
  Clone ID: PAT_MRT4530_66383C.1
nttatatatttttcattgtatgcagcaactctgactaaacattctgaaaaatgtgatttagcagtgatgtccaacttatatagacatacatcgagtacgagcacttaaattagaggctatgctgagatacagcgcagataattaatccatgggcatcctccctcgaactgaacattgtataagtagattctgtgataacacgttgattatgtcctacgtgaccaccctaacctatgtaaagaaagtcttcttgatcggcttgaacagcatgttctggtatgcaaaccaccc

SEQ ID NO: 65325 - DNA, 477 bp, Oryza sativa
  Clone ID: PAT_MRT4530_66384C.1
atggcggttggcccagcgcggcggcggcctaagggcggccaggcggcgtcgggtggatggggagagaaggccgcgaaacatgttttcggaatagcattccggcgaaatcgctttttgaaagtggccaaatgtccatttctccctggagacggcaaggtcatccattgtgtagatgaagtcaaagccctggatcttctatcggtcggcactgtcaccacgaggagagcgggcggggccatgggggcgtccaagcagcgcaccgccactgctgcccttgcgttcacgcgaatcaccagcacctcctacacccgatgcagcggcgcgcaccgtgggagtcgagctcaatggcggtgcttgaggtgccgaggggtggccctggttcctcctcctgatgcgacgcgcaacgtgggggtggctgcgactgcagctgtgcaccgaaaccggtcctctccaccgtcggctcggctgcctccctaa

SEQ ID NO: 65326 - DNA, 1122 bp, Oryza sativa
  Clone ID: PAT_MRT4530_66385C.1
tcctagctagagatcgctgtgttgctgaatgctgacacgcggagatcaccggagatggtacacctaacagttaccggtgctagctacagagactccaacgcagccacaattggctcaaccgtccctgcctcagctgagctcgcgttattgaatgccgcccgccggccatcgccgtcgccgtcgccgtcccatgccgatgccgtttatgacatacactgtgctgatccattgaaagtagcaaccaatcgagctgcaccgacactagaaagaaatggaaatgggattaaatcggatttcttatttttgctgcatcgttatttttcaccggagccgtgttttaccatcgatttggctattcttcgcatccacgacgagacgttaaactggcgcaatggccccatgagcaccagcatggacactattcgcagtactcgaaggagtaatttggccgttgcacctaacctaacagtcatcttgttcatggcgggaggatcacggccggtaggggaggagtgccggcggctggcggaggaggaggtccggcgcggcagctggcgaagacgagcggggagagaagcagcggccgacggagaggagcttggcgttggtggtggcggccgtcggctagacccagcgagcgccgtcctctgccaggaacgcgtagcggcgagaccggacgtcgagcccggtgggcttgtccgagaggtcgagctcgacacccatggcgtgcgcaagctccccgttgccgtcggaaaggaggagcacctcatcacggcggcatcatccgagactttgcagactcgccggcctcctcacttcaccccgtcggcctcctccccacctgccggttgcggtggcggtggcggtggcgatggtgcttgttcgggcggtgagcctccacaccgtggccatggcggcgagcgcctgcggctccgactgctcgccggcgccgaggtcgacgccgacgcccagtaccgggtcatcgtcgagcccacgcgacgcgctgaagctgcgtgtctgccggccggctcgcccagagaagagaagagtgagagagagaggaggaggaagaaaggagagtcggagaggaggggagagagagaggatgatgacgtggcatac

SEQ ID NO: 65327 - DNA, 585 bp, Oryza sativa
  Clone ID: PAT_MRT4530_66386C.1
atgggtacgagtctgatctggtggatcaacatggcgggtgtcaaaaagaagattgaagaacacccaaataagtggcataaggtgctttctgaagcattatgggcgcataggatatctaaacatggtgctactaaggtcactccttttgagttgatttatgtatatgaagccgttttgtcggtcgaggctttggaagaaatagagaaagagaagaagagagtggctaaagcatacaacaaaagggtgaaagcaaaattgtttcaagtgggagagggtactcgatctaaggagttcggttctattgaaccatatgagacaaagcgggagagggagacggcgggcggcgacgacgtggtggagtggtgggtgcggagggcggtcaagaagaggaggtcctcgccggcgagcagcgagagggtgaagtgcagcagcggcagcgcgcgcgtcgagtggaacgatttgatcctcaggctagctaatattattctgtcaaatgaaaaggactgttttgtatggtcgttccataagaatggccaaattttaatcaaatctatgtatggcgcgatcatgaactgtaaattctag

SEQ ID NO: 65328 - DNA, 509 bp, Oryza sativa
  Clone ID: PAT_MRT4530_66387C.1
gcgcaaaagaggaaaaaaagcattttcacttgtagggattgactgatctatctgcaagggctagtacgggggtcatcattatgcaggatctcatcaccagcattagggtcatctccatggacacgtgtacgcagtacatgatacgaacatggaccatgggtagctccacaaggatgttgatatcccagtcaacgccgctcctgcagtactaatgctgcatgcaactacacggcatgaggcctaagcgatattgcggcaccaggtgccacatgatgcacagaatgcaacatgtcattagttctggactcggacaccagaagatcattaagacggcataccacatgccatacatgtgcaacatgggagctgtcaacttccaactctctaagtgtggttgttgttgatcaaacgttacttacatgtactctagtaataaggtgttgcatactatcacgtgcaaacactagaaataggagccatcgaataaaagatcaatcattttcagactt

SEQ ID NO: 65329 - DNA, 1596 bp, Oryza sativa
  Clone ID: PAT_MRT4530_66388C.1
agtggatccccgggctgcaggctccccctctcctcctcctcctttttcctcccccttccgaaacgacgaaaagcaaccgccgaggcggaagcggggagaggagaattcgccgccgccgccccccgatcggtggaagaacaactaacaactagattgatccatccctgcgccgccgcctccgcctgccgtgggggctctctccgctgtggatgatagggaggctcgacgatgggagggaagaaggccaagacggttgagaggaatgaccaccgcctgctctgcagtgacgtgctcacggaggtcttccacaggctgccggcgcgcaccctcgcgtcgtgcaggcttgtctgcaagtcatggatgtcggagctcaccgatccccatttcgtccacgagcacctcaagaggagccagcagaagctcctgctctttgcgaacgacaaggcgaacgataggtccctcgcgatggtgctcgccgacgacacgggggctacctaccagctgaccaggcccatggcttcgaggagcctctttgtgcacaattcttgcaatggcctgctctgcctaggtgacagcacaggagccgtgcagttgctcaacccgacgaccggcgaatcggctactctgccgatgccgatgtataccgcagggagcagccagttctcgtcgtgtaattggcactgcttggggttttgcccgtctacgaaggagcacaaagtggtacatttctacctgggagctcattttgattctttcaatgtgtgctgcgagatattcactattggagataaatcctggagacagattgggagtttccatggagcaccgacagatagaggggtgcatgtgaatggagcagtgtactatctgacaaagttccgttacattgcttcgtcacgtatcaattgtttgaatcttgagagcgaaaattttgatgtgatgatgcttcccccacgcaagtcgtatggagggcattgctctttggcggagcttgagggaaagctatgcttgctagttgtggagggtggacatgataatccacctcgtacaatggacatattgatgcttgatagtggtgataagacaacctggacgcacagataccacatctcattgccatggttgatgccttcatgttattttactccaaaacacactttgttccatgagggaaaaatttgggttcagttgttggctcggaacctctactgttatgatccaagttcaagctccactgaactgaagatggcatgtccagaatctgagtttccttttagcacacatactttcattgaaagcatagttcctctgcgcaaagattacttcatcaagcagatacagtgataatggtgttcatcacttgttttccagatgttccgcagttcacagaattacaaaattgtgcccctttttccttttccgttgatgaattttagctggtcaatgacttagagtggcctattttaccgtgaattgtaattagctaaaataaatgcagtattgaaacctccttacagcacatgcaagtctgacttctaattgatgtgcttgtttctaacttcctattatgatgctaaattgatatgacgagttgag

SEQ ID NO: 65330 - DNA, 1779 bp, Oryza sativa
  Clone ID: PAT_MRT4530_66389C.1
aaaatattaaaaaaaaatctgctcttaacaactccctataaagctaccactacgcccccctaccccggagaagcaaccaatccaattccgaacaagcaaggcaccaaatccccccaccatggatcaccgcctcctcctcctcggcctcctcctcctctccccggcggtggccgccgcctcagtccccggcgaggaggagccgctgatccggcaggtggtcggcggcggcgacgacaacgagctggagctgaacgcggagcgccacttcgccagcttcgtccagaggttcgggaagtcctaccgtgacgccgacgagcacgcgtaccggctctccgtgttcaaggccaacctccgccgcgcgcgccgccaccagctgctcgacccctccgcggagcacggcgtcaccaagttctccgacctcaccccggccgagttccgccgggcctacctcggcctccgcacgtcgcgccgcgccttcctgcgggggctcggcgggtccgcccacgaggcgcccgtcctccccaccgacggcctccccgacgacttcgactggagagaccacggcgccgtcggccccgtcaagaaccagggatcgtgcgggtcgtgctggtcgttcagcgcgtcgggggcgctagagggagcgaactacctggcgacgggcaagatggacgtgctctccgagcagcagatggtcgattgcgaccatgaggtgcattcagcacaacagatggtcgattgtgatgatgagtgtgattcatcagaacctgattcatgtgatgctggatgcaatggtggattgatgactaacgccttcagctatcttttgaaatccggtggccttgagagtgagaaggattacccctacactgggagggatggcacctgcaaatttgacaagtcgaagattgttacttcagttcagaacttcagtgttgtctctgtcgatgaggatcagattgctgccaaccttgtcaaacatgggccacttgcaattggcatcaatgctgcgtacatgcaaacatacattggtggtgtttcgtgcccgtacatctgtggcaggcaccttgatcacggtgttcttctcgttggctacggcgcatctggttttgctccaatccgcctaaaggataaggcctactggatcatcaagaactcctggggcgagaactggggagagcatgggtactacaagatctgcaggggctccaacgtccgcaacaaatgtggcgtggattctatggtctccaccgtgtctgccatccacacctcaaaggagtagattctgatcagtagtcccccgaccatcctgtggatggttcacagttggtgattctgatattatatataagctagaactacgaaatatacttagtttatgctccatctgcgctgttattgcagttatgataagcagcgatgatgtgaagctgcaactgaatgtttgtcctaagttatatgcttggtttgctacgcaatgctacacgctatttggaggtagctttaagtattatcgccattcacgaacttgtatttttactattaccaatcttttgaatggtctgtattatatgcatgtggtctgtttacatggaataactctgtctattgctacgaatttgcgtctaacacaaactccaaaataaaaaaatatgaaactaagtcctatgtttttgaatctgtaaaaaaaaaaaacctaacggttaatgagctacaactgccaatttctcaggggcggcgctttataaggttcccaatttttttctcgcttctttgcaactt

SEQ ID NO: 65331 - DNA, 132 bp, Oryza sativa
  Clone ID: PAT_MRT4530_6638C.1
atgaacaaatatgaaaacgatgatggaaagggcccaccaatcaacctccagttgaagaagcaactgggaggtggggcccacaggtcgactgatcagaccttgcctccatccatcaccaccttccacgtgtag

SEQ ID NO: 65332 - DNA, 628 bp, Oryza sativa
  Clone ID: PAT_MRT4530_66390C.1
ggactaaactgtaattgcattatctttggcagcaagaggattgaaactgaaactgcaattgcaatcttaaagcacatcttgaacaagttgacagcaagaatacctctaccaggacgatcgatcaaacgaacataacggggtagaagccacgccggcggtgagtagttcgacgggacttgctccggcaagaacttgaccgctgacaaccacttgccgacggccacgttgaactcggtggccggaaagtcgtccgcattgtacgatctgcagcgacgaacaggaacagcatcagcccacccagcgattccagctcgttccaagcaccatctccaacaccctgatcgcggacgtcttgggcggataggagaggagaggacatgggtgcagagtagttgatggcggcgaagagagggtcgcggccaccaaggccattcccaagttgggctcgccgttgaggagcgcgtagtccagccagggagtgggcgtgtggccgaaggcgatgaagacccagccaccgtcgtagtacgcgcgtgggtggcacagccggcgagggtgcacgccaaggaaggtccgccggcgcgccggacgaggatcgacgatggccaattgtgggttgtggcagacttgg

SEQ ID NO: 65333 - DNA, 552 bp, Oryza sativa
  unsure (1)..(552): unsure at all n locations
  Clone ID: PAT_MRT4530_66391C.1
cgggctgcaggaatcggcacgaggatcacaattacttctgacaatgatgttgcaggaacgatttaagtgtaatctcttcgtccctttacatttttttccaggttagaaatcataantggtgatgtgcttacactaatgtttccgatattacagtttgtcaataccattacaaatagtagtttgcatagtacaattcttcattgaacaatacctaagatttttgtaaaggtagtgtttatgttatttgtttacatatagctagttagcactagatcattagcatttcactggttcaagccgaggttttctgaaattttttgaagttactctctggttgtcttagtaaattcatctatctaggctatgtctaattgctctctttagcatgaatactattgggtgtctttgtaagaactaatttgtacctttggaacaattaatgtgacctacactgctttagttctaggctcctggcaaaggtaagcactagaaagacataccagaactaagtaacaatgtatacttctttcttaatatcagaacatagtattg

SEQ ID NO: 65334 - DNA, 261 bp, Oryza sativa
  Clone ID: PAT_MRT4530_66392C.1
atgggggccgcacgaattcgttgcatgcgcgccggatctggcagcgggcgttacctggggaggaagtgggcggcagctgaggtcgccgtgcttcgtcgaccttggcacggcatcgggcaagctactgttgatctgcaatcagtgtgggccatgacaccgttcagcaagatggacaccaacctaaggtgccagagctatcctgccgctcgccgcaatggtatctctcatttccacaggttcctcatattgttcaccatgtag

SEQ ID NO: 65335 - DNA, 642 bp, Oryza sativa
  Clone ID: PAT_MRT4530_66393C.1
actccgtttttttcggatctacaacaaactcaatcaaaattccagcgatggcgaatggcgaatggcgatggcttcgggagaaagcgatgtaggtctccatcgtaggcaattttagggttcgggcttggtgacagtgtccatggcagcgggcgatcgaaagagaggatgggggccgcacgaattcgttgcatgcgcgccggatctggcagcggggcatgaattagggcgttacctggggaggaagtgggcggcagctgaggtcgccgtgcttcgtcgaccttggcacggcatcggtctttggcatcctcaggaaaaaaaacaggtttgcatattgatggtccacccttaatttgctacataattgccttacatttgttcgttggtcttgctgtatattgccggcatccaaagtcagccaagggcttcctcaagctgagcccaaccccaaaggtttgtgttgtttctctgaacagggcaagctactgttgatctgcaatcagtgtgggccatgacaccgttcagcaagatggacaccaacctaaggtgccagagctatcctgccgctcgccgcaatggtatctctcatttccacaggttcctcatattgttcaccatgtagctctggagaaatctcttatatct

SEQ ID NO: 65336 - DNA, 2019 bp, Oryza sativa
  Clone ID: PAT_MRT4530_66394C.1
gccgcgcaccgccagtgagccagcgacgccaccgcgccgcgcgccatgccgctcctcctccacccgcgcttcccctcctcccacgccgcggcctgcgcccaccgcgccgccgccgcccaccgcgacgcgcggcccgcgcttcgcctccccgagctacacgcgacgaggcggaggcggaacaacgtcgcgtgccgcgcgaccagggccagggaggcgccgccgcagcagcagaatacggcggcggcgctgtccaaggaggcgcacaagtacttcgaccacgccgtggtcaccgtccgcgcgggcgacggcggccacggcgccgtcctcgccatgccggcctccccctcgacggacgcccccaaatccccccgccgcaggtcggacaagggcaagaggagcggcgtgaagaaggtgtcgtacaagaggaactacgacgggtcggtggcgctgccgatgggcggccacggcggcgatgtggtggtgtacgccgacgaggcggaggagacgctgctccggttccacgagaaggcccgatactgcgccaagaggggaggcaacgtgggcgccaccggaaccctgagctcgcggatgcacaatggcttcgccggggagacgctcaggatacccgtgcctgtaggtactgttgtgaagcgcaagaaaggcgctgttcttgctgatttggctcatcccggtgatgaagttattgttgctaggggtggacaaggcgggataagcttgatcgatgtgcctgagtacagaaggaggaaagccatggttttatcacctaatatcatgcgtgatgttagtgacagggtgttaattcatggtcagcctggtgaggaagtaagcttggagttaatcttaagggtggttgcagacgttggtcttgtgggacttccaaatgctggaaagtcaacacttctatcagcaataacacttgcaagaccagacattgctgattatccattcactacattaatgccaaatcttggtcgtcttggtggagatcctgctctaggggcgttgcagttttcctcagaggcaacattggcagacttgccaggtctcattgagggtgctcatctgggcaagggtcttggtcgcaatttcttgagacatttaaggagaactagagtaatcgtccatgttgttgatgctgctgctgatgaccctgtggatgattataagattgttagagaagaactcaggatgtataacccccaatatctggagagaccttacgttgtggttctgaataagattgatcttcctaaggcccaagacaggctatcttcactggcttttgagatatcctcaataggctgtgaagaatgtgatggtaacaatacaagcgaagacagtttaaacggaaatacaggcgaacataatacctcatcagagactaaagttgaaggtggtgaaaaggaacttcgggactatccaagacctcaagctgttgttggtgcaagtgtactgaagcacatcggaatcgatgagatgctaaaggagattagggcagccctgagaaaatgttttgatcacagtctgaacttactgctgcctacggagaattccgttatctgtttgttggcttataagccgaaaccgagcttcgcccccacgccccgcgctggtgaacaactgaacatgagattggttgagaagggtccctcgccttctagtacagaacctggtacggacacagagtcttgtaccaataagcaagggccagtggctgctgaagagaataataaaaaatgttgtccaagaaagcaagcttcaatggcacttgggacggaaattgaagagaggaagaaggagcttctcaagctaatgttgcagatgaagaatattccacattgtgatgagtgttttccgaataaggaggagcagtggattcgttttcttcaaggatcgcaagctagcgagcaacaacggcagccagcgtttggaaaatctgtggatgtcttggtgatcgtattatatgtcttgaatatcggattcatgctcagggactaa

SEQ ID NO: 65337 - DNA, 381 bp, Oryza sativa
  Clone ID: PAT_MRT4530_66395C.1
cggccccgatttttttgtgctacgcacttgagggggttgcacaccgtttggatatctttttttttttttttggttattttttttttttttgttgtttcccaactttttttttttctgtgggggggcaaccaccatgggtgtgtttttccacacgaccccggtgaccaccctaatgttcggggggttccagtcaccacccgcggggttggatcaaaaagttggcttgaacgcccgacgggaaccgtcgggcaattaaagatagaaacccaccggagggggttggcagtagaaggcccattctccacaccaaatttcctaccaggcttatgtgtgggcgagaacagaattgtacccggtttatttgggaggggaagcaccgga

SEQ ID NO: 65338 - DNA, 327 bp, Oryza sativa
  Clone ID: PAT_MRT4530_66396C.1
atggcttccggccggccacacatcccctcgaagtactcgagcgcctccctgcatagaccgacctgctcgggcgtcagcgccggcggaggcggctcgtcgaggggcgcctgggacgacgacgacgacgactgcgccgcgcggcgagggacaccggcgaagcgggcggcggccatcgccctgccgcgggagctcgtgccgttccccgtggccgccgcggtgggagcgtactggccggaggcgggaggagaggggctcgccggaatcgccgccgccgccgctgcggtggtggcggaagcgatggagacgaggggtattaagacacggtga

SEQ ID NO: 65339 - DNA, 387 bp, Oryza sativa
  Clone ID: PAT_MRT4530_66397C.1
aaaaaaggaaaaaaaattttttttttttttttttcacccaaagtttcaaatggcaaaaatgaggatttcggggcttttttttaacttccgaaccccttttctggtaaaacttattaaaaaaaacccccaaggggggaaagggtcctggggcccccataaaccctgggggagaacccatttttaaaggggccgttaaaagccaaaaaagtttgggcttggcccaaattccgataaaaggaaaaaccaccaaactgctggaattgaaattgctgccctttggcctgaacaatgttaatgtcctgaatgggaaattgttgccccaccaacggaaggtgttgcaaaaattggtttgttttaaataaaaacccatttagttggggacccggg

SEQ ID NO: 65340 - DNA, 1318 bp, Oryza sativa
  Clone ID: PAT_MRT4530_66398C.1
ttttgttgtttcttccaacgctcgaatgcacttgcaatttgcttgactgattcagcctctagcacaaatgggccaacagtagttgctgtttcctagtttttgtatggtctctgatgtcacgtgggtttgcttctggcccatcatagatgctgactagagagttctgctagataaacaaactttgcacaccaacagcaggaggtgatcaataacgagatccaaattaggggaactatcttggtctatctattggggcctgcgacaactgatcgtatgataaaagctaagtagttaaaaactagtctctagatttcatcacggtctctggtaggtacatttttcacatgagcaatttgtaactgaaaaaaattatcaagcaaacaaggctctggtatccgacgatgtactaaacgtgcacaaagcccataacatgttgcatcctgctgcatttttacaccactccagacggaagtcgaaggacaagttgcccaccaaaaacactcttcacatagtagtagcagaaatcagcaaggatgaacgtctgaacgatttcagagagaagcaccatcgaaggccagagaccatagcccagagcagtcaacaagcgaccacgggtatccaaaacctgaaggacccagtgtgcgcagctaagaaaccttgcaacacccaatgcaaacacataatgagctgtaaatggttccacaatctttgtgttttgcatcaaacgcaactgtggcagcactgaaacagcttccaaataaacacagaaagcccaggagatcctgttgatgatgttatgcgatgttgaaggatgaaccaggagagctaggccagcacaaggtaacaccacgtagtacaatgcaaaattgtccttgtccagcatataagttgacctcagtttgaaccgaatcatgtagatgacaaagagagtagctgctagtgtagctgtatcaagtatggtatggatgtcatactccataacaaaactgcagtacagcctaacagccagaaatagtgctgttaaatcctgagacttgagtgagagtcctccgttttcattaacgaaaacaccaacattacagaagtccttaaacacggcgcaggtcttctccttggtgagcttgtagatgaggactccgaggccgagcgcgtgggcggcctcggcggcgacgaagaggttgtcgtggtcgtggacgatgaagcggatgaagacgagcgcggccatcccggcgaccacggcgaggaacgccttgaccttgggcggctgcctccgcacccagctcagcaccacggccaccggcctcctcgaccccctcat

SEQ ID NO: 65341 - DNA, 222 bp, Oryza sativa
  Clone ID: PAT_MRT4530_66399C.1
aaggcacttggcttagaccaaatagtattacattccacacatttggaccaactcaagcatacacatgtttggcctgcctacaatagaatagttatctttctttctgcatattctacattctaggcagactcaaaggagactcccgattattgtgtaactacagatattttgtatgatggctcctatctccttccagggaggatgtgctcacagctgcccctt

SEQ ID NO: 65342 - DNA, 628 bp, Oryza sativa
  Clone ID: PAT_MRT4530_6639C.1
ctggggctggggttttttttttttttttttttttttttttttttttttttttttttttttttttttttttacagacaagctcagtacaaatccaaaaacaggcatgaaaagattttttttatacataaattgcccctccgttgctggcccgagggggggtcagatgggaaacaaaatttaaacattcaaagaggccccgggcccaaccaaaagaggcttcagggggggaactaaacaaaaaaaccccttccccaaaaaaatggctggctctggaaataccgaaaagggaaaaaacactatcgggctatcaacccttaaaggagtatttccttcctgaaaaagctgaaaatttcgggtcatctttctggggaacccccttgggttccttttaaggcaccttttttggttccttaaaggggcgggccccaccagggccaaaaacaagcttttccggggtttaacaaaaaaaaccgctctgggatggggaccctgttgagggccgcaccccgtttggggcattaacttgccgttttgcaggggatgaaactgaaacatccttatttttaggagccttcccatccaaaccccccccaggtccagaaaaggggaagaactttgggttttctta

SEQ ID NO: 65343 - DNA, 1768 bp, Oryza sativa
  Clone ID: PAT_MRT4530_663C.1
ttttttttttttttttccccgggaacgttgcactatgcaagctgcatgcaataaatttgattttatattgtaccctgtcaccgaaaaaccagctgcaccagtactataatataaagtgaaacagatctctttctctctatttatatcactctgctatcttttcttatctcatcaatgctatgatatcctttttcttttctgtgtaaaaaggtgaaagtagaaattaaggagaaaaagaatcttcagttggtgtcagcatgtagtgtcatcctcctcttttctactgagcaggagattgtgtaatgtcaccaagcatcttcaatgcagggcaagggttgtctattggtaccatgtggccagctcccagtatccagtagaatttgagattcttgtaagatttgaggaaggcttgggtgccagctgcttcaccaccactgcagtagagcggcactctgcgtgagtttgtgaagttcttcagaccatcccacttgagtttctgaatccaatccaatgttcccttggtcgcacagatcagatcaagctgtccgctatagattgtgacgttgaggccaaggttgagaagctcgtcgacctcaaggattctgggtttcatgaagtctcctgcaagagcttcgaacacatcgtctgactgctcgctccaggtgacgtttttgggtatgatccggagcttatccctgatgacggtgttcatgatgccctcgaagccgccttccgttgtgaccttggagctcaggtagctggagtagcgcctcctcgactgccccagcgacgccagtagcctctgccgctgctgctgctccaaattagcatccgacgacgagtcatccttgaggaaattgtagaagtcgatgaagttggcttgctcgagaatgatggactccagactttgccatgtgttctcggcctccaggaactgtgctgccttcacctgcgccttgatctgctgcgccaggctgtcggagaggtagaggccgttctcgtcaaggcgggacacttggtacagcaatggcccccacgaaagcaccgagtcctcgggtgaaatccagctattaccaagcgcaactccggcgaggctggcggcgaggcggccggcgtggatggccttgagcgcggccaaggcggtggtgacggcgaacttgccgccgtaggactctgcgacgatgtaaagtgggctcccctgcagccgcgtgttgttgctgcggtagagttgggagagcagagtggtgaggtcggtggctgcctcggcgtccgtgcgcgccagcaatgtcctgtcgccgccctccacgtagctgaacccggtgcccactgggttgtcgacgaagaggaggtcggccttggagagccaggtggatgggcggggtttaaggttggtgtccagcggcccgatctccatgaagttgccataacccacgcccgaagcgcccgggcctccctggagccagagcacggtcggccatggcgtgctgcccttgttgttcacgcgctgcgggctccggtacaaccaccagaacatgtgcgccttcgggcgtacttggacatagccccactcctccgagccgtccggcgtgccaccggcgatggcggcggaggaggaggaggtgaggaagaagagggaggcggtggtgcagtagatgagcaaggcgacgggcctcatcagcaaccccattcttgaccgagactccacagggatgcgtgaggcagcctctgcctctccctcaacctcagcaaaaaggagagagcctcgtgc

SEQ ID NO: 65344 - DNA, 509 bp, Oryza sativa
  Clone ID: PAT_MRT4530_66400C.1
ttaagtacgttttttagtgctccgcagtaaggttgatgtttttttttatgctggaagtaaaaggacggacacagtaaaatgtttacgtccacccgtaacgctcgtgtgccctatcggtgatatgggcccgggggtacatagcttagagggaagaggccgcccccagcgacagtcatcacgtggccgccacgcgtatgaggttagcatttaatgcggacggagcgagcgcaccacgtcacattaaatgcggcgtgctgtgtgcctgcgatcggtctatgaccggccaaatgacagatgagacggcggcaatgcactcacaccctgatcgtgtgtcaggcggcgtgtggaaggtattgcccgtcccatcataatgatgagaggctttggacctctcgaccagtctggagtcggcttgactgctccagacatgcccgagattgtgttcctggtgcatgcatgccccccaagtcctcctccattaaatggtgagtggcaggggcatcccccgt

SEQ ID NO: 65345 - DNA, 478 bp, Oryza sativa
  Clone ID: PAT_MRT4530_66401C.1
atgcgggtgagacggcaactcgctgtgttcggcccggtgtacatgttgggcctacatttcggccctcaattaaggcaggtccgcaagtgcactgataagagtcaagttggaggaaacaagctatacaggatccggttcgcgattgatgaggacatcacttcgtcggatacgctcataacttcacacgttccaatgataattccaagtccaagtccagttcggcctccggagacagcactgacttcaaacggacctagcgccttcatgccaactccgatttgggtgatcttggacttcgtggaaagcttatctcgctacctttcaaacgcatctggtctcatgtccaaattcatctcgagtcaacgggaatcgccaaaacaagacagtgctgttgctgaaaccgaacttgggccttgggccttgtaatagactaggcccatctcggaagtgtcaccctccacctccacgaattagcact

SEQ ID NO: 65346 - DNA, 569 bp, Oryza sativa
  Clone ID: PAT_MRT4530_66402C.1
ggagagagagagagaactagtctcgagttttttttttttttttttataagtagataagtggttctcataacttaacggtgcataggtcttacatagtagttaggccgaccggccaaataaaagagtttaaacgcagtggagaaggtaaagatacataagttcttcggtatgcccatctaccaaaccacacaggcaaccgactaggaatcaccctagaaagaaccatcctcaaaaactccggtacccggtgcaaagtaatcgtcactaggcacctcacatcctgcatccatgtctaaaaacaacaacaagaagtgggtcaatacactaggtattggcaagtcctacccaaaccttgggaaacctaggactattgcaagctgagatcaaggatggctatatttgtggctcattttcagcttaaggcaaattttatttcacaatagtagataataatagatagaaacgggatttttaaatcaaagagtaagccataataatagcaatataagtatcatcatagtaccaaccttgtgccacccacggcaacaagtaatcattttattatcagc

SEQ ID NO: 65347 - DNA, 381 bp, Oryza sativa
  Clone ID: PAT_MRT4530_66403C.1
gaggattcaggtactcacaccccacgcatgaggacggccttcctgggcttgcacgaccagagccagcgcgcaccctggggagcaggagcgcaggtcaagcgctcatctcactgtccaagctcagctgcgctggagctacgtgaaacccacatgcagccgtgtgcatactgccctgtctctagacacggacgactcggactctcagtgaagtggtggctgccggatctggctgtgggacccttggccacgctcttgagagccaggctgacacctggaacagacggtctgagactgaattgttaccagctcctcagggtgtgacttcagtgtgtgtatttgtgtaaatgagtaaaacattttatttctttttaaaaaaaaaaa

SEQ ID NO: 65348 - DNA, 459 bp, Oryza sativa
  Clone ID: PAT_MRT4530_66404C.1
ttttttttttttttctctactttttttttttgttgattagtgttgttttttttttttttttgttttttttttaaatcttttttttttttttttttttttttctttctttttttttttttaaaagccctttacccccagctttttttttttaaaaacttttctttttccatttttgggttggaaaactttttggggggaggcaaaaaaaaaacggggggacccttctccctttgggggaggcccgtttaccctttttctggccggggggaaaaatcctcccctgttggggctaaacccgggacattaacgggagttgcccccgttattgccttgccctggtaaaccttccccgggttatccccggtttttttttttttttcccgtaaaaaccctttttggaaaaccccttgggggattacccttgtttcgaaaaaaacccctttccggggttattttttt

SEQ ID NO: 65349 - DNA, 181 bp, Oryza sativa
  Clone ID: PAT_MRT4530_66405C.1
gcgtgattctttccatcaagcgggtgcccaccgtggtgggcagctaccatgaggatgctgccgccaccagcagctaacgcccacgagcctgctgcgggagggattgtctcgccgagttgctatttgcccgattccaagcttccgctgtatgctttcaaggcgagtccgaaaaagccgtctt

SEQ ID NO: 65350 - DNA, 2328 bp, Oryza sativa
  Clone ID: PAT_MRT4530_66406C.1
ttcgttgaagcacagaagcacacacccacacacacgcacactgagctgagctgacctgcagataggctgtcgtcaagggagaggaagagagaaagagagacagcagagcaaagagagcatgggggatttgttacttcagtctcatgctgtccgccatgaagttcatgaagcttgggtccaagccggacgccttccagaccgacggcggcggcgactccagatatgtgttgtctgaacttccatcagacattgtcatccatgtggaggaggcaaggttctacctgcacaagttccccttactatccaagagtagccttctacagaggctgatcattgaggccagccagaatggcactgatgaagtttacatccatgacatccctggtggagtgaaaatatttgagatctgtgcaaagttctgctatggcatggttgtgaccctcaacgcgtacaatgtcgtcgccgcaagatgtgcagccgagttacttgggatgactgaagatgttgacaagagcaacctggtgttcaagatcgaggtgttcctcaactccggcatcttcagaagctggaaagactcgatcatagcgctgcaaaccactgatgcattgctaccatggtcagagcagctgaagctggctgcaagatgcattgactccattgcttccaaggctacctccaacccctgcaatgtggtgtggtcatacacatacaaccggaaatcggcgtcgtccgatgagattgtggaagcgaggaagaactcgcagccggttccgaaagactggtgggttgaggatctgtgtgagctggatgtagacctctacaagcgtgtcatggttgctgtcaagtccagaggaaggatcacttctgatgttgttggggaagctctcaaggcctatgcttcaaggtggcttcctgaatgcttcgacaccgcggcaatcgatgacgacgcctactccatggcgtacaaccatctgctcgagacgatcgtctggctgctgccgtcagacaaggggtcatcgtgctgctcatgccggttcttcctcaagcttctgaaggtcgccgtcctgatcggctccggtgagatgctgaaggaggagctcatggacagggtgatccttcagctgcacaaggcctctgtctgtgacctcctgatcccggcaaggccaccggcgttgaccacctacgacatacagctggtgctgacgctcgtcggcaggttcatgaggcgagccggagtgactgaagatgggatcttcctcaacaaccttgatcaagagatgttcgagaccgacgtcgacgatgaatctttgctcgcactgtccaagattgttgatggatacttggctgaggtcgcctctgatccaaacctgtcggtctcgagcttcgttgcagtggcgacctccatgcctgatgcagcaagagcaacccatgatggactgtacaccgccattgatgtctttctcaagttgcatccgaatttgccgaaggcggagaagaggaagatctcgagcttgatggacgtgaagaagctgtccaaggaggcatgcatccacgcggcgcagaacgatcgcctcccgctccgcgtcgtcgtgcaggtgctcttcttcgagcagctgcgcgccgcggcggggggcaacaacccggcggcggcggcggcggcggcgagcggcggcattgcgcggcttctggtggaggaggaggacgatgacgacgacgatgtcggcggcggaggcggtggggactggagcaagtcccgcgcgctgccgacgccgacgccgtcgctgctcaagaagcagctcgggagcctgaagctcgccgccgccggcgacgagggcggcggcggcgacgacgggcggcagctggcgagggtgagcagcgtggcgaaccagagcagcaggctgtcgctgtcgtcgcggtcgcggcggatgttcgacaggctgtgggccggcgggaagccgcccggcggcgaggtggtcagcaagagctccgacacgtcggggagctcgcagagcccgaggtcgtcggcgaagccgccggcgtccaagtcgtcgagctcgtcgtcgaggaatcggcgctactccgtctcgtagtctagctagcgcgctggcattgcattgcatgtgtacaggggaaaggaagagagagagcttggtccatcagcaatggcgatgagctagagtactagtgataatcgtctcgcatctctgaagaatctgttcagaatttcagactcgctcgagcaaaaacaggatgcagctagaaattctgtcatctgagacaaaagagtaatcccctggtttttgttccaaatacgattagcttggtgat

SEQ ID NO: 65351 - DNA, 430 bp, Oryza sativa
  Clone ID: PAT_MRT4530_66407C.1
caagagaggaagagcttcaaaacagagaaaaaaaagtctagtttaatgacactgaccaacccattagattaccccctcaattacaaggccatatcaattacaacaacatggcagggacagagattaaattaagggacattcaccaccatcaatgcctttgtccactgcagcaacagcaagaagcaatgcatcccaatgtgcgcctcctctgactccattagaaaccagaggcttccttcctactaccatcacttgatctgctcacaatcacaatgccatcatcctcatcaggacagccacacatgctgctacagctgcttgtgtccaccatgtccaccaacctgccggctttgctgaggccgagatgctgtagtagccgccatcctcgccatggccattgtactcgccgccgccgtcaatggtgccgctg

SEQ ID NO: 65352 - DNA, 372 bp, Oryza sativa
  Clone ID: PAT_MRT4530_66408C.1
atgaccatcgccgatcagaaggaatcaccattgcggtcgccaacggagtcgccagagctcacagaaggagtcgccattattcaaagttgttcaaagttgttcacaaaaggcggcggcggcaacggagggctcgggcagcaagggagggcagaggaggcgcgcgatggcacggatccaacagcgaccgccctctccccgcgcggaggatcctgcgctggggaggcgcggcggctatcgcccacgcgcaggagcggtggatctagtggtcatgagacatggtggcctttgcctgcgcggatccgacggtggccgtcctccccccacacggcggcggtggatcgcacggtggggaggcatgggggcggcggctag

SEQ ID NO: 65353 - DNA, 990 bp, Oryza sativa
  Clone ID: PAT_MRT4530_66409C.1
atgaaggatcacttctcgccaccacaatcagcgcagctgtgttccagcctttccaccggcgccgctgcctccacaagtcttgctggttcggccttcggcaggtttagctactccgcaaccatatgcctagggtgtggcgccggtatcctcccagccgcgcacgggttctattctgctgcggcagtcgtgcgagctagggcgggagcaggcagagcttgcccgggcgctgccggcggtggagggcggcgggacggaggcggccgccggccacacacgcttgcacctgcgtcgccgccgccgacgccctcctccacggcgtcctcggtcgctgtcaccgccaccgagtgcgggtgccaggacgacatgaacgcgtacgcggtacagttcaacgccgccgccaagaacctcctcgagcggctcaacgcgaagctccccagcgcgagcatgtccctcaccgactgctactccatcgtcatggagctcatcgagcacccgcagaagtacgggctcaagttagttatcatgcaactctgcgacgaccgcacggcgttcgtgttctgggacgcctaccacacctccgacgccgccaaccaggtcatcgccgaccgcctctacgccgacatggtgagcgctggcgcggtgcaggggagcgggaacgccaccacccgcctccacccgcgcgcctcgcgttgtcgtcgacggcggcgcgccgtcgagccacgccgcgccacctccaaagccttgaagagcgtggcggcgtggtctggacatggacgtccgaggagaggaattggcgtcgccggcccacccgcggcgaccgcgtcgtcggtcgataaggaggaggtcgaagagcaccttccgcctccgcctccaccactggttgcccgggagaactccacctcccgctgccggccgcccgccgcttgccgccgccggcagcgcccgagcaagctctgcctgctcccgtcctcgcacgccgccgccgtgctg

SEQ ID NO: 65354 - DNA, 187 bp, Oryza sativa
  Clone ID: PAT_MRT4530_6640C.1
cggactcgtgggcttgggtaataactccccctcctggtcgatacgggagggcgacggcggtttgttggacaggacaaatcccaaagctcagaggatcaaaggtagtactgtatagcgatcttcctgaacagggggagagctaaggggtgcttgtcaagatcagaagagcatcacccggaggcgcgct

SEQ ID NO: 65355 - DNA, 225 bp, Oryza sativa
  Clone ID: PAT_MRT4530_66410C.1
atggcagttaaggaccgaatcgtgacgttggagaggccgaggacaccggagctactgctgttcctccctgggatggtggtgaaccccaacaacacctaccacatgtactacgggatcgtgcagcgcatcaccaagatgccgtcgccgctcgtcgttcgtgtcgtcctccccatcggctgccaacctgccgctcctcaccgtctaccgccggctgttgctccttag

SEQ ID NO: 65356 - DNA, 256 bp, Oryza sativa
  Clone ID: PAT_MRT4530_66411C.1
gacgatcccgactcctcatcagagtcagagaccgggcgggacccgaataccgtcccccccccacgccattggtatcgtgcggctttgggagccagggaaacggcgataacgtatggcggaggccgggacggcgtgcagcggtggctccagcgtggcgacatgttggagacggtgtaaagaggggcggctcccctttgcgcgccgccatggttccggtacggccgaatcctggtggcgcgggagtggggtagcgttg

SEQ ID NO: 65357 - DNA, 219 bp, Oryza sativa
  Clone ID: PAT_MRT4530_66412C.1
caaaccaaaatccatccatcttttttactacattcaacatacattcattcatatattccgcagcaaagcgtagtacatcatctagcatatcccatatttttaaccttcccagttgcaaagtacctataaagctagaagttttctgcatataaacatgtggtatggacatgatttccatgtccacacatagctatagctacatggttgaggaatctcaaa

SEQ ID NO: 65358 - DNA, 332 bp, Oryza sativa
  unsure (1)..(332): unsure at all n locations
  Clone ID: PAT_MRT4530_66413C.1
gcacaaagcgccgcctcgctatccgacgagcgccatctcctcttctcctgcagcgtccacgcctccctccctcacgcctcgcctcgcctcgcccgctcactcactccactnccccccgcagccgccgcgcgcgcncggccgccgcggtggtggcggcggcggcgatggattcgctgcgcctncggccgtcgctcctcgccgcgcgggcncccggcgcggcctcgctgccgcctctncggcgagatcactttctaccaactttatgttctatccatagaaatggtaaacgggcaatttctttgtcaagcaaaggaccaaggtntttctttgat

SEQ ID NO: 65359 - DNA, 122 bp, Oryza sativa
  Clone ID: PAT_MRT4530_66414C.1
gcacgaggctcggcgagtaaaccgttccaaatcgctctcaaccggcgccatggcctggctagactgcatgctaaatgctacacaatttactattggtacaaccccgccggtggggaggaaga

SEQ ID NO: 65360 - DNA, 1230 bp, Oryza sativa
  Clone ID: PAT_MRT4530_66415C.1
cctatccctatcctagatctgaccatagggaggcggccgccggtggcggtagctcgtccacggcggcttcagcagcctccaaggtcatcgttgatgacaatgactcctactccgacccggacgccaccgactccgactccgactcggactccgccgacgccggcgaccacgatatcagcagccgaagcagcaggaccaacgccgccgccgccagcccgggcggtgggcggtggacttccgggacagccagctcaaggtccggcaatggctcggcacgttcccctccgaggaggaggccagggccgcctacgacgccttcgaggtgcaggtaccgcgcctccctgtcccgcggcggcgccggcgcctcctcccccgccgtcgccatcgcgccgtcacctgcccgcgtcaagatccaactaccggcgccgcggccgtccccgtcgtccaaggaggcgccgccgccgtcgtcgtcagcttctgccgcgacgccgccgccgctgaatccgccgccgttcgtcgtcgatacattcctgggggaggatgaccacctcgccgccgacgaggatgaccgcttcggcttcggcctcgccgatcttgggcacctcccgctgccacgccgggagccgcgccgccgcctggcagacgcacgagttgtccagcgacatgaggcgccggcagcacgccgtgtcgtgggggtcctccctgctctcgtcgtcgtcgtccacgttgcgccggtgccggtggcgccgccgccgcccacgcccctcctcgtcgccgccgcctcctccctgctcctcgccgtcggcgtcgtagtagtagtcgccgtcgtcgtcatactcgtcgccgccgccgccaccgccgccccgagactggagcccgtgcctgcggctcccgccgccgtcattgatcggtcaggattgtcccaatccaacgcccgacgacgctcccacctccctcacccccttcctctctccgccctcccagagacccggactcatcctctctctcgcgttcatccaaaaaatcatgctgccccaccctcacaccaactgcacagcgacgcctcctcgcaacccctccgcccacgcatcgcgccgccgtcgatttctgcctcgagagcatcgttgcacgccgcgtgtcaccagatcggcgtcacagtcgccgacatcgatctcgctccactatcggagtcacaaacatcggcaatcaacccgaggctcagcggagtcg

SEQ ID NO: 65361 - DNA, 540 bp, Oryza sativa
  Clone ID: PAT_MRT4530_66416C.1
atggcgctgcttctgcttccgctgctcgccgtgacggcgagcgcccaggtgttgtgccggtcgcagttcaacctcgccaacgaggcgtgcagcatgcgcaccttgccgggggtcatgaggccgccgctcgtgccgccgcgcccgctcaagctcaacgagacgtcggtcaccggcggcgggagccgcaggcacgggctccagtctcggggcggcggtggcggcggcggcgacgagtatgacgacgacggcgactactactacgacgccgacggcgaggagcagggaggaggcggcggcgacgaggaggggcgtgggcggcggcggcgccaccggcaccggcgcaacgtggacgacgacgacgagagcagggaggacccccacgacacggcgtgctgccggcgcctcatgtcgctggacaactcgtgcgtctgccaggcggcggcgcggctcccggcgttcatgaccgccgtccggcacgtcgtccggctcactcccgtcgacggctgccacgtcaccttcgagtgccccggctccttctag

SEQ ID NO: 65362 - DNA, 325 bp, Oryza sativa
  Clone ID: PAT_MRT4530_66417C.1
cccacgcgtccggtcgaccgtgcggaggcggaggcgcggtcttgccggcgtcgagccacctcaccgccgccgtcctcgccttctcttgccccgtcccccatccgccccacatcccgctctctccttcctgtcgaccgagcggaagcgcggtctcgccggcgtcgccttcctgtcgccccgttctgctcccgccgccgcttcccgtcccccatctaccccaattgcgccgccggtgaacggtgagaggcggcgcggcggtagctgactcggcagctagcggcggcggtgatgcctgcgaggggtgcagcgggattcggtggtggtg

SEQ ID NO: 65363 - DNA, 150 bp, Oryza sativa
  Clone ID: PAT_MRT4530_66418C.1
atggcaatcatcttgaagcacatcaacttgaacccgatgacgtacaccgagctcagtgacaatctcaatggcgttgagatttgccggctcaacgcgtccttgcggccgaacacaggagcgatgttgagcggcaaggacgcgagcgtctaa

SEQ ID NO: 65364 - DNA, 470 bp, Oryza sativa
  Clone ID: PAT_MRT4530_66419C.1
gtaaacagttaatttactttattaaacaataggcttgagtgcacgggggaatgccaccttatgttacaagcccaaaaaataagctagcacgaatacatactggaaatgcttggaaccatggaaaacagaacttggacaactattactgaaccaaaaatgtgatatctttcttggataaatacatatcatacaaattccaaaagtgaaggcaatctctgcctgctagacgttgagtatctgtgggatagccttttcctgctccttgtaactcattgcgtactcataggtgcccaccatgggggagaggaggaacctggctgaaatccagttactcggataccttcaggaggatcttgaaggtgatgaactaacatgtgaccagaatgcccttctgctggaacgaacactgaaaaggcccaaccgcttgcgttcttacataggcttcgcccatctgactatcattacataaa

SEQ ID NO: 65365 - DNA, 418 bp, Oryza sativa
  Clone ID: PAT_MRT4530_6641C.1
ctctgcactttcacccccaacattgtcaccaggtgcatcgaaccgagtctgcaatgcacttgcacttcttcagtgtgttgcatctcaccctgagaccaggatccttttcttaactgctcatattcccctgtacctgtacccattcttgaatactaccagcaagacaagaccttttgaatacctgcgactcaccagcctgggtgtcatcggtgcacttgttaaggttgatgatactgaagttatcagttttctgctgcaaactgaaataattcctctgtgtttgcgtaccatggaaatgggaagtgagctgtcaaaaactgtatgtcgctaaccatctcatgtttatctaaataccatcatctttttcttctttaagtatgtgatgatgctgtctgaagtttgtgtgtaattttttttt

SEQ ID NO: 65366 - DNA, 832 bp, Oryza sativa
  Clone ID: PAT_MRT4530_66420C.1
atggccgccgccgccgcccgcctcctcctcctcgccgtcgtcgccgcggtgttcctcctctcccccgcggcagccgggcgcccctgcggccacgcccagacgctcctcatctccttctcctccgtctccaggcccaaccccgaccccaacaaccccactcccctcaccaccaccgtcgtcaccgtcctccgcgtccgccgcctcggcccccaccaccccctccagatcccccgccccgatcccctccccgccgcctccgacgccgcctcgtccgtccaggagcgcgccaaggacatcctcgtcgtcgtctccggcctcctcttcggcttcggctgcggcgccctcaccgccgcgaccatgtacctcgtctggtccctcctcgcctccacctgcgctccttcctacgacgaggtctacggcgaagacgacgacgacgagctgtccgactccgagagccccaagaaggccggatacgtcatcatccacgacgccgaacagtacgtcggcggtaagaactaggggtggggaattgggctatctcgccgatggccaatttaagaatttgtgataaatgatcgcgtggatttgcggggtatatatactactattagcacctatatatgtgttgcgtctgtctgactcagtatgtgtgtgtgatttcgaaaagaaacaaattatgaatacggtcttgatgttttcttacataatttaaagtgaaactgaagtgtccttatttattgatcatgaaacatggaacatatttggttcttctgctcagaaaaaaaaaaaaaatacgtgcagcccttgttaaaaaaaaaaaaaaaaaaaaaaa

SEQ ID NO: 65367 - DNA, 939 bp, Oryza sativa
  Clone ID: PAT_MRT4530_66421C.1
atggtggccttccggaggatccggatctcctactccgacccggacgccaccgactccgactccgactcggactccgccgacgccggcgaccacgatatcagcagccgaagcagcaggaccaacgccgccgcacgccggaaggtgatcgtcatctcgctgtccaggaagaagggaagatcgttatcgcagtccggtcgtcattatcgtcgtcgtcgttccgaaattccggcggccgcggcgaaggcggtggaggcggaagattggccgtcgtcgagcgacgggatgcgtcgtggcgccgtagcggcggcgaggtcggcgtcggcggccgccaagaagggttcccgcggcggcgtgtaccagcgccagcccgggcggtgggcggtggacttccgggacagccagctcaaggtccggcaatggctcggcacgttcccctccgaggaggaggccagggccgcctacgacgccttcgaggtgcaggtccgcgcctccctgtcccgcggcggcgccggcgcctcctcccccgccgtcgccatcgcgccgtcacctgcccgcgtcaagatccaactaccggcgccgcggcgtgcatctggccgccggaagaagacgcagacgacggcgacggtgacgacaacgacgacgacggaatcattatcgcaagtgacggcctcatcagcgtccccgtcgtccaaggaggcgccgccgccgtcgtcgtcagcttctgccgcgacgccgccgccgctgaatccgccgccgttcgtcgtcgatacattcctgggggaggatgaccacctcgccgccgacgaggatgaccgcttcggcttcggcctcgccgatcttgggcacctcccgctgccgttcttggatgacaacgacatggacttcaagctcagcgacagcgacgatctctccttcctcttcgatatcggcttcatgtga

SEQ ID NO: 65368 - DNA, 1305 bp, Oryza sativa
  Clone ID: PAT_MRT4530_66422C.1
atggatgagtcgatccccaaagcttgggaacgactccaggagtatgtggccgcctgtcctcatcatgggatggaagagtgggtgatactccagagctgctacaacgggctcactcccatgtcctgcgaccacctggacgtggcagctggaggagctttcttctctaagacggtctgcggtagcacaggtcattttgggaacgactgctcggaaacccgtgaggaggcaatgtacatgggcaacaaaaacaacaatgggttccgtccacaaggaggtcaagggtggaaccaacccagcccgtattaccaagggggcaataatggtaacttctctaaccagccctccttaaaagatctcatcttttcacaagctaaaactactgatgctcttagcaaaaagctggctgccaatgaaaagatcttaaaaaatataaatgtcaagctagacggcatttcttccgcattccaaaatcagctaagctttaataagatgatagagacacagctggcgcagctagctgcctttattcccgctaatgaatcagggaggattacgggacaactggaacactctgttaaaaatgttaaggcgatcacaacaaggggaggtaagtccactcgggatcctccatatcctaaccctgcaggaacaaggagcagtagcagccaggaagcgctgcctaacaacacggctgagacagaggaggtagctcagcccaaaggaattgtgccacaagagtactgcgacacgaggttgctaccattcccacaaaggtacaggaagccgtcggtggacgagcagttcgctcgtttcgttgaggtgatccagaatatccacattcacgtgccactgctggatgctatgcaagtgcccacttatgcattatatcttaaggatatcctcaataacaagaggccactaccaacaaccgaagtgaaattcgaccaggccctctacgaccttgaagctagtgtcagcattatgcccaaagaagtcttcgacaagcttaacttcacggtgttggctccaacaccgatgcgccgggagctggccaattcatcggtccgttactcagctgggatagcggaagatgtgccggtcaaaatacgggatttcttcatcccagttgattttgtggtgctggagatggagtcagacaaggagacgccactcatcctgggctgtctgttccatagcaccgcaggcgccaacattgatgtgggaacgggaagtatccatttccgtatcaacagaaggaatagaagttcgagtttcagccaaggactaagcaatgctccatggtga

SEQ ID NO: 65369 - DNA, 230 bp, Oryza sativa
  unsure (1)..(230): unsure at all n locations
  Clone ID: PAT_MRT4530_66423C.1
tcgacccagcgtccggagaaaaaccctcgctgctctcctccccctccccctccccctccggccgcccctcagatctccatctccccgcncccnnntccccccgnaaccgcgagctcctcgcnctggcgtccatgatgcaaccgcagatcatcctgctgaaggaggggacggacacgtcgctggggcgcgcgccggtggtgtgcggcgtcaacgcgcgcacggtggtggcg

SEQ ID NO: 65370 - DNA, 561 bp, Oryza sativa
  Clone ID: PAT_MRT4530_66424C.1
ctactctgtgaggccggcagtgcaaggccggtgatagcggcgacggggcggagttgccgtcgccgttagacccagcggagacctagaggagttggacggcggtggccgtcgccgttgttgtcgaagtcgagccccaatgagccgccccttcggccgtcctcccctgtccccgaactgcataggcacgtatgcgttgggcgagcaggaggggcacccgcactgcagcggcaccagcagcggctgccctgccgccggacggagggcgggcgtgacgcggtggtcgcgggagcagggggaggcgcggcagaggtgtgcgcgctttgtgcgccatgtccgagcagtcgacgcagcatgtggcggtggcagcagtgggcggatcggagtcactctaggtggaggcggtgcgcgcaggtgccatgagccagctcctcctgatggtgcagggcgggtgctcggagcgggcgaagtggaaggcgcagcacgtgctgaatctgctccggtcagcatggccggccgcccgccaactccgacgacttcctccaaccatactaacaacgccat

SEQ ID NO: 65371 - DNA, 1352 bp, Oryza sativa
  Clone ID: PAT_MRT4530_66425C.1
gcacgagccaaacccaaacgccatctccaccgtcgcctcgcctcgcctccacctccacctccactaccaccaccgtctccggcgatggaggccgccgaccccaggtgattcggcggccggtctcctccccgccaccgccgccgccgccgccaatggcgtgcctcgcgccgcacttcaagtgggcgccctgcccccacgcgcaccaccaccactctacttctttaccgtcgtcgtcgtcttcgtccacctcggccccttcctcgtcgtcgaggtgctccttctcccgcgggggccccttccgcgtccactgcgcggtcaccgccaccacctccgccgcggcgcccgtcgtcgtagaagctcccggcggggggatgcggctcgcgtacgccgccgccccggactcctccgcgccggctctccagaaaaaaattcaatcggccctggcatcagaagtatttctaaatgaagaggctgttgtaacagctgctgcagcagaggcagttgcccttgctagagcagctgctgaagctgcacaggaagttgttcgtatggtacaaaataataaaaatgaacgtaacaccagaccaaaaaaagctgtggtcaactacttggcaaatgaaatacttcgcacggaaatgaaaccaaacattcttgataaatatagtgatggcattttgtcagaggagatagagtcttatggcatcttgagtgatgaagctgaactagacggtgatacacaggacatccctagtatagctgtgaagtctgctcgtcaaactgagagaagagctcggagaacgagggcagcaataaaggctgctaccatagtccgtacttccccaaaacctgcaacgtcctcaaagaagaagcggtcaaagggcgcctcttctggcacaaatccattaggttccttgtggaagatgacgggtcgcagacttcttacagcaaaggaagaggttgagttctcggaaggtattcaggacctcttaaagctagaagcaatccaagctgagcttgcagagtacaatggtggccagccaaccttcgctcagtgggctacagcagctggagttgatgagagaactttgcggaagcgtttagatcatggtatttattgcaagaatagaatggttacatccaatgtgcgacttgtaatatctattgccagagagtttgaaggtccaggaatggaactttatgatcttatccaggaagggatgcagggccttataaggggtgctgaaaaatttgatgcatcaaagggttttaggttctcgacatattctcactggtggatcaaacaagcaatgcgtaaatctgtctcagagcaatcacagatatttcgcttgccg

SEQ ID NO: 65372 - DNA, 198 bp, Oryza sativa
  Clone ID: PAT_MRT4530_66426C.1
atgtctagcggcggcgccgccaccgctctcgctcctggtctagccgccgcccgcaggcggaccaaggcggggtcgtcgacggcggcgtgccacgagcggcaaactgccctgaaacatgcgagggatgttactgggaggttcacgaagatgtgggagaagaacacgtcgtcggggatggatgtggtggtgcccgcataa

SEQ ID NO: 65373 - DNA, 384 bp, Oryza sativa
  unsure (1)..(384): unsure at all n locations
  Clone ID: PAT_MRT4530_66427C.1
gccgacccagtctcgccgccgccctcgccgccgccaccgccctccccaccctcgcgcgctccgccgccgccgccgcccctccccgccgtcccctgccgggcctccccgcgctgcccccatgtcgtcttccgcagcggcgctcgcctggcgccgctccctccgcgacgccctcctgcgcggctccggtggcgcggcgcgccgccgccaactccgccgccgcgcggttggccagcacggctccgcatccgaagcggcggttggtccgaagaaggtgcctccgctttcccgcaaggaaggcttttaacttggagcatgatagggttggaattgttggaggtgctacgtgagtaacagccgatgaagcaagttttgtggnttgttatt

SEQ ID NO: 65374 - DNA, 1431 bp, Oryza sativa
  Clone ID: PAT_MRT4530_66428C.1
ttaatttgcaattcccaatttcctgtcaataaagtctccaaaagactcaaaggcaggtgcaaaaaaacccccggacggccgagattctttcgaaaatctttgcgaggatggattttgatcgtcctgcccaaacctgctggcagcgttcttcctagtcctacaaacattacgaggctcaggcttacgacccatggttacgaaaagcgcaaaccccaccaacgctgaaacaatagctatggaaccggctattagattacgaacccatccaccgatcgacatcaaagccagcacaagtgttgcgctcaagcaaattttcctgcaaaacctgaacagctttagcagctcttccaagtgaaatgttctttccggccagtgctgaagcatccacaagttgacgtgtgaaagagcagaggaggagctaaccatgcacaagctccacctgcaccgggatttcacaagttccctctcgtacgcagcatatgagccagtcaggtatgcgagaagccctacggtagagctgagaatggtgacggcttgcgatctgtaagacaacacattgtcgatgctaactgcagttgcattcctcgcgtcatggtcgaaatgtacggtgaaccacacgagcactgcaacgagtcctggaatgcaggctactatgacatcttccccaatccattctgcagccatcgtgtgaactgttatcagcagcagaacaatgcaggtcttttgcaggactggaagaacctgagctgcaccggggctgacacctgcgggtaatttggcaaccatcactgcaagcgcaccgagtgcggagctgaagaacaggaggaactgcgagaacacaatggtatcgtcttgctgttcattatctggattcagtattgtgctggacaaaagctgcaaccagcacggcagcgttgccaacttcagaagccactcagtgttggggacatgtagtaaggaaactctgctgattctgtaatcctgctgaatgtaaggactagacttgtcccacaatttggtgcagagtgctgcgatgaagacaagcaggatcactggaatgatgaatactccgatatatctagtgttgatcagaagtaggactgcataatctgccatcactagggaagcagcggtgatgtaagtctccaagccaagaaacttgctcatggtagagtgcatcatccttatgtacacgccagtaacaaataaaagcatgctgaaatcggcaaggcccgtagaagttgtactcgctgcagttttatcagaacgctttgttaacttcggagctgcttgcgaaattatacagttaacgccgattgcagatatcaaaagttgctggtagtcatgtaaaggtttcaccgaactgtcgatcgacgggtgatggtatgaaccgcgtgttgaaggcccggtcgatttcttccgacttgacat

SEQ ID NO: 65375 - DNA, 342 bp, Oryza sativa
  Clone ID: PAT_MRT4530_66429C.1
atgccgcgtcctccctatctgacccctctgacccctcctaactgtagcgtcgccttcgacccgtccaacgctagcgcgcctcctccagacgccgacgccgcaccgtctcctccccgcccgacgctgtgccgcctccaacccctcctgacgccggcgccgtcgagaccacagcctttgagccgccgccgctcctcgccgagatgccgccgctgccgctcgtcctcgacaagccgccaccgccatccctgctcctcctctcgtctcgccgccggcagcgagccccaacgcgaatctcttgatgaagaagatgaatgcagtgagactgataggcagggtccactc

SEQ ID NO: 65376 - DNA, 1368 bp, Oryza sativa
  Clone ID: PAT_MRT4530_6642C.1
aggcccccccccttttttttttttttttttttttttttttttatcaaacctaagctcttcctctttttttgttaaacgttggaactgtcaaagcaaaagcagttctggggcaagaacataaaaaggagctttcttgctgtccctgtttccacagcattaaagaataagcacagcacccttaacaggcaatgacactaacacacaaacagttcctcttgtttggcgaaggtgggactaaccatggtacctatttctagcctaaatacctaggagatcttccctacttgcaattcacgggtagataaggttatatatgttgtcaattgcagcgatcagaatgatttatatccccatcatgtgatccaggcctggctgaggagcagctcccatgcctgcgcctgtcacattaagaagcaattgctggagccagcgccttgttgtaggatcatccctaagacagttattgaacgtgccatccttcagcatgtcagggaggcaagtttgtagtgcagcacatgccctggaattgtctgacagcctaaggtaacatcggataatgtgcttcagcaaccttgtggaaggctgctcagcaagtgaaaccaccatgtttgctaaaacactgcctacagcaaagaaacgctcagcagtggcacaaatgtagcgcaatccaacatcatcgaggagaatcttctgaacaatgaaggtggccacagtttttgacagctcacttcccatttccatggtacgcaaacacagaggaattatttcagtttgcagcagaaaactgataacttcagtatcatcaaccttaacaagtgcaccgatgacacccaggctggtgagtcgcaggtattcaaaaggtcttgtcttgctggtagtattcaagaatgggtacaggtacaggggaatatgaggtgctccaactttatcttcatcttcatgagtttcaaacactagtacagttaagaaaaggatcctggtctcagggtgagatgcaacacactgaagaagtgcaagtgcattgcagactcggttcgatgcacctggtgacaatgttgggggtgaaagtgcagagtagattgacacaatttcctgaagaagtgcagcaactgttccaaaagaatgccaaagaagtggggccagatcttgaaatatctctcttttcttcgagagctcgaggagggcgttctcgcgaagctcggggtcgcagaggtcgagcaccagctgctccgccgacgccatcttcatatccttggctggctgccccaccccgccgcccacgccaccgccgccgatcggagaaggcgatggcggcgaggccccggcgaaggagggcggaatggaaagcgagggctgcagattcgccat

SEQ ID NO: 65377 - DNA, 214 bp, Oryza sativa
  Clone ID: PAT_MRT4530_66430C.1
gacaaaaaacacaactgattgttgggagcctaataaatgggcttgcaaactgatatacacagtacaatgccccagcccctatgtaccgcatttgtgcttttggggataaatgcgttataacttcacccggtcttactctcggttcgcctataatttagatctaagatgcaaacgctcgatgcacgagctttttgatagtgtttgtgcattgacg

SEQ ID NO: 65378 - DNA, 186 bp, Oryza sativa
  Clone ID: PAT_MRT4530_66431C.1
cggagctcagaatgcgtcattaaaaatgcattatattttaaactatccatacattgagtaacatgtttgtggatgtataatcttttgatctgttatatttgaaagaatgacaacatttgataaaaattgtctagttaatatatgttggctgcatcttcaggtaatacatttttgcattgttactga

SEQ ID NO: 65379 - DNA, 408 bp, Oryza sativa
  Clone ID: PAT_MRT4530_66432C.1
atggagcgacggcccgagccgggacggctcggcgcgcagcagaaaaagcggcggcgctccgccagggtctcaccgccagcgacggcgaggcgcgacggccaccatacgcacggcgcgacggacaggtttgaggtggatccatggcgacgggtcggtggagaacaggacctgcagaccgcggcctgcggcggcggcgacggcgccgtggggctcagcttcgagacgcaccacggcggcggcgtggcgccttcaccagagttcgcggcgtgcacggcgagctcctgcagcgcggcgagctcctggtgcaccatgaccggccgagccatcaccaccgccgtcgcttcccaacgccgcaaccagccgaagccgccgccgcagttgaagttggatggggatttcaggtactga

SEQ ID NO: 65380 - DNA, 203 bp, Oryza sativa
  Clone ID: PAT_MRT4530_66433C.1
tctacaggccctcctccacgtccaactcggggtagaaactaaaggaaacccgaaacatgccttcccgagcaaggaaacctcgaaacccaatgaaacacagtcggactcggacctgccagtcagaccggccacacacaccgccggtctgatcggcactcaatcggtgatctgaccgcccaacacacgacggtctgaccggccca

SEQ ID NO: 65381 - DNA, 697 bp, Oryza sativa
  Clone ID: PAT_MRT4530_66434C.1
caggagggagacgaagacgatggtgcccagtaggtcttagtacggtcgttgcctgtggcaatggcatgccgctgcctaaattccactgccttatctaaactctgcttttggttgtattccagaccgctcggtctgatgatttaagacaatgcctgcgggcttatgttgtaataattcgtagcggcggcggcgggcagctgctggtgcggctacggcgtcggtggcgcagacttggccaagctctgcggcggcggcggcgttgcagagcggctgcagcagcgggtggtggtggcgagcggctccatcgccattgtgatttgtgcattgcatttgatcgatttgttgccgttgattggtttcttgttgatgtgtgtgcaggtttgaggtggatccatggcgacgggtcggtggagaacaggagctgcagaccgtggcctgcggcggcagcgacggcgccgtggggctcagcttcgagacgcaccacggcggcggcgtggcaccttcgccggagttcgcggcgtgcgcggcgagctcctgcagcgcggaaatcatggtgttgctgctcttgcagcgcggcgagctcctggtgcaccatgaccggccgagccatcaccaccgccgtcgcttcccaacgccgcaaccagccgaagccgccgccgcagttgaagttggatggggatttcaggagattcagtga

SEQ ID NO: 65382 - DNA, 768 bp, Oryza sativa
  Clone ID: PAT_MRT4530_66435C.1
tcactcaatgtagagtgactcaactcccgagtcatggccacaatctccaccataatcaccatcagccttaatattcgctctccggtcactcgcctcaccaaggaactcctccctcaattctgctcccccacgacgaccgccaccaagctcatcccatccacgacccgtgctagtgaacatccggtccaaattcgccttcctggtttcccctaggaggaggatgtgctcgaggcggaggcggaggcggttgtgcgcgggggggggggcgaggaggaggagcttgcggatgcggatgatggaggccggcagcgaggaggcgatggtgtcggcctcgaggcggagcgccgtggcggcgcgcggggtgaggcggggcgtggaggacgcggtggaacgcgtgcgggtggcgcaggaggaaacggccggcgtcgaggggcgcgaggcggagctggcgccaagacgggagaagggcacggacatggcccctccgccgccgccggcgagcgcggtgggggtggccgcatagaggaggacggagtagaggacgagaaagcggcgcactccatgatgccgtcgaaggcgtggtcccgcagaagcagcagtggtggacttggatgcatatcccgccgcgactgcggcggcggcggcggccggagtgcggcgatgcggcggagcatcgggggcttgcagccagctgcaatgcaagcggatcaagatctggtgcagtactacgactgcaactttagcagttacagtgcagccgatagataa

SEQ ID NO: 65383 - DNA, 483 bp, Oryza sativa
  Clone ID: PAT_MRT4530_66436C.1
aaagggatcaatgatgtatcacaaatgtatattcaacattttgtttatgacaagcttatagattgggcaaatgcacaaagatactataagaacatctatcgacatttcaacaacgggacaaacacaatttaccttccaaagctagcggataacataaattcatgctctaagctatagcaatttgaagatattaaattagcaatgccattgatatcaacacccatagtttgatgcagatcaacgtaactttcacataagggggtttctatctcatgggtgctttcggaactagcgctgcctgaactcaaaactttgtttcttatagactgtaatgatatctccacttgcttcattggtggcctttcttcacctcggagcctcaagcatgcctgtgcaattgaggcaaaaatattaatctcatcctctattgcttccttaataacttcaggggcaactatctctgtaataggctttccttttatc

SEQ ID NO: 65384 - DNA, 375 bp, Oryza sativa
  Clone ID: PAT_MRT4530_66437C.1
atgacaacgccgacggcctggcgagtatggatggaaggtgtcggcgaagcagtgaagcagtggattggatcttggcactgggcggctcggtggtctttggcgaggcagatgaagcacttcccgctcgtctctgcccagaaggcgcagtgggccgcagagagggggaggaacgagacgcacccaaagcttccatctcgcccacgaaccacctcggcgaaggagcgtggtgccccagctgactcagatctgggcagagagacgtctggggacctacggaggaggcggacgggcgtgggcgacgccgacgggagtgtcggcgccggcggatggggtgggagcggcgttggcatgagcggcttcttttactactactaa

SEQ ID NO: 65385 - DNA, 2798 bp, Oryza sativa
  Clone ID: PAT_MRT4530_66438C.1
atgtcgtcgcggcaggacaaggagaagtcggtgaacgtccaggtcctcctccgctgcaggccgttcagcgacgacgaggtccgcagcaacgcgccccaggtcatcacctgcaacgactaccagcgggaggtcgccgtcacgcagaccatcgccggcaagcagatcgaccgtgtcttcaccttcgacaaggtgtttggcccgacagcgaagcagagagacttgtatgaccaagcgattatccctattgtaaatgaagtcctcgagggtttgaatggcgccgaaacttcgaagttgcagagccactccaatcacacacatgaagcacaagtcaaaagcctggaagatttccagaaggcttatgaggagcaatcaaaatcagaagaacaaaagcttctggcggacatcaccagtttggtttctaaacacgttactcgacaacgagaactggtgggtggtagactaaactctcttggtgacgccgctcgtggaaacaaagcatttttggatgagcacacgtccgccatggaggtggtcacgaaggacgccaagagaaagtgggaaatgtttgcagagcaggcagagaatgactgcaaagttgggtccaacttctctgcagctaagcattgtcgcatggaaaccattctgcaggaatgtgcatgcaccgtcgacactgctgctcaacaatggaaagcatcacatgcaactgttaacgatctatgcagaaaacaaatagctgaagttgaagcactcgtcaggagtgcaatcgaaaccaacgagcagcacgaagcagagattgcatcttcccgtgccacggccgaggagcatgcgtccaacagcagcaaggacctactccaagatgttgacaatatgctgcaggaggcgcgcaattcgtcgtcgagagtggtgtcgacggtggaagctcatttgggagagatccagcatctacaggagagccactccagccataccgccggcatcaacacccacgccgacaacgctttccagagcagctacaaggactacgagccgaccggcgaaactccggtgaggtcggagccggaggtgccgagcaaagacgcgatcgagtcgctgcgagcgatgccgatggagtccctgatggacgagttccgcgagaaccacccctacgagccgagcaaggaccgcaggccatcgctcatccctcgctcgccgctcgccaccatcaacaactgatgaaaatccattggaaacgcaacgcaatgcaatctgtctctgtgtgtgtactagtgtaatcttattagccgtaagtaggtcatcaaatgctggcttttggtgtcctttggttgttgtggctcagtgccagtgccagtgccagtccagcttcttgttgtgggttgcgagctatctcagcttcccccggcgcccttcccttcctttctttcacattttattattttgatgtaccaatctgttgcttttctgtgtgattattggagctgcataagaaaaaagatgagaaaaactctgaaaagagaaaagcagaaaatgctttaattcaacaagcctgtcttctgagatcagacctggaaaaatctaaccgtgagaatgctgcactctattcaaagattgctcgaggagataaactaaatgctgcaaataggtcagtggtgaactcattccaagctgaccttgcttcaaagttggatattctctccactacccttgccacatctatagatcagcaaaataaacaccttaaatctgtggagaacttatgcaagtcttgtgttgattcccatgacacgcttctagcttgtgtcgagggagaggcacagaagatatttggtgatatccagaatttgctagctgatcatcgaagcgaagtggcacatttcactcaagagttgcgggagagtttccgcattagcttggataggacgaaggacatgtctagtttcatccttgggttgttcgataagtatgtggaggaaacttcgaagttgcagagccactccaatcacacacatgaagcacaagtcaaaagccttgaagatttccagaaggcttatgaggagcaatcaaaatcagaagaacaaaagcttctggcggacatcaccagtttggtttctaaacacgttactcgacaacgagaactggtgggtggtagactaaactctcttggtgacgccgctcgtggaaacaaagcatttttggatgagcacacgtccgccatggaggtggtcacgaaggacgccaagagaaagtgggaaatgtttgcagagcaggcagagaatgactgcaaagttgggtccaacttctctgcagctaagcattgtcgcatggaaaccattctgcaggaatggagtgcaatcgaaaccaacgagcagcacgaagcagagattgcatcttcccgtgccacggccgaggagcatgcgtccaacagcagcaaggacctactccaagatgttgacaatatgctgcaggaggcgcgcaattcgtcgtcgagagtggtgtcgacggtggaagctcatttgggagagagccagcatctacaggagagccactccagccataccgccggcatcaacacccacgccgacaacgctttccagagcagctacaaggactacgagccgaccggcgaaactccggtgaggtcggagccggaggtgccgagcaaagacgcgatcgagtcgctgcgagcgatgccgatggagtccctgatggacgagttccgcgagaaccacccctacgagccgagcaaggaccgcaggccatcgctcatccctcgctcgccgctcgccaccatcaacaactga

SEQ ID NO: 65386 - DNA, 205 bp, Oryza sativa
  Clone ID: PAT_MRT4530_66439C.1
gggcgcaggcgcaggcgccacggacgagccttcccacgaccccgccgctctctatggaggttttggatttctcctgcgctttttaccctgcgcgcttgattggtcggtcggtggaattggggtttggcaggggcattcaattctgcagtcaggtttcagctctccggtgcgtcagtgtttcgtgcatttttctccatggcatttc

SEQ ID NO: 65387 - DNA, 998 bp, Oryza sativa
  Clone ID: PAT_MRT4530_6643C.1
aactagtggatccccgggctgcaggctcgtctcgtcgaggagaggatagagaatcgaatccatcgccgcctagggtttccttccttgtcaatcgcgcggccgcggcgatgaccacggcggcgcggccgacctgggctccggccaagggcggcaacgagcagggcggcacccgcatcttcgggccctcgcagaagtactcctcccgcgacctcgccgcccacaccaccctcaagcccaggaaagaaggacaacatacccaagaagagttacagaagaggaatctcagggacgaacttgaggagcgtgagaggaagcactactcgtcaaaggacaagtcctatgctgaggagagagataggcggaaaagcacaagcctactcctagaaggttcaaggagagaggctgaggataagatagttcctagagaaatcgatgcagatgattctgatgtggaacccagaagtgatgatgaaagtgatgaggatgatgacgacgatgatgacactgaagctctaatggcagagcttgaaagaatcaagaaagaaagagctgaagaaaaccttagaaaggaacgccaacaagcagaagaggaggctaagatgaaggaagctgaactgatgcggggaaaccccctgatcaatattaacaacgccggatccttcaatgttaagagaaggtgggatgatgatgttgtattcaagaaccaggctcgtggagagaccaagacaccgaaacgtttcatcaacgacactatcagaagtgatttccaccgtaagtttctgcagaggtacatgaagtgatgctgccgttgtacgctgttccctggccttcacggcctgcctgtctctgtctgagatcgctgtgtttctgtttctgtaatttgagtggaagatctatatatgacacaactgtaacatctgcttaatctggatggcacatttttccactaaaaatggaaaaaaaatctatgcttgtgtattaaaaaaaaaaaaaaaaaa

SEQ ID NO: 65388 - DNA, 5887 bp, Oryza sativa
  Clone ID: PAT_MRT4530_66440C.1
atggcaccccacccccacctccgtttgctgctggtcgtcggagtggcagtcggtagcccgggccgtggttgtgggggaggagaagtggaggaagatgcggcgggtcctgaggttgttggcccatattctattcttatacggcacgatttagctcctccgtccacgcctgctccgacgcaacttgctgtttctcgagcggcgacctgccttggggcgcatcacggtaaacgggaaatttgcccttgttgtcatttcctagaggagctgaatcaggtcctggaaactaacatggctggggaggcccttcgggttgtactctccagcgccttcgtcggctgccacaccttcggctgagggatctatcccccactcacccctgaagtccgggtgggcagcagtgtttgcgtcagcgcatgcactgtctctctcgacgaggttaactaaactttagctgacctgtccgttgtgacatcgaccgcgctagtcttcggtccacctgcacccacgctggccgcgcccgagggttagcccggttgggaccacgtggtcggtggccgtaacgggacttgtttcgtcaaggagcgtcagacgcaagacttgtcgtttggcatgtatctctcttagagatccaggctcgtgcagccgattgcatagaccctcccagggtttgccagtgacggcatttgggtcaatgaaggaatcatcggaggtatcggctgctcgtgttccgaggagttgataatgagtagggctggggtctgagatgaatgtttttcggccgatcagagcaatggaagtacacaaagtacattgtatcttaaagctgcgtgcttatagtgcattggttaaccttgtgcagcctcagagttggttccggttgtacgtgaaaaggtactatttactctttatgtgtacaataggcacactatcgccttagatttttctcagaggtagaagtgttcaggatgtggaggtaatgcaggaaatgacagaactctttatgagactgtacctacgagtcttgttgttagcaacaacaactttagtatacaaaataaaggtgtacttgaacaattattaagtaggatttagacaccatagagtttataaacagttcccaagctaactgaagagatgtgattttgttgttgtttttagttctcttgttgtcggtgctatgtactttgcctctagatgttgatttgggcaaggcaggcattgactgtgaaacttgtattacctgcttggaagcttcttatgagtgactcaacaatcaaggtgtttggtgccttgagaatgtctgtaaagatgcttcttatgtggaactccaaaatgttaattgatggtggtggagattcaatagttgcaacatcgttacttgatgctagcaatttgatagttctaaaggaatcatctgtaatacactctaatgctaatcttggagttcgtggtcaagtaaagagtggcagtgggggcgtgcacctgcgcatatttagagcagctcttgctggtgctggagtggtgaaatattcatctcatttattcttgtgtgcatctattagggcaccaaagctgaactgtgatgatgacatctgtcctgtggaaataatacacccaccagaagattgcaatctgaactcatcactgtcatttactcttcaggtatgtcgtgttgaagatattgacatctggggtctcgtacaaggaactgtaattcatttcaatagagctagaagtgtcagtgtgcacacatctggtaccatcagtgcaacaggcttgggctgccgaagtggagtaggacaaggaaagatattaaacagtggtgtaagtggtggtggtggtcatggtggtagagggggggatggcttttataatgaaagccatgctgagggtggatctatgtacggtagtgctgatttaccatgtgaacttggcagtggcagtggtaatgacaccacaaagctttccaccgctggtggtggtataatagtgatgggctcatgggagtattctctaccaagtctttccctctatggttcagtagaatcaaatggtcaaagttccactgatgtggtaacaaatgcttctattggaggacccggtggtggttctgggggcacaattcttctttttgtacgtgctttgtccctagcggagagctccatcctttcaagtgttggtggtcttggaaactttggcagtggtggaggtggagggggaaggattcacttccactggtcaaacattccaactggagatgagtatgttcctgttgcagctgttaaaggatcaatacgtacaagtggaggaatcagcaaagggaaaggatttcctggcgagaacggaacagttacaggaaaagcttgcccaaagggtctctatggtacattttgcaaggaatgccccttgggaacgtataagaacgttactggatcttctaaatctctgtgcgttcaatgccctccagatgaactccctcatcgtgcgatttacacaagtgtccgaggaggtgcttatgaaaccccatgcccatacaaatgtgtatcagatagatatcgtatgcctcactgttatactgctctggaagagttgatatacacttttgggggaccttggttatttggcctattactttcaggtcttcttgttttgttagctcttgttttaagtgttgccaggatgaaatttgttggtactgatgagttacctgggcccgcaccaactcaacaaggatcccaaattgatcattcttttcctttcctagaatctctaaatgaggtcttggaaactaatagggctgaggaatcgcatgggcatgtacacaggatgtatttcatgggccccaacaccttcagtgaaccttggcatctcccacacaccccaccagaacagatttctgagattgtgtatgaggatgcatttaaccgatttgtcgatgagataaacactcttgcagcttaccagtggtgggaaggatcgattcacagtatcctctgtgtacttgcataccccttggcctggtcatggcaacagttccgtaggagaaagaaattgcaaagacttcgtgaatttgttcgctctgagtatgaccattcgtgcttacgttcttgccgttcacgtgctctttatgaagggctcaaggtgactgcaacacctgattttatgctgggttatttagatttcttccttgggggagatgaaaaaaggcctgatcttccacctcgtcttcgccaaaggtttccaatgtgcttgatctttggaggtgatggaagttacatggctccattttcactccatagtgatagtgtactcactagccttatgagtcaggctgttccctcatcgatatggcaccgtcttgtagctggattgaatgcccagttgcgtttggttcgacgtggaagtctcagaggaacatttcttcctgtcctcgactggcttgaaacccatgctaatccctctctgggtgtgaatggtgttcgtgttgatcttgcctggttccaagctacagcattagggtattgccaacttggtcttgtcgtttatgctgttgaagaaccaatgagtgcagagcttgatggtagccctagaattaaaatagagcaacattcactaacacagaacatgcatgctgatactcaactaggccattctagaattaaggaagctcttatgcgcaaaaggatcacaggcggaattcttgatagtaatagcttaaggacgcttaaagacaggagagatttgttttacccgttttctctcatcttgcacaacactaaaccagttggccatcaggatcttgttggcttagtaatctcaatattgcttctcgcagattttagcttagtgttactgacttttctccagctatattcatactctatggccgatgttctcttagttttatttgttcttccacttgggatactatcaccttttcctgctggaataaatgctctttttagtcatggaccacggcgatcagcaggccttgctcgtgtgttagtggcttttgcttgcggccttgtacactacaagtcatcaaccaaaagacatcctagtacgcagccatggaaccttggaacagtttgagaaagtattgtaccagttggtgttgtcgttcccattcacctccttgtctccggtgttctccgtggacatgttggtgaaggcgcagatgaacaggagcagtcgcatgttggtgaaggctatcagtgggatctctctgcctgtgggttccgacaagctttactccggcagcgctgacggctccgtccgcgtctgggactgcaactctggcaagtgcgttgatgccatcaagatgggaggcaagattggttgcatgattacccatggcccatggatatttgttggaatcacgaagtccgtggaggcatggaacacacaaacagggatgaagtccagtctccgtgaaccttctggtctggtttgttccatgactatcaaggatgagatgttgtttgctggtaccggagatggtcgcatcatggcttggaaaattcctgacaagaagggtgactctggaccagtggcaatcctcagtggccatgagcgccaagtgatttcgctcggtgtctcagtaacaaggctttactctggctcacttgacaagaccatcaaagtatgggaccttaaaactctgcagtgtgtccaaacactctctgagcacaaagctgctgtaacatctgtgctttgttgggatgaaaaactattatcttgctctctggacaagactgtaaagatctgggctgcttcaaagtctggagaccttcaagtgatatatacccattctgaggagcatgggtggaaacgagccgagccggctcggcttgcagtggctcgcaaaaaactaggcttggcttggctcggcttgaatctgttgatcgctttgggtgtttttgttgtggtgcttgttgtggagaaacattctgtatttattgtggtgcatggttatggaaaccatggagtacgcacgctctttggcatgcaccgtgttggaaagacgccagttctgttctgctccctccacaacagcaactgcatacgtctgttcgacctgccatcgttcgacgagatgggcaagcttttctccaagaaggaagtgaggaccatcgagctcgcagccggcggcctcctcttcaccggcgacggcgccggcgagctgaaggtgtggaggtgggcgcccgaggaggagcctgcaaccccggcgctcgtgaaatcatcaatgtggctggtggctcttccctactggactcatgttgctgaaatgcatccaagctaggcttgtcgattggcatgtggctaatttagagattcaagaccgcgcagtatatagcaatgacccaagcatattttggcagtcatgacacttggcattactactactaaaggttcttttgggagctttttacaactcaattttttgggagttgataaaaggaagggtgggggtactcaaagcacggcctttctttattgacctttggccgaagaagaagcaactactacagtgggttatagatgcaatttccgcgtccctctgctaatcatatgtgcagtcacaaccaacctgtattttggtgttgtatatataaaaaaggtgtacttgatccattatttgtaggatttagacaccatagagtttataaacagttcccaagctaactgaagagatgtgattttgttgttgttgctactgctcttgttgtcggtgctatgtactttgcctctagatgttgagctgggcaaggcaggcattgactgtgaaacttgtactacctgattggataacacaagtgctaacttggctgatggttttcatccctcatcattaacccaatgcaatgctgataccaccgagttgttc

SEQ ID NO: 65389 - DNA, 472 bp, Oryza sativa
  Clone ID: PAT_MRT4530_66441C.1
actattatagaggagctaggacgtaggctggccgccgacggcagggaggctcttgttcggccgccctcctttttttttggggtttttttttttttttttttttttttttggggaagcaactctttttttttttttcatgggaaaaaaaccccacgtactcaattaacccagggaagatgggccctcccaagcacacatcttgaaatataccctccggggggcttgaaaaacgtttgtacattcataaccggggggaaaactagcttgccggcatccagtttttaagaaagatttatgggtgggccaggcgggccacaggctttggacttgccggctggtacaccatgccgtattcttaaccgttttttttccactgtaggagccggttgatgggccctaataaacaagttttgactctcccttaaccacttcggggtttggaaagggaagagaatgtttcagtattatttct

SEQ ID NO: 65390 - DNA, 288 bp, Oryza sativa
  Clone ID: PAT_MRT4530_66442C.1
atgatggtcggcaagcccggcagcagcggcttcgatggcagtggtggtggcggaggcaatggcttcgacggtggccgatggcggcagcggcgggttagacggcggttggtgagtggctctagaaagcacgcagcggaggcagctttgatgatggttcgcgagcccgacggcagtggcttcgaggcggaggtcaaggcgaaggccacagcggccaattacataatttttgggtgtcctagggacaattttgcctacggaaaaacagacgtcgactacgacaacatctag

SEQ ID NO: 65391 - DNA, 898 bp, Oryza sativa
  unsure (1)..(898): unsure at all n locations
  Clone ID: PAT_MRT4530_66443C.1
cggtccggattccgggtcgacccacgcgtccgctcctacacacccctacgttctccgctggcaccccgatccctatgctgtcgggtccggcccgggtcgacgcgtccgtgattacccatggcccatggatatttgttggaatcacgaagtccgtggaggcatggaacacacaaacagggatgaagtccagtctccgtgaaccttctggtctggtttgttccatgactatcaaggatgagatgttgtttgctggtaccggagatggtcgcatcatggcttggaaaattcctgacaagaagggtgactctggaccagtggcaatcctcagtggccatgagcgccaagtgatttcgctcggtgtctcagtaacaaggctttactctggctcacttgacaagaccatcaaagtatggtatgggaccttaaaactctgcagtgtgtccaaacactctctgagcacaaagctgctgtaacatctgtgctttgttgggatgaaaaactattatcttgctctctggacaagactgtaaagatctgggctgcttcaaagtctggagaccttcaagtgatatatacccattctgaggagcatggagtacgcacgctctttggcatgcaccgtgttggaaagacgccagttctgttctgctccctccacaacagcaactgcatacgtctgttcgacctgccatcgttcgacgagatgggcaagcttttctccaagaaggaagtgaggaccatcgagctcgcagccggcggcctcctcttcaccggcgacggcgccggcgagctgaaggtgtggaggtgggcgcccngagaggagcctgcaaccccggcgctcgtgaaatcatcaatgtagaagcactgtagcgtcgttgagtaaagaagcagctcctgc

SEQ ID NO: 65392 - DNA, 462 bp, Oryza sativa
  Clone ID: PAT_MRT4530_66444C.1
cccacgcgtccgctctacattgcccccacccctaatttttgcagagatctcctcgaggcatgacaagtgttcgatgctgatgggtgcagtgccatgtatattttcaaagagggaattaaagactaacttgagcttcctgagattaggcaatgcatccgactcaaatttcagccaaggtgcactgcatctgaactccaagtactttagaactgagaatccccccttgtcaaagatgaccttttcaatggacgttgtatgcacattcaatgacagagaagtgagggcaggcaatcccctgagaatattaatgccattcttgacaagttcccttactgcaatatttaaaatgcagaggttgtcaagttctccaatccattcgggaattttggagaagatgcaatcatgtagaaaccactcaaatctctgcagaaaacgaagaggtgtcaagaaatcccaagcaac

SEQ ID NO: 65393 - DNA, 453 bp, Oryza sativa
  unsure (1)..(453): unsure at all n locations
  Clone ID: PAT_MRT4530_66446C.1
ccacgcgtccgcgtggtcaatggtctgttgaatttatctggagaaggagacataattgaagcacaacgacttattttatctctattctacagtataaaagttggacctggctccattttacggggtccacttgtaaatggaagtagcggtgacgtggcaccaaagctgaactgtgatgatgacatctgtcctgtggaaataatacacccaccagaagattgcaatctgaactcatcactgtcatttactcttcaggtatgtcgtgttgaagatattgacatctggggtctcgtacaaggaactgtaattcatttcaatagagctagaagtgtcagtgtgcacacatctggtaccatcagtgcaacaggcttgggctgccgaagtggagtaggacaaggaaagatattaaacagtggtgtaagtnggtggtggtggtcatggtggtagaggggg

SEQ ID NO: 65394 - DNA, 168 bp, Oryza sativa
  Clone ID: PAT_MRT4530_66447C.1
ggccgatcaaaagtttcattttttttaactacttgtatattgcacattgtgggcaggttttaacggttcatgaaacgagggccaaggccgcgaacaaaacttaacaagggcgagaactagacatcttaacggcagacatgcaaaaccaacatgggggacgaggcgtac

SEQ ID NO: 65395 - DNA, 1343 bp, Oryza sativa
  Clone ID: PAT_MRT4530_66448C.1
ctcacgctgacgatcgccaccgcctcccccgcaaaaccgtcgcgccgactcactctcgccgccgccgccgccgccgccgcgagatccgatcgccatgacgatctcctagtccctcgcctcccgcctcggccccggcggccccacgaggtggagcccctacgcccgggcccccgatcccggccacggggcggggaggagctccgttcctcccggtggtggtggtaactcccgccctcccctccgcgtcgcccccgccacggcgaggctcctcggccaccccgcgcggaagggggccgcggcgccgcccggatcgaggtgccgcgcggaggcggaggcggaggccacagccgcctccgatgctgcctgccctaacccgccgcggcgtgggtgcgaagagacgaacccgaacccgaaccctaagagaaaccctaagccggcggagagaggggaggagccgcccgtccgcgccgtcggctgcggcggattcgccttcctctgcgccctcgctggccacaccgaggctatcagtgggatctctctgcctgtgggttccgacaagctttactccggcagcgctgacggctccgtccgcgtctgggactgcaactctggcaaggtagctgggctctccgctctcggcactcccttcaggctctttacgcacgattcaagttgagtaaattcaagttgggggttgcatctgcgtcgattcctccgttgattgtggcggtctttgaagtgcttccatgagatcaattggggagtactatctgattgcttcctgtggtcagacatattggtaccaaatcagttttttctttgcaagattggggttatcggcatgccggaccgaattgttacgggaatcttttcgcctgcttgtgtactgttgatcagtatatcagggtcagtttgcgagcaaggcaatgaggctggtttggctgataagcaaggggctctctggaattacattacagttctctctggctgatggtccatacatgtgcgttgatgccatcaagatgggaggcaagattggttgcatgattacccatggcccatggatatttgttggaatcacgaagtccgtggaggcatggaacacacaaacagggatgaagtccagtctccgtgaaccttctggtctggtttgttccatgactatcaaggatgagatgttgtttgctggtaccggagatggtcgcatcatggcttggaaaattcctgacaagaagggtgactctggaccagtggcaatcctcagtggccatgagcgccaagtgatttcgctcggtgtctcagtaacaaggctttactctggctcacttgacaagaccatcaaa

SEQ ID NO: 65396 - DNA, 440 bp, Oryza sativa
  Clone ID: PAT_MRT4530_66449C.1
aacattgaaccggaacatagacatgacgtcctggtaaccttactttgcttagggggttctttattaaaacatttctgaactatgaagggggtaaacccacgttctccaattattgaaccacacaccaggtctagcagttctatataacacttaactgagtcctaaatgaaagtcccgccctgatgactgttgctatgtctaagccataaactcttttcaaaaccccttactctctgcatgccaaaaaatactatttttcctcccacaaatcgacaactctgacgtcggttatgtactgcctatgactagccatccaccgctagttcgtaatgatgtcatgcaaccaacaaagaagtgcttcttgttcatcgcggactcttctaggctaacatggtccgccaatgtcttctgagatttgtggaacgggaagcctcctgccc

SEQ ID NO: 65397 - DNA, 435 bp, Oryza sativa
  Clone ID: PAT_MRT4530_6644C.1
atggccgtggcacggacacagaagatggtgaggttatcgtcggcgttgcggcgacagaggcaccgggaccgccgacttcttcttcttcttctgcggcggaggaggagccacctgtgctcactagcaaggaggcggcgggagcagcgggcaaggacgatggtgctggtggctcgcgaggcaacggagaccttggcgaggagtgtgagggaggaggggagaggcctcgacgcctacagtgacggggagcgccagtggaagaagcggcgccgcagcaggcggaggacggcgtcgaggaggcacggcgagatcaccctcgacactgccccgacctcgccgacgccgggccgttgtcgtccacctcggccgccggagacgacgacggcgaccccttcctcctagctggcttcatctccatgctcttggacttctcctgac

SEQ ID NO: 65398 - DNA, 864 bp, Oryza sativa
  unsure (1)..(864): unsure at all n locations
  Clone ID: PAT_MRT4530_66450C.1
ccggccgggctctttctacagccatccgcgccccgcccccccgcgtcaaccaaaccctaactcgcccaaatccgcctctcgatctcgcctccgccgtccgccgccgccgcctccgccgccggccgccaaaaccctaccgcctctcgtcgcctccgtccgccgcagacgcgcccggtatacaacagggtgatcgtcggttgaaaatgccatctgcatccaaatccaagtccaaagacaggtcagctgccaaggcaccaaaagagcaacctaaggttgcagcaaagcctatggggaatggcacagttgcaagtgcctataacaacttctctggaaaattccatctgttggagccatcatcttctttgctggttagccagggcaatgacaaattaaggaatacagacgagatagatgaacattctcgtagctcccatggtacaggagactttgattgtgcctctaacaatggtagctgttctggtgagtcagaagatccaaaggaaaaatcaacgagtactgcacctcgagtggactctgttccaggatgtgatgtcgataaacgtgagaagatcagacagaagaatgagaagaagcatcaaaggcagaaggagaggcgtgcccaggagttacatgagcgctgcaagggatacctaatgtcgagaaagctagaggcacttgcgcagaagcttgttgctatgggtttctcatcagatcaagcaacaatgggcccttatacagaatgagggctgcccttgagagtctgttgcctggctatgcagctttgatggaagtgaggaagccaacagcaacagcagcagatcaacacctggggntaatttgaagatgatatactgatgaacttgc

SEQ ID NO: 65399 - DNA, 1606 bp, Oryza sativa
  Clone ID: PAT_MRT4530_66451C.1
atcgagtacgtgtgcacgcagctcatctactagcctacactccgggagggcgacatgacggacgtggagctgagagtggaggccctcagcctcagcggcgtctccgccatcccgccggagtacgtccgcccggaggaggagcgcgccgacctcggcgacgccctggagctcgcccgggccgcgtccgacgacgacgccaccgcccgcatccccgtcgtcgacatctccgcgttcgacaacgacggcgacggcaggcacgcgtgcgtggaggcggtgcgcgcggcggccgaggagtggggcgtcatgcacatcgccggccacggcctcccgggcgacgtcctcggccgcctgcgcgccgcgggcgaggcgttcttcgcgctgcccatcgcggagaaggaggcgtacgccaacgacccggcggcggggcggctgcaggggtacggcagcaagctcgccgccaacgccagcgggaagagggagtgggaggactacctgttccacctcgtccacccggaccacctcgccgaccactcgctctggccggcgaacccgccggagtacgtccccgtgtcgcgcgacttcggcggccgcgtccggaccctcgcgtccaagctgctcgccatcctctccctcggcctcggcctgccggaagagacgctggaacgccgcctgagaagacatgatcagcacggcgtcgacgacgacctgcttctccagctcaagatcaactactacccgaggtgcccgcggcctgacctcgccgtcggcgtcgaggcacacaccgacgtcagcgcgctctccttcatcctccacaacggcgtgccgggactgcaggcgcaccacgccgggacctgggtcaccgcgcgctccgaacagggcaccatcgtcgtccacgtcggcgacgccctggagatcctcaccaacggccggtacaccagcgtgctccaccgcggcctcgtcagccgcgacgcagtgcgcctctcctgggtcgtcttctgcgagccgccgcctgagtccgtgctgctgcagccggtgccggagctgctcgccgacggcgccggcaagccgctcttcgcgccgcgcacattcaagcagcacgtgcaacgcaagctgttcaagaagctcaaggatcagcaagacaacaatgccgcagctgcatcgaacggaatgataactaaataattgcaattagtcgatctatcggcgagacaacccaatattttgaaaaattgatggacacacaaaaaaaacttttttatataagaatatgcatttggttgattcaacatgaaaaatattttcaaaccattatatttttaattggttatgaataaactataaaaataattgcattcgtctgaatttcagataaaggagaacaaataatgttcaacggaagcgaaagccggggaaatgtacggatgttatatcgagagcttaacttatgagatgtcttatattttgttgtctatgtattgcagtcgacttgtacaccgagtctttccatccctattaagagctggagctcaatattatgatgggatttgctataaatgtgtcaccatatttttcataaaaaataatcaccatgtaaaaaaaaaaaaaa

SEQ ID NO: 65400 - DNA, 513 bp, Oryza sativa
  Clone ID: PAT_MRT4530_66452C.1
gggaagggcatcggcggcagacgcgcagccggttctgccgccaacgtaggtaccctcgccactgccgccacaagggaagggagggggcacgacggcggatccgccggcgtcgggcgccggatctgccctccccccgccaccaccgccgccgccggcttaagtggagggagaacaaggagggaaggagaaccggggcggattcagcgggcgtccctccacccgccgccgccgtcaccacaagtggatggagaaggaggaggggagcagcggcggcagcaagggcgggtcccgcctccttcctccccccgtggacgcaaccacaaggtcgaggaggccatcatggtagaggagggcagcacaggaggcatggtggagggcggcaatgttgtcgtccccttgctccgtcgtctttgtaaacgccggcgccgtccttgcccccggccgggaggaggaggccgcatggattggccggggatggggatggcggattggccgggaggaggattggacaga

SEQ ID NO: 65401 - DNA, 678 bp, Oryza sativa
  Clone ID: PAT_MRT4530_66453C.1
atggaaaatcacaaggatcacacctgcaaaattgcaaccactactttagtaatagtgccattgctattatctcttcaccagctatatctcttcttcctccacctgctgccatatgcttgtgtagtcagtgttgcagaaatgacaaagatgagcagcatgaaagctgatggcagtgtccccaagagaaggaggcaggatgttcagaaggttgtggtgtctttgaaagatcataaggttgagcaagggccacctgctgacagttggtcctggaggaaatatgggcagaaaccaatcaaaggatctcctcatccaagaggctactacaagtgcagcagttacaggggatgcccagccaggaagcaagtagacaagtgcaggaatgatgcatctctgctcatcatcacctacacctcagatcacaaccatgacaactatgctgctactactacaaattcagtccaagaacaggcacataatcctgacacaagtgatcctctcagcaatggcatgtcccttgctgaggtagtaacagttgcatcctccaagctgtccggtgaagaggagagctgtgacttctttgatgagcttgaggagctcccagtgtctgcatctcccttgccaagcttatctttcatggtccaagagtgcagcttctctgatgcaagaacactgttgtag

SEQ ID NO: 65402 - DNA, 330 bp, Oryza sativa
  Clone ID: PAT_MRT4530_66454C.1
aaatagtggatcccccgggctgcaggctcaccacaacgttcttcggcttcttgtttgttgcgtcctctgccattgcttccacggctccgccatggacgtcgctcttgcgtgccgcagctcgcgccccggacagcccggtgaactggccgacgaggatgaacatcgcgatgggcgtggcccgtgggctgcaccacctgcacgcggaggcgagcatcgtgcacggcaacctgacgagcaggaacatcctgctcgacgaggggaacgacgccaggatcgccgactgcggcctgtcgcgcctcatgaacgccacggccaactccaacgtcatcg

SEQ ID NO: 65403 - DNA, 354 bp, Oryza sativa
  Clone ID: PAT_MRT4530_66455C.1
tcccggtcgcccacctcgctttgtctatttcacattgagtgaagaggggatgccaaagctcttgagctaagtctgggaaaccatggtggcttaggagctcagagcaagcctgtcgtgccgtgcatgcctaggcccttgttccttgtgttagtttcagagtgggggtattggtgtggttgctttggcatgttatttcccatgtattggcttggttaggtctcacacatattggcttggttatgctttaaagatttccttggctatttaatggtttatctagtagatgattgagggttttctcaattgcataagtccctgttctcacttcagttttaagtgtccttgctggtgact

SEQ ID NO: 65404 - DNA, 210 bp, Oryza sativa
  Clone ID: PAT_MRT4530_66456C.1
gggggggtgtttatttttgtttgttttatttgatatatattaccagggggccccccaagcggtccaccaggcgttggggggggcggggggtccccggggaattggggaccagtaccaactgggcgtgcagtgttgcatattgtggggtggactaaaaacatggaggacaaagggcaaggcggttgcgcgtgggaaagtggttggcgctca

SEQ ID NO: 65405 - DNA, 1764 bp, Oryza sativa
  Clone ID: PAT_MRT4530_66457C.1
cctcgcccggcccccgcctgtaggtactcgtactactccacttctttctctcgcctacgccttcctcccaatcttgttgtttcggcggcggcggcggcggcggcggtgagggagatggcggcggagaggaaggacgtgggcattctcgccatggacatctacttcccgcccacctgcgtgctccaggacgagctggagaatcatgatggcgtgagcaaagggaagtacaccattgggcttggacaggatagcatggccttttgcactgaagtggaagatgttatttccatgagcttgacagtagtgaagtcactcctggaaaactataagattgatccaaaatgtattggacgtttggaagttggcagtgaaacagtaatagacaagagcaagtctataaaaacatggctgatgcaaatatttgaggaatgcggtaatactgacattgaaggagttgactcctcaaatgcatgctacggtggaacagctgctttatttaattgtgttaattgggtcgagagcaactcatgggatggacgttatgggcttgttgtttgcacagacagcgcggtttacgctgaaggtccggctcgtccaaccggtggtgcagctgctattgcaatgttgattggaccaaatgctccagtttctttcgaaagcaagtatagaggatctcatatggcacatgtctatgacttttacaagcctgatcttgctagtgaatacccggtggtcgatggaaagctatcacagacatgctatctcatggcattagattcctgctacaatgtcttctgcaaaaagtatgaaaagcttgagggaaagcaattttctattcatgatgcagactattttgtatttcactccccatacaacaagcttgtgcagaagagctttgcacgcctatactacaacgattttctgagaaaatgcagcacggtggaagatggatcaagagaaaaactggagccttattcaggtttgtcatccgaggaaagctaccagagtagagaacttgaaaaggcttctcagcaagttgcgaagcacctctatgattcaaaggttcaaccaactacattaatcccgaaacaagtcgggaatatgtacacagcgtctctatatgctgctttggcatcagtgatgcataacaaaaatgaaactctggcaggccaaaggattgtcatgttctcatacggcagtggcttgacatcaacaatgttctctttcaagatcaatgaaggccagcatccattcatcctatcaaacattgcaggcatactggatgtctccaagaaactggagtccaggcatgtggttgcgccggagaagttcgtggcggcgctgaagctgatggagcaccggtacggcgccaaggatttcacgacgagccaggacacgagcctgctcgctccaggcacctactacctcacccacgtcgactccatgtacaggaggttctacgccgtcaaaggtcaagccgtcaccgaagtgtccaatggccattgaaaaaattgtgttgtgatgtgtggttcattcaacctgaagctgcaataagccaacggcatagagggttcagggcgtgggtgtaccaagttttctgatgaaagcttgtaaagggtgctaggttagagctgttggattagttggttcgctattcgctagtaaggcttacttggtgaaatggtatctccacttcgttaatgttcttcagtggaacacacggtagcgagctgtaagaattcttaataatctgccgtcccgttc

SEQ ID NO: 65406 - DNA, 1167 bp, Oryza sativa
  Clone ID: PAT_MRT4530_66458C.1
ttttttttttttttttttcatctctgtttcacctcgttgggaagccaattcatcacagattcaatcacaaggggaaaatcaactaaaaagagaaaaaaatgaaaaacaaatctcttaaaaattcatcacaaagagaggagccctagcgtgcccgccaccgccaccagctcgtcgctgtcgtgtccgccaccgcaacacctgctccaaccgccgcctactcctgcgcccaactaggaggaggtcgtagccgctgccggggaagggggctgcctcaatgaggagaggaggacggggtggagccggtggtcgactggaccgacgcgggaagccgacgtcgccgccggatccgcccgtgggaagccgcaggagggcacctccaccgccgctgctcacggtgggggagggcaccgccacagccgcttggagagggcgtcgtcgccgccgctgctcgaccaccgcaagagggggatggaggaggaggtcatcaccgatgaacgcgaaatctagcgcgaggatgccgtcccggggatccgtcgcgtcggatgctagggtgcaagaatccaagctcgaggcaagaacgtcggcgagagggtgctgctgctgcggcggcggcggcggcgacttcaactctgcctcgctccccatgtactccgagtcatcggcggccggcggcgggcaaccggcgttttccgccgtcttggcggcgtcggggaccaagccgctgcggcggagctggatccagcggtccctcatgatggccgaggtgcggccgtagaccgagcggctgatcttcctccagctgccgccggtgtggcggtggaggcgcacgagctcctcgtcgtcgcgggcggtgaaggggcggtggtagacgtcgcgggcgaggtggtggcgccacctggcgcggcacgagtcaccggagcgcccaggcatttccctggcgaccttccaccattgccggaagaggttctccttggcgagccgccgcagccgctcgtcctcctccgccgtccactcccgctcgggcagccgccgccggcgggagcacctgcacttcgccgccgccgccgccgccgccgccgcgagccatggacgtctctcctcctcgggatcgtggttggttgcagcgagagcaagggtatcgtcccagacgtccgtctccgtccccat

SEQ ID NO: 65407 - DNA, 218 bp, Oryza sativa
  unsure (1)..(218): unsure at all n locations
  Clone ID: PAT_MRT4530_66459C.1
accaactatatacacacaaacaggcattgttttaataataaaaacacccccccacccaccacctacaccctacacatatacctaataatacataatttatacccactaccatccataccactacccatcattttttccatcnaccatacaaaaaaaaaacatacattcttacacacatttacacatatacacatccatatatacatatataaaaactc

SEQ ID NO: 65408 - DNA, 3795 bp, Oryza sativa
  Clone ID: PAT_MRT4530_6645C.1
atggctgctgtccgaatgaccctccgatgggatgggtcataccaacctccactccgccggaagcagatgccgcgctacaagcctgagtacttgtttggtgttgagggatttgtccaggagttgcgtacgatgtcctttgccataggatttgggactgcccctttttatgcccagattcctcatgatcgccacgaagagaagtgccgagtcaaagtcaccttgaacagtaatagtgaagatatcccctcagtgatgttcgaagctggaggaagaaactacatccatgcatgtcaggaggtggcaaggatcgccataggagagctccgcgatcgctattgtgatcagttggccgacactgagtatcgctaccatcctcgtcaaccacagggaagtgaccgtggcagctaccttgagactgaaggaattgagaatgatgctaccacaaagcatttggttgagatgctgtgggctatggatgaaacccgtgcggagactgtgttagcagctcaagatcgtgaagaccggaatcgtggtaagatttgcaagctagaggacaaagtggatcgtttggagaaggaactagccgcgttgaagggagaagcaccaccgcagaaggccaggattcgtcttactgcaaggaagagagctctatttgtccctcgctaccaattggcgccaaaggtccgtgtggtggagaaagaagttaccccagccctagcggatcctccggtcgtcaataataagttagcagaatttcttcgtgtgaggccgcccactttctctagcaccactaatcctgttgaagctggtgattggctgcatgccatagaaaagaagttggatttgcttcagtgcactgatcaggagaaggtctcatttgcatcacatcagctgcatggccctgcctctgaatggtgggatcatttccgccttaacaggactactgctgaacctatcacttggcttgaattcaccgctgctttccggaagacgcatataccatcgggagtggtatctctcaagaagaaggaattcaggtcgctcactcaggggtctcgctctgtcactgagtatctgcacgagttcaatcgtctggcccgttatgctccggaagatgtgcgcactgatgaagagcgccaggagaagttcttggaaggacttaatgatgagctttcttacccactcatgactggggattatcctgatttccagaagttagtggataaggctattcgccaggaggacaagtacaaccgcatggaacagaagaaacgccggattgcttacttcaaggcacaacaggggaatagtcagaggccgcgtcttactttaggaccccagtccatgccacagggaggttcttcgtctgttgttcgtccgcagcgtcagttcttcaacaacaatgctggaaacaacatccgcaatcaagctccacgccctgttgcagctccaacacagcaacagcctgccaagaaggagcaaggcagcaagcccggggtgtgtttcaattgtggagacccaggacattacgctgacaagtgtccgaagccccgacgcgtgaaggttgtccctgcccagagcaactctaccataccagcatcaaaggcccgtgtcaatcatgttgctgctgcagaagctcaagatgctccagatatgattttgggtacgtttcttgttaacttagttcctgcaacagtgcttttcgattctggtgctacacattcattcttatctatgagttttgcgggaaatcataggatggaagtagaagatcttagacgtcctttgatggttagtaccccaagtaatcaggcactctctttgcaacgtagcccctctatcagaatagaaattcaaggagtaccatttctggccaatcttatcttgttagaatccaaagaccttgatgtcatactagggatggactggttagccagatataaaggtgtgatagactgtgccaacagaaaagtaactctcaccagtaatgatggtcgagttgtaactgttcatgcattgtcttctgagtctttaaggtcaagtctgaaccaaataactttggaagagattcctgtagttcgagagtatcccgatgtgttcccagacgatttacctggtatgccgcctaaaagggatatagagttcagaatagatttagtaccaggaacaactccgatccataagagaccttatagaatggcagccaatgagttggcagaagtcaagagacaagtagacgatttgcttcagaaaggatacatcagaccgagttcatctccatggggagctccggttatttttgtggaaaagaaagaccatacccagaggatgtgtgtggactatcgtgcactaaatgatgtgactatcaagaataagtatccgctgcccagaattgatgatttgtttgatcagcttaaaggtgccaccgttttctccaagatagatcttcgatcagggtatcaccagttgagaatcaaagaggaagatatacctaagacagcttttaccactaggtatgggttgtttgaatgtactgttatgtcttttggacttaccaatgcccctgctttcttcatgaatttgatgaataaggtgtttatggaatacctagacaagttcgtggtggtctttattgatgacattcttatctactcccgaaccaaagaagagcatgaagaacatcttcgccttgcactagagaagctacgagaacatcaactgtatgctaagtttagcaagtgtgaattttggttgtctgaagtgaagttccttggtcacgtcatctcagcaggaggagttgccgtcgatcctagtaatgtggaatccgtaaccaactggaaacaaccaaagacagtttcagagatttgcagtttcctaggcctcgcaggatattatcggaggtttatagagaatttttccaagattgctaagcccatgacacgactgcttcaggaagagatgggttctaagctgaactttagtactgcttatcatccacagacagacggacaaaccgaaagggtgaatcagattttggaagatatgttgagagcttgtgctttagacttcggtggaagttgggataagaatctaccttatgcagaattttcgtacaacaacagttatcaagctagtcttcagatggctccttacgaagcactgtatggtcggaagtgccgcactccgcttttgtgggatcaaacgggagaacgtcaggttttcgggacggatatcttgagggaagcagaagaaaaggtgaaaatcattcaagaaatattgcgtgtggcccagtctcgccataagagttatgccgacaatcgtcgtagagatctaagttttgacgaaggagattatgtgtaccttcgtgtcacgcctcttcgaggagttcatcgttttcacaccaaaggaaaattggcaccgcgttttgtgggaccctataagattgtcagtagaagaggagaggttgcttatcagttggagttacctcaatctttggcaggagtccataatgtgttccatgtgtcgcaattgaaaaagtgtttaagggtacctaccgaagaaactaatcttgaacagatagaagtccaagaggatctgacctatgttgagaaaccaatccgtatcttggaaatagatgagagaagaaccaggaatcgagttatccgtttttgcaaagttcaatggagtaatcactcggaagaagaatcaacttgggaacgagaagatgaattgaagtcaactcatccgcatctgttcgccagttcttccgaatctcgaggacgagattctgtttaa

SEQ ID NO: 65409 - DNA, 858 bp, Oryza sativa
  Clone ID: PAT_MRT4530_66460C.1
atgcagatcgggattaaagaaaacgaacaatcaactttattggatcctaaattagctccaatgttatggtttcattacaactattatatgcctctggaagaaagcgacgacgaggacaatgagaaaagtggtgatgatgacgatgtgagcgacgaagacgagtttagtgagacaagtgatgaggatgaatctacagaggaaactgatgatgatggaataagtgaggataacaaaattgatgtaagtggtgatgatgatgataacactactgatgaggctaaggaggtaaatgacactttggtcctttacaacatctctagcaaacaattggtagctcacgacaagccagatgatttgaaagaccacttttattggataacaccgcaagtggggggaaagttctacacgacatttggtgatcgtattgtgacactagaattcttcccttatccaacatttgatattattcctattaaatcagcacataatatagtgtatcactttgcggaaatctgtttgttagaatcaagcggagatttgttcatcttgttcttttaccatccaatgacatgttctcaaaaaacagtggagatcgatgttcacaagctggacataacaagaagagcttgggtgaagatggacacacttgaggacagagcatttgtagttaataccattaagaactctggagtatcggttaatgcaaaagaagtttatctggatggaaactgcatttattttttaatgcgtggtgacaaaggattatatgtgcacaacatggaacgaggaacaactacggccctcaatcctggtgcagatgttaatgtggcagctcaaatattgatgcctgcattttga

SEQ ID NO: 65410 - DNA, 2805 bp, Oryza sativa
  Clone ID: PAT_MRT4530_66461C.1
atgtgctgccccaggtctggctgtgtgctgattcagagtgctaagggtatagtgcaaaaagaacatgttaaccctttggctattgtgacaattatgtgggtaggtgatcttactgagcaggctttggaggaaggattcactcaacacttcaagtggaactggacttggaaggccaggatgcaggagaaagggttgttccatatgagattcctaaataagatgaaattggatgagttagctgaatttgactcaattagagtaaaaggaacatctgtacatgtgaaagtgaagaaatggactcaagaagctgaggcagtggggaggttacatgaagtgtgggtgactgtggagggggtacctgatgaaatgaaggattacgaccctctacatgaagtgggttctaatctaggacctgtgatagaagtggatatggtagctttaaagacaaaggatgtggttagaattagagtaggaatgatgacattaaaaagcttgcctctgaccatgactctgatgacacctaagttgctggtttacaaagctcatttcaagttggagcagattgtggagttgggatggtttagagattgtgcacaggaaaagagagttgtggaggtggaggagcaaaatgaacctggcaacataaatcacatgcagaggaataagaaaccaagaaaagaagaagctgcatcaaacatgagagttttggaaaaggcaggggacaagaagaaagccatagttgtggaagaggattcagacaatgaaagtgctcaagcagaattggtgaagctcaaacagatggagatagatagggagatggctctgagagtacaactagaagaacattttaaagtcaagcagattcaacttgataaagatgtagcaggagggatgatagagggtggaatcagagaagaagcacaggctggggaggaggaaaatgagaaaacaaagaagacacaagaagggatggcagataaaagtggtactagccagagagtggaaaatgacagtgaggaggtgatttatgatgaagatgaaccaagagtgcaactggtggggagtgaggagaacatggaatcacaagaatcaagtgactttgctgtagcggtgggagttgttctgtctcaaactaatgaagacatgacagaggagaagaggaagaaaagtctaagacttttggagaaggaagaaaaaggatgtgctctagaagctgcggatacaaatctgaacctaatcaaaaatctggaattggctaggataaatctgttcttgaaagagaaactaaatacttctcagaaaggggagtgtcaaaatgttggggagaacttgagtgacataaacataaatatagatgaagtcttacattcagatgattgtatgtctgattttgattatgctgaaaacatgttgaggctttctcaaagcaattcatcagagcataaagttgatttcattggcatccaagaaactgtgaagcaggatttcactgctaaagacttggatttaataggaggagggggtaagtttagttggaattggaccattcccaagggtagatctgggggtatgttggtgggaataaatgaagacaaaatggaaattatggaagtttccaagaagaattttttgttgcatgttaaagtaaaaaatagaaatgacaaatttgtgtggagattaataactgtgtatggggctgcccagcctgaacacaaggaggagttcttgagggagttagctcaggattgttatgggtgtgatgaacccctgttaattggtgtggattttaacatcctgagacaagagaatgaaaaaaacaagaggggaggggtgaataaatggagtcttatgttcaattctataattgagaatgcaaacttgagagagatggccttggaagggaaaaaattcacttgggctaataacaaacaaagtgtaactcttgaaaaattggacagaattctttttaatgataaatgggagattaagttccctttggcatgtggaagggtcttagagagaatttactctgaccacactcctcttttgatcaatgttgagggagaaaagtggctatctcctctgtttaaatttgagaatagttggctcatgagagaagatattaatactgtggttgagcaagtttggaattcttgtaatataaatggatccagtattgataaatggcaatggaggttacaaaaaatgagaaagaaactaaaaggttggaacatgaactgggaaggaatgtacaaaaggaaaaaacatgaaattatggaaaaaatagaagacattgataaaaaatgtgaagcatatggaatgactattctggaaagaaaagagagaggggatttggaggaagagttgaagaaagtagataacttgatggaactaatcacagatttcatgaaaagaaaaattagagttgagagattaaattatggtgttataactttgatccctaaatgcaaagaagcaagaatgatacagaaattcagaccaatatgtcttttaaatgccaaaggattccctgacatatggtgtgattggatcttgaaagtggttaaaggggggaaagtggccatcagagtgaatgatcagatagggcactattttacaacacacaaagggttgagacagggggatccactctcacccttgctttttaacattgctgctgatgctttaaccattcttatcaaaagagcagagcaacagggactaatcaagggtttgggaatggatgtcatgagagagggggtggctattttacaatatgcccatgataccatatgcctgatctag

SEQ ID NO: 65411 - DNA, 316 bp, Oryza sativa
  Clone ID: PAT_MRT4530_66462C.1
gtcgactctagaggatcccccggcgcaacttggcttaaagcaagaagaagtctgcaggacgttggatatgctgcccatatgctgcttcagttgcagccagcatcagatgcgagccccatacactcaggtggagcacctcaaatgtgaagatgaagctgaaaatgacatttttgctggcacgacaggtttcccgactggaaagcgggcagtgagcgcaccccaattaatgtcgactctagaggatccccttaccatgcaaccacatgttttcatgggaggaccgcccatgggggaagccggtgttagggcgaggtag

SEQ ID NO: 65412 - DNA, 333 bp, Oryza sativa
  Clone ID: PAT_MRT4530_66463C.1
atggcgagggccgagatcggtgtaaacagccgtggtgggccatggcgagagctcgacaaggcgatgccgtggagcatctccgctgccgccggcctcggtatcatcgaccgcgcctcgcatcgcatctctcggaaagcatatgcacaccgcgtggcggcgccgcttcgaattcgtcgtgcactgccgcttgctcggtgcggtgcaccgcgcgcgctccgctgccgacgtcgcgcgcgcgcgaggtgggacgaggaaaacgcacgcaatcttggcgccacgtacgccgatcgagcagctagaggaggaggacgtagcggccgggtggcacgcacg

SEQ ID NO: 65413 - DNA, 3048 bp, Oryza sativa
  Clone ID: PAT_MRT4530_66464C.1
atgcggccgaattggaaaggcggcggcggcgcggcgcggctagggtttcggcgcgaggaggacgacgagtccgacaggagttacagtcatttgtctagagattgcaaattgtcagtgttctgtatgatatgtgcaaaagagactcataggacagaggattgttttaggaagaatcagaagaaacctgtagctaaagtagtgggatgtgctgccccaggtctgggctgtgtgctgattcagagtgctaagggtatagtgcaaaaagaacatgttaaccctttggctattgtgacaattatgtggggaggtgatcttactgagcaggctttggaggaaggattcactcaacatttcaagtggaactggacttggaaggctaggatgcaggagaaagggttgttccatatgagattcccaaataagatgaaattggatgagttagctgaatttgactcaattagagtaaaaggaacatctgtacaggtgaaagtgaagaaatggactcaagaagctgaggcagtggggaggttacatgaagtgtgggtgactgtggagggggtacctgatgaaatgaaggattacgaccctctacatgaagtgggttccaatctaggacctgtgatagaagtggatatggtagctttaaagacaaagaatgtggtcagaattagagtaggaatgatgacactaaaaagcttgcctctgaccatgactctggtgacacctaagttgctggtttacaaagctcatttcaagttggagcagattgtggagttgggatggtttagagattgtgcacaggaaaagagagctgtggaggtggaggagcaaaatgaacctggcaacataaatcacatgcagaggaataagaaaccaagaaaagaagaagctgcatcaaacatgagggttttggaaaaggctggggacaagaggaaagccatagttgtggaagaggattcagacaatgaaagtgctcaagcagaaatggtgaagctcaaacagatggagatagacagggagatggctctgagagtacaactagaagaacattttaaagccaagcagattcaacttgataaagatgtagcaggagggatgatagagggtggaatcagagaagaagcacaggctggggaggaggaaaatgagaaaacaaagaagacacaagaagggatggcagataaaagtggtactagtcagagagtggaaaatgacagtgaggaggtgatttatgatgaagatgaaccaagagtgcaactggtggggagtgaggagaacatggaatcacaagaatcaagtgactttgctgcagcggtgggagttgttctgtctcagactaatgaacacatgacagaggagaagaggaagaaaagtctaagacttttggagaaggaagacaaaaaggtggccgatgctgcagctgaaaggaagggggccctctagaatctggaattggctaggataaatctgttcttgaaagagaaactaaatacttctcagaaaggggagtgtgaaaatgttagggagaacttgagtgacatagacataaatatagatgaagtcttacattcagatgattgtatgtctgattttgattatgctgaaaacatgttgaggctttctcaaagcaattcatcaggaaaaaagaggaggaaaaataacagaggaaaccttgagattttcaagcataaagttgatttcattggcatccaagaaactgtgaagcaggatttcactgctaaagacttggatttaataggaggagggggtaagtttagttggaattggaccattcccaggggtagatctgggggtatgttggtgggaataaatgaagacaaaatggaaattatggaagtttccaagaagaattttttgttgcatgttaaagtaaaaaatagaaatgacaaatttgtgtggagattaataactgtgtatggggctgcccagcctgaacacaaggaggagttcttgagggagttagctcaggattgttatgggtgtgatgaacccctgttaattggtggggattttaacatcctgagacgagagaatgaaaaaaacaagaggggaggggtgaataaatggagtcttatgttcaattctataattgagaatgcaaacttgagagagatggccttggaagggaaaaaattcacttgggctaataacaaacaaagtgtaactcttgaaaaattggacagaattctttttaatgataaatgggagattaagttccctttggcatgtggaagggtcttagagagaatttactctgaccacactcctcttttgatcaatgttgagggagaaaagtggcagtctcctctgtttaaatttgagaatatttggctcatgagagaagatattaatactgtggttgagcaagtttggaattcttgtaatataaatggatccagtattgataaatggcaatggagtttacaaaaaatgagaaagaaactaaaaggttggaacatgaactgggaaggaatgtacaaaaggaaaaaacatgaaattatggaaaaaatagaagacattgataaaaaatgtgaagcatatggaatgactattctggaaagaaaagagagaggggatttggaggaagagttgaagaaagtagatgacttgatggaactaatcatagatttcatgaaaagaaaaattggagttgagagattaaattatggtgttataactttgatccctaaatgcaaagaagtaagaatgatacagaaattcagaccaatatgtcttttaaatgccaagggattccctgacatatggtgtgattggatcttgaaagtggttaaaggggggaaagtggccataagagtgaattatcagatagggcactattttacaacacacaaagggctgagacagggggatccactctcacccttgctttttaacattgctgctgatgctttaacccttcttatcaaaagagcagagcaacagggactaatcaaggggttgggaatggatgtcatgagagaaggggtggatattttacaatatgccgatgataccatatgcctgatc

SEQ ID NO: 65414 - DNA, 354 bp, Oryza sativa
  Clone ID: PAT_MRT4530_66465C.1
atgggcatgaagccaccaacgccgttgtcgccaccggatccatccacggggcgccgtcggatctcctcggccgttgccaccgccaacggagggatcgagaagagaggcggcggagggagctgccgctgccagatccgcctgcagtcgccaccatcgccgacggatccacccgcagacgcctttgacactgtcgtcgctgtcgacgccgccgttgggaaggcgctgctggatcttgagggtggagagggcgccgtcaccgagagggagggacggctgtcgaggccgacgaggagagggagagggggagggacgccgtctccgccgcaccccgccttccccgcaccgtgccggtga

SEQ ID NO: 65415 - DNA, 373 bp, Oryza sativa
  Clone ID: PAT_MRT4530_66466C.1
tttttttttttttttttttttttttttttttttttttttttttttttttttttttttttttttttttttttttttttttttttttattttttatttatattaaatttttttattttttaattaatttttttttagacaaatatttaaactattattgggccaaaaaaaaaaaaaaaaaaaaaaaaaaaaaaaaaggatagaaaacaaataaacggaaaaaaaaaggctgcccacaccaaatatagggaactagaaaacactgtgtctgaagggagactctgcccaaaaaggggggaacaaaaaagcaggaagcctaaacctataaagaaatacgggcaacaaaataaactaattttggaaaaaaatgataggg

SEQ ID NO: 65416 - DNA, 545 bp, Oryza sativa
  unsure (1)..(545): unsure at all n locations
  Clone ID: PAT_MRT4530_66467C.1
tgacgcagctgctgtatctgattctgctccacaccggctctctgggtagcagcatgacgcttggcctgagccncaggaactgcgacgacgacgaggantgcgctgcgacgagattcctcgtgaagaactctacacgaacaagaagccagccatagtcgcgggtgcatgaccatcgtccatgacaatctgtttcttttttctttttcttttttttttgggggggggttcactgtgtttgtagttcagttactggcttactggttgtcagaataggatctctttcatcttctagggcccctttaattcataggattgacaaagaatttttatagtatttaaatttctatggattttttactacatgtccctttgattcataggaaagaaatgaaactttccatacaattgtattcttatgcttcacatttcataggaaaaatagcaagaggtgtgacctctttgtaaactttcctttgtttttcccatagcactatcaaaggactcctattgtctttcaaaaaaaaaaaaaaaaaaaaaaaaaaaaa

SEQ ID NO: 65417 - DNA, 317 bp, Oryza sativa
  Clone ID: PAT_MRT4530_66468C.1
tggcggcagagaggcacacgctcgacgacattagctcgatcgggctactgctccctctccatttgctactgtttgatctgattagcttgcttgctaggagattggacgagctcaggagatgcctcgatatcggcaaggtcagcagctgctccacggcgacggcagtcgttatcattgtaaatgacgtgatcgatgccgtcatcggtgacgcggtcgttgccgtcgtacaggaccgtgttgatgaagaccattggtgctgtattgtcggtgaagacaaatatatggctggtgtagaggaggaagcagttgcggcttag

SEQ ID NO: 65418 - DNA, 912 bp, Oryza sativa
  Clone ID: PAT_MRT4530_66469C.1
atgacggggcacagtaagcttcgagctcccgagcaccacgaccatgagctcacactgacggccgggaaggagtcattccggtgcgatggctgcaaggagcacgggtaccacatgagatacgtgtgcaagctgggagggtgtcgcgcggggttccatctccacgaggcgtgcgcgcagcacaggttcggggattcttaccaggatcccttcaagcgttacagcctcgtgttccataaatctcttcccaggtacagtgcaggacgacgttcgctgcgatggatgcggaggcaacatcttccgtccccaaatataaaagattttggctacatcgcagaaaactctaagctagtatacgtgaatggttatgcgtacgtgcgggacatcggaaggttgcgcaccctgctcaaacgcggcagggtcctgcacccctgctgcgcggcgctgccgaaggtgatcgaagccgagggcagcgtgacgaagctgcggctcacgcggaagctcaggtcgccgtgctgcaagtgcaggcacgtcaagctcggcgacaggaggcacacctgggggtacgtctccgacggcggcggcggcgccggtgtcgtccagatccatgtcgcctgcgccaacgacctcttccgcgaggagtacgagggcgcgcgcctgcagcagcagcagcgcacaagggtggaaaggctcaaggcgcgtctggtgaatatgctgagaggagcggcgaccggcggcggcggcggcgtcatgatcctccctcagctgccgaccggcgtgccggaggagtcgtcgccgtcgccgtggacgatggacagcccggtcgtgaaagcgttgctgtggaccatctgcaccgttggtgctgtcatcaccggtaaccccgtcggtatttctaatttctttttaaccttgtag

SEQ ID NO: 65419 - DNA, 1030 bp, Oryza sativa
  unsure (1)..(1030): unsure at all n locations
  Clone ID: PAT_MRT4530_6646C.1
atgagtagagtgtccactagttgaggttttgtttgatctagggtgaacaagccgagggagagggcgcgcggaccgagtccaccggagtggggcccacgcgtcagcctctcggtccacggtggaccgggcgcacgcggccgacgggagggggacgcgcccggccccgatggtcaccgccggcgaccaccggcgcggcggagcggcacccgagagagaggagggaagggggaagcgaatggagcggtctttcgcttaccccggtcgacggagactacgggaacggcggccgaagcggaggaaggcggcggtgcggttcgggacgacaaggacgacggcgctccgacggtcggcgagcgaaacggaggagcggactgtgtcgacgactactcggcgaaacccaaggaggcgaccccgagaggggaggaagtnctgagcgaccgcggncggcgacccggaactcgtctgcgactgctgatagagagaanagctgtgcgagcgctatttccaccgtgagggcgagcggcgaacggcggaaacggaggagagaggcacggggaacaattaaatagcgtctggtgagagggaaagcggcctgaggagggggaaaccggcgcggagatctcggccgccattgattgcgccggcgaactttgcgggcacaaaatcggacgaatcctagggagagagagaggggaaagtgggggaatcgggagagggaatcgcggggagtaattccccccactttaatgcgcgcggggacggcgggatgcggcggattcggcggcggcggcggcgctagggcacgggcgggcggcgggcccggcgcgaggaagccaatgacaggtgggccccacccgtcagcgagggtggcgggcgggcccgcctgtcagcggcgcgcgcgcgggggaggagccgatgggccggaggagaggagagagagggagggaagagaagtgggccgagccggccccagaaaggaagggggggaaagaggacttcttttagggtttttctttttataaaccttttc

SEQ ID NO: 65420 - DNA, 701 bp, Oryza sativa
  Clone ID: PAT_MRT4530_66470C.1
ctgcaggaattcggcacgaggaaaagaaaaggttattgatggtcttgacagtatgtgctaaacatgaagaatggcaaagttgctcttgtaatagttcccgaatatgcatttggttttgtccaccaaacaaccctgtgattcatgaagttgagcttgcaccattttgtgaagggtaaataatagtgggacttgaataatgtcggtaagattgagactactgttgcaaaaaaaaaggaagaaggaaatacattgttcaagctgggaaaatctaccagcttttcataaaaaaaaaggatttctaagcgatatgagaaggtctggcatgcttttttttttcttgcacaattgttcaaataactttgctgccattaaggtttttgttaatcccttattaactgatgattaatctgtttttgcttcaagcattcatcaagtaattgatagcacatttggtgaagaaaagaagaagcaatacaagtgactgatggtgctgcaacttgaacaatgttgcatgcaagttgaagctaaaaagattacaagcaagctgagaagctttgcactaagattttgagatattaacattcctatgcaacccattcttgtgacaagagctgggccattctagccaataatggtcttcctttgcataagatttaaagctggatatccagtttttcagaagctttatatgttggatggat

SEQ ID NO: 65421 - DNA, 620 bp, Oryza sativa
  Clone ID: PAT_MRT4530_66471C.1
gtgtgaaccaagtgtcaagtttccctaggagtcatttttgcaaatactccatctgtccaaaagtgcaagtccagaacttcctgtcttccaggtccaaaagttccggtttttcgaacctagagttgttgctagcctctcccaagtgttttttttttgccttctccactcaatctagagcctaattttggaatatctcgtgggctgcatctcggttcttattactcttggagatgatctcctagacagttaggtgtcgcccgtgagaatccgttgcatattgtggatgtcccgggtaagtttgtgaaggatctcctctcctccgaaagggaacgagttaagttaatgaagttcttgtgctaagattctagaggttttccaagtagagtaacctgtgctctttcttgtgaagattggcttagtctcctgtttcgaaatttgaatttcatctctgttctgttacccggaagttcctgtcctagaacattggaagttccgggcctggaaggcttaaacgggttcctctgcctgcccgcatctcctttggaccggccccagggtgctctactataatcgcgatgcggcctatcttgtgtgctccgtgttgtatttggcggtggtca

SEQ ID NO: 65422 - DNA, 163 bp, Oryza sativa
  unsure (1)..(163): unsure at all n locations
  Clone ID: PAT_MRT4530_66472C.1
ggaccttatattgtggaaatgggaggagtagtnntttgggatacgcatgcggctatncatcaggtggtccccttggtgttgaccaggcacaggcactgcgcatgatgcagcacattngtgtgccaccccctggnngaatgcaaatgcaagttggcttnatgcc

SEQ ID NO: 65423 - DNA, 497 bp, Oryza sativa
  Clone ID: PAT_MRT4530_66473C.1
gcctggaacttccggtgttcttaggacaggaactttcggataacagatgaaagaagaaattgaaatttcgaaacaggagactaagccaatcttcacaagatggtgcgcaggttgctcttcttggaaaacctctagaatctcagcacaagaacttcattaacttatctcgttccctttcggaggagaggagatccttcacaaacttacccgggacatccacaatatgcaatggattcttgcgggcgacacctaaccgtctaggagatcatctccaagagtaacaagcaccgagatgacagcccatgagatattccaaaattaggctttagattgagtggagaaggcaagaaacacttgggagaggctagcaacagttctaggtttgaaaaaccggaacttccggacctggaagataggaagttctggacttgcatttttggacagatggagtatttgcaaaaataactcatagggaaactttgacacttggttcacac

SEQ ID NO: 65424 - DNA, 274 bp, Oryza sativa
  Clone ID: PAT_MRT4530_66474C.1
gtcgtcgtactttttgatcactcaaccgtttagtaggacttacaagatcggtaaacccaagggcggcggggacgggcagggagctgagggaaaacaaggatccgacggtgcaggccggccgcgcgtgcggataatcacacacaacaacgaccacgaaccacgagtcgtgcagcacgaacaagctccagcttcatctccggctccggcccccgtctcctactgaatcaactagcaatcaaccaacgcatccatcgtatagatccgtccatcccgt

SEQ ID NO: 65425 - DNA, 531 bp, Oryza sativa
  Clone ID: PAT_MRT4530_66475C.1
ttgattagccgaattaacatcgatttaattctcgtccccggaactttcggtgttcttaggacaggaacttccgggttacagattgaagatgaaattcaaatttcgaaacaggagactaagccaatcttatcaagatgatgcacaggttgctctacttggaaagcctctagaatctcagcataagaacttcactaacttacctcgttccctttcggaggagaggggatccttcacaaacttacctgggacatccacaatatacaacggatactcgcggtccacacctaaccgtctaggagatcatctccaagagtaataagcaccgagatgacaacccacgagatattccaaaattaggctctagattgagtggagaaggcaaaaaacacttgggagaggctagcaacagctctaggtttgaaataccggaacttccggacctggaagacaggaagttctggacttgcacttttggacagatggagtatttgcaaaaatgactcctagggaaacttgatacttggttcacac

SEQ ID NO: 65426 - DNA, 338 bp, Oryza sativa
  Clone ID: PAT_MRT4530_66476C.1
cccacgcgtccgagctgtatgtgcttgaattttccattataagatggttgaatttccatgtagaacataataaatggtttgtatttccatgtagaacataataaatagtcatacaattccatgggtcacatttaaaaagaaagggaaatttattttggatcttccaatatagaagctaaaagaattttccagaaaagaaaaggaacatattaaagcttttttcttctttttaaacaaatacgcacacaccagccatgttcatgcctaaaaaataaaaatattccatcttaaattatatatcaccttctatcatttgattttaaataattatttttttt

SEQ ID NO: 65427 - DNA, 4470 bp, Oryza sativa
  Clone ID: PAT_MRT4530_66477C.1
atgggtttcgtctccggcatcaacgacttcgtcttccctcctgggcaggcattctggttcggcagcctcaacttcatcaccaacgacttcggcaagatttctatccttgactcggatccgaaccagtcggggagaggccagcctcggctccgatccagtctagctccagggaagtcggtgtcatactccaacctcacgggacagtttcgacagaagaattggatggctatcttagctccccaggtgtcgattctcgaccgacagatatcctcgagtacgatgacttcggctaccactacgactaccacaacctcgacgacttcgacgaaggctacgaagacaactacacgcctctcttctttggcgttttcatggccgacaatgagacggaagaatagcgtcaagcctgagaagcagaagaacagcgcacacaacaagaagccgcgcgtcgccgactggaggaggagcgttaagcacaagagcgagaacggctgcagcgaagacgcacccaatcacgtcgtcaacatcttaaaccagaccaagaccatgatcgccgcctcagttccagtgaactcctcaagcgtccgtacaccgactggcagccgagttccgcctctttcatctcaagactatcaccaaccaagcctcagcattgccggcgcaggatctagtcgcaggagcagcaatcacggaggagatagcaaagccatggctaattatctgcccgtggccctagcggactctgcccggtcctggcttcacgggctaccccgtggcacgatcgggtcctgggcggagtttcacgaccacttcatcgccaacttccagggcacttttgaacgccctggtacccagtttgatctttacaacgttatccagaagtccagagaatcccttcgagattacatccgacgtttctctgagcaacgtaacaagatctctgacatcaccggcaacgttatcatcgccgcctttactaagggcattcgccatgaactcttagtcggcaagtttggctttaagcctcccaagacggtcaagcagatgtttgaaaaagccaatgagtacgccaaagcagaagacgctgtcattgcatccaagcagtcgggcagcacctggaagccaaagaaagatgtgccgactacagggggagtggaattcacagagcaatacgccaagaatgcacgcaagacgactgacggagatcaaagtacgtcgaagaaaaaggatgatgaagatgatgcctcgactagttttcaagactcccgtaaagaactcaaccacatgtttggtggacccctggcttatgaatccaagcgaaagcaaaagctgaccgaacgggagatcaatgctgttcagcctgatacgccccaatatcttcagtggtcagagactgctatcaagtttgaccactcggatcatcctgaccgagtggtccacccggggcgcgcactcaatatccttttcgccaagactctggacgacatgcagatcccttggacagaactaaagccgagtagtgcgccctttcacggagtcatccccgggctatcttctactccactcagccagatcactttgccggttaccttcggtacacgggagaacttccgcacagagaacatttgcttcgaagttgctgatttcgagacagcgtaccacgctatactcggacgcccggcgttacccaagttcatggccgtcccgcactatacctacatgatgatgaagatgccaggtcctcgaggagtcatatccctgcggagcgacatcaagcaagccgtcacctgcgacaaggaaagctgcgagatggcacagactcgcgagatcacgctcgctcgagaggagatccgactagctgcatcaatagcaacagaagaagaagtgcctgcaaccaagatgccaaagagcggagaaggcgacgccaagactaaagccgagtaccagatcactttgccggttgccttcggttcacgggagaacttccgcacagagaacatttgcttcgaagttgctgatttcgagacagcgtaccacgctatactcagacgcccggcgttacccaagttcatggccgtcccgcactatacctacatgatgatgaagatgccaggtcctcgaggagtcatatccctgcggagcgacatcaagcaagtcgtcacctgcgacaaggaaagttgcgagatggcacagactcgcaagatcacgctcgctcgagaggagatccgactggctgcatcaatagcaacagaagaagaagtgcttgcaaccaagatgccaaagagcggagaaggcgacgccaagactaagaaaaatcctctagatccctcttatcccactaagactgctgataggaaggatgcgatcaaggaggaattgaccaagctgttagcagcaggcttcaccaaggaagtcctacatcccgactggctggcaaacccggtcctggttcggaagaagacggcacaatggcgtatgtgtgttgattacaccgacctcaacaaatcttgtcccaaagatcccttcgggttacctcgcattgaccagattggtcgcaacgttgaagcttatgttgatgacgtagttgtcaagaccaagcagaagaataatttgattgcggatctaaaagagacctttgcaagcatccgtgccttcaggatgaagttaaatcctgaaaagtgcatcttcggagtatcgtcagggaagttgcttggctttatggtatcccataggggcatacaggccaacccggagaagatcaacgctatcctcaacatgaaaccgccgagttcccaaaaagacattcaaaagttaactggatgcatggtggcactcagccggtttatctcacgactcggcgagcgggggatgcgctttttcaagttactaaagaaaaccgacaatttccagtggggacccgaagcgcaaaaagcctttgaagacttcaagaaacttctcactactccaccggtcttagcttcaccacatctgcaagagccgctgttgttatatgtgtcggcaacatttcaggttgtgagcacggtcatggttgtcgagcgtgaagaagatggccatgtttatttcgtcagcgaggttttgaccaactccaagacaagatatcatcaggtgcaaaagttgttatatggtgttttaattaccgtcaggaaattatctcactattttcaaggtcattcggtcacggtggtcacatcgtttccactcggggacatacttcataatggcgaggcaaatggacggattgcaaagtgggccttagagttgatgtctttggatctatccttcaagccgcgaacttcgatcaagtcccaagccctagcagattttgtcgccgagtggactgagtgccaagaagacatgcctttagagaagatggagtattggactatgcattttgacgggtcaaagaggctttcaggcaccggagcaggagttgtcctgatttccccaactggagaaaggctaaactacgtattgtggatacacttttctgcgtcccataatatggcagaatatgaggcgcttcttcatggattaaggatcgcgatatctttggggatccggcatctgatagttcgtggagattctcagttggttgttaatcaagtcatgaaagagtggtcctgcctcgatgataatatggctgcttatcggctggaggtacgcaagttagaagataagtttgatggcctcgagctaacccatgttcttcgacataataatgaggcagccgacagattggccaattttggttcgaaacgagaaataactccttctgatgtgtttgttgagcatttttatgaaccaactgtaccaaggaaagaaacaaccgaggctgtggacactcaagaaactcatttaccaactcaggagttgcaaaccatcccgttatcctggtcgttcgccgtttgggggctcgacatggtcggcccattcaaaagggctaccggtggtttcactcatctttttgtagctattaacaaattctcaaagtggattgaggccaaaccagtcgtcacgattacagcagacaaggctagagattttttcatcaacatcgtgcaccggttcggggtacccaatcgaatcatcacagataatggtactcaattcactagcagtgtgtttaaagatttttgtgaagacttcggcatcaaaatttgctatgcctccgtagcgcatcctatgagcaatggacaagtcgaacgcgccaatggtatggtacttcaaggaatcaaagcgcgagtcttcgaccgactgcatccctatgctgctaaatgggtagatcagctgccatccgtactttggtctctgcgtactacgcccagtcgggccacgggtcagtcaccgtttttcctggtatatggtgcggaagcaatgttgtcaagcgaggtagaattcgaatctttgcgatttctcaacttcaaggaggagcgctacggagaagactga

SEQ ID NO: 65428 - DNA, 495 bp, Oryza sativa
  Clone ID: PAT_MRT4530_66478C.1
gtccggaacttccggtgttctaggacaggaacttccgggtaacagaacaaggatggaattcaaatttcgaaacaggagactaagccaatcttcacaagatgatgcacaggttgctctacttggaaaacctctagaatctcagcacaagaacttcattaacttacctcgttccctttcgaaggagaggagatccttcacaaacttacccgggacatccacaatataaaacggattctcgcgggcgacacctaactgtctaggagatcatctccaagagtaataagcaccgagatgacagcccacaagatatcccaaaattaggctctagattgagtggagagggcaagaaacacttgggagaggctagcaacagctctagggtcgaaaaaccggaacttcaaaacctggaagacaggaagtcccggacttgcatttttggacagatggagtatttgcaaaaataactcctagggaaacttgtcacttggttcacac

SEQ ID NO: 65429 - DNA, 5493 bp, Oryza sativa
  Clone ID: PAT_MRT4530_66479C.1
ggaaagaagatacaaaagtaatgcctaagcataaaaacgatgaagatgctcaatattccaagagttgtcgacatgagtaccgtcttcacgcttgagtcgataagaacctggccgagtaactttagaaattatgaacggtccctcccataatggagataacttgtgccgatctcgtgtagtttgaattttcctcaaaacctggtctccgactaagaaaacccgcgatcaaacattgcggttgtgacaacgtcgcaacccttgtaaataccgagccgactgaattaaggctgccccacgggcttcttccagtcggttgagatcgtcaactcggtcttctccgtagcgctcctccttgaagttgcaaaatcgcaaagattcgaactctacctcgcttggcaacattgcttccgcaccatagaccagaaaaaacggtgactgacccgtggcccgactgggcgtagtatgcagagaccaaagtacggatggcagctgatctacccatttgccagcatagggatgcagtcggtcgaaaactcacgctttgattccttgaagtaccataccattggcacgttcgacttatccattgcttataggatgcgctacggaggcatagcaaattttgatgccgaagtcttcacaaaaatctttaaacacatcgccagtgaattgagtaccattatcggtaatgattcgattgggtaccccgaaccggtgcacgatgttgatgaaaaaatctctagccttgtccgctgtaatcgtgacgactagtttggcttcaatccactttgagaacttgtcaatagctacaaaaagataagtgaaaccaccagtagcccttttgaatgggccgaccatgtcgagcccccaaaccgcgaacggccaggataacgggatggtttgcaactcctgagatggtaaatgagtctgtcgggcaaaaaattgacaaccttcacatgttcgcacaatttaatcggcgtcggatacagtagtaggccagaaaaaaccctgccgataagccttgccaacaatggttcgtgcgacagcgtgattgccacagatgcccgagtgtatatcttttagcaattgccttccctcctccaaagacatagcattgcagaatccctgatggacttttcttgtacagctcggtctcatgtatgacataaagcatgctgcgcctggagatccgctccgcctcgtctttatcctgagggagttcttggtcaaaaacttgatgaggggctctctccagtcggcttcgatcatgcttacttcttgagtgtccacagcctcggttatttcctttcttggtatggtcggttcataaagatgttcaacaaacacatcagaagaagctgtttctcgtttcgaaccgaaattggccagtctgtcggctgcctcattgttatttcgaagaacatgggttagatcgaggccatcaaacttatcttctaacttgcgtacctcctgccgataagcagccatattatcatcgaggcaggaccactctttcatgacttgattaacaaccaactgagaatctccacaaactatcagacgccggatctccaaagatattgcgatccttaatacatgaagaagcgcctcatattctgccacattatgggacgtagaaaaatgtatccacaatacgtagctcagcctttctcaagtcggggaaatcaggacaactcctgctccggtgcctgaaagcctctttgacccgtcaaaatgcatagtccaatactccatcttttctataggcatgtcttcttggcactcagtccactcagcgataaaatctgctaaggcttgggacttgatcgaaattcgcggcttgaaggatagatccaaagacatcaactctaaagcccactttgcaatccgtccatttgcctcgcgattatgaagtatgtccccgagtagaaacgatgtgaccaccgtgaccgagtgaccttgaaaatagtgagataatttcctaacggtaattaaaacaccatataccaacttttgcacctgaggatatcttgtcttggagtcggctaaaaccttgctgacgaaataaattggtcgttggactttttcaacatggccatcttcttcacgctcgacaaccaggaccgtgctcacaacctgagatgttgccgacacatataacaacaatggctcttgcggatgtggtgaagttaagaccggtggagtggtgagaagtttcttgaggtcttcaaaggctttttgcacttcgggtccccactggaaattgtcggttttctttagcaacttgaaaaatggcatcctccgctcgccgagtcgtgagacaaaccggctgagcaccgccatgcatccagttagcttttgaacgtctttctgggaactcggcggtttcatgttgagaatggcgttgatcttctacgggttggcctgtatgcccctatgggatatcataaagccaagcaacttccctgacggtactccgaagatgcacttttcaggattaaacttcatcctgaaggcgcggatgcttgcaaaggtctcttctagatccgcgatcaaatcagccttctacttggtcttgacaactacgtcatcaacataagcttcaacgttgcgaccaatctgagttgaaaaatatctctggatcatgcgttggtaagttgctcccgcgttcttcaatccaaaaggcatggtgatgtagcactaagccccgaacggtgtgatgaatgaagtcttcaagtagtcggactcttttaatcggatctgatgataccctgagtagcaatccaggaaactgagtagctcgcagccggccgttgagtcaactacctggtcaatgcgaggtaacccgaagggatctttgggacaagatttgttgaggtcggtgtaatcaacacacatacgccattgcactgtcctcttccgaaccaggaccgggtttgccagccagtcgggatgtaggacttccttgatgaagcctgctgctaacagcttggtcaattcctccgtgatcgcatccttcctatcctgtgcaaaacggcggagtcgttgcttaatgggtttagcgtcttccttaatatgtaaagagtgctcaataacctctttaggaataccaggcatatcagatggtttccacgcaaagatatctttattattagcagtcttagtgggatcagagggatctagaggaattttcttagtcttggcatcgccttctccgctctttgatatcttggttgcaggcacttctccttcggttgctgttgatgcagccagtcggatctcctctcgagcgagcgtgatctcgcgagtctgggccatctcgcagctttccttgtcgcaggtgacggtttgcttgatgtcactccgcagggatatgactcctcgaggacctggcatcttcatcatcctgtagatatagtgtgggacaaccatgaacttggctaacgccgggcgtccgagtatagcgtggtacgctgtctcaaagtcagcaacttcaaagcaaatgttctctgtgcgaaagttctcccgagtgccgaaggtaaccagcaaagtgatctggccgagtggagtagaagatagcccggggatgaatctgtgaaagggcgcactactcggcttcagttctgtccgagggatctgcatgtcgtctagagtcttggcaaaaaggatattgagtgcgctgccaccatcgatgagagatcgtcggagcttgacgttgcgaaccactgggtctagcactagggggtaccaccccgggtggaccactcggtcaggatgatccgagcggttaaacttgataactgtctctgaccaccgaagatattggggtgtatcgggctgaacaacattgttctcccgtttggtcagcttttgctttcgcttggattcataagccaggggtccgccaaagatgtcgttgagttccttgcgggagtcttgaaaaccagtcggggcatcatcttcatcatccttcttctttgacatgctttgatctccgtcagtcagcttgcgtgcattcttggcgtattgctctgcgaactgtttctagacgaagaaatatttggccgcatgatttgaattcggacgatgcgggcattgggagttcatgatcttgtcgaaagtgttgacgtgtgagcgctgtcgggaggatggtgtagtagttgccacaagttcctcgggcttacgcttgcgatccttgtgattggcacttccactcccccctgtagtcggcgcatctttctttggcttccaggtgctgcccgactgcttggatgcaatgacaacgtcttctactttggcatactcattggctttttcaaacatctgcttgacagtcttgggaggcttgcggccaaacttgccaactaggtcctcgtggcgaatgcctttagttaaggcggcgatgatgacgtcgtcggtgatgtcggagatcttgttgcgtagttcagagaagcgtcggatgtaatctcgaagggattctccagacttctgaacgacgttgtagagatcgaactgtgtgccggggcgttcaaaggtgccctggaagttggcgatgaagtgatcacgaagttccgcccatgatccgatcgtgccacgaggtagtccgtggagccaggatcgggcggagtccgctagggccacaggtagatagtttgccatggctttgctgtctcctcctgctgcgcggattgcgagtccgtagacggtgagccaagactccggattagtggtgctgtcatacttctcgattccagtcgacttaaagccggctggccaatctactcgacgcaggtcattagtgaaggcagctactccatccacgtcgtcgtcgtagagatttggtgaatggcggtgacctcgtgcagtcggggtgcgggtgcttgcggagttggctggaaccgaggcagcgatcatggtcttcatctggttcaagatgttgacaacatgatcggcttggttgagtgcgtcttccttgaggagggtatcgaggagagtgattgctgcaaccgcgttctgctggggggtgcgaaagaccgctgttccatcgacgtcttgttgcccaatgagctctctcgctcggcgcccagattccaaggcgcgttcccgtcgatcttcagcctcgctgtagtcgttctcgctcctgtcactgtcgctcttcctccagtcggcgacgttcagcttcttgccgtgcgcgatcttggtccgcttctcgggcttgacgctgttcccgtcgtcttgatccggccgcggaagagtagattggatctcgtccgagtggtttggagccgactcgggagagatgatcttagagtaggcctcggccgagttcagaataccgaatggcacggggacctggtttctccccgactggtttgagtccgagtcatggagagagatcttgccgaagtcgttggtgatgaagttgaggctgccgaaccggaacgcctgcccgggagggaaggcgaagtcgtcgatgccagaaacagaacccat

SEQ ID NO: 65430 - DNA, 508 bp, Oryza sativa
  Clone ID: PAT_MRT4530_6647C.1
cgaggcgcatctcgcaggagctcctccccgctgccgccgctccactgaaaactcgccgaagccgccgccactgccactacctccgtcggatcctgcttcttcccccatcgccgcagccgtcctcctcgctcgctcctcctcctccccgtgtgatttaagccgcatcctcgccggagctcctccacgctgccgccgctccgccgcatcctaaccggagcagccgccgccgaatcctacttcttcatcaccgccgtggccggagccgatctcggccccttccgccgccaccgacaccgccgtgcactccaccgctggccagcaccgaggtcggccctcttccccatctgccacttcatcatcagatcaccaatgtttgccccattgttgaaagcctatagtacgagtaagtccctcaaatcctgtttcttttcttaatcttctccgtacgtgtggaaattttgatctctatgtctgatgatctttgttcttgagccttggctatgttgga

SEQ ID NO: 65431 - DNA, 537 bp, Oryza sativa
  Clone ID: PAT_MRT4530_66480C.1
atcaaggttgctggctggctggacagagactggaacttccggcccggaacttccagtgttcttaggacaggaacttctaggttactgatggaagatgaaaatcaaatttcggaacaagagactaagccaatcttcacaagatggtgcacaggttgctctacttggaaagcctctagaatctcagcacaagaacttcactaacttacctcgttccctttcggaggagaggagatccttcacaaacttacccgtgacatccacaatatgcaacggattctcgcgggcgacacctaaccatctaggagatcatctccaagagtaataagcaccgagatggcagcccacaagatattccaaaattaggctctagattgagtggagaaggcaagaaacacttggaagaggctagcaacagctctaggttcgaaaaaccggaacttccggacctggaagacaggaagttccggacttgcacttttggatagatggagtatttgcaaaaatgactcctagagaaacttgacacttggttcacac

SEQ ID NO: 65432 - DNA, 575 bp, Oryza sativa
  Clone ID: PAT_MRT4530_66481C.1
aaccaccacaaattcccttgcatggtgcctgtttctatctctttctttttcaaataatgctacatatacatgcgccccccaaaaaatgcataatagaaatggcaaaccaaatagttacaatcacaggatctacaacatctggtccgaaagagaaaaaaaaaaaggattctgcagcaccttccccccattacacccaactctttaacctggaatgtatcacaattttctgaaggaagagcagcacgtctcaacataaacctttgagccgcaaaggagactgagcagacgcatctttagaccagagacgctcttgtctcttctcttctagctgcgaagcttcattcaacatgtccatagcatcactctgcatatttaactttgagagcgcaacagcttgcatatagaatgcggttggccaatcagggtatacgcactgcgcttgcattgcatcccggagggcagcatcaggttggtcagacatgaggtggcataagctccgtctagcgtataccgttggtgataccattgttcccacatcaacaaactgtgtgtaacactctattgctggcttaaaa

SEQ ID NO: 65433 - DNA, 6091 bp, Oryza sativa
  Clone ID: PAT_MRT4530_66482C.1
atgggtttcgtctccggcatcgacgacttcgtcttccctccaaggcaggcgttccggttcggtagcctcgacttcatcaccaatgacttcggcaagatttctctcctcgactcggatccgaaccagtcggggagaggccaggtctccgccccgtacggtatcccgactaggccaaaatctactccgagatcatctaaactgagtcggcttcaaaccactcagacgagatccaatctacatcaacgcgacctgatcaagacgatggggcctatccctcaatcctgatgaaactccccgacgacttggctgtagtcttcaccacaagggcgtcttatccccgtaggcctaggcgggatccagcctcggccccgatccaatctagctccagggaagtcggcgtcatactccaacctctcgggacggttttgacgaaagaattggatggctaccttagctcccccggcgtcgattctctaccgacggagatcctctagtacgatgacttcggctaccactacgactaccgcaacctcgacgacttcgacgaaggctacaaagacaactacacgcctctcttctttggcgttttcatggccgacaacgagacgtaagagcaacatcaagcccgagaagcagaagaacaacgcgtataacaagaagccgagcatcgccgactggaggaggagcgtcaagtataggagcaagaacggctgcagcgtgagcaacaagagcacgaacgggccgcgaagaaggctgaggaccggcgacagcgcgccttggaggctgggcgatgagcacaagaacttattggacaacaagacattgaagggacggcggtttttcgcaccccgcagtagaacgcggttgcagcaatcacccatcttgatactctactcaaggaagacgcacccaatcacgtcgtcaacatcttaaaccagaccaagaccatgattgctgcctcggtcccggtgaactccgcaagcgtccgcacgccgactggtagccgggttccgcctcttcgatcttaggactatcaccaaccaagcctcagtgttgccagcgctggatctagtcgcaggagcagggatcacagtgaacgatctgtccactcgcctcctgaccgacacagggagcgtcaagctgaacagccccgctctccacgtcgcaggcgtcctgtcgatcttcgcgataccatcaaccagcgacgtgcggcaagaggctacatcccccaccattcaccagatcattacgacgacgatgtggatggagttgctgccttcacaagtgatctgcgccgtgtggattggccggccggcttcaaaccgactggaattgagaagtatgacggcacgataaatcctgagtcttggctcaccgtctacgatctcgtaattcgcgcagcaggaggagatagcaaagccatggctaattatctgcccgtggccctagtagacttcgcccggtccaggcttcacgggctaccccgtggcacgatcgggtcctgggcagagctttgcggccacttcatcgcaaacttccagggcactttcgaacgccctggtacccagtttgatctttacaacgttatccagaagtccggagaatcccttcgaaattacatccgacgtttttctgagcaacgtaacaagatctctgacatcactgaggacgtcatcatcgccgccttcaccaagggcatccgccatgaactcttagtcggcaagtttggccgcaagcctcccaagacggtcaagtagatgtttgaaaaagccaatgagtacgccaaagccgaagacgccgtcatcgcatccaagcagtcgggcagcacctggaagccaaagaaagatacgccgactacagggggtagtggaagtgccaatcacaaggatcgcaagcataagcccgaagaacttgtggcaactactacaccatcctcccgacaacattcacgcgtcaacactttcgacaagatcatgaactcccaatatccgcatcatccgaattcaaatcacgcggccaaagattgcttcatctacaaacagttcgcagagcaatacgccaacaacacacgcaagccgacttatggcgatcaaagcacgtcgaagaagaaggatgatgaagatgatgcaccgactggttttcaagaccctcgcaaggaactcaaccatatctttggcggacccctggcttatgaatctaagcgaaaacaaaagctgaccgagcgggagatcaatgctgttcagcccgatacgccccaatatcttaggtggtcagagacagctatcaagtttgaccgctcggataatcctgaccgagtggtccacccagggcggtaccccctggtactagacccagtggttcacaacgtcaagctccgacgatccctcatcgatggtggcagcacactcaatatcctttttgccaagactctggacaacatgcagatccctcgcacagaactgaagccgagcagtgcgccctttcacggagtcatccctgggctatcttctaccccactcggccagatcactctgccagttaccttcggcactcgggagaactttcgcacagagaacatttgattcgaagttgctgatttcgagacagcgttccacgctatacttgcacgcccggcgttagccaagttcatggccgtcccgcactacacccacatgatgatgaagatgccaggtcctcgaggagtcatatccctgcggagcgacatcaagcaagccgtcacttgcgacaaggaaagctgcgagatggcccagattcgcgagattacgctcgctcgagaggagatccgactggctgcatcaacagcaaccgaaggagaagtgcctgcgaccaagacatcaaagagcggagaaggcaatgccaagactaagaaaattcctctagatccctctgatcccaccaagacaactaataataaagatatctttgcgtggaaaccatctgatatgcctggtattcctagagaggtgattgaacactctttatatgttaaggaagacgctaaacccattaagcaacgactccgccgtttcgcacagaataggaaggatgcgatcaaggaggaattgaccaagctgttagcagcaggcttcatcaaggaagtcctacatcccgactggctggcaaacccggtcctagttcggaagaagacgggacaatggcgtatgtgtgttgattaaaccgacctcaacaaatcttgtcccaaagaccccttcgggctacctcgcattgaccaggtagttgactcaacggccggctacgagctactcagttttctggattgctactcaggataccatcagatccttttaaaggagtccgactgcttgaagacttcattcatcacgcccttcggggcttactgctgaattaccatgccttttggattgaagaatgcgggagcagcttatcaacgcatgatccagagatgtttttcaacttagattggtcgcaacgttgaagcttatgttgatgatgtagttgtcaagaccaagcagaatgatgatttggttgcgaatctagaagaaacatttgcgagcatccgcgctttcaggatgaaattaaaccctgaaaagtgcatcttcggagtaccgtcagggaagttgcttggctttatggtatcccacaggggcatacaggccaacccggagaagatcagcgccatcctcaacatgaaaccgccgagttcccagaaataatcaaaagttaactggatgcatagtgacgctcagccggtttgtttcacgactcggcgagtaggggatgccctttttcaagctgctaaagaaaaccgacaatttccagtggggacccgaagcgcaaaaagcctttgaagacttcaagaaacttctcaccactccaccggtcttagcttcaccacatccgcaagagccgctgttgttatatgcgtcggcaacatctcaggttgtgagcacggtcctggttgtcgagcgtgaagaagatggccatgttcaaaaagtccaacgaccaatttatttcgttagcgaggttttggccgactccaagacaagatatcctcaggtgcaaaagttgttgtatggtgttttaattaccgttaggaaattatctcactattttcaaggtcactcggtcacggtggtcacatcgtttccactcggggacatacttcataatcgcgaggcaaatggacagattgcaaagtgggccttagagttgatgtctttggatctatccttcaagcaacgaacttcgatcaagtcccaagccttagcagattttgtcgccgagtggactgagtgccaagaagacatgcctatagagaagatggagtattggactatgcattttgacgggtcaaagaggctttcagacaccggagcaggaattgtcctgatttccccgactggagaaaagttgagctacgtattgtggatacacttttctgcgtcccataacgtggcggaatatgaggcgcttcttcatggattaaggatcgcggtgtcttttggaattcggcatctgatagttcatggagattctcagttggttgctaatcaagtcatgaaagagtggtcctgtcttgatgataatatggctgcttattggcatgaggtacgcaagttagaagataagtttgatggcctcgagctaacccatgttcttcgacataacaatgatgcagccgacagactggccaatttcgattcgaagcgagaagcaactccttctgatgtgtttgttgaatatctttatgaaccaaccgtactaaggaaagaaacaaccgaggccatgaacactcaagaagtaaacatgatcgaagccgactgaagagagcccctcatcaaatttttgaccaagcaagaactccctcaagataaagtcgaagccgagcggatctccaggtgcagcaagctttacgtcatacatgagactgagctgtacaagaaaagcccatcagggattctgcaacgctgtgtgtctttggaggatgggaggcaattgctaagagatatacatccaggcatctgcggcaatcacgctgccgcacgaaccattgttggcaaggccaatcggcagggttttttctggcctactgctgtatccgacgctgacaaaattgtgcggacatgcgaaggttgtcaattttttgcccgacagactcacttaccagctcaggagttgcaaaccatcccgttatcctggccgttcgcggtttgggggctcgacatggttggcccattcaaaaaggctactggtggttacactcatctttttgtagctgttaacaaattctccaagtacattgaagccaaaccagtcgtcatgattacagcagacaaggctagagattttttcatcaacatcgtgcaccggtttggagtacctaaccagatcatcaccgataatggtactcagttcactggcggtgtctttaaaaatttctgtgaagacttcggcatcaaaatctgttatgcctccgtagcgcatcccatgagcaatggacaagtcgaacgcgccaatggtatggtacttcaaggaattaaagcacgagttttcgaccgactgaatccctatgctggcaaatgggtagatcagctgccgtctgtactttggtctctgcgcactacacccagtcgggctacgggccagtcaccgtttttcctggtctatggtgcggaagcaatgttgccaagcgaggtagaattcgaatcattgtcatttcacaacttcaaggaggaacgctacggagaagactgagttgatgatctcaaccgactggaggaagcccgtgaagcagccttaattcagtcggctcggtatttacaagggatgcgacgttatcacaaccgcaatgttcgatcgcgggctttcttagtcggagacctggttttgaggaaaattcaaactacacgagatcggcacaagttatctcccttatgggaaggacagttcataatttctgaagttactcggccaggttcttatcgactcaagcatgaagaccttcatgatactcacgttgacaactcttggaatattgagcatcttcgtcgtttttatgcttaggcattacttttgtatatcctttccc

SEQ ID NO: 65434 - DNA, 593 bp, Oryza sativa
  Clone ID: PAT_MRT4530_66483C.1
tccagcctgaagtggtaagctagccctcgaagggattcggcaggcaaagtgatgtaaataatatgattgttagatttttaatatttatcctacaggtccggaacttcctgtttttcaaacctagagctgttgctagactctcacaagtgtttcttgccttctccactcaatctagagcctaattttggaatatctcgtgggctgtcatctcggtgcttattactcttggagatgatctcctagacggttaggtgtcgcccgcgagaatccgttgcatattgtggatgtcccgggtaagtttgtgaaggatctcctctcctccgaaagggaacaaggtaagtgaatgaagttcttgtgctgagattctagaggttttccaagtagagcaacctgtgcaccatcttgtgaagattggcttagtctcctgtttcgaaatttgaatttcatctctattctgttacccagaagttcctgtcctaagaacaccagaagttccgggcctggcaggccgaatgttccggacttccttaccaggtcttggcatccaagttgtttgatgtgcggcaggccgaaatgaaattcaaaggggccat

SEQ ID NO: 65435 - DNA, 578 bp, Oryza sativa
  Clone ID: PAT_MRT4530_66484C.1
cagaccaatatacctaattcaccacttttttattacccacaaaaaacccccattttactacaatttaaattccagaaacttccgcccttcccaagcccggaacttccattgttttaaacacagaaatttccgggtaacaagaacaaaaattaaattccaattttcaaaaccaaaatattctaataaaaatccaccacaagtgtgggttgctctacttggaagacctctagaatctcagcacaagaacttcactaacttacctcgttccctttcggaggaaaggaaatccttcacaaacttacccgggacatccacaatatgcaacggattctcgcgggtgatacctaaccgtctaggagataataagcaccgagatgacagcccacgagatattcaagaattaggctctagattgagtggagaaggcaagaaacacttgggagaggctagcaacagctctaggttcgaaaaaccggaacttccggacctagaagacaggaagttccggacctgcacttttggacagatggagtataagcagaaatgactcctagggaaacttgacacttggttcacac

SEQ ID NO: 65436 - DNA, 656 bp, Oryza sativa
  Clone ID: PAT_MRT4530_66485C.1
tcatgtcagcttgtccggaagttcctggtattttatccggaagttccggacaagtccggaacttcctgtcttccaggtccggaagttccggtcttccaggtccggaacttcctgtttttcgaacctagagctgttgctagcctctcccaagtgtttcttgccttctccactcaatctagagcctaattttggaatatctcgtgggctgccatctcggtgcttattactcttggagatgatctcctagacagttaggtgtcgcccgcgagaatccgttgcatattgtggatgtcctgggtaagtttgtgaaggatctcctctcctccgaaagggaacgaggtaagttagtgaagttcttgggctgagattctagaggctttccaagtagagcaacccacacttgtggtggatttgttacacttagtttcctgtttcgaaatttgattttcatcttccatcagtaacccggaagttcctgtcctaagaacaccggaagttccgggcctggcaggccggaagaactaggctctgttcgttccaggctgataggggagattgagtctcgttttccgcgcgcacgcttttcaaactactaaacggtgtgttttttgcaaaaccgatgcagatggtgctgcgggtgaagcacccgtcgtcgc

SEQ ID NO: 65437 - DNA, 526 bp, Oryza sativa
  Clone ID: PAT_MRT4530_66486C.1
gcaaagggagtgccggaattgtccccacgtggcccagaacttccggtattctaggacaggaacttccgggtaacagaacagagatgaaattcaaatttcgaaataggagactaagccaatcttcacaagatggtgcacaggttgctctacttggaaaacctctagaatctcagcacaagaacttcattcacttacctcgttccctttcagaggagaggagatccttcacaaacttacccgggacatccacaatattcaacggattctcgcgggcaacacctaaccgtctaggagatcatctccaagagtaataagcaccgagatgacagctcttgagatatcccaaaattaggctctagattgagtggagaaggcaagaaacacttgggagaggctagcaacagctctaggtttgaaaaaccggaatttccggacctagacgagaggaagttccggacttgcagttctggacagatggagtatttgcaaatatgactcctagggaaatttgaaacttggttcacac

SEQ ID NO: 65438 - DNA, 968 bp, Oryza sativa
  Clone ID: PAT_MRT4530_66487C.1
tcagtggctcggtgttgccggtgttctcattcgtcaagtttattttgaaaaacaacaacaaccaaggaacccaccagctccattccaactcaagaatgaatttatgccaatgccatggctcagtgaaattaccacccatacatgtttcacctatacaccatcagtaaaagacaaacaattaatcaaagatacattcaaccgcacaatcgtcgttgaagttcaactcccaacaggaacacgtgtcaaccttcgtcaaattggattcttcttaagccgagttccagaaatgatgtacttcacatttgatacacgcctcaacaaattcaacttcttccttaccgttccatcaaccatgtacggtaaagaaatctgttttgactggtgtctcgaacgcttatcattcattgaccaatgggcaccaattcgcattcgtgtctacgattatcttcaacctgaacaacaattaattcgtcttatgcccgtcgaattccaacccaaactcctcggatactcatacgttgaagctattcacaaggctcgaccaaccctcgaacaattagctaaaatgcaacaatcggcacgtccaccaccaccaccacgtccatcaccaccccgtgtttaactgagcatgccgaatgattcgaatgactctattttttttctcatctggtatggagaaggagttttttatatgcattgtaacatcttgtccttttttctcttttaattatctcctctccagcttaaatcgatcgattttctttttctagttttatatttatacattttcatccgtccacactcattcatctatgttttcccctcttcttgtgtccacgtctttcgtcttgtctttcatgtcatatgttttgtgttctcattgtccatcgttcactgtgttcgtaggaatgtgtcaaactaaatgtattgtcctcgttcaattccacactccgtcccggaatgggtgc

SEQ ID NO: 65439 - DNA, 743 bp, Oryza sativa
  Clone ID: PAT_MRT4530_66488C.1
ctagctcaagggcgcctcaaagaggagggaggaggagggatggggatggaagaaggtgttgggcaaggtcaccagtcccgcggggagaggggggtccgaggccagagcctgccaccggtgccacggattcgaccagatccagccgctaggagcgcagatcgccctcacggacgacacgtcgccagacagcaccgctggcgactgccctccgcggccaaggagcacgaccgctccttcgccgggaacagcacaccgtcgccgggacacacgccgccgcaccgcctccaccacgccccatcgcgccaccgcgcacggcattgttgctctcctccggccaggtccaaaagcagggtgccagatccagccacgggggcgccagatccgaagcttcgcgccgcgctgatgtcagcccccaccttcttcctcccttctccaccgccgccggctgccgtcgcctctaccgcctctccgcggtggtggggcgtggcctcctcctctccaccgctagccgccataagctcggggccggattcggccgctgcgacgatggtggaggccggatctgccgccgcgacgacgggggaggctagatccgtcgccgcgaccgccgcagggccactagtctcaaccaaacggccacaatgtcgcgcagggcttatccggggcactactgcccatgggctgaaagtgcggccacaagcccacaatatcttgcggggcttagccggggcaccacggcccat

SEQ ID NO: 65440 - DNA, 1185 bp, Oryza sativa
  Clone ID: PAT_MRT4530_66489C.1
atggcgagttgtgccgcacgcgccgccgccgccgcggatagcagcctggggatcagccgcctgcgcccctgtggctgggagtcggaggccggagatggagtaggagcgctggagcgggcgtcgggcaatcggaggagaggtcagccccggcggtcggcggcgacgtctcctcgaggctcggtcaggaccgagcgaggccaggccagcgtcgacgtcaagcaagcacgaacaggagcgattgagaaaaaaaaagggaagaaaaataaaaacatcaccgagaagccaccaacgccgtcgtcgccaccgaatccgaccacggggcgtcgtcggatcccctcggccgtcgccactactgccggattcatccacgaccaccgccgacgccaccaccgtcgccagaggaagaagagaggcgacggagggagctgtcgctgccagatccgcaagcgtgcgccgcggcccgtgcggcacgccatgtgcgacgaggcctccccttatctggaacgccgaaaactgaaagcccttgtgccccacacacacaccgccgaacttctgtcgttagccttctttccttcgtccgacccagatcccgcatcacgagaaggcgcgtcggctaggggacggaacggagaaaacgaatgtcgcgtttgcaccggcgcaatccaatcccaaccccagttgccgccgtcgccagcacaagtacgccagtcggtcacaccgcaccactacgctgcgctgtgcagccgacgcgcatcggctcatgcacagcacgcaccctcggagtcgcggaccggggtaaactccctagacacgtcgccctcgatcggtgatcgagtgatcgacgtacgggacaccggggccgcgatcggatcggttttcttgggagatcgagagctctttttcacgacagcgacggacacgtcacgactcacgcgccggagcccagccgttgatgcacgaattatggccctcgacgaaacgaccgtgacgggttttaatggcgggttcatgcacatgcacgagcacgctcgttgccagttgggatcatgcaccaccctcggtataaagagggttcggcagcgctcgcggacggccgggcgggcggtcgtccggcaaatccacgccacgaccgctgaattttcggtcgcggcggcgatcgacccgctggtggaatttgagcgtggg

SEQ ID NO: 65441 - DNA, 408 bp, Oryza sativa
  Clone ID: PAT_MRT4530_6648C.1
atctcggccgccattgatgacgccggcgagggtttcgggaataaatccgagcgaatccgagggagagagagaggggaaagaggggggaaagagggagggaatcacggggagtgatttccccctctttatggcgcgcggggacggcgggatgcggcggattcggcggcggcggcggcgctagggcacgggcgggcggcgggtgcggcgcgaggacagggatgacaggtgggccccacccgtcagcgagggtggcgggcgggcccgcccgtcagcggcgcgcgcgcggggagaggccgagtgggccgcggggaggaggagagggagggaaggagctgggccgagccggcccagtaagggaagggggggggaagaagactttttaggatttttctttttataaaaccattc

SEQ ID NO: 65442 - DNA, 228 bp, Oryza sativa
  Clone ID: PAT_MRT4530_66490C.1
atggcgaaacgcggcgaagtggagctcgacgcggtgcaggacaggggcaaacgacggcgacgtaagctccggccggggagcctcacaatggtgatctctagcggtggtgagagggtgatcgcaaggaggctccgttttattcattgggcgcgaatgggggcgacggaacgcgcgcacatgggagctgtggcggagcggcggcttgctggggcggttttcccgtcctaa

SEQ ID NO: 65443 - DNA, 207 bp, Oryza sativa
  Clone ID: PAT_MRT4530_66491C.1
atgtgctgcaaggcgattaagttgggtaacgccagggttgaattggtgttgctcaaggagcagctggttgttcttcttcctcgatgtgatgacttcccgcagctaaaggggtatgatcacttgatgattgttgaacaggaggagaaggaggaggtgaaggctgaaaggaaacaagtgaatcagccgaggcacacaataacaaattga

SEQ ID NO: 65444 - DNA, 504 bp, Oryza sativa
  Clone ID: PAT_MRT4530_66492C.1
cctatctcggccgtcggttttccgccgcacgaatctcgaggagggagggagggagggcaacggcaacccagcccccgccgcccgccatggccgcagtggcaccgatcgccatgcccgcgcgggtgcaccaccaccaccaccaccaccgccgcgcgttggcggcgtctccggcggcgttagcggcggcggggaacgggttgtcggcgacgaggagggtgaggaggtcgccggccgtggagatgaggcgggagcgggagcggcggcgggcgcgggagcagcagccgcggtgcggggaggtggcgggcgggacggcggcggagtgcgccgcggtgttctgctgctttccccttcgccgtcgtcgagctcgtcgtcctcgcggccgtccgcgctcccgccgcgctctgccgccgcgccgtccgcggtgggcgccgacgccgcgtccgctccacgaagccgaaggagacgggcgccatggacatcgcctcccaaaggtcgctggccgcc

SEQ ID NO: 65445 - DNA, 1232 bp, Oryza sativa
  Clone ID: PAT_MRT4530_66493C.1
ctccctctttttttttttttttttttttcacaaatgaggcaattcttattgatccattcattcattcacatcagtagttcattacatgacaggttcattcatcacacaaatcaccgagtacacctcacgccatttttcaccgtcttcctccctctcttgatttttgcagtaagctagtgtcattgaggaaaaaaaaatcatccactaattaattaataccatgggaaagggagcatgcacggcgacatggaggacggcgtctgagcagctcaggcgagcacggtggtctcgacggcggcggagcggaggtcgacggcggcctgggccagctgggcctggacgtgctcgccggcggcctcccacagctccggcaccgcctccttgatgttgtggatgctctccagcgccacgtccgccccggccaccgccgccgagctccccacgatcaccgtgtggaatccggcggccttcccggcggcgatgttgcgtgggctgtcgtcgaagaacaccgtcttcatggcgtcgagcttggcgatctcgatgacggcttccatggattccagggacggcttgcacaggatcttcctcttgcgatgagaagctgagctgtcagaactgctgcctccatcggtactgtcagagtcgtcttcttcaggttcagtcgatgggttcagagtctcgaagcagatgatcccttcgaagcaatcctccagcccgagcttcttcagaaccgtcgcggcgtgcgccttgtcagagtttgtgaatataatcttcctttgtggcagtgaaagcagtaggtgcctcaagacagggtcaggcttcagcttctcgtatggcaatgtgccatgaacacaagcgtggaaatcgtcatagtcgaaatcataacccaagaccttcagtccagccattgtagttccaaattccctgtacagatcaagacacatcttgggaacaaggctctcttcaatctgaagcttgttcagcatatagtcttgtatgttcttgcggcaagctaagttgattcctaagctcagtgggtacagagtatcatccatgtcaaacagcaaacaatcaaacttggctccagctgtgtaggattccatctttacaggtttgctagagcctagatgctaaacggaagcacaacacgcgtgggtcgaccctggtggaagagccccgccgcgagctccgccacccgccacctccgcacgaagtgctcgacgaggtcgacg

SEQ ID NO: 65446 - DNA, 708 bp, Oryza sativa
  Clone ID: PAT_MRT4530_66494C.1
atggccaaggaacaagatcagctcatcaagagagttgagctgaaggtgagtgtcaactgctgcgacggatgccggagcaaggtgctcaaagccctcaaccttaaaggcgtgctgaggacggaggtccacccgacggccggcagggtggcggtcgtcggcgacgtggacgccggtcgcctcgtcaagaggctcgccaaggtcggcaagatcgccgaggtgatcgtcgtcgcgcagccgtcgccggaggtggagaggaggaggcgcgacgtcggcggcagcaagaaggaggcgtcgccggacaacgggaagatgggcggcggcacggcgccgaaacacggcggcgccgacgacgacaagcgcggcgagacgaatggcggcgcagggagcggggctagctcagctcgaatccatggcggtggcgacgacgacgtgaaggcggccatgtgctgctaccaccgggcggagccgccggccatggccgtgcccgtgctgcagccaccgtactatgcggcgaacttcacaatgccgccgccgcagccgccggcggcggcgtacggttttggtggctgctaccacgggactccttcgccggcgatggcgctgtgccgccgcggccgtattccggtggtccggccgcagccgacccggttcgccgacgagtgctgcatgtacggcgacgacgacatcgccggctgccacgtcatgtga

SEQ ID NO: 65447 - DNA, 409 bp, Oryza sativa
  Clone ID: PAT_MRT4530_66495C.1
ctagagtgttaacgtcaaaatttggtaagccccgaggtcgtcataggcctagagtcagtatcagcttcagaatcctagaatcggccgacgggagttgtcaagtcgccagcagtcggattcttggtagattcgcctgtctttgattataataagggtttcattggggtttcagctgattttatgacatcagacctccggccgatgtatactttaaccatcggatcaatgtttattctattacatcattattagccgattgatttctaccggattatattattgtttattacattatcattagccaattgtctttataccgttatctatattggacatataggtgattgttcaaaactctatcaacatcggcaagaactactccatcggcttgttagtcgatcagctattt

SEQ ID NO: 65448 - DNA, 827 bp, Oryza sativa
  Clone ID: PAT_MRT4530_66496C.1
actggagaatcatggtgcgggtgcgtggatcaggcgagcgtcgaggcggtggagaagtagggcgcttcgtacgcctcgcggagccgggtctccacctcgtcaaccctttggccggcgagtgcgtcgctggcgctctctctacccgcgtccaatccaatccctcgacgtccgtgtcgagaccaagaccaagaccaaagtctttgttcagctgatctgcgcaatccaataccgagtcgtgaaggaacatgctgatgatgcattctatgaattgcagaatccccaacagcaaattcaggcctatgcctttgatgtggtcctggccctagttccaagaatgaatcttgatgacctttttgagtaaaagaatgatgtggtgaagactgtacttgaggagcttgaaaaggtaactcaagtgcctggtctatacatcgaacatattcttatggttgatatcatccctgatacttctgtacgcagagcaatgaatgacataaatgcagcccaaagtcttcagcttgcaagtgtctacaaaggggaagcagaaaagattcttctggtgaagaaatcagaagcagaggcaaaaatacctttctggtgatggcattgctaaacagaggcaggctgatggcctgagacagtaccacagcaaaagaagtcatggacctaatcatggtcacgcagtactttgacaccataaaagaacttggggatggctcgaagaacacaacggtgttcatacctcaaggcccaggccatgtcaaggatatcagcgagcaaatccggaatggtatgatggaagcgtcaagcaacaatgtgtaaattgtagc

SEQ ID NO: 65449 - DNA, 559 bp, Oryza sativa
  Clone ID: PAT_MRT4530_66497C.1
cattgatccaaactcttccatcagttttccgaaggggatttcattttctccgggaatgtctgaaattataaggtttgtagaagagcactgtgatttttgtgtaattgatccattcaaaaatatttatccattgctggatcgcatccaaattcaagaaattctaatccgactggaaggacttagcgccgaaggaaggccaaaactccgagcaccatgctttttaaagattgaaagcttttgtggcagtgaattacagaaacaactagcagaagctaagttatcctttccgctcattgtgaagccacaagtagcatgtggagttgctgatgcccacaatatggcattgattttcaaaatcgaagaatttagcaaccttagtgtgcctcttccagctattctacaggtatatattgaccagaatttatgtgccttatctttcttcagatgatgattacttggaattaaatctgatatatatatcttggtaaattttatattctaaagataatcaattcttccttgagcactttgcaacaatttattgctaagttctcgcaac

SEQ ID NO: 65450 - DNA, 249 bp, Oryza sativa
  Clone ID: PAT_MRT4530_66498C.1
gatatctggctcaagctcaagctctattggctttttaacgtcccatctagatatggtatctcaccactaggtactatggtgcacccaagtcaccattcaccacccttgcggtgtcttgtaatgagtttaccaagtatagtggttcggaagttaaaaataagctcaagatatcatcataggggacatggaaactttgggtgatataaatagaaataaagttgtctttcatatttaaaaaaaaaaaaaaaa

SEQ ID NO: 65451 - DNA, 1168 bp, Oryza sativa
  Clone ID: PAT_MRT4530_66499C.1
ataatttagaggaacttatcctcaaagaaggaccagaaacaattgctgcattcattgcagagcctgtgatgggtgctggtggtgtcatacctcctccaaagacctattttgaaaaggttcaagcgatcgttaagaagtatgacatccttttcatagcagatgaggtcattactgcatttggaaggttgggaaccatgtttggaagtgatatgtataacatcaagccagatctagtctccatggccaaggcgctttcatctgcctatgtgcccattggagcaattatggttagcccagaaatatcagatgttattcattctcagagcaataagctcggttcatttgctcatggatttacatactctggccatccagttgcatgtgctgtcgccatagaagccctgaaaatttatcaggaaaggaacattcctgatcatgtgaagcaaatttctccaaggttccaggagggagtcaaggcctttgcaggaagtccgattgttggagagatacgtggtgtagggttgatacttggaactgaattcgcagacaacaaatcgccaaatgatccattccctgctgaatggggcgtcggcgcgatctttggagcggagtgccagaagcgcggcatgctggttagagttgctggagacaacatcatgatgtcaccaccattgataatgacccctgatgaagtcgaggagctggtgagcatctatggagatgcactcaaggccaccgaggagagggtggctgagctgaaatccaagaagaacaattagaccgagttgacaactcctcatcttgcaactgcacgagacgacgatgacgatgataatgctggcagcgatgatgatgatggtgatggtgttcttggtggatgtacagagtaataatccctcgtctgtcagaaaactctactcagagaacagtaataacgctgttcttagcgtgcaaaaaataatcaaaacagcgatcatgcattcacccagaaccggtgaatcttcaccagatttcagtcttacgcacgggattagctgccgtggtgaactggtggtgactgtcatcttgtagaccaaatcaggttggaataaatcaaatttacatgaaaaaaaaaaaaaaaaaaaatttctttgagaatatcaaacttttactcaaaaaaaaaaaaaaa

SEQ ID NO: 65452 - DNA, 1177 bp, Oryza sativa
  Clone ID: PAT_MRT4530_6649C.1
aacagttgcattgtggaaccagctatagtggggaggataaggctgcgccagcgggagagggggaagaggcgaccgccgctctcgccagctgtcacgaccggaaataacccaacgggcattccttacgtgcgtgcattattccttatcccaggaggcaagactgagccacaaactaagccttacccactagacatgtggaagtacggtagtgctttgcaacagaggcccgaagaccgatccttatatggccgagccgggccccacgcggtggccactcggcgcgcccgagggcggccactcggcgcggccggcgggaggcggcgcccgcgcccctatggtcgccggcggcggccataggcacggcggagcggcggccgagagaggggaagggaagggggaaaagaggcgacggtccacggctcaccctaggtcgacggcggcgcagaggaggcggccggagcggagggaggcggcggcgcggctcgggtcgacggggtcgacggcgttccggcggtcggcgaccgaaacggagaggtggacgaggtcggcgaggatgcggcgaacccaaaggaggcggcgccgaggtgggagttggtccggggcgacgacggcggcggaccggagctcggcggcgacggcggagagagagagcgatgtcgcgagctcgaatccggtgaggaggaagggcggcgagaggcggaaacggacggaggaggtgtggggagggtttaaatagggttggaagagggagagagcggccggcggggaaggaaaccggcgcgggaggtccggccgccatcaatggcgccggcgagatttgcgggggcaaatccgcccgtttgaacgagagagagagagggaaaaatagggggaaagggagaggggatcacggggagtaattccccccactttattgcacgtggggacgacgggaggcggcgggattcgtggcggcggcggcgctagggcacgggggaggcggcgggagcggcgggaggaaggggatgacgggtgggccccaccagtcagcgagggtggcgggcgggcccgcccgtcagcggcgcgcgcggggagaggccggattggccgcggggagaggagagagagagagggggggagagatgggccgggccggcccaagggagggaagggggactttttagggtttttcttttta

SEQ ID NO: 65453 - DNA, 1105 bp, Oryza sativa
  Clone ID: PAT_MRT4530_664C.1
ccatttctcatcactgagctgagctcagttcagttcagttcatggaagtatatctccttcttggcttcatttgacaacttccaacacaagcagaacaaggtgatcaaatcatcctcaaggcttgtcttttttttccttctctggttatctccaatggaggctcccccttctctttccatcgtcgacgaagacggcttcgtcatcgacctctcgctgacgctgggcctgacatcgcctccgccctctccaggcggcgcgtctccttccattcctccgggaagaggcggcggcggcggcacgagtggtggtgacaacaacagaggcagcagaggtggtggcaatggtggtggtggtggtggtgtgaggctcttcccttgcctcttctgcaacaagaagtttctcaagtcgcaggcgctagggggacaccagaatgcacacaagaaggagaggagcgtcgggtggaacacccacctctacctcccggccggcgtcgccgccgccacgacgacgacgacgacgacgacggcgatggccgtccctgacatggtcggcatgcccacccaccagatgtcctccatggcgttgcactcctgccggcctcaccagggctcccatgtcaccgccgccgacatcgccacgctggctgcgccgccacattacaccgtcgaccatggcgttgccggcatcgccagcggcggtggtgacagctcggtggggtggcgccaaaggcaaagggaggccggcggcgagaagcagaggcaggttgatctcaacctgaagctctagctagtagcttaagttgttgctcatcatgctgatctgtgctgagacgatgatcgaggtaggtgctgtgcttttggtttgtttcttcagagattcttctttcttttctttcctttctttccttggttatttcttcttcgtcgtcttcctttgagagctagtgtgcgtagtgccacgcaagtattttctactggggtgtacaattaagaataaatccgtggccattgtaaattaattaattatgctgttgccttgatcaaaagtgttgcactctttgcacacaatgccatatgcctttgttgtaaaaaaaaaaaaaaaaaaa

SEQ ID NO: 65454 - DNA, 176 bp, Oryza sativa
  Clone ID: PAT_MRT4530_66500C.1
aagactgccaatacggaatctatatatggcgtataggcatagggtcattagacaatgtgggcggtatcatagcaagcacatggatactgacagccctgcccctgaaacattatacacacatgtcgctgacacactcccctacatactgataagagagagagacaaaaacgctctta

SEQ ID NO: 65455 - DNA, 1949 bp, Oryza sativa
  Clone ID: PAT_MRT4530_66501C.1
ctgcaggaattcggcacgaggcctcccccgcattccgcgccggagctgaggagggagagcgagccagcgagggaggtggggcaatccagcgagcgccagatcgtgccgccagccccgctccgtcctctctccggcgaccctccgccccgcctgatcccgtggtggatcaactacaactcatctttaggaaagcctcttgaacattagccttgtgtgcctttcaacagtatggcctcggtaggtgtggtgcgttcttccttggggtttcagaacgaaacaagtacaagtggcgatgccgaccgacttccgaatgagatgagcaatatgagtataagggatgataataaggacattgacgacatagttgtcaatggcaatgggacagaacctggtcatgttattgtgacaagcattgatggaagaaatggacaggctaaacagaccattagctacatggccgagcgtgtcgtaggtcatggatcctttggaactgttttccaggccaagtgcctggaaaccggtgagactgtggctataaagaaggttcttcaagacaagagatataagaaccgtgagctgcaaacaatgcgagttcttgaccacccaaatgtggtgtcactaaagcattgttttttctcaaagactgagaaggaggagctttacctcaatttggtgcttgagtatgtgccagagactgctcaccgtgtaattaaacattacaacaagatgaaccaacgcatgccattgatatatgcaaaactatacatgtatcagatatgcagagctttggcgtacattcacaacaccattggcgtgtgtcacagggatatcaagccacaaaatcttctggtgaacccacatactcatcagctgaaattatgtgacttcggcagcgcgaaagtcttggtaaaaggagaaccaaatatttcttacatctgttcaaggtactacagagctccagagctcatatttggtgctactgaatacacaacagcgattgatgtttggtctgccggttgtgtgcttgctgaactcctcctggggcagcctctattccctggcgacagtggcgttgatcagcttgttgaaatcatcaaggttctgggtacccctacacgagaggagattaagtgcatgaacccaaattacaccgagtttaaatttccgcaaatcaaagctcacccatggcacaagatcttccataaaagaatgcctgctgaagcagtcgatctcgtctccaggcttttgcagtattcaccatacctccggtccactgcttcggaagcattgatccatcccttcttcgatgaactccgtgatccaaacacccgcttaccgaacggccgtttccttcctcctctcttcaacttcaagccccatgaactgaagggtatgccaatggaattcctggtgaagcttatccccgaacatgctcgaaagcaatgcgcgtttgtaggatggtgatttctgaggtcagcatgaaaactagttcagaatttcttcaccgtcctccattagaaagcagagatgaaccctgtgtgcagccatttgggaaagctggtgcatatggaagtggaactacatttttttgtccgagattctgacgccgcgtattcttttcccccctcccactttgctgctgccggtgtaaccaaaaaatcatccacggttctgtaaagttgatgaagaagagtgtaaaatcaggttgaaaactgaattcgatcggtttgtcaagattgtagcaacatgcaaggaaggatgttgcacactttgtatggcaatgttcgttcggtccaaatatttggacatggatcgagaggctattcatttaattgtacttgctgctacatgttcttacatatcagtaatcttctgagaagcttgtgaaaaaaaaaaagaaaaagcgcgccaaaaacaacagaatccaagcattgcgtgcgtgtgcagtc

SEQ ID NO: 65456 - DNA, 480 bp, Oryza sativa
  Clone ID: PAT_MRT4530_66502C.1
atggtggtggtcgtgctgctcgtcgcggcagcgtcgttgcatgccgccgacggagccgcggcggcgccgcgccgcgtgctgggagctgacggcggcggcggtgatcagtcggagagcaaggcggcggcggcctcgcgtggcggcggtggccgggcggcggctggcggtggaggccggcgcgccggcgaggaggccatggcggtggccagcggtggaggcgggcgtggccctgcgaccgcggtgatgatggtgctcgtgctgctcgtcacggcggcggcgtcgctgcatgccgccgacgccgccgctgcggtggcgccgccgcgccgcctgctggccggagctgatgccggcggcgccgttgagtcgccgccgccgccgccgccgctggtgtctgcgagcaagacgtcatcgggggcttccgactgcacgcacaaccctactaagccctccactggtccatgcccgccgaacgccccgtga

SEQ ID NO: 65457 - DNA, 546 bp, Oryza sativa
  Clone ID: PAT_MRT4530_66503C.1
atggtggtggtcgtgctgctcgtcgcggcagcgtcgttgcatgccgccgacggagccgcggcggcgccgcgccgcgtgctgggagctgacggcggcggcggtgatcagtcggagagcaagtactggttgacggttggtaacaccaaccaggaaaaaagatcggcatacgcggagattgagaatgaggcggcggcggcctcgcgtggcggcggtggccgggcggcggctggcggtggaggccggcgcgccggcgaggaggccatggcggtggccagcggtggaggcgggcgtggccctgcgaccgcggtgatgatggtgctcgtgctgctcgtcacggcggcggcgtcgctgcatgccgccgacgccgccgctgcggtggcgccgccgcgccgcctgctggccggagctgatgccggcggcgccgttgagtcgccgccgccgccgccgccgctggtgtctgcgagcaagacgtcatcgggggcttccgactgcacgcacaaccctactaagccctccactggtccatgcccgccgaacgccccgtga

SEQ ID NO: 65458 - DNA, 426 bp, Oryza sativa
  Clone ID: PAT_MRT4530_66504C.1
gcggcggcggcctcgcgtggcggcggtggccgggcggcggctggcggtggaggccggcgcgccggcgaggaggccatggcggtggccagcggcgaccgcggtgatgatggtgctcgtgctgctcgtcacggcggcggcgtcgctgcatgccgccgacgccgccgctcggtggcgccgccgcgccgcctgctggccggagctgatgccggcggcgccgttgagtcgccgccgccgccgccgccgctggtgtctgcgagcaagacgtcatcgggggcttccgactgcacgcacaaccctactaagccctccactggtccatgcccgccgaacgcccctggcggtggctgcaccctcccctccgccagatccagctggaggggaggcggcacgatgggaggccgggcggcgtccgggctgcggaagtag

SEQ ID NO: 65459 - DNA, 132 bp, Oryza sativa
  Clone ID: PAT_MRT4530_66505C.1
atggtgtctccggatactgtcaggagagacgaaagcgctatctttgatctcgccgggcacgaactcgaggaggaccctgttatcgactacgagtcagaccttcagaccgccatgtcgacaacagttaaatag

SEQ ID NO: 65460 - DNA, 2322 bp, Oryza sativa
  Clone ID: PAT_MRT4530_66506C.1
atgagaggcgtctacattttcaccacaatattcttccttctcatgccaacaattgctcttgcaaatcatagaaaacccttccttgctagacgttcatccatttcaacccaagccttcattgctagacgttcatccatttcaacccaggatgacaccaccaccatcctagtgtcccccaatggcgacttctcctgcggattctacagggtggccaccaacgcattcaccttctccatctggttctccaggtcgtcggagaagacggtcgcttggacggcgaaccgcgatgctccggtgaacggaaagggttccaggctcaccttccagaaggacggcaccttggcccttcttgactacaatggcaaagttgtatggagcaccaacacaacagccactcgagccgaccgagcagagcttctcaacaatggaaaccttgttgtcatggatcctgaaggccagcatctatggaggagcttcgactcgccaacagatacacttctgccgttgcagccaataactaggaatgtaaagctgccatggaagaatggaaggacaacttatgacagtcttcgatatggtgttctaaatcagacaggttattttgtatcaagtgacctttttaagtttgaagcctctgatcttggcgatcatgtcatgaggaggttgacactggattacgatggaaatcttaggctgtacagcctaaacgagaccagtggcaactggtcagtttcttggatggcattctctagagtatgtcaaatgcatggagtgtgtggcacaaacgctgtctgcaattacatcccggaactccattgttcttgcctccaaggcttcgaggtgattgatccgactgactggagcaaaggatgcaagcgcaaggtggacataacagcaatctgggataaagggaatagacataatattacaaacaactctaccagccaggacttctcaatcagaaagatcactgcaactgacttctgggggtatgacaccgcctacacacagttaataccatactcaaactgtagaaatatgtgcctcaccgccaataactgtcaagccttcggctaccggaagggaactggtgaatcttatccaaagtactctcttttcaatggctggcgcttcccagatccttacaatgacctctatctgaaagttcccaagggggtgccgtttcgcgaagaatcagattctagaccaacccattcttgtggagttacagaaaagttagcctacccttcatcacaaatgtttgaggaagtcacttccaatttcgagtttggttacttcctttcttctgtgttaacgttgcttttgattgaagtggttttaatcattgttgggttttcagttgttagaaaatgggagacaaggcctgagattaccgatgaaggttacgcaatcatttctagtcagttccgaagattcagctacaaggagttacaaaaggcaaccaattgttttcaggaagagctgggaagtggtggatcgggtgtggtttacaagggagtcctcgatgatgaaaggaaggttgcagtgaaaattttaaatgatgtgatctatggagagcaggagttaaggtctgagctaagtgtcataggaagaatatatcatatgaatctggttagaatttgggggttttgtgtggagaagacaaagaggctcttggtttctgagtacagtgagaacggttctttagacagacttctgtttgactaccacaacttatttcctgtcctaaaatggagccaaaggtacaatattgcacttggagtggcaaaaggactggcatatcttcaccatgagtgtcttgaatggatcgtgcactgcgatatcaaaccggaaaacatattgttagataaagactttgagccaaagattgcagattttggactggtgaaactacttaagccagaagcagcacaaatgccgtcaagagtgcatggaactagagggtatattgcaccagaatgggctctaaatcttccaatcactggcaaggctgatgtttacagctatggagtagtacttcttgagttagtgaaggggagtcgggtttccagatgggtggttgatggcaaggaggaggtaggtctggctgttaaacgcaatgttgacactcttagagagaaactagctagcgaagatcaatcatggctgctggaatttgttgacagcaggctggatggagaattcaactattcacaggcggccacagtactaaagatagcagtgttatgtctggaagaagataggcgcatgagaccaagcatggatactgtggttgaagtcctgctttcgcttgtggaataa

SEQ ID NO: 65461 - DNA, 441 bp, Oryza sativa
  Clone ID: PAT_MRT4530_66507C.1
atggcggaggcggtgaccgttgctgtggcagcggggggaggcggcggcgccggcaccggcggacattccatggggtggcatcctgttaaagccaattctatggagtggcatattgttaaatttctcatgtatttaatggtgtcggatgaatggaaccctaacgacaatggtatttctttgataaaaatcacttgtatgatgcggggagagggcggtggccggcggggagaaagggaaacgcacggcgggccgtcgggagaggagctacgaggagaagggaaccatcccggcggcgacggggccaccgcgaccttggccgtggacgacgtcgacatcgacctcggcatctcggcgggtggtgagctgagcggtggtggtggccgcccctgttgccatggcggagtggaggcgggatgggacgggagcaacttggcgaggtga

SEQ ID NO: 65462 - DNA, 2457 bp, Oryza sativa
  Clone ID: PAT_MRT4530_66508C.1
atgagaggcgtctacattttcaccacaatattcttccttctcatgccaacaattgctcttgcaaatcatagaaaacccttccttgctagacgttcatccatttcaacccaagccttcattgctagacgttcatccatttcaacccaggatgacaccaccaccatcctagtgtcccccaatggcgacttctcctgcggattctacagggtggccaccaacgcattcaccttctccatctggttctccaggtcgtcggagaagacggtcgcttggacggcgaaccgcgatgctccggtgaacggaaagggttccaggctcaccttccagaaggacggcaccttggcccttcttgactacaatggcaaagttgtatggagcaccaacacaacagccactcgagccgaccgagcagagcttctcaacaatggaaaccttgttgtcatggatcctgaaggccagcatctatggaggagcttcgactcgccaacagatacacttctgccgttgcagccaataactaggaatgtaaagctggtatatgcatctgccagggggctgctatattcaggcttctacaactttctcttcgacagtaacaatattttgactctcgtctacaacggcccagacactgccagcatatattggccaaatccttcctttgaccagccatggaagaatggaaggacaacttatgacagtcttcgatatggtgttctaaatcagacaggttattttgtatcaagtgacctttttaagtttgaagcctctgatcttggcgatcatgtcatgaggaggttgacactggattacgatggaaatcttaggctgtacagcctaaacgagaccagtggcaactggtcagtttcttggatggcattctctagagtatgtcaaatgcatggagtgtgtggcacaaacgctgtctgcaattacatcccggaactccattgttcttgcctccaaggcttcgaggtgattgatccgactgactggagcaaaggatgcaagcgcaaggtggacataacagcaatctgggataaagggaatagacataatattacaaacaactctaccagccaggacttctcaatcagaaagatcactgcaactgacttctgggggtatgacaccgcctacacacagttaataccatactcaaactgtagaaatatgtgcctcaccgccaataactgtcaagccttcggctaccggaagggaactggtgaatcttatccaaagtactctcttttcaatggctggcgcttcccagatccttacaatgacctctatctgaaagttcccaagggggtgccgtttcgcgaagaatcagattctagaccaacccattcttgtggagttacagaaaagttagcctacccttcatcacaaatgtttgaggaagtcacttccaatttcgagtttggttacttcctttcttctgtgttaacgttgcttttgattgaagtggttttaatcattgttgggttttcagttgttagaaaatgggagacaaggcctgagattaccgatgaaggttacgcaatcatttctagtcagttccgaagattcagctacaaggagttacaaaaggcaaccaattgttttcaggaagagctgggaagtggtggatcgggtgtggtttacaagggagtcctcgatgatgaaaggaaggttgcagtgaaaattttaaatgatgtgatctatggagagcaggagttaaggtctgagctaagtgtcataggaagaatatatcatatgaatctggttagaatttgggggttttgtgtggagaagacaaagaggctcttggtttctgagtacagtgagaacggttctttagacagacttctgtttgactaccacaacttatttcctgtcctaaaatggagccaaaggtacaatattgcacttggagtggcaaaaggactggcatatcttcaccatgagtgtcttgaatggatcgtgcactgcgatatcaaaccggaaaacatattgttagataaagactttgagccaaagattgcagattttggactggtgaaactacttaagccagaagcagcacaaatgccgtcaagagtgcatggaactagagggtatattgcaccagaatgggctctaaatcttccaatcactggcaaggctgatgtttacagctatggagtagtacttcttgagttagtgaaggggagtcgggtttccagatgggtggttgatggcaaggaggaggtaggtctggctgttaaacgcaatgttgacactcttagagagaaactagctagcgaagatcaatcatggctgctggaatttgttgacagcaggctggatggagaattcaactattcacaggcggccacagtactaaagatagcagtgttatgtctggaagaagataggcgcatgagaccaagcatggatactgtggttgaagtcctgctttcgcttgtggaataa

SEQ ID NO: 65463 - DNA, 2533 bp, Oryza sativa
  Clone ID: PAT_MRT4530_66509C.1
ctaccaccaggtcctcattgttggcgctgctccgatgcgctcatcaaatctcgaatccttccactccggcatcatctgcacagttatcagcgccgctgcggcgtgagggctctctttgcggcatcgagctccggacggcgcctcctccgcgccgtcgaactccgactccggcgaccagggcaccggaacggcggccgccatgggcaagggcggcagcggggtaccccaaatccgccgcgagggcggtggccgccgctcctcgccgtcgccgggagcgctgctgctccgtgggccgtggcgaagttcgagaggcatcctcatcatctgggctgatccaagtgtgatatccttccttctcatgctccccactgctgttgcaaaagatcaaaagagctttcttactaggcgttcatccatttcaacccaggatgacaccaccgccatcctagtgtcccccaatgacgatttctcctgtggcttctacaaggtggccaccaacgccttcaccttctccatctggttttccaggtcgtcagagaagactgtcgcttggacggcgaaccgcgatgctccggtgaatggcaagggctccaggctcaccttccagaacgacgggaccttggcccttcttgactacaatggcaaagttgtatggagcaccaacacaacagccactcaagcaaatcgagcagagcttctcaacaatggaaaccttgttgtcatggacctacaaggccagcatctatggaggagcttcgactcgccaacagacacacttctgccgttgcaaccaataactaggaatgtaaagctggtatctgcatctgccaggggtttgttatattcaggcttctacaactttctcttcgacagtaacaatattttgactctcgtctacaatggccctgacactgccagcatatattggccaaatccttcggttcacctgccatggaagaatggaaggacaacttatgacagtcgccgatatggggttctaaatcagacaggtcgttttgtatcaagtgacctatttaagtttgaagactctgatcttggcgatcatgtcatgaggaggttgactctggattacgatggaaatcttaggctgtacagcctaaacgagaccagtggcaactggtcagtttcttggatggcattctctagattatgccaaatgcatggagtgtgtggcttcgaggtgattgatccgagtgactggagcaaagggtgcaagcgcaaggcagacatgacagtcatctgggataaagggaatagaacaaatacaaacaacactatcagccgggacttttcattcagaaagaacactggaactgacttctggggatatgacatggactacgcagagtcagtgccgttctcaaactgtagaaatatgtgcctggccaacgctaaatgccaagccttcggttaccgaaggagaactggcctatgttacccaaagtacacgcttttcaatggcaggagcttcccagatccttacaatgacatctacctgaaagttcctaagggggtgccgtttaccaaagaatcagattctagactaacccattcttgtggagttactgaaaaattagcctacccttcatcacaaatgctcgaagatgtcccatccaagttcatgtttgccaattccgaagattcagctacaaggagttacacaaggcaaccaattgttttcaggaagagcgggaatggtggatcaggtgtggtttacaagggagtcctcgatgatgaaaggcaggttgcagtgaaaaagctaaatgatgtgatctatggagagcaggagttaaggtctgagctaagtgtcataggaagaatatatcatatgaatctggttagagtttgggggttctgtgcagagaagacaagtaggctcttggtttctgagtacattgagaatggttctttagacagacttgtgtttgaccatcagaacttatttcctttgctaaaatggaaccaacggtacaatattgcaattggcgtagcaaaaggactggcatatcttcaccatgagtgtcttgaatggatcgtacactgcgatatcaaaccagaaaacatattgttagataaagactttgagccaaagattgcagattttggactggtcaaactacttaagcaaggaactgcactaatgttgtcaagagtgcatggaactagagggtacattgcaccagaatgggttctaaatcttccgatcacaggcaaggctgatgttttcagctatggagttgtgcttcttgagttagtgaaggggattcgggtttcaagatggatggttgagggtgagaaggtggaactgggcgttaaacgcactgctgatattctcaaagagaaattggtaaacgaagatcagtcatggctcttggagtttgttgatggcagactggaaggagagtttaattattcacaagcagtcaagatgttaaagatagcagtttcatgcgtggaagaggagaggagccaaagaccaagcatgagccaagtggttcaaaatctgctttaa

SEQ ID NO: 65464 - DNA, 455 bp, Oryza sativa
  Clone ID: PAT_MRT4530_6650C.1
aaacaccaacttttttttaaatcaacaggcccgatttgttcttgggggggcaaaactcttttttaaaacagcacaatatccaaacccaatccttgggtgcctaaaaccaacaggggaaaaaaaaaaagcttaaaaccctttggggcagctaaaggccccaacggcaagcttgttcagtcagtcccacaggaggggacagaaaaaaacaaagcatcggcctacgggaaaaaacaaaacaggattcacatctaaaggtcaaggctttcctaaaaaaaacttgctacccgccatccgattagcgggataagttcccccacgaggagtttctatatgccctgcatcggggaaaaagaaaccctgatcgggttcccccccagggagggggcatgttttgatacaagggcttcggccgccccctcttccctctcaaactggatgagcccctgccttttgcc

SEQ ID NO: 65465 - DNA, 348 bp, Oryza sativa
  Clone ID: PAT_MRT4530_66510C.1
ggcctcactggtcatgaaatccatctgttctcggccaatgctgataatatgccacaaccactgtaaaaaatatggcagaattttcgtccaaaataacagtatatcagtgggagagagggcatcatacgttacaacgctggtgctgaactagcaaacaatgtgagcgactggcttctctgtgcacatattaccttacagtgacgaacaagcgaacaatgtgaagactattgtgtctgattaatacagcaaaagtctgacctgagctagttcatatgtcgggtcaacctgaacgctgaccctagctgaacttatagattgctactacaagatgcaagtaaggcgtaaagc

SEQ ID NO: 65466 - DNA, 3138 bp, Oryza sativa
  Clone ID: PAT_MRT4530_66511C.1
agatccagcaaaagtgactttctgcatgttgcaagtctgtgccgtacaattccttcaggttctaacacctttattcagtcatcatcaaggtccagcagggttacaaagggttgaaaatagggatggtacttttaacatgtttcaattaggcaacaaaagaaagtctgggggcgctacgatcttacatgagtctgtacaaaatttccttgagaggaatacaaacatatcagcagagtattatttataggtgatcatcatgtgaaccagaagtctgaactctgaagttgtccagacctttagatcaactggaaccatgtacaggcctttcaccattggtcaaatgcaaactcatcaacaagagcctcaagtatgtcatgctcaattgcaatgctgatatcaaatgcttccacttgacatgcatcccacctgggagtcatttggtccaactctttctcagcaactcgattgggtgtagtttctctagtttccctccaattgcagatctccttcgatatctccctcttcaacagatcttcagtcaaactgagaggcagtctcaaccatgccttgtatccgcatttgccgaaatcgcagaattttgaattcactgattcaataatgcagtcgaatatgaagttggtttgttgatacttcttttcttctgtgagacctaagctctttgacccaccaaataaatccataataacttcaagcatttcaatgataaaacaatggagtgatagatttgatgttttggtagacaaggggctattgcctaacagcaattcagcatttgaaatggcttctccgatgctgtggagcctagcttctaacagcttgaaatcacgcgccatcaaattatgtacagaagacattttatcaattccatgaaatatttcttcagcatcggtcttcgttttgtcaatagatattgccaaatccacaatgtcagactccaaattaaagagatcttccattttgttttcaattgacacaaagtattctttaccctcatttttttcggttggacttcctaacgatgaagtatcattcgagaagcatgcttcgaggactgaagttggacttggttggttgggctcattgttcatgcaagtagcagaagattcaacctctctgtccctctggtaacagttctgaaagtcatgcgactgatcattggaattgcatgcactcatattgttgtttagacagtctactgcatcagagtagttgctatgctgagaattgtatgcattggaatagttactatgttgagaatctgaagtgtttgtatcattagtgagggcagaaatgagctcttgaagcactgatgcagttaattttcctgaaagagcatcacttgattcaatcctatcagacaaaccaagctcattaatttttgctttcagtagcctgctaaactcctctttctcagaactacccacaacagaaggtgaagattcaactaccggcaatcttgtactacaactggtactaataacttgtgtccttctgcaccctctcttctctgaaactttgctttgcgatgaattccttgtcactgggttcacagatgaactagatgcaaatgcaactggattattaacttctctgttacaggctgcattgtcacggcctacattcttccgtgatccccttttttgcccagatacagtactgactgcaatcctacttgtggttgtggatgtcaatccactccggtcaatcgagcttcggcgagtgtttctttgtggattgcttgaacccattacctccctgcgactgcttctttgtggagtgattgtacccatcaactcccttctttgaccagaaccatggtgtgcagctctcctactgccagacatcagttcgcgagcactaccagcagcaggatgagtggaactaaccaagctccgagatccaatattcccctcaacatcttgcagagagtgagttcctcgcttgcgcaatgacctctcttctccagctcgaacgccagcaccactcgatctcattcttgaacagttgctcagtctgtcagttcttgccttgtgatccttgggcatggcgtccgcaccagagctgcttctactcacatttgcatcatcaaaacccgatcttagcaccactattgcatcaccacttactacatctgcagcatcagagctgcttattgtgtcaatggaatgcttctcatgcctactggaagtaatgacattgtcccattctgtctccgccggaagaacaggaggctgggcaacgaccggctgcaatctggacgaacgctctaatggcaggctatcagagcgagacaggaagtcatcaggcatacttgagctttgcaacgcattggaatggccatccatgcgatgctgcggggaggagcaggcgtacgcgagggccaacctggcactcgccctcgagctcgcgcgagcgctaggctccaacagcttggtcgccgcggcatgcacgagtcggctccgcctcgggctcctcgccggcaggtcggcgccgtgatggttccttgccgcaggcgatagcggcggcggacgctggctcggaggcaacaccaggaccacgtctggctcgtcggcccgcggcgtcggtgatgccacctccaccttcctctgcttctgcggcctccgcgccgccgggggcgcgccgacggggccagtggcgggccacgactcgagacccatgaggcgcgcgacgacgcccacgcccggagcggcgacaccggcggcggttgcggcggaggacaagcgaggcgcgggaggaggatgcgaggcctgaggcggggacgggagcctgcgcggggaagagcggagcgaggtggggaggagcctgcgcggcgagaagaggcggcgcttgcgggcgaggcggcggtgccagtccaggaggtggagcagcacgccgcccgcgcacccgccgccgccgccgacgaacggcgccggcctcttctccacaatggccaggctactcatcctcctcctccctccgtctctgccaccttgtcaaacctcctcctcctccgtggagagacactagtgatcgttgcttcttttactcgatcgatcgatccacttgttgtttttaccgacctgcgcttcgatttgggagtaaaaagcgagggcaaaa

SEQ ID NO: 65467 - DNA, 345 bp, Oryza sativa
  Clone ID: PAT_MRT4530_66512C.1
gtgagtgttgttgagaagaaataccatataggggcgggagattttagctatgaattcgcgaattaaaacatgcctatgatgattgggtggccacggacatgaatgggaagagctgagctcaccatgctagctccgaggaaataaaatgttgccataatggagctgaccaccctagtggtgactgccatcatagacgagacttggagcccggactcccgaggatgaggctgcaggagccagaatgggactaaccagttgccggtggcggactttatgaacagcatatagcggtgctaggcagcagccagagacaatcacgtgcatgtactgtggatatctggcagc

SEQ ID NO: 65468 - DNA, 246 bp, Oryza sativa
  Clone ID: PAT_MRT4530_66513C.1
atgggcaatgagatcgacacctccgtcttggccttcttggcctcgaggctccagatgcactactcgaaagcgctgttgagttatgatccaaattcatttgcacttaataaagaccagcttctgccgaatgctgccaagcgccggccaccgcctacatgtgccttcctttccacggacaggctcggcggctcccacgacctgaatggaaggaaggagagggaatttgggatgaagaaggaagaatag

SEQ ID NO: 65469 - DNA, 375 bp, Oryza sativa
  Clone ID: PAT_MRT4530_66514C.1
atgtcagtgcaaactctcctttccttcttcctcctccctctctctctcccttctctctctcccgtggcctctctctccaccttggccagagcaatggcggcagcggtggcagacgacgtcggagcatcggtcgccgtcgttgagccggagccagaggagaggcccaaggtcggtggcgcggcggcggcgcatggggaggcggcggaggaggaggtcgtgttcccgatggcgtggacggacgacgacgagttgtgcccggaggggacggtgcccgtgcggcagacgacgaagcgcgacgtgctgaggtccagctcctctccctgtttggggatgaagcagcctcgtgccggcgtgccgctggtgtcgtccgcgtga

SEQ ID NO: 65470 - DNA, 1254 bp, Oryza sativa
  Clone ID: PAT_MRT4530_66515C.1
atgacagaccatggaaacacatgtctttttgggtgtgcattcctaggagatgagacaactgagacatttaagtgggtttttgagacattcaggacagctatgagaggcaaagatcctattagcataataacagaccaagacagtgcaatgagatctgcaatagggcaagtgttcaagaaaaccaagcataggaactgcctatttcatatcaagaaaattgcagagagagaacagctgcacaatgtgaaatacttgcaatcaatttgggatacaagacaaagctgcatccctgtctattgcaagaatgactttttcccatttattcaaagcacaacgctaagtgaagggactaatgcaaggtttaaaagaggagttgggccaaggcatagtgttacaagcttcctaaaggaatatgacagaataaatgacactatatttgatacactgtattggaatgcctataactcaaacacaaaacaacccaaaaatctatggtcaggatactacatagaagagcaagcttcggagatgtacaatttaagcattttcaaaaagttccagcttgaattaaagaaatcaacaaggcttcagttctcgaaggatggaatcctttgctcccatatcctgaaagtaatgttggacctaaatgttagcaaaattccgaacaaatacatcatagaaaggtggaggaagaaagacaacaacataacaggtctattcagaggagaatcaagtaatggacctaatgctatgctaatgtacaacgtgctctcgcaaaaaatgtcagaattagcatcaaagggttgtaagagaccagagatatatagttacctggttggagaagtggagaagttggatagcatagtggacagcatgattctagaagcccatggaaatcacacatgccaggtccaaagtaatgcaacaaacaacgctgttgttgaggggcaacaacatgggaatctgaatgatgaagaggaaattgaagacccagagcaagctaatacaaaaggcaggaaatcaataaggcagaaaagattggtggaaaagattatggataaagaatgcaaaaaatacaaaggcaagagtggccaaagtaatgagaatcagttgaagacaaagagaacaagtaatgttgcgcaaggtgggactgcttgtgagatgcaaccaaaaccaaagaggcggaagaaaggacaggaaaacaacaccaaagaaataataggtaaaaacagggcaagaaaaatatgtaactag

SEQ ID NO: 65471 - DNA, 435 bp, Oryza sativa
  Clone ID: PAT_MRT4530_66516C.1
cgtcttcttgctggtgtgttcgaggaggaggaggaggaggagaagctagcggcggctgcagcaatggcgacgagcggtctgaggagctgcaccgcggttgtcgttcttagactgcttgcgccgttatttaacaggagcgagcttctgctctcatcctaaatcactacatttgggcgcgtaaacctataccaaggatggtttctttgttaaccttatctgcacaatctaatatcgtgttcaaggaccacatcaagaatgactacgtcatgtcccttccaaaatgccattaaggcactttccgtctacgtctttaatgtgtgcacagctatagttgccagaatgtatcttgattatctttttgagcaaaagaatgacttttcgaaagctgtactttactagctaaaaaatgtgatgggagattttggttacagtatt

SEQ ID NO: 65472 - DNA, 420 bp, Oryza sativa
  Clone ID: PAT_MRT4530_66517C.1
agtgtgcacgcgttgggattggcaaagtgtgacctgttgtgcatggttcgttccacgggcctggagatggatgacgatggtgctgattgacacggatcggtgataaacaaagtggctggactgctggctgccctggggccttgctgtggttgccattgaagacaagttcgccaatatggaagattgcaagaagcttggattggtgtcacattgtggttgtaacaagatggtttactgactatgtgctgagaagttttaacatgacttaaggatgaaccgttgaagaacttttgctcatagctaatagaaagcgagagatatgctaacttggataaagtctagatatttctactgccttcaattccttttttttaatcaaccgtaaacgagttatgcatggttaggaaatacttcacatta

SEQ ID NO: 65473 - DNA, 1668 bp, Oryza sativa
  Clone ID: PAT_MRT4530_66518C.1
atggcgtggaggagagagggtgtgggccagagttcttccgcatggttgctcggttccttgggggtggtaattctgcatgaagtgttacatgaactcgacactaagaaagagaggggtattatctttaagatagatttcgagaaagcctacgatagagtgcaatggccttttttgtttgaagtcatgaggaagaaaaattttggagaaaaatttattgggtgggtgagaaatgctgttgaaggtggtaaagtggcaatcaacattaatggagaacaaggggagttttttagaacatatagaggtctgagacaaggagatccgttatcaccaatcctctttaacttagttggtgatgcattagatctgattcttgagtcagccaagaaagctggggttctcgtgggtttatctcctaatctgattgaagggggtatcactcacctgcaatatgcagacgacacgattctatttgtgaaaccatgcaaacaaaacatcataactctgaagttcttgttgttctgctttgaagagatgtcggggatgaaaataaactaccagaaaagcgaagtatttggagtgggattggaggatggggatcttcaacagtttgctgacattctgaactgtgaaagagggaatatgcccattgtgtacctaggtcttcctataagtactgagaagattgggaacaaagatcttttctttttaggacaaaaaatggaaaagagactgggaacttggattgggggctatgtttcttatggtgggaaagagatcttaataaactcctgcttgtcctctatacctttgtatgccatgggattttataaactgccggaaggggtgcataagaaaatggattcagtcagaggaagattttattggcaggggatacagaagaaaaagaagaagtatcatatgttaagctggggggctatgagtagacctaaagattatggaggcttaggtttttttggaaacaaggaaaatgaattgtctctgagggtgtattttgaggatttgtataagataaatgagcaacaaggtggtactgtaagggagatttggcaagaaggagagtggtgcctaacctttaggaggaatttggagggagtttcctgggataattgggtagaactaaaaagtttgttagagggagtggaaatcaaagaagggtgggatgaattgaaatgggctctggatgagaagaacggatactcttcaaaatctttgtacaaagctttaacttttggagggaaatggagtcttttacaaattgaggaaatgaagggtgtattgaaggcgtggattgaggatatgcgagggaggatgaggtcctggaaacctgatattcaattacctgaagatcttttaaatgtgtctcttatgactagggagtttagcgccttgtcatttggtagcttgcctggagtctgtttccagaaagcaagtgaggtgttcgcatgtgtcctttacttttctgtatcaagactctgttctgggctttcttcaaaaagccgggtcattattaatataatgatctttcctctaaacattctaaggaagtatatagaaacatccattgttcacacctggaacccaacctgtcggacgcagatcctcagcagtaccttttgcggatgtgcttctgctcttgagaaattttga

SEQ ID NO: 65474 - DNA, 1491 bp, Oryza sativa
  Clone ID: PAT_MRT4530_66519C.1
atgaggaagaaaaattttggagaaaaatttattggatgggtgagaaatgctgtagagggtggtaaagtggcaatcaacattaatggagaacaaggggagttttttagaacatacagaggcctgagacaaggagatccgttatcaccaattctctttaacttaattggagatgcattagatctgattcttgagtcagcaaagaaagctgggtttctggtggggttatctcctgatctgattgaagggggtattactcacctgcaatatgcagatgacacgattctgtttgtgaaaccatgcaaacaaaacattataaccctgaagttcctgttgttctgctttgaagagatgtcggggatgaaaataaactaccagaaaagtgaagtatttggagtgggattggaggatggggatcttcaacagtttgctgacattctgaactgtgaaaggggcaatatgcctattgtgtacctaggtcttcctataagtactgagaaaattgggatcagagatcttttctttttaggacaaaaaatggagaagaggctgggaacctggattgggggctatgtttcttatggtgggaaggagatcttaataaactcctgcttgtcctctatacctctgtatgccatgggtttttataaactgcctgaaggggtgcataagaaaatggattcagtcagaggaagattctattggcaggggatacagaagaaaaagaagaagtatcatatgttgagtttgggagctatgagtagacctaaagattatggaggtttaggctttttggaaacaaggaaaatgaatctatacacaaagagggtggtgaataatgggaggagaaccagtttttgggacgatgtttggttactacaagtgcctctgagggtgtattttgaggatttgtataagataaatgagcaacaaggtggtactgtaagggagatttggcaggaaggagaatggtgcctaacttttaggaggaattgggagggagtttcctgggataattgggtagaactaaaaagtttgctagagggagtggaaatcaaggaagggtgggatgaattgaaatggtctctggatgagaagaaaggatactcttcaaaatctttgtacagagctttagcttttggaggtgtgatagataccagggcacagggcttgtggaaagctaaaattcccttaaagatcaaacacttcttattcatggccatgaaagggaagatcccttgtgctgctcagctgaaaaagaaaaaatggaaaggggagattaattgtaaaatgtgtgatctagaggaggacacagaacatattctgtttagatgtgctttagcaagattcttatgctgcttgctgttgggcaatttgaaatggagtcttttacaaaatgaggaaatgaaggatgtccagaaggcgtggattgaagatatgcgagggaggatgagatcctggaaacctgatattcaattacctgaagatctgtga

SEQ ID NO: 65475 - DNA, 2037 bp, Oryza sativa
  Clone ID: PAT_MRT4530_6651C.1
ctaagctttgaactgagcaatcctgcgtttcttctgttccattgggttgtacttatcctcctgacgaatggccttatccaccaacttctggaaatcagaataatccccagtcattagcgggtaagaaagctcatcattcagtcctgccaagaaattctcttgacgctcttcatctgtgcgcacatcctccggaacataacgggccagacgattgaactcatgcatgtactcggtgacagaacgggatccctgagtgagcgccctgaactccttcttcttgagagacaccactctcgatggtacacgagtcttcctgaaagcagcagtgaactcaagccaagtgattggttcagcagtagccctgttgagacagaagtgatcccaacgaagaaattctgctaacttgttctggggaggagcatgattgttcccctggttttgttggttctggagttgttgcatcatcatgttcatgagttgcgcctgttgagctaggacttgggcaagcgtgagattctctccattgttgttgttgttgttgttgggcccatttccattgctgcgggtgttcaccatcttgggcaccaactggtagcagggaacaaaaagagctctcttccttgcagtaagatgaaccctggccttctgtggtggcgcttctcccttcaattcggctagttccttctccagacgatcaaccttgtcctctagcttgcagatcttaccacggttccgatcttcacaagcttgagcagctgacacaacttcagcgcgggactcatccatggcccacagcatctcgaccaaatgtcttatggtagcatcattctcaattccttcaggatcaacatagctggcacggtcacttccctggggctgacgaggatggcaacgatactcagtgtcggccaacagatcattgtaacggtcacggagctctcctatggcgatccttgccgcctcctgacaagcttgaggatagcttccccctccagcctcgaacatcatcgatgggatgtcttcacgatcactgttcaaggtgaccatgacacggcacttctcttcatcacgatcatgaggaatctgggcatacaaaggggcagtctcgaatcctatggtaaaggacatcatacgcagctcctggacaaatccctcaataccgaacaagtgctcaggcttgaagcgtggcatcttcagcctcactgtagaactcctctgatgaatggttgcaaggtgagtatatgacacactcaacaagccacgcagcaaatattcaagtgcaggggataacaaaggatggcataatatagtctcatttgcataaatggcaatcaataaataccgttgcataggcccaaccattctgaacaaccattcctggctgcacagttctatctccaaaccaggaatataccattctaaaccaggagtgttgtcgacatggcggtctgactcgtagtcgacaacagggtagcctttctcctcgaatccgtgcccggtaagatcagagatagcgctttcgtctctccttattgcgtactcgttcgacatcatatgatctgacatcttttggtacgccgcgtatcttgaggcttgaatgatctcgatagaccaagttgtcaatgacgatgatggtcccgatctagtcggaagatgtacttggacaagttggatcttcccacagccgaagtcgtcgagtagcttgttgtcggagagtccatctcttaaacccatctcgtcgaaatcctgaagcaccaaaatccccctacctggcgcgccactgtcgacgtttgatgtctcgaatggcggttgaaggtctgactcgtagtcgacaacagggtagccttcctccttaaatccgtgtccggcgagatcagagatagcgctttcgtatctcctgacggtatccggagacaccgtaggggaatagccatgcctatccctgaagtcgatatccggcggcgtgtcttggcgtatgtaggcttgtgtgttgtggcttctggtggacgtgtgttgattgtcatgggtgtcttccat

SEQ ID NO: 65476 - DNA, 210 bp, Oryza sativa
  Clone ID: PAT_MRT4530_66520C.1
atggcgatggccaacaggccaagtgggtggggctactccaaggtgatggaggctggagccccggtccaccaaatcaccaatcagtcgggcgggtttggtccgtgccgaccgtcgtcgtcgtcgtggatcgccatgtgcgttccactagcacctagtactttgagtaccagctggtacctggtacctttggtactgggtattgactggtag

SEQ ID NO: 65477 - DNA, 945 bp, Oryza sativa
  Clone ID: PAT_MRT4530_66521C.1
cggccccctgtcatcgtaaccttccgctgtttccccaggtactcaagccgctatgcaggtcttcacgagcccttttttgtttggcgtcatcagatttactgtgtatcttttcgaattcattcagctgtttcaaggcctcagatattgcttcttggttgtgctcgtcccatttcttctttctttctttcttcaaacgagagcgtaagtgtgtccgtgaagagttcatagactaatttacagccaacatgccactcttgagaagggttcttccatgagggatttatagtcagatgggtgcctgaagcaccaacaatagaaccatcatcatcagctttcaccactttggacgtgtcaacatcaccactacccgtgcagtcaataacatcaaggatcttgggctttccatctgaagtagtctgcaaaccagctgcagccggatcaactccagaatcgaagatggcgatgagcgcgccgcggccgtcgtactcgggatgcgcggcgaggaagcggtcgacgccgatctccttcttcggcatcagcgactcgaggaacgagggctcggtgaggcggaacccacccgctgcagcggtcgtcccctcggcggcggaaggcggcgaggaggacgaggaaggcatcgctctaggcgcgacgcccgcgctagggctcgggccgcctcgagtcgtagtcgaagccgccgcgacgttggaggctgcggcggggacggaccaggcggagactgcgaggaggaggcgcaggtgggcgaccggtttatgtagcgctgcggctgctgctgcggtcacggagctcctcccccgcaagtgccacatgaggtggcccgggccgattcactcacctgtgacggataaagttggagactgctacactcactgccgcagcaatggcgaattggggctctgctcgccggcggcggagggcggaggctga

SEQ ID NO: 65478 - DNA, 5040 bp, Oryza sativa
  Clone ID: PAT_MRT4530_66522C.1
gtaagacacggttagtgctctcacacctaagctggatggtacgcgggtaccgtttccagccgtggaccaaacatgcgcacaccaccatctacacggaatcgaaaccttgttcggagggtccaccggaataaacctatctgatgccaacagtgaccccacaaccacccgcgcctcggccccgctccccgcggggccagtctcttcatcgtcgaagaattttacatgaggcgcaatcacaacaccacaacagcagggaccatggctagaaattgagcttcaccaatactgagcctcggacacgtccgaagttaggctactggaacggcgaccaaggagagccttcattgcggatccatccttgatttttattttgtaatttcgagctgggaagatgatttgttttcttttttgcacaaaccgatgagcttagcagtagcaggcagccttcttaagttcttattaccatttgaagaaataaaatacctagtgaaaaactaccaaaccagcaagtttgctaccaacaatgacaaaaatagtaaaatactgaatccatggtgatgaaaaatgagtgaaaaatagtcctaacaattaaaacggaggcaaagatgggggaaatcggacatgcatccactgcttctcgtaggccgatacatggacccatcctatctcctcaatcaattggatcttcaaatcataaagtcttttctttggttgctcagagtcatcttgaatcatgtcattcagaaccttcaatgcagtgccaagtcttccacagcgcctctcacgcaggacagttaaagagccgtattttgtagttttggcatcaacccatttaattaattctttgtaattctcttcaaaaacatctttagcagatgcctcagttgactcatcagtctttagcgactcaatctctgccaatgcaagacccttttggtatagtgcatcagccaactggtctcgtgtttcttccatctttttcttatttttctgtgcctcttcatcttcaggatctggtttaagggacaaagactttgccagatcctctttatcaatactgtccacaacctcatcagctgcagctataatctctttttgatggctaaacttatcatctgaagttgctttctgaactatgcattccaaaattttggcaagcaaaggtgtatacttgggatactctggcttaagagaagcaacaagtgccgtccaagaagacttgtcatcctcagtttcttgattaaagccagaaaggaactttatcttggtgtctcgaacctcgtcatccaatctctctgaaatactctttcttccagatgaaactcccttttctttatcattatcaacctttgatggtggaatgagatacgagatactataagatgctggagcatgctggttttggtcatctttcttgctgaaagagcttaccgcaccataggtaattgacccaaccaaaacagacccaggtagaacattctttggaagtttttctctagatggtggacccacatagaatgcttctggttctcctggaactaaaatagaggatttgaaggtgccatttccaactgtagggccatcaggttcagagtagaaactcaattgaatgaaatcctttttctctagcttcctctcgataaatagaaccaactgcttcagtttctccaataactgcacattgtcatgccttatgtacaattgcagcgtgtattcaccttttgagagtttgacataattaggatagacgtcaccagaagagtagacacacttgtttgaatctgatattctataatactgagactcgaacttgttatcatatattctgttgttaagtaggggcacacggggctttatttcagcaccatcctctagtttgaatttgtaagtcagagttagtgctatgatttgcttgccagatggtaatctatcacggctgggaggaagtgaacaaagattagactccactggtcgataaggggtcttgaccttgttcagagtggcaacaggaacaagcctctctgatgctaatagagatctagcaacaacacgcacaggtgcctcactaccatcaaggccaattattttctgatcaacggatattccatgaaacacaatctcaaaatcaacacaggtaggttcatggctagcaattccgctagaccagaactgggctatggacaactccaaagttaagccaccttctacaggaaaactgaaattcttgagagaaggtgaagagaaagtgacaacagcctcccatttaataggtcgcttcagtggacagatctgaacagtgtccaaaaagaacctcctaggagtatcaaaggctgatgtgcgcattgtaacttccacccatgaagctccaataggcacatttatgaaccttctttcaatgtgacctgacttaaaggaaagatttgaaagtgtcaatgcaggtggctctcctgatagagcaataggctttattacagtgattggtacgcggaaaataggtccacgccatggtgctttgcaatctataccataaacttcataatagtgaaggccgctgctgatattaacaggatttacaacaatgttgaaagtgcgcccattgtttgtcaccattatgtactcaggaattttgatgacagagctatcagtggaatgcagctgcaggcactcctcaaatggaaccaattgctccatgttacttgcatcctcatgaaattttgggtctagttgaacagtccactcacttgtttgccggcatgtgttactcccacgtagatatattcctctaagtttagaagttggcttgcccacttgattgattgatattctataagaaacaagtggcaattccttagcctgttgagcatattcaaaagccctatcaacttgcaaaagcccatgccctgtggttagcttctcctcaggcacatcacttattgatgcagctgtattctcaattgccttcctcacagtataagggcttaatggaatgccttcagccttcatggcactaacaagaagagcaaccccaccgcaggcagaaggtgatgacatggaagttccattcatgagcatgcgagactgaagtgtccatgttggtacaggagccactgctccacccggtgcactaatggagacaccaagatccccgtcagcagtaggacctcggctagaccatgtgtactccatcccctcagctggtgcttgtacgacacagtgagctccagcagccatagctggtgagacataagcgccaacgccaataatgcttgaactagtaccaccaggagcaccgacagtgtttaaagcaggaccattgtttccagcactactaataaatataatacgatgcttgtctacaacctcactagcaagatcaataaatctgccatagtcaggaagaagggtaggctctccatagctcatgttaatcagatcacatttgtgctctactgcagctatcaaggccctaaccaggcctgtccctgtctccattgatcctaaacgggtatcgccaatcttgcaggaaatcagttgtgcacccggtgcaactccattgagcaaaggttcatcaggatgaaaagcagctgcaatgcccgcaacatgggtagcatgaggagagcaatcagttactatactaacaaggtttccatcatcgtaaatgtttgctacaaaagagcaagcatctaatttgctaaaaatcccaaacttccgctcaagtctgtagtttgtcaatggaacaaaatctgcaagttttccacaatttttgttgccctcaaggccctgggtatcaacagcaaccctccacacatcaccatcgtgccatgcaacaatatcaattaccggccccctgtcatcgtaaccttctgcttgtttcctcaggtactcaagcctgctttgcaggtcttcacgagccattttttgtttggcgtcatcagatttactgtgtttcttttcgaattcattcagctgtttcaaggcctcagatattgcttcttggttgtgctcgtcccatttcttctttctttctttcttcagaatgcaggcaccaagtacaaagtttaccttcaaacgagaggtaagtgtgtccgtgaagagttcatagactaatttacagccaacatgccactcttgagaagggttcttccatgagggatttatagtcagatgggtgcctgaagcaccaacaatagaaccatcatcatcagctttcaccactttggacgtgtcaacatcaccactacccgtgctgcacttaaacacatgtatgtgaataggtatttcagaggggttacagcaccagtcaataacatcaaggatcttgggctttccatctgaagtagtctgcaaaccagctgcagccggatcaactccagaatcgaagatggcgatgagcgcgccgcggccgtcgtactcgggatgcgcggcgaggaagcggtcgacgccgatctccttcttcggcatcagcgactcgaggaacgagggctcggtgaggcggaacccacccgctgcagcggtcgtcccctcggcggcggaaggcggcgaggaggacgaggaaggcatcgctctaggcgcgacgcccgcgctagggctcgggccgcctcgagtcgtagtcgaagccgccgcgacgttggaggctgcggcggggacggaccaggcggagactgcgaggaggaggcgcaggtgggcgaccggtttatgtagcgctgcggctgctgctgcggtcacggagctcctcccccgcaagtgccacatgaggtggcccgggccgattcactcacgtttatcgatttgagttcttttcagtctcagtttgtcttaatttagtccggtttagccggggaatctgcgtggaaagcacggctttaatttgacacgatgatgaagcaatgagtgtattgagtggactaacttttagctgtgacggataaagttggagactgctacactcactgccgcagcaatggcgaattggggctctgctcgccggcgacggagggcggaggctgaggccttggacgctagctgctgccggcctcgtgc

SEQ ID NO: 65479 - DNA, 1569 bp, Oryza sativa
  Clone ID: PAT_MRT4530_66523C.1
ccacgcgtccgcgattctgaactcccccatacatctccggcaatggcggcggcggcggcggcggcgcccccctcctcctcgtcgctcgcgccccccgaggtgcccatggagctgcacgccggcaaccgcgatcgcctcgtcgccgcgctccgcgcccacctctccgcctccggccgccccctccgcggcctcgtcctcctccagggaggggaggagcagacgcggtactgcaccgatcacctcgagctcttcaggcaggagagctactttgcttatctcttcggagtgagggaaccggggttctatggcgcaatcgacattgtctctggacagtcaattttgttctctccaaggttgccagctgattatgctgtgtggatgggtgaaattaagccattgtcttattttaaggataggtacaaggtcgacatggtgttctatgttgatgagatcacacaagttctgcaggaccgtttcagcgatcatggaaagcctcttctgtttgtgttatatggaaaaaatacagacagcggaaattattcaaagcctgctagttttgaggggatggagaagttcgattccgatctaagtacacttcaccctattttaactgaatgccgtgttatcaaatctgacatggagcttgcccttattcagtatgctaatgatgtgagctctgaagctcacattgaggtcatgagacgagcaaaaccaggcatgaaggaataccagttagaaagcatctttcttcatcatgtttatatgtatgggggctgtcgacattgctcttatacatgtatatgcgctactggagaaaatagttctgttcttcattatggacatgctgcagcaccaaatgacaggaccctgaatgatggagacatggcactaatggacatgggaggtgaataccattgctatggatccgatataacatgctcataccctataaatgggaaattcaacagcaatcagacaatagtatacaatgctgtccttaaggctcataatgctgtcatagcacacatgcggcctggagtaaattggttggatatgcacaaacttgcggagcagactatacttgaatctctcaagaacgaaagaattctccatggggatgtcactgatatgatggctcaaaggttgggtgctgttttcatgcctcatggtcttggacacttgcttggtattgacacccatgatcctgggggctatcctgagggcttagagaggccaaaggagccaggactgagctccttgcggaccataagagaacttaaagaaggcatggttatcacagttgagccaggttgctatttcattgatgctttgctgataccagccagggatgatccagtttcctcgaagttcttcaactgggaagagattgaaaaatacaaaagctttggtggtgttcggattgagagtgacgtgtatgtgacggcgcatggatgcaagaacctgacaaactgccccagggagacctgggaaatcgaagctgtaatggctggatctgttgaagacggtcccctcgagtatcgtcctttgaaaactgaaaggtacaaataa

SEQ ID NO: 65480 - DNA, 552 bp, Oryza sativa
  Clone ID: PAT_MRT4530_66524C.1
atggatggagcttcttactggacatttcatcgaacatgcggcggccatattgtcgggcgacatggtggggcaggaggggataggaggggatacataccttcagatgacggcgtctgtgaccaccttgagcggtcgagggcgtcgaggggcgaggaggcggcgcaggtcgagggcggtggggaggcgaggggcggcggcgcgcagtggggacggcggcggcacgggtggagaggcgagggtcgccgtcgcggtgtggggacggcttctggtggaggtggaggggcggcgcggccggcgcctctccggctaggggtggaggcgtggtgggaaggcgatgggcggcggcgcgcagtggggacggcggcgacgcgggtggagaggagaggggcgctggcgcagtgtggagacggctgctggtggaggggcggcgcggaggagaggcgaggggagggtgcggggcggcgatggaggcgcgcggaggagggggcgcgggttgcggggcgacatggctttttacgcttttttgttccgcatcgcgtgtacctcttttaa

SEQ ID NO: 65481 - DNA, 1557 bp, Oryza sativa
  Clone ID: PAT_MRT4530_66525C.1
attaccgaccccccgccgctgcctcacaatacccccaccaccaccatgccggtttgcataccttattcgaatgacacccagttcccgcttatccgccgccgccctcgcgcgcgtcccgtccccctgatccgtcccgcagcgcggcgctccgtcctcatcgttactgtcccccgggcccccccccgcctcccgcgccccccccgccaccctcccccctcggacggcctacggtccgcgcgcgccgccggccccctcgccccaactccgcgcgccattccaacacccaaattccgcctccccccccccctctccccccccgcccctccctccctcgcccgccccgcccccccgcccgcgccgcctcccgcgccccccccccgccccccccccacccccgccccttccccgccacccccccccgcccccccccccaccaacctcccctcccaccccgccgccgcacccccatcccgcataccacccgacaccgcgccgaagccccagcccccacctttgtccccaccctccctcccccccaccccctcgcccctaccaacccaacccccccccccccccaacgccgccgcccactcctgcgattggtgcaccccgcgccactccaccgtctccatcctccccacccccacgcacgccgcccatctcaccggcaagtccaattcctccctctccccaatcccctcgcccatcccatttccccccaaatctgactgcgaccttcccgacctgcctcctcgtctccgctcctctcctctcccagatgagatccctctcctccccgcggagacttctcctcccctcccatgccgctcccacccaatcctcgcccacctccacacccacatccgcgccgtccgctcctgggcgcacgaccccacctccgtcgcctccggcctcgcccacctcgacgcgctccacgccgccctcggtgagctcctcgacctccccgaggcccaggccgccctctccgccgccaacgaccgcctcctcgacgccttcctccgcctcgccgacgcccacggcagcttccaggagaccgtcgtcgcgctcaagcaggacgtcgccgaggccctggccgccatccgccgccgcgacggcgcgcgcctcgcctccgcggtgcgctcgcagcgcaaggccgggaaggagctcgcccgcctcgccgccgccgcgagggacggcgccaggccgtcgcgcctcgggctcggcgggagcgcggcggaggtggaggtgaccggcctgctgatggagtcggccgcggtcaccgccgccgcgtccgcgacgcttttcaacaccgtggcgtccatgtcggcgtcggcttcggcggcggcgtgctcttgccggaagacggcggcgttggtgtgcctgatcaagaagacgtcggcgtcgtcggaggaggagaaggagacgatggcgctggtggagaggctggaggagctggaggagtgcatcgatgagctcgacaacggcagcgacaaggtgttcaggagccttgtgcagaccagggttgcactgctcaacatacacacccacatcttctaa

SEQ ID NO: 65482 - DNA, 546 bp, Oryza sativa
  Clone ID: PAT_MRT4530_66526C.1
gacaaaggggataaaagagcaccgtttttctatcaagcatactatggcgactgtagaaagaaataacaggctcacagaactagaagatgtacatcatgacacagcctgttgaaatgccgccgtcaattgattctagtagtttttcagttctgttttttctgcatttacaacaagggcttcctcctctttctctgtttcttctaacatatggcaactgaagccatcatgttcataaacctacacagggggtatacctctacaaatcaaactctataagcatatcccccatcaatcttacatttgctacaaaggtcaaagtgtaaccagagaaatcaccgtcggatggcacagaagtgctcttctttcttatccattgtgggtgtcagacaaatgagacacccagtgtaggcctgcaaagcgtcgaattctgtaagaacaaatgtccaccacagcaatggtgcatctcaagctacagtgggtcagtgtttcccacatcaatggagtatgctcgactccccttggtcaccggcttatgtgcccatttgc

SEQ ID NO: 65483 - DNA, 351 bp, Oryza sativa
  unsure (1)..(351): unsure at all n locations
  Clone ID: PAT_MRT4530_66527C.1
gtatagcggatgctcctacacctagccggtccgatcctcaaatcccacccagacccacgcatcctgaaactacctaacacactactagcccaccacggagattcccgtggaggcgtgcgacgacatgcgcctacagacctaaaactacacctgcttccatccatatcctttgagaaantgactatattatgagcatttacccattgatacactaccaaacatgcataggactacacattcatatattaaacctcaccgtattctgcatatctccttgtgtataacctacactaatttagcttaccaacactacactcactgcaataatattttccatccagtaattcactt

SEQ ID NO: 65484 - DNA, 1929 bp, Oryza sativa
  Clone ID: PAT_MRT4530_66528C.1
atgctgaccatcctgcgggtgcacctcccgtcggagatccctatcgtgggctgcgagatcacgccctacgtgctcctgcggcgccccgatggcggcatctccaccgaagatgtgcatgaggccatccctctagatgggcactttatgcggtcgaaatggtaccgcatacaaagtgatcgaagagtcgctgtctgcaatgttcatccaacagaacaggcaacaatacagtgcttggggtgtttgaagtcaaaaataccagttgctaagagctaccattgttctgctaagtgcttctcagatgcctggcaacaccacagggtgttgcatgaacgtgctttgagcgctttaaatgaaaatggcaacgaagaggaggagttatttggccgatttggtagtggcaatgcagggattataaatgccagtttatctggctcaacatcaaatattggacagagctcaagtgttaataatggacctacacctgtgtatcccactggaactgaaaagaattctggtgaaacttggtttgaagtgggacgttcacggacgtatacgccaactgctgatgatattgggcatgccctaagattcgaatgtgtagcagtggattcagaaacaaggtcgagtgtgggagctccaacttcaatcatgacatctcgtgtaattcctgctccaacacccactccgcgtcgtctgataccagtgaattcggctgatgtaatgggacactttgatctagacagccgaaattcttcttttgggacattcacagtgttgtcttacaatattcttgctgatacatatgcaacaagtgatacatacagctattgcccaacttgggcactttcatggccttacagaagacaaaatttgctgcgtgaaataattggttaccatgcggatatcatctgccttcaggaggtacaaagtaaccactttgaagaattctttgcaccggagcttgacaaacatggatatcaggcactgttcaagaaaaggacaactgaggtgtacactggcaatctccaatcaattgatggatgtgctactttctttcgaagggacaaattttcacatgtcaaaaaatacgaggttgagtttaataaggctgcacagtctttaactgatgcaattattccagctgctcaaagaaaagtggctttaactcgattgattaaggataacattgcgttgattgcagttttagaagctaagtttggtagccatggggctgataaccctagcaaaagacagctcctttgtgtggcaaatacgcatatcaatgttcaccaagacctcaaagatgtcaagctatggcaggttaacaccctcctaaaaggtttagaaaaaatagctgtcagtgcggacattccaatgctggtctgtggagatttcaatgcaacccctggaagtactccacatgggcttcttgcaatggggaaagttgatctgatgcatccagatctagcaatagatcctcttggaattttgcgaccagcaagcaagttgacacaccagcttcctctggtgagtgcgtactcttcatttgcaaggatggttggtgctggttatgatttggagcaccagaggaggagaatggaccctgcaacaaatgaaccacttttcacaaattgcacgagggatttcactgggaccattgattacatattttacacagcttgtgagttgttagtagttgaaaatctacagtctgacagctggggcactcatgatgaccatttagtgcagaattatgctgttgctataggtcctgacaaagcattttgtctgcagcttcatgacaaactctactgtagcatgtttaatatcctgccgataggcagattgattgctcctgccatccctggatgtcctatcttagatttagatattttaggacagatggattacgttactactgctctttag

SEQ ID NO: 65485 - DNA, 181 bp, Oryza sativa
  Clone ID: PAT_MRT4530_66529C.1
gggggcttaaacccccaaattttctaaacctaacattttttcctggaaatcccagggtttacaaaagtcccactttccaagggaaaaatccttcccgcctaagcgaagataagcataacatccttttgcttacaaacaatttttaaccaaaggatgatggttttaaaaccagggggttttt

SEQ ID NO: 65486 - DNA, 456 bp, Oryza sativa
  Clone ID: PAT_MRT4530_6652C.1
ttaaatcggattaaaacacttatatggattttaattgaattatgacgcaataatgaattatttttgaaaaggaaaaagggatttattgcgtcagcggctagggtttcgcggtggaccgggcgcacggcgacggttcacgggaacggacggccgagatcgatcttatccaaaacggacggccgagatcgaccgatccacggccggaccacgagagacgacgacgatgacgtcagcggtgacgtcaccaccggcggcggctcgggagcacaagctcgccggcgaacgatggcgcggcggcgcgaacggagggcaccaggacgtagagggcgacgcggcgaactcaccggcgaccaaaacggcggcggaagatcaacgaacggcgacggcgtcgaggaagaagcggcgtcgaccttcggttacagtaaataagtatttcaattagagtgtaatgctact

SEQ ID NO: 65487 - DNA, 2218 bp, Oryza sativa
  Clone ID: PAT_MRT4530_66530C.1
cgtttgctttggctcgagcccaacacgatctttggggggggttactttaaaaaggggggggctagcgacagcatcacaggcaggaatggcggggctcgcggtgtcggcttccccagctccggcgccggcgtccttccggccggcggcggcggcctcgcgcttcggcccgtgtgcacaggttgcaggacctgctgccaattttagaacacgagtttgtggactgagatgtttgatcgctgcaaagctgaagttccggaaggccttgaagaggcatggatggcagcttcgaaggaatctagaagtccgagccaatgataaagtgcctgattggttggaggctacaccactgactgagaatataatgtctcgggacgtacaactcgcgtatgattctggaggtgaaacatcaaatacatgccctgatactttggacagttcagtcattgagcaaagttcaatgcatcacaaacttaacccctctgaaacccatcctcctgtgctgaaggaagaccctgttctattcgacgacccacctgaaagcgcagcgcctctttgcattgctgtaattggagcaactggtgaactggcaaaaaataaagtgttccctgcactatttgctctgtattacagtggttttcttcctcagaatgtcggtatatttgggtattctaggaagacactaacggatgaagatttaagatccatgattgaagccaatttgacctgccgggttgaccaccacgaaaactgtgatgaaaagttaaatgaatttcttaaaaggacatactatatagatgcaggatatgacaacaaagatgggatggtgaaactaaattccaaaatgtcacagatagagggcttacatggttcattaataggcctatttgtttcaaagggtaattgtgcagcaaacaggatattttaccttgctgttccccaagaggcacttcttgatgttgcactgtcactagctgacagtgcccaaactatgcaaggctggaataggataataattgagaaaccatttggcttcactggtttgtcttcacatcgggtaacacaatcactgctgtcaagatttgaggaggagcagatttacaggattgatcatcttttggggaaggatctgattgaaaatctcaccgtcttgagattttctaatttggtgtttgaacctttgtggagtcgcacctatatacgcaatgtacaggtcatattttctgaagaaacagcagcagaaatccaagggagatactttggaaattatggcataattcgtgacatagtgcatagtcacattcttcaaacaatagcactatttgcgatggaaccacctgtaagccttgatggagaggatatccgagatgaaaaggtgaaggtgctcagatcaattcgacaggtgaaccttgaggatgttgttcttggtcaactgaaagatacctctgtgaaagttgacagatatacaaaatcattgacaccaacctattttgctgctgccatgtacattgacaattcgcgttgggatggagtaccatttttgatcaagacaggaattgggctcatggaaaatagagctgagattcgtattcagtttcgccatgttcctggcaatatctatcgtgaacgctttggccatgacatagatcttgacacaaatgagctgatcttgcgtgatcaacctgaagaagccatccttttgaaagtcaacaataaggtcccaggacttgggctccagttagatgcttcagaactcaacctgctttacagggataggtacaatgtcgaactgccagattcgtatgagcatcttcttcttgatgtgcttgatggagacagtcatctattcatgcgcagtgatgaagtagctgctgcatggaacgtgctaactccactaatccatgagattgatcagaatagaatagctcctgagctctacgaggctgggggtagaggacccgttaatgcgtactaccttgctgctaaacatgggattgttaaaattgtttccccagattgcaccacccggggcagcggaggcggagaaatgcatgtaacacctaaggttcatttagtgactactaccgtagtattggaaagtttgcccctttcaaattcttccgttggcaagatattgtttgtaaacaagtcgcatggactgttcgcgattgcaggtggccaggtggggatatgggcacggaaatttggcttaagggtctaa

SEQ ID NO: 65488 - DNA, 355 bp, Oryza sativa
  Clone ID: PAT_MRT4530_66531C.1
gaagggctccgtcatggacttcaaaagctgaccgctattggaacgacgacgccccgccggtcatgaacgcaggctggagagaggcaccacgcgttcgtcctgttggagaagaatgaccgtgggatgccaactatactgcagtggaccaccggataccacgacgagacgctctcagagtcttttcctttgttacaatgacactgaagacattcctcatttactgaatatgccatctgctgccatcgaccgaaactagctatctctaacgatactcgaacgattgccttgtctttgtctgctgctagatgacctgcgaaagatgatccctagtccagcgaatctatagctttgatga

SEQ ID NO: 65489 - DNA, 243 bp, Oryza sativa
  Clone ID: PAT_MRT4530_66532C.1
atgaagacgattgtgactgcacgtgacagcaacctcgacgatgacgaaggttgtgaccgagcttgggcgaggcggatccgtcacactgagcttaggaagggggctcagctgcagcgaaggggagaagcaacggcgattgaggagggccacgaaggggacggttcggtagaggtggatgaggcatgcttctaccttatgggccttgactatgggcctaaaagagatggatttggtcctcggtga

SEQ ID NO: 65490 - DNA, 111 bp, Oryza sativa
  Clone ID: PAT_MRT4530_66533C.1
atggcgcaagtcgcggatcagcgatctgcagtcgccggtgctgatggcatctctatcgatattatgcatagccaggcattatctcctagagggagcaaatatacaccgtag

SEQ ID NO: 65491 - DNA, 111 bp, Oryza sativa
  Clone ID: PAT_MRT4530_66534C.1
ggccggtcaaccccatcgaaatggtgttttatttgctttaatcattacaacatcttttttttgtatattgagcaaaatccaatgggtacaaaagactctgcaagtcataaa

SEQ ID NO: 65492 - DNA, 1140 bp, Oryza sativa
  Clone ID: PAT_MRT4530_66535C.1
atgcccgcggacttcggggcagaccaagatcggattcgacgtctcctccgctgtttcagtggcatcgcaatagcggtgttggtcgtagtggccgtgctcgtcttgtgcgcattggaggcctccaaggccccgcggctgtccgtcgcggtcgccatcgtctcgggcctcgacccggcgacggacctcgcccggccagcggtggacccgcagttcaacctcaccctccgcgtcgcctcgcggagcctcctgagccgcgcgtgcgtcggggtgagcagcacggccgtggccgtgtcgtaccacggcgtccggctcgccagcgcgcccgttgcgccgcgcgtctgcgcggcgcggaggaagtcggcggacgcggggccgttcgtggcgtggggctcctcggtgcgcctgccggggttcgcgcgggacagcctcgccgcggacatgaggaacggcgcggcggcgttcgacgtcgcgctcatggacgggcacctggtggtgtgcaggggcaggcgggtcggggacgcggacgccttgcaggctccactgcaacatataccatttttaaggcttcagaagctaccaatatgtcagatcaacgtgtataaaaacccaggccgccgtacccctgctttatccatcaaaaacgcgaggacgaagcgaatcgaatacaaacagaggctaaaaatcaacaagtactacgtcgccatagacaccgcctccggcctcgacccggcgacggatcttccctggccagtgctgacccctgagttcaacctcaccctccgcgtcacgtcgtggagcgtcgttggagccgcgtgcctggatcccgccatggacgtggcggtggcctaccggggcctcgccctcgcgcgcgcgtcgccgccgccgcgtgtctgcgcgcgggggtggggccggacggagcaggtgccggtcgtcgcctcgtcggggaacggagtgcgcctgcccggtttcgcgctgcacggcctcgaggcggacgcgtggggcggggctgtggcgttcgacgtcgcgctgactatgccgccgaagggcagagacaaccggcatcagctgtggtgcagagctgtgccggtcggcgatgacggcggcttggggatcccgtgcaatgcaaattcggagtactaa

SEQ ID NO: 65493 - DNA, 351 bp, Oryza sativa
  Clone ID: PAT_MRT4530_66536C.1
accattagttttatctttttagacaccaactaacctgtgctcattggtacacagggccgcgaaaaaaaaacacggccccaccgggggggggacaccacgaccaaaataaacgaccctcgcgccatcccaccaaacaaaaacgctgaccagggaaccaaaccacagtaaaagggccaccgccgaggacaaagagcccaccaaaaaggggccccagcagaaggccagaggccacaccctggacccccaagggagaaaaaaaacggccaccctgaaagcccctaccaccaacggacccacacggccaggaacaaaaggaccccccccggggggggaaccacggggggggggggc

SEQ ID NO: 65494 - DNA, 231 bp, Oryza sativa
  Clone ID: PAT_MRT4530_66537C.1
agctctggctctatttagccatcggtgatgcgctcggcggatggtgtccacgtcacatcaacactaggcactgaagctgtgctttaactcgtctacgaggacgtgggccgggaaatctgctgtatggccgcgggtgttcttgaggctgaccaaaggtggtcactactccatgtgacgtgcttcaagaaacagctactgacatgtattgtacactgccacaactagtggtgt

SEQ ID NO: 65495 - DNA, 385 bp, Oryza sativa
  Clone ID: PAT_MRT4530_66538C.1
agggaaatagaaactttattaaataggagagggggtgacaactagcaaaaaaaatgggaaactccaagctagttagttccaacagcagctgggtggaattcaatctcccccagggggacctttagggttatgggggggggtggctcctggcgcccgggagtaattcacccccacaagggggggcgccgccaccatgccctggagggacatttctttccctgggggacctttaggggtatgggggggattggctcctggggctggggagaaattcacccccacgtccggcggcgttggcaccatgcccgggaaggacaattctttccctgggggacttttagggataaggggggggatgggtcccggggccgggtagaaattcacc

SEQ ID NO: 65496 - DNA, 603 bp, Oryza sativa
  unsure (1)..(603): unsure at all n locations
  Clone ID: PAT_MRT4530_66539C.1
tacttggacattgatgtcaaggngagtcgcagaggaagagcgtaaatagtgcttggaggctgtgccttctcttcgtggtccgccgtctagttcttataacagaattcccgaagaaggattcacagtcagctctggtggattccaatattntatcagagtttcacttgcataatggtcatggaccaggcataaagtttaaagcaggagctatgccgaacgttcaggtccttgtatgcagtttccatgcatgcgaatcagtacgggtatatggtgattttgacttcggtgtccaacaccttgtcatctctcggtcgtatcaatgtcgagatttgttatacagatgaaagagttgtctttttgttggaggctgcagagtctggccatcaagaatgagatcaagcttcttcccaagcatccaatgtttatggattagaaggaagtttaatagaaattcctgtgatgtattatggcatggatatggataatgacgaccacaagagcttgaggaatcaactgggaggaatgtactctaatcctccttggtattaattaccttgttatcactaaacagttcatccatcccaaaaaaaaaaaaaaaaaaaa

SEQ ID NO: 65497 - DNA, 231 bp, Oryza sativa
  Clone ID: PAT_MRT4530_6653C.1
atgggtgtccggttcccgtcgcgccaatctgggcaccaccctcctctcgcaccgtcgggctgtgccaccctccccttgcaccgccgcgccacacctgggcactcgcctcgcgccgaccaggtcaccgccctcccctctcactatcgcacaacgccgcagccctcccctcgcgccgacccggccgccgcccttcccttgcaccacctggccatggccgtcctctcgcgctga

SEQ ID NO: 65498 - DNA, 207 bp, Oryza sativa
  Clone ID: PAT_MRT4530_66540C.1
ggcaacggacagcttatgattaccctaaaatctgattatccccaaacaacaaaatttttcataaatatcgggccaaccaaacaaggcatcactttttttttttttgggggggggggggggggataaacattataccctccatgccctttttttcaaatatatcaggctccataatgggacaacccggttttaatccaatagtcaaaa

SEQ ID NO: 65499 - DNA, 321 bp, Oryza sativa
  Clone ID: PAT_MRT4530_66541C.1
gcacgagggcagcccaacgccgatggtcagactcgtcaagtcggcagcaagcggcaggcacggcgggtcggacgcgggagagggagagcgagagaccaaccctagccgagcggccgtagcctgtagcatgcatggcatcgccggcggcgcgcgccgatccgccggaacggagccgccggccgcggcgacggcaaggggagggaggccacggtgcgaggggcttcaactcgcagcggcaggaagccggcaactgccaactggtctgcaaagagtactggttcagtggggcatacatacaacaacagctgaacgaaaagcaag

SEQ ID NO: 65500 - DNA, 2445 bp, Oryza sativa
  Clone ID: PAT_MRT4530_66542C.1
gtctcttcgtcctctacaccggcgagctctctctctctctctctctctctctctctcgtcaactccatagcgattccactagccgatcatgcattatattattttcttggatcgatgggtgacgaggagcccatggaattcattaacgttgatacaaatcgtatttcatttaagcaatctagcccttgcatccccgattggaatataggcttcaaatctcggccctccaagctccccggctggaaaaactggtatcggcctatgttggaggccaatcatcaagtatggtatgatgttggtatagctcagtgccttgctctatcattagctgagcctaaaaaagatgaatccttgattgcatcggccacttacctttggttcgatgccttgaacgttttcatgttcaaccacgcaccgatgaccccactttgctggatattgtcatgctaactgtcttggacatcgcctcatcggcaaacttgttcaatttgagggtaaaatgtgtcaacaagttagaaaccaagtctgttggcggttggtcaagctatatcgccaagcatgctagaattggagcattgaccgatagagagcacatagctttcaagaaactatggctggaaagatttgtcttctacgacacaacaacggttccaacatcaaatatgcaacacatcgcccaagctctctctgaagggaagttgcttcctttgggaaaatattttcttggcgccacttaccaacttctctagcaagcatcggccaaactgttagccggtcaacctatcggacacccgggtggcccatggtgacttgtacaactctggctcaagttctaccctatcgaattagccaaactgcccccctgccaactccagatttccaaccaattttgcaaaaggctatgatagaattgttcgctgatgcatgtcacttggcgaagcggcaattatctatcttggaatagccttacacctgaaaatttcaaactctagtttgataaattctgcaccgatttccctagggcagccagaaattggatcccttatgaagaattcaagggctacacgcgtccatcggacttcaatccgatcaacatcaattccaatgagacaagccgggagatcttcatatcggctatcaccccctacatccttcctactggcatcaccatgggtcactattctcgtgtctcatatgaattctatcatccatcgatggtgacccatcaacttgtctttggccaagtcccaatcacgctgcactttttcgacaaaatccagactcgagtacccatcacaagcacactcatgagcaatcggctcttgaatctcaacggtccagatcttggccccttcagagaaatgaagctggcatgcgaagaaacacagttccgccgaatcatgtctgagcacgagattgatgggcccacaagtcagtgcaaaccgacttaaagaggggccaaaccaccaggaaccatcatatgggcccaggtgccatcctctcatcaaaggcggtggtgaaagacggtggccatggtttggctgaactaggcttggcgcctccaacaccgagcttccacatggcgattccttcttcactcctaatggcagttatgtccgtttcccggcctacaactagggatgaaaacggatcgaatacgatcggaaactagctctatcagctatagcggtatccatacgattgcggatttatctgagcccgaagtagaagacgacctccccgacattaacctagaagtggaacaagtccttgtcgaggaagtcgcaaatgaggaaattgatgatgctgccaatggttctgcagatgaggagcctgccttgccacttgcagctggccgctcaacctcctttcctcattggcagacctcaagcgaacatgctccttcccactcgattcgattgtcgatagccatcacaccgatgaaggcccaaccccagactgctgctccaagaatcctgaatatcaccgatatcttttctttcgatgttcgccaattcattgatgacagtgaagacgacatcatgagcaaagcgccaacagcctacctcgagacctatcggatcaaagtcttcagggctcgatagcgtatggctgaccgcgtcgtcttgagaactgaagaagctactatcgaatctgatagacaattagccagagcagaaaaaaaccaagctcagtgagttagccgcggccctgagacaacccaaaagcaaaccaaagaattggacaagggagaagccgatctgcttgctgcgctggagagcacacggcaagagctagaacaaagccactatccgcaagccagctgatcggcgtaaatctattaagccgataccaaggtctgatgccgaagacgcaaaaatcatcgacgatgttgatcaaatacgcccgcgtgtggtatcgacaatccagaaatatctgggttga

SEQ ID NO: 65501 - DNA, 309 bp, Oryza sativa
  Clone ID: PAT_MRT4530_66543C.1
atggacctcgctgatgctctagtggtgctcctcatccttggattcctagagttatggctctcgtggaaccaccagatagccgccctcatcactcgtggtttccgcacattggcaactgacctctgcagctatgccgtcgccgctgccgtccgtcgccgccgtcgggtgcgcacggaggagaggaaccccgtccgccccttcgcagccgccgaagaccaccgaagcgccatcgccgccgtcaagccgaaccgtgccgccatagaagctcgtcgccggtcgtcatccgtcgtcgttcgtcgcagtggttag

SEQ ID NO: 65502 - DNA, 462 bp, Oryza sativa
  Clone ID: PAT_MRT4530_66544C.1
atggatctcccaaagtctgttgccgacgaagtcgctctggcgaagctacaacttgagtggtttactgcgagagagcaagtgttggggcgttcagaaggaggtactgatcttgagcttggcttcgggcaaatccatgttcaggccgcgctcatcctgtatatgaaggggactattgctgaagaagcaaaaaaaggtgagctccagatcacctcctgcatgctgttgctgtctcatgcgctcgccgagtccaaggacaacctcacttcactccgacaagcattgcacgagaactattggtgcctttatgtggtcgcgaagagcttggtgaagagcgctcctcatcccgaattcctcgacgagatcacggtcttggcgtccctagagtctcttataaccgagctagaggccgccgcaacctcctacgttgagcaagtcgctgaggggatgcggtccagaatctag

SEQ ID NO: 65503 - DNA, 432 bp, Oryza sativa
  Clone ID: PAT_MRT4530_66545C.1
atggacctcgctgatgctctagtggtgctcctcatccttggattcctagagttatggctctcgtggaaccaccagatagccgccctcatcactcgtggtttccgcacattggcaactgacctctgcagctatgcccaagacgaaaagtctaatttgcctccccgtgtactgttcatcttcaagcttggacagaagcccgagctgccgtcctgtgctctagccgacgccgcttcctccaccaaatccgccgcatcccccgtcgccgctgccgtccgtcgccgccgtcgggtgcgcacggaggagaggaaccccgtccgccccttcgcagccgccgaagaccaccgaagcgccatcgccgccgtcaagccgaaccgtgccgccatagaagctcgtcgccggtcgtcatccgtcgtcgttcgtcgcagtggttag

SEQ ID NO: 65504 - DNA, 835 bp, Oryza sativa
  Clone ID: PAT_MRT4530_66546C.1
gtggtcggcgtagcggcgggtgcggacgtcttcttggaggagactagcggcgtggtgggggggagatttcaggctcgcagaagcagtcgcctcgctgccgcccgtcgactgcgaccttcccgtccgcaccctccgcgatggccgccgcctgaaagcccgaccccgcgtcgccgccagaggcgccgtcggcgaagaagggggttttcatgcgccgcatcttcccgttcctcctcgcatgattcggcaaacactcaatgttctcactttcggagcctttgcttccaagcgaaattgcccttcctacctcccgtgtggtagccatgacagggtagatgcggtgccgctgcagcggggcggcgggcggcggtacggtggtggctgctctcgctcgccgcgacgggcgccaccatcaccgccccgggcacgctgctcgccgtcgccctccacgtctcctcctcctccgcctccggccccgcttcctcctccggcgtgccctaccgccactccaaggtaatgtgtgctgcatcaatgtgcccttctccgtgccacggccgcttagattgaactctcggggtgtgctactaactgacgggttgcctcctcctcgtcgccgacgccgcagcagccgcggaaggccgaggagctgcgtgccacgtcaatgccacgtaggataaggacctagtcaaaccaaccacgtagatgccacgtcattcaaaaccgggtacaatactgccgagggatctcgtctgcacggatttggtaagttgggggatgcgttgtatctggttttgtggactgaggacgaaaatcgggcgacaaattaagggacctaaag

SEQ ID NO: 65505 - DNA, 291 bp, Oryza sativa
  Clone ID: PAT_MRT4530_66547C.1
gggatatatacaatggaacgggaaaataattgggtgcagatacggacacagacacacacgaattgacggtaccccacatacatacccacgttcatgcaagaagagaaaactgcaaagaaacaatggaggagacgatgccaacataaagaaagcggctatcgattagattacagaccgaacgatctcattgaaacgaccttaaagaattttacatggcacatataagtgtgtatatgtgtaccactagatagtcgagcttagcttgagtagacgaacctgccatttttatta

SEQ ID NO: 65506 - DNA, 255 bp, Oryza sativa
  Clone ID: PAT_MRT4530_66548C.1
atgccgaagaggtcggagtgctggcaaggctcaaatccatgctggcgcaaggacatgactacatgggaggggaagggaaaaagggcggcggatgctccaaaccgggagggagagcacgcgtacctcctcacctgtgaggcgctggatctaacagacgatgaaacttggacgacgaacgtgccactcatggaaggaaacaacgccagaggggaaacactgagggaggccaaggctcgaaaggatagtccagcatag

SEQ ID NO: 65507 - DNA, 122 bp, Oryza sativa
  Clone ID: PAT_MRT4530_66549C.1
gtccccacctcgtgttggggacgatctataagttgtaggtcaacaagctatcgggtacgccacgcgtctttgcgtgattctgacgtcaggccttctttgcagcttttggacattttatgcag

SEQ ID NO: 65508 - DNA, 326 bp, Oryza sativa
  Clone ID: PAT_MRT4530_6654C.1
ttttcttcattaattgcatgctcgcacggggtcctattaggttgcttacgcatcttctgcatacatcaactcaaaatggggtgcacttggatatggacgtttttgtgccacaccaataacggcacggcggcgctgcggcggatgcacgacgccgacccggccctgtacctctccccctccgccgacctcgccgccgtcgaccgtgaggcctacaagcacctctacgcctcgctcgtccccttctcccccgcgcagccgcccccgctctgcaacctactggcaggccccgccttcgacggacagcagattttgtcccagattgagct

SEQ ID NO: 65509 - DNA, 366 bp, Oryza sativa
  Clone ID: PAT_MRT4530_66550C.1
atggatcatttcgacttgctggcattgtcaggcaacaacgagacgctggccaagttcgcggcgtttgtggtggtgcaagcgctggtgtacctcatcctctccagatcctccgccgtcttcttctccggcgccggcgccggcaccgccagcttccggcggccggccgtggagaggtcggagagcgcccgccgccgcatggccgcgctgctcgccgccgagatgacaccacgacggtccggtgacgcaccgcctactccggccggaatccagcggcggggacggcggtcgaacgacgacgacggcggcgacgtttgcgtggacgtggagctggagcttatgctgattcgatgctcgttttcgtcatga

SEQ ID NO: 65510 - DNA, 438 bp, Oryza sativa
  unsure (1)..(438): unsure at all n locations
  Clone ID: PAT_MRT4530_66551C.1
ctcctttcgcccctcttgacctcgagttggacgcgccgggcgccgctctccagtcccgcgcggccagcggtcgtgtgtgctttcgcgcggcttccttccgcgccggcgaccatggcgtacgaagtcgcacgtccttctcatccctaggcgcgcttttcggtctcctcgtctttgcgctcgccctggcttctcttgtngatctggtcgctttttctatgtgcctttacctcctaggtcaccggacgctttgttccctcgcggagttcctagctcgtgctgtcttactgcacgacgtgcccatcttatgagattgtttccttacgcgcgccttactgtgattgcggttctgggcgttcggagccgtatccgacattttcgtcgaatctggctggccgtttctgtcgcgcattgcggggcctatagctgcttctgccttgc

SEQ ID NO: 65511 - DNA, 250 bp, Oryza sativa
  Clone ID: PAT_MRT4530_66552C.1
aaatcagtgaagctgagatatagttgtctctgtactgcagcacttgttccttgactggtattgggtgaacatcaaatatgctgccaatgttcacctcatctctactttttttttcgaccttaccgtttcaaatagatgtagtgtaggaataattgatatcgtactatgaagctcattcttagatgataaaattgctatgcaacacggctagtaaattagaatgtcagctgattgctctgaaaaaaaaaaa

SEQ ID NO: 65512 - DNA, 195 bp, Oryza sativa
  Clone ID: PAT_MRT4530_66553C.1
atggttcatgactcggtcggagttgatgacaccttacgtgcatcaagtagtggcgctccggttggcgttctcctcgagcggcaagccaatgagtgtgaagaagataatagcaccgacaagagcgaatggatgtcggcggtgtcgcggagaagaggctgcgaccggcaaggcgacaacgtccaagcatctcagtga

SEQ ID NO: 65513 - DNA, 243 bp, Oryza sativa
  Clone ID: PAT_MRT4530_66554C.1
atggagatcctgtgcttggtggcgtactcatcaagcacacactccttcatggccgcagcggccaccggcggcggcgtagacacacacaactccagtgtgtacttcgcgagcggcctacagaacaagcacaatcatcgcaacgcgcgtgctgttgcggatcccggaaggatggaacataggacgttagggtggatagcttacacgatgtcggtgtcaaacgcgtcgactaaccgtgccgttaag

SEQ ID NO: 65514 - DNA, 490 bp, Oryza sativa
  Clone ID: PAT_MRT4530_66555C.1
ggtaatacctaatttagatttggtatcatctagaatattcttcactacaattttacattttagctatatattggtagcaaaccaaatatgatcaatgcaatcttactttaccaaagatttggtagtgccaaaacttgcctacattttggcactaccaaaaaattggtagggtaacaatccaaataggccctaaatacatcaggttacaaggccaattcttccaatacacttatcttacaaacatgttatgccaaaaggcacagcaaagcaaaaggttgcattttaagaaagcaccactttagttttgctcttcacttcttgtcatctctaaggacgacataattgtggccattagtcttctgaatcttcgatattttcttcagaatttcagcaaaagcattcttgtcctctggacctcgtagtctagacttaaatctagataccaaatcttgtgtagtgacaggagcaacagcaagaagaacagtcctga

SEQ ID NO: 65515 - DNA, 2340 bp, Oryza sativa
  Clone ID: PAT_MRT4530_66556C.1
ggccggccgggctccggcgcgcgccttcccgtttccattttcacgccaccccaccacccgcacacccacactccacgagagacgacccaaaccggccgccaccgccgcagcgatcccccacctccgctcgccggaaggggcgccgtagccccgcccctcccctcccccctctccggtggctggcccctctccggcgatggggagcgccgacctggtgctgaaggcggcgtgcgagggctgcggctcgccgtcggacctctacggcacgtcgtgcaagcacaccacgctctgcagctcctgcggcaaatccatggcgctctccggcgcccgctgcctcgtctgctcggcccccatcaccaacctcatcagggaatataatgtacgggccaatgccaccacagataagagcttctctattggaagatttgtgactggtttaccccctttctcaaaaaagaagagtgcggaaaacaaatggtctcttcataaggaggggttacaaggtcgccagattcctgagaatatgcgggaaaaatacaataggaagccatggattttggaagatgaaactgggcaatatcagtatcaaggtcaaatggagggatcacagtcatcaacagctacatactatttgttgatgatgcatggcaaggaatttcatgcatatcctgctggttcttggtataacttcagtaaaattgcacagtacaaacaacttaccctggaagaggctgaagagaagatgaataagagaaaaaccagtgcaactggttatgaacgttggatgatgaaagcagctacaaatgggccggctgcctttggttcagacataaagaaacttgagcctacaaatggcactgaaaaagaaaatgcccgccccaagaaagggaaaaataatgaagagggtaacaattctgataaaggcgaggaggatgaagaagaggaagctgcacgcaaaaataggcttgcgctcaacaaaaaaagtatggatgacgatgaggaaggtggaaaggatctggacttcgatttggatgatgaaattgaaaaaggtgatgactgggagcacgaagaaacattcactgacgacgatgaggctgtggatatagacccagaggagcgggcagatttagctcctgagattcccgctcctcctgaaattaagcaggatgatgaagagaatgaagaagagggtggtctgagcaagtctggcaaggagttgaaaaagcttcttgggaaagctgctggacttaatgagtcagatgccgatgaggatgacgaagatgatgaccaggaggatgagtcatctccagtgcttgctccaaaacagaaggatcaacccaaagatgaacctgtagataacagccccgctaaaccaacaccatcaggacatgctcgtggcacacctcctgcatccaaatcgaagcaaaagaggaaatcaggtggtggtgatgattcaaaagcatctggcggtgcagcttccaaaaaagcaaaggtggaatctgatacaaaaacatcagtggccaaagatgagacaccatcttcctcaaaacctgcatcgaaggccactgctgcatcaaaaactagtgcaaatgtatctcctgtcacagaggatgaaatcaggactgttcttcttgctgttgctcctgtcactacacaagatttggtatctagatttaagtctagactacgaggtccagaggacaagaatgcttttgctgaaattctgaagaaaatatcgaagattcagaagactaatggccacaattatgtcgtccttagagatgacaagaagtgaagagcaaaactaaagtggtgctttcttaaaatgcaaccttttgctttgctgtgccttttggcataacatgtttgtaagataagtgtattggaagaattggccttgtaacctgatgtatttagatcttttttaacttaaggtcattgatcacttaaaaaaaaaaaaaaaaaaaattagacatcctactggaaaccagctgtttctaaaaaaaaaaaaaaaaaggattgttaccctaccaattttttggtagtgccaaaatgtaggcaagttttggcactaccaaatctttggtaaagtaagattgcattgatcatatttggtttgctaccaatatatagctaaaatgtaaaattgtagtgaagaaatattctaggatgaataccaaaatcttaaattaggtacttaccaatgaataaggcttcgatccaaattaacacaactactattcaaattccaaaaatattggtagggcatgtttttggtaacaatccaaataggcccttagatcttttttaacttaaggtcattgatcacttatcaatgtt

SEQ ID NO: 65516 - DNA, 1449 bp, Oryza sativa
  Clone ID: PAT_MRT4530_66557C.1
atggagagtagctcgtcggtgtcggtgtccgacgagagctcggaggcgaacggcggcgggtgctgctcgtcgtcgacgacgccgagcatggacgcggtgaacctgagccggactttctccgacgtgtcgtccttctcggaggagcatggcggcagcggcagcagcgtcgaccacagtggcccgttcgagccgccgtccgccgccgccgtgtcgaggctgatcggccgccgctcgccggctgcggcggcctccgctctcagcctcagccgcctcagcatgaagccccgggccgacgtgctcgaccggcgctccaccgacgacgagctggagctcgtcaaggagaggttctccaagctcctgctcggcgaggacatgtccggcggcggcaagggcgtctgcaccgccgtcgccatctccaacgccatcaccaacctctacgctaatgcagccacggtgttcgggagttgccacaagctggagccattgccggcggggaagaagacgatgtggaggagggagatggactgcctcctctccgtatgcgactacatcgtcgagttctacccctcctcacagactctccccgatggcaccaaagtcgaggtcatggccaccaggccaagatccgacatctacatcaacctccctgctctggagaagctcgatgccatgctcattgagatactggagagttttcagaaggcggagttctggtacgcggacgccgggacgaggtcgttcgggtcggcgacgtcgtcgtcgacgatgtcgtcgtcgtcgttccggcggtcgacgcaccggaacgaggacaggtggtggctgccggtgccgtgcgtccccgacggcggcatctccggcaaggcccgcaaggagctccagcagaagcgcgactgcgccacccagatccacaaggccgccgtcgccatcaacaccggcgtcctcggcgacatggaggtccccgactccttcatggccatcctccccaagagtgggaaggcgagcgtgggggacggggtgtacagggcgatgctgggggcggagaagttctcgccggagtacctgctggactgcctggacatgtcgtcggagcacgaggcgctggcgatggcggacagggtggaggcggcgatgtacgtgtggcggcgcaaggcgggcgccagccacgggaggtcgcggtggggcgccgtcaaggagctcgtcgccgacgacgaggagcaggacaagaacgtgatgctggcaggccgggcggagagcctcctcctctgcctcaagcacaggttccccggcttgtcccagaccaccctcgacaccagcaagatccagttcaacaaggatattggtcaggcaatcctggagagctactcaagggtgctggaaagcttggctttcaacatcgtatcatggatcgatgatgtcctttttgctgacaagacggtcaggaaacagtga

SEQ ID NO: 65517 - DNA, 345 bp, Oryza sativa
  Clone ID: PAT_MRT4530_66558C.1
atgtcggtggacttccgacgcagaggcgtgggtgacaatgctaagggcactggtaggatggcggcggtggaggtgcagctcccaagaggcaacgaccctaggggtggtagctacccgtggggcttctactcccaagtccggccgatgacagcgagggcgatggtccttttcctgcatgtggtgtggatggcggtggtgatgattcggacgcatggatcagaggtggatgcaataggcaggacaacgacgagcttgcttgcagtgctcacggctaccagggaggtacaatctggcctaatactcagatccaacgttcttctagtgagcaaggggaggagcaaatga

SEQ ID NO: 65518 - DNA, 2200 bp, Oryza sativa
  Clone ID: PAT_MRT4530_66559C.1
gttttttttttttgtttcattcaaaactatttcatttacttccttgtgaatcagtcatattttttttttttttttactaggattgaagattcatttatctttgaattttaaccacttacaagaaaccaacccttttgtttctttccttctctttcctcacccacttaatcctatagattttataattcaagacaccacagatacaaaaatacaagagagaaatgatgaggcagaaaaaaaaaacccagctaaaagcactccaccaattaattatctgccattgacataattaattaaccacccaaacgaacaaacttcacttcacttgcatctcagttggcggctgcccccttgaacctgtaccacttggcgcagatcatgaagtagatgatgttgaagatgccgatgccggcgatcatccagtagaagaggtcgagcctccccttgttgaggtcctgcgccagccagttgctcccggcgccggtggtccggtgcacgatggtgacgaggaacccactgaggtagttccccagcgccaggttgcagaaggcgagcgcgccggccacgctccgcatgtgctccgggatctccttgtagtagaactcgatctggctgatgaggttgaacgcctccgagagccccagcaccatgagctgcggcaccatccacaggctggacatggccgagatggcgcccccggtgatggtcgtccccagcgtcggctgcgtcagcgcgatgtgccgcctccggtcctccaccacggccgacatcaccatcgccaccgtcgacagcgcgatcccgatcccctgccgctgcaggagggtgaggccctcgtccttgcccgtgaccctgcggaggcgcggcacgaggaggcggtcgtagatggggatccacagcgtctgcgccagcatggcgaacaccgtgaacgacgccgcggggatctggaagctccggccgaggtgtcggtcggactgcagcgcagacaacaccacgtaggtcgactgctgcacgacggcgacgtagtagatgatccccgtggaccagacgggcacgatgcggatgaggcacttcacctcctccacctgctgcacgctgcacagcctccacgggttcgacggcgcggcgcccccggcgcgcacgtcgtcggggccggacacgatggccgccttgtcgaggcaccggaactggtccgtgtgcgccagcttggtgacgatggcgctggtgtgcggcgggtcgaacaggtcctgcttggggtccttgggctgcttgagcgaccgcttcctcgccgcggcggcgaacacctggacgatgctggtgaagggggagccctcgggggtgacgcggacgtagagcctggtgcccatgaagaagaggacgcaggcgaggagcatgagcgcggtggggatgccgaggccgatgggccagctgacgttgctctggacgtagatgatgacggtggcggagacgagcatggcggaggtgaaggtgaagtagtaccagttgaagaagctgttgatgccgcgcttgccggactccgtgtgggggtcgaactggtcggcgccgaacggcatgctgcacggccggatccccgccgaccccagcaccaggaacgcgaacgacatgaacagcaccgcgaactgccccgacgtcgccttcgagcacgtctcccccaccccgcactccgccgggtgcagcccgtccgcggcggccgtcatcgtcagcaagaacatgccgatgagggaggcgacggaggcgatggcgagggcgaggtagcggccgaggtaggcgtcggagaggaaggcgccgatgatgggggcgaggctggtggtgccgttgaggccgttgagcagcgtcgccgcgtccacgctccgcatgtggaacacctgcgtcaggtacaccagcaggttcgccgacgtccccagcgtccccagcttctcgaacgtctcgttccctatgatgaagggcatggccctccagccgtggtacttgagggcgggcttgtcgccgccgttctccagcttgtcgacgtccatgctcttcagcttctggccggcctcctcgccgccgccgccgccgccgccgccgccgccgcgcatcctctctcaccaaccaccacctctgctctcctccagtagaagcgaagcgaccgacgcgggggaggagacagagtgagaggcccccggatccccgcagcccgggg

SEQ ID NO: 65519 - DNA, 376 bp, Oryza sativa
  Clone ID: PAT_MRT4530_6655C.1
atggtcgccgccggcgaccaacggcgcggcggagtggcacccgagagagaggaggaaagggggaaggcgaacggcggtcttcggctcacgccgggacaacgacgacgacgagaatggcggccgaagcggaagaaggcggcggcgcggttcgggaagacgatgacgacggtgctccggcggtcggcgggcgaagtggaggcgcggacggggtcgacggcgatgcggcgatgccgagggaggtgtcgccgagtcgggaggaagagcggagcggcggcggcggctaaccgaagcacggcggcgacggaacggagctcggcggcgacggcggagagagaggagcacggtgcgagcacgattccgacggcgagagcgagcg

SEQ ID NO: 65520 - DNA, 2196 bp, Oryza sativa
  Clone ID: PAT_MRT4530_66560C.1
atgcttccgctctcgctcctcaagaccgcccaggggcatcccatgctcgtggagcttaagaacggcgagacgtacaacgggcacttggtgaactgcgacacgtggatgaacatccacctccgggaggttatttgcacctcaaaggatggtgataagttttggaggatgccagaatgttacatccgtgggaacaccatcaagtatcttcgggttcctgatgaggtgattgacaaggtccaggaagagacttcaaagagcagatcagaggcattgggcgtggccaggatgatggtggcagcaaaggcggtggtggccgtggaaggggaggaattggaggtaaaggtggcatcaaaggtgggggccgcggacgtgggtgagagggaagtagttaccagtgaagaggcagcggttggcctgtctcgaaacaatttgtttgatgtctggaccctcgactatattgaatattattgtggttattactttgacctgttcatcgcagagagccaggagaaggcatccgcatccgcatctgccgccgtcggtgggggcggagaccggagcatggcggaggcggaggagaagcgggtgggggtgggggaggcgcgggcgccgctcgccgtggaggcgctccgggggaagatcgtggagaaggtgaaggggaaccgcgtcactctcatcgtgggggacaccggatgcggcttgagtgctggaggttttagcgagttttcaaccttggatagtgtttttgcatctttattgcaagggaaagagttctatggttccacagttcctcctggaagaaaacatggaacccattctatgcacgcagccaaggaggttatactggcaacaaacattgcagaatcatcagtcactattccaggagttgcttatgttattgactcctgtagatcactgcaagtttattgggatccaatcaggaaaacagactcagctgagcttgtatgggtttccaaatctcaggctgaacagcggaaaggcaggacagggcgaacctgtgatgagtccagagctatgaacgatcctcatgtcctgctgcaaaaagttcttgacccgccagattcggatgttgttgaagatgcattggaatctcttgttcaaattcgtgctttagataagccaacctctcctagagggcgccatgagccaaccttttatggatgtttgcttaatagtttgccactctcatttgacgcttctgttctagcccttaaatttggtgatactggctccatctgtgaaggaattctgataagcatcatgctggacatccaacccctgcctatcgtccaaccttttggtcaccaacaattgtgcaaaatgtatagaaacaattactttgaggaggagggtatcgacctgcaaactggcaagaaggaagctgcacttgttggaaatctttgtgcatttcaattctggcagcgtatgtttaaggacaagtatcgtctggattgtctgataaatgtggtgaacactcatgaaccgaaggcatctaatggttttgttgctaaacctgaagatgagtggtgtgctgcaaccccttatgtttctccagctgattttggaaccactactgttgttaaaacactgaagacacttatcaaggagaagtttttccagcatattgccatcaagaccttgtcagaaaagatgtcagatttgcaggtcatcgtgatcatgaataacgcaaaatttgttcagttacaggtcgaaagattggcaagagagtgcttcttatttctgggtgaatcatttatgtttgatgaagcaactcttggatggttctcggatacccctaattacccgagagggatgcaagtatcagcaccagttgcttacatctttagcatgcatcctcctactggcattcagtttgggattaaaacaaaattgaaggacagtctgatgatactgaaggacggcaaggcgacgaacaccaactccggggtgcgccgccgggtccagcgtgtttatattgtatgtaggggtaaaaacgggcaggctatggtggtggccattgaaactgtggctgatgcttccatgcctgctcctcttcccccggtggccatcctggatatcaccgggagggatggaaagacgggaagagagcattccctggttagtttggttgaaaatgtctataatacccttgaggttggaggagctgaaaactaa

SEQ ID NO: 65521 - DNA, 657 bp, Oryza sativa
  Clone ID: PAT_MRT4530_66561C.1
atgcttccgctctcgctcctcaagaccgcccaggggcatcccatgctcgtggagcttaagaacggcgagacgtacaacgggcacttggtgaactgcgacacgtggatgaacatccacctccgggaggttatttgcacctcaaaggatggtgataagttttggaggatgccagaatgttacatccgtgggaacaccatcaagtatcttcgggttcctgatgaggtgattgacaaggtccaggaagagacttcaaagagcagatcagataggaggccaccaggtgtaggccgcggaagaggaagaggtgatataggtactaagcctggaggcagaggcattgggcgtggccaggatgatggtggcagcaaaggcggtggtggccgtggaaggggaggaattggaggtaaaggtggcatcaaagtagttaccagtgaagaggcagcggttggcctgtctcgaaacaatttgtttgatgtctggaccctcgactatattgaatattattgtggttattactttgacctgttcatcgcagagagccagggaggaattaagtctcagacagtcgcaccattttaccataaaatggtgaccactctcgcaactgctgccctgataaacggaacggccagcccgaatgcatttacatataactaa

SEQ ID NO: 65522 - DNA, 365 bp, Oryza sativa
  Clone ID: PAT_MRT4530_66562C.1
cccacgcgtccgcccacgcgtccggccaaccttttatggatgtttgcttaatagtttgccactctcatttgacgcttctgttctagcccttaaatttggtgatactggctccatctgtgaaggaattctgataagcatcatgctggacatccaacccctgcctatcgtccaaccttttggtcaccaacaattgtgcaaaatgtatagaaacaattactttgaggaggagggtatcgacctgcaaactggcaagaaggaagctgcacttgttggaaatctttgtgcatttcaattctggcagcgtatgtttaaggacaagtatcgtctggattgtctgataaatgtggtgaacactcatgaaccga

SEQ ID NO: 65523 - DNA, 384 bp, Oryza sativa
  Clone ID: PAT_MRT4530_66563C.1
gtgttgtttctcgccacctgccgatctgcctcgccgtcgactagaggagtgagctggccgccggcgacccaggccaacccagccgtctcctcctgcttctgccactcgccatgccaggctctccgatccaaacgccccctccagaacccaaaccccaccgccgtcgtcgcctactctgggtgccggctctcctcgccgacgccgtcgccgtcctcctcgccacctcccccaatcctctcccccgactcctgcgatccctcctcgggccaaatacctccctcctccgctcgaaagagagaggtcctccgtacggcacctcgcccgacgcgcgacgcccaccatgtgttctatggatggcccctctcgcctccggcggcggctact

SEQ ID NO: 65524 - DNA, 951 bp, Oryza sativa
  Clone ID: PAT_MRT4530_66564C.1
ccggccgggtttttcttcgttgctcgcgagctcttcccccctcgcctcgcctccccacccaacaagcccgcggcggcgactagggttttgaccccccggaatcccccctcctctcgccgcctccgcctccgccgccgccgccttcctccccgcgccggcgacgatctgctcctcctcccccgccggcatcgctgtttccggatctagcgcaagatgcttccgctctcgctcctcaagaccgcccaggggcatcccatgctcgtggagcttaagaacggcgagacgtacaacgggcacttggtgaactgcgacacgtggatgaacatccacctccgggaggttatttgcacctcaagggatggtgataagttttggaggatgccagaatgttacatccgtgggaacaccatcaagtatcttcgggttcctgatgaggtgattgacaaggtccaggaagagacttcaaagagcagatcagataggaggccaccaggtgtaggccgcggaagaggaagaggtgatataggtactaagcctggaggcagaggcattgggcgtggccaggatgatggtggcagcaaaggcggtggtggccgtggaaggggaggaattggaggtaaaggtggcatcaaaggtgggggccgcggacgtgggtgagagggaaggtcacttgtgggaatgccgcttttttaaggctttgtgtcacatagattgctttaggagggtgaagaatggactggtggagtaagcattgctttgctttatcattttgtggtatgaccgaaaaatgtttcatgggttcagtagttaccagtgaagaggcagcggttggcctgtctcgaaacaatttgtttgatgtctggaccctcgactatattgaatattattgtggttattaaaaaaaaaaaaaaaaaaaaaaaaaaaaaaaaaacaaaaaaaaaaaaaaaaaaa

SEQ ID NO: 65525 - DNA, 1329 bp, Oryza sativa
  Clone ID: PAT_MRT4530_66565C.1
atgtcccaaccggcgagcgccgccgcggccgccgccgccggggaggaggaggaggaggacgccgcctgggcagacgcgctggacttcgacgactccggcttcctccgccgcggcccggcctcctctccctcccgcctccgcccccctcgccccgatgaccccgcgccggccgcctcgctctcccagggcgcggcgcgcggcctccgctccccgccccacctggcttcgtccggccccgccgcccgcggccatgccaccgaccccgacttctcgctcgccccgtggctccacgcgctgggttccctcggtgagggtggagtggaggcggtgaccggatcagacattccgtgtttggttttgcgttttcggttgctcatcgtggcgtgggtggtcggcgtggtgacgtcgtgcgcgccgaacaggctcggtgatctcttcctttctctcaaggatccaagtggtacggttggtgcttcagttcaccagaaagtatttacaaaggaggataacatggttgtatctgtagggtcttgcattgttctgaaaaatgtagctgttttccgtccatctcacaagggttgctatcttaatgtcaccaaagaaaatctagagatgcttgtgccaaaggacttctgcttcccatctaagcaagtgttttcatcaagtccttctgaaagtcaacatcctgtaaagtgtcaagaaacacgggattcttcatgccaaggagataaccgcatcaggaaaactggagttgaaacatacggacaaacaacaggaaatgctgttcgagatagtacgttaagaatggacaatggcagtactcaaggtgtaggaaatcacctagatacaaggatgaaggaaaaagatataaatccttcaaacaagaatacaccaagctacagtgccgatcagcaattccaaaaaactagttccagttcagctagttctgatgaaaagctgagtcgacctcttgaaggtgaacgggtgcaccctaatagcaaaaagcaaaggggtgatgcggtattgccagataatgttatgtcaagtacgaatattgagacctatgggttagccaataatctaaacattggtctggatgatgtcgcacatcttgttgagcacgcttcaatcaaaaaacccaatgagcatcagcaaaaggacttcattactggaactttgggcattgtcctgccaactcaagaaaatagctctgtaagtaacagtgatgcaactactctcagtgcatcgttgcattcacagccaaataagatggcttctgtaactgaatggacagatgatcagctatctgaactgtttgctgactattag

SEQ ID NO: 65526 - DNA, 380 bp, Oryza sativa
  Clone ID: PAT_MRT4530_66566C.1
aagacaatgaggataataagattgccttattacacaacataataaggctttgtgcatatgcaaggcggcgagaataacttacttgcaagttgagctgcccaggaactgttacaaaacggtgttccaggattgtatgaaagccaagcgcgtttgcaccctaactaggatctggcaacctgctaaagctaaacagattaacgacgaatctaacatacttagggagagagaacaatctatgctagcagattcagagcttagagccaccaacaaaatttttttgatgagcaaaggctagagatttgacttaccattacctgcgcgcatccggaccagatggtcgagcctgactttgaacacgacttagtggctgaccagaaatg

SEQ ID NO: 65527 - DNA, 417 bp, Oryza sativa
  unsure (1)..(417): unsure at all n locations
  Clone ID: PAT_MRT4530_66567C.1
ccgacggccatggcctcttccttcccatccgcaataatgattcctcttctgcctcttcttcttcttcttcttctcgtgtgtactcgcggagcgtcgctaatgctaacaaccagccgccgccgggcgcgggtacggacggcctactgctacacgcgaatgttcagcttcggcgactccatcaccgacaccggcaaccaggtgagcttcttccccaccgcacccgccgccaggcaccctacggcgagaccttcttcggccaccccaccggccgctacagcgacggcaggctcgtcgtcgacttcctagctgaggcgctggggttgccgtacttgacggcgtacctccgggggaagacggcggaggactttcggngggggggccaacttngcggtgtccgncgnacggggnttgaagctt

SEQ ID NO: 65528 - DNA, 518 bp, Oryza sativa
  Clone ID: PAT_MRT4530_66568C.1
ggaaaaaaagcctgatttctcattcgggaaaggacggggcccggaccccctttctttttacaggtacagatattaccccctcccccatgtggatcttacttaccccgactggcctcaaaagggccctcaagaccaaaaaaaaatccccgggcaggttaacccccaggcaggcaaagttacccccggtgcataccccggatcaggcaaatcctttgccatattacagggttcttccatcagacaaatcaggaacggggcccaaccttggaaaaaactgaaaacgggatcatcccccgggggcccttggccccgtaaaacccgaccctgccaaacctcgggggggggccgttcatgggggcgttaacaaaaaagggcacctggtgcctttgcccggtggggataaaaaactgggccggcgacccggaaacgggaaccccgtaaggggccctgtaactgaccgggtagcgctcgtccctccccacgttggttacagtttttgttatcggccttgacggggg

SEQ ID NO: 65529 - DNA, 3231 bp, Oryza sativa
  Clone ID: PAT_MRT4530_66569C.1
tcaaagcaagtccctggtggctcgtctcattcgctcgatgccgacgcactccatcgcctcattgccactactaccgcatcggtaggcccagcacccctgtccccatgcctcaccatcgccacgtaggggtggtaatgggtcaaggcccatgggctctttcacaaccctttcagagacaggtccaggactagcattgctggaatcatttcttgaaactttttgtcttttgggtgtgctagcacccgctgcacaactagttgaacctagtggtctcccttgtttgtcactattcttcattattttctgggaatttaaaggacattttggagatgttgccctatggcccatgccaagacagctcttgcactgaacctgccacttgcctttggtcctaagcttgccttgttctttatcaagacacccaactatcatgttcttcctttgcttctctacgtctttcttagtcagaggtggcaacaaattgaaaccaagattgacttttggccattgggacttatctgaaagtggatgaataacacctgcatatgcaagcttatacttttgcactgaatagcaaggatccaaataatcagccattctggggtttctagttgatattatgagagctaatgcatgtgggcatggtttgccagaaacttgccactctctacaggtgcatgtatgttttgcaagattgaccctatgcctaataatctcatgttcaggagtgatctcagccacctctgcttggtctctatcaccttgaaccaccctcaagtggcccaaggatctagtcattgcattgagttgacgaactataatagggagcatctcaccatctagcttctcacctatcttctttctcctcgccaatagatccattatttttgacctgatagcatctgcaagctcagcaactggaagatccttcatatccttaatccatttgttccataaatctgccagattattgctaatgaagtcacattttatctcttctgagaacttgctcctcatccaaagcagtttgtgataggtttccaagtatggtttcacatctgaattagtctcatggattatattcatgtagtgctcaaacctatcttgcatgtaagatctagctgcagggtacatgttcccatacatcggacctgggaacttctctacgaaattctgcatcaagtgacaaaagcattctctatgctctgcccaaggaaaaacacttttcacagcattctctagccccttacaagcttctgagcttattgctaagtgtgatggtttgcctattgccttgtgaagctgttgcataaaccaagtccaattgtcagtggtctcactctgaaagaatccaaatgcaactggaaacatccagttgtgcccatctatggatgtaacaaaaggtagatgaccattccatttcccattaaaggctgtggagtctatactcaagtatggtcggcatccattcatgaaaccatcaatgcaaggtttgaatgcacaaaagaatctacaaaaataaatcccatcatcatcctcctgtacatctatctccaccacacttccaggcattttcagctcaacctcagccttgaagttaaacaaatagctctcttcccatgacccaaatatctgctccacagccttctgcctaccttgccacacttttgagtatcctactgtgacattgtatttggtctctaactcctcttttagcttctttgcacccatatttggatccttctttagaaaaggaattgccttctctgcaacccacttatatgataccatctttgtcttaactccctcaatagatgtacaagcatgtgcaaatctgttcaaagtaaccttcacagattttccatcaggcatcaaccttgccacaatagcccatggacatccctcagctttgcaatagcccctgaacctttctggatcagacttctctgtcccaagctcaaattgcccctttatagcgtgttgcctcacagctgatctaaactcaaccatacttccatatgagcttccaactatcattggagggtcatccctatcatagaaaatttcagcttcaaacctagcatctatctctgcctcatcaaggttcaagtcccgctgtgcaagacgtggagctggaccaggagcagaatccctctgcttttcagcttcaagcctagcttgatccgctctctcatcctcagttctgagtccaagaaaatcatacatttcatcttcctccattacaggtagtgaagaaccaatttgctcctctggaattggagctatctccaatccatcccaatcaatgacatgctgaggaacttgctcttgtggaattgacatttcatcttccttcatcatgggcactgaagaacctatttgctcctctagaattggagatatcttgaaactatcccaatcaatgagatgttgattgcttgagtctagagcatcaccttgcttggctgtcacaacctcacccatgactaactcatttacctctgaaatagaagagctagtaactaattgaccagatttatcctccacatccacaaataaaatcagcctcctctccctcttccaatcaaataatgcatgcgctagatccatattatccaaaaactttgtttccttgccagttctcttgtcatatccatacaccacaacctgttggcacctaccccattttaccctggctgcaaaatccttttccaagctctctaatgtgcattgtcgatagtctacaacccattcagcgtatttgcttggcacatgaacactactaccatcatcaagcttagctgtgtactgaccaaaccgaacacacacaataaacgccgcatcaggatcgatctgggaactatgaagtacgccaacgcctgcaaagtgccctcctttggagccaccattgccacctctccccctctcacccattcggctgccgcatgccccctccatctcctccttcttgtcatcctcctcctcatatttgtcatcgtcaccgctgtcgccgccgacttccccgaccacgccgaggtcggcgttgaaggcgatgttgtccgggagcaccgccggcccaaggaggatctccaactgcgccgccgccgctgttgacaccgtcgattgctctacgagagagaaggtgaagagaaaagggggagagaaagagagagaagggagagagagagggaggaggaggaagaagagaaaggatgacatatggccccacat

SEQ ID NO: 65530 - DNA, 2185 bp, Oryza sativa
  Clone ID: PAT_MRT4530_6656C.1
cccacgcgtccgcccacgcgtccggccaaaagaatctgatctttgaagaattggggatttagggttccaagaactgggagtctttcatgctgataagtgataaggatagcttatccacaatttgggatcttccctatggctgttggaatgaatttgatttcctgatttcttttccttccttttttttcttgtgtttcttgtaatgatattattgcttgctgtaacaagcaagaatgaagagatggagatttgaggacagtattaaatgcaaaacactttctgattttacaagattttgtggataacaactgcaagatcttgaaacttcttgatgattcaatccaaatgagtagcagctcaaccctcttacatgatgaaaaaatgtgttttattttattttttgtcaggtttttgaaggcccccttgtgaattccctgttgtccatcagacaaggaggcctcaagatgtacatcatagaggacaaagggggtgccattgccctcatgctggcctccctcttcttcctggggacatggcctgcggtcctcaccctcctcgagcgccgaggccggctcccgcagcacacctacctcgactactcgatcacgaacctcctcgctgcggtcctcatcgcgctcaccttcggtcagctcggcgatagcaagcccaacatgcccaatttcttcacccagctcagtcaggataattggccttcagtgctgtttgcaatggcagggggtgttgtgctcagtatagggaacctctctactcagtatgcatgggcatatgtaggtctctcagtgactgaggtcatcagctcaagtatggttgttgtaataggtagtagatcagaaaactcacatgttggatcttcaggcacaacactgaattatttcctggacaaccgcatcaacagagcagagattcttttccctggagtggcctgcttccttgttgcagtcattcttggctctgctgtacatgcctccaatgcagctgataatgaagaaaaactaaatggctccacaaatatctataaacttggggaaaatggaagtgtggaaccaaacaaagaagtcatagaaaaagatgctcccaaggacttggagaatggagcttctgcaaccaaatatgttgccaaagctgaagcaggaactgcggaatacttgattgagctcgaagaacggcgttcgatcaaggtgttcggatcaagcaccttcatagggcttgggatagtgttcttctcaggagtctgcttctcactcttctccccggcattcaacctcgccaccaatgaccaatggcacaccctgaaacaaggtgtaccacacctggtggtgtacaccgccttcttctacttctcgatctcgtgcttcgtcatcggcatcggcctgaacatcctgttcctctaccgtccaatggccggtgtgccgaaatcatccttcaaggcttacctgaatgactgggaaggcaggcagtgggctctcctggctggcttcctatgtggctttggcaatgggtttcagttcatgggtggtcaggctgctggctatgctgctgctgatgctgtccaggcattgccacttgtgagcacattctggggaatactcctgtttggggagtaccggaaatcgtcgcgaaagacgtatatcctgctcgggttcatgctgttcatgttcatcgtcgcggtcgcggtgctcatggcttcatcaggtcacaggagcaccaagtgattgattcaaatcctttcatctcttgccttaatttggtgtttgcaagcgcaaaccactcttgctgtcagaaaacaaagaagttcaggcagcaatgcagggggggacttcagtccaggtctccaggaagcagatcatgccaacatggaatgaaactccattcatgaaatttccatttggatggagctgtacataaggggaaaaaaggaacaaactaagatagtttgtggatttgtgattttaagtttgtgtcagattatataaatgtaatgttatccctttctctgaattctaaaagacccgtttgcagatagcatagggaaatttggagttcacctgaatgataagaaagatagtaactgttttggtttcgaagctaatataaaaaaattaaaatttgaaatggtacatgaagcccggaaaaaaaaaaaaaaaaaggggggggcctcgtgccg

SEQ ID NO: 65531 - DNA, 304 bp, Oryza sativa
  Clone ID: PAT_MRT4530_66570C.1
attactccttttttttattcttgttcatatattttgttttgggggccgaaaacaagaccccatggggacccaccagaaaatggggggctttaaaaaatcaaccaaaacgccccccaatgggaacccaagcctggggggcccaaaaaaaatggcacggggaaaatgggaccacacccccttttttaaaaacatacctccaaccccgggaaaaaatttgttgaccaccccggaaaccggactttacgggccccccgaccccccgaaaaagggggattgcaatgcccctagaaaaggccacgggggc

SEQ ID NO: 65532 - DNA, 159 bp, Oryza sativa
  unsure (1)..(159): unsure at all n locations
  Clone ID: PAT_MRT4530_66571C.1
ctacttcaacatcattcctacacactnactcctaacttccaatcttccttccctcaataaactactaatctttccttcccacatcatatttcttttactactttacttaaaccccactatcaacactcataaactacactcactaactaatcttctctc

SEQ ID NO: 65533 - DNA, 403 bp, Oryza sativa
  unsure (1)..(403): unsure at all n locations
  Clone ID: PAT_MRT4530_66572C.1
acggacacacgtacgtgcgagcggtccaacgaagaaattggcacagaaatggctatgaggctgagggctagctcagctgccaatgccctcaagatctcatgcagtggagccaccagggctgcacctgcctactcaatctccagatacttctccactggtatagctagcttgagtagtagaattcatatcaaataaattttctgttgccttttgcaacaaagcatgtggttgttacaatgttctggttcctgtacagtcttgcattgtgccatgctatccttgcacccagttataaattgcttgggcttccttttttcttttctttcttttntacattctatatgggtacattgactggtccatgctgtagttatacaccggagacatactaaatgattgaaaa

SEQ ID NO: 65534 - DNA, 135 bp, Oryza sativa
  Clone ID: PAT_MRT4530_66573C.1
atggccgggagctggccggccggcaggcaggaggcacatgtcattgccggtgccggtgattacgccgccgcagcaagttgggtggcgtcacctgttgaggtcgccctgactgacctgcagcatgagaggaaatga

SEQ ID NO: 65535 - DNA, 568 bp, Oryza sativa
  Clone ID: PAT_MRT4530_66574C.1
ttcggaagaatgggagtggtcgatctggacaaatttgcgagagcactgagagtgtgatggctatggttcagttgggtgtgcccaaacaagccttgggcagtgacacacccccaccttgtgatgagctcaatagaaaactatttggatcagcaactaaggtggagactgatgcaaagcaattatttgggaatcgaactggattggggaacaaccactcaaggaatctgctccgactttatacaagcatgccaaaatcaaagtaaggtcagtccaggaaagataagctaatgaccaatgggtagacgatatctggcgcaacctcacaaatcagctagtcaaggcgtactttgaggtattcaaccaagtatggagcaacggcatcaccctcacggaaggtgtcgacgataccataactcggagatggacgagcaatggatttggacagaggatcggctacagatcagacaatggccaaataattgtttttatcaactatgttataggaacctagaaacaactcaacatctctttaaagattgcccttttgtgcgacagatttgggagaggg

SEQ ID NO: 65536 - DNA, 207 bp, Oryza sativa
  Clone ID: PAT_MRT4530_66575C.1
atggaggctgaatttcatgtcaaggaagttgacaaggatcaagacgatgtagcacaaaacaacgcagacaaggaggagacgttggatggccataagatggctaagcaagacatcgttcagtacaacgcagatactcacaaccacaggcacctcgctgtcgatggttacgtcgcctaccacttaaagcacatcgccgttaaatcctag

SEQ ID NO: 65537 - DNA, 704 bp, Oryza sativa
  Clone ID: PAT_MRT4530_66576C.1
tgatgcgacaggagcttgattggaatgcaagtgttgcactcaaatccaaccaaaattttgcaccaaataacaatagcaaactggttgaacaacttgataaaattttcagcacttgtgcatataaacaaactgattgttctacttttctttacaatcttgttaacacttttctttggtactttcctttcttctcttttttttgatactttttttatagaactaaacacagagatctgatatgatattgcacactttataatacttaacaaagaactcaaccagcagctataactcacataggatcaaagttaacgcgaaggaaatgatgagagttttcatatttttctttttgtggatattttcagatatatataagaggctcaaagggaacacaaaggatagagtgaccaacaactaaacaaagactctaatgactgaaacttaacaaaactcactggaacaacagattgaaacaaagggctatgacaaaatattttatggctttttggtggataggacgaacataaaatatatgtagctaagggtaaagaatcctaccgtggcaactgatgctttgataccagatgatgcgtcacgatgcccgatcttcatgacgtaggatcaatcttcagataactagcttcaaagaagccaagataacttgctgcaagcagcgataactagtgcaacctaacaaataaaac

SEQ ID NO: 65538 - DNA, 1188 bp, Oryza sativa
  Clone ID: PAT_MRT4530_66577C.1
atgaagccgcagaggctgccgctgccgcccgtccccgccgcggcgctcctcctgctccccgtcgcactcctcgccgcccttctcttggtcgtctaccccaacgagttcgccctgcaggcctcgctggccggcgccgccgcatgcggcgatcatcaaggcggcggcggcggcggtggcgtgcaggcggccccggagttccggctgctgatcggcgtgctgaccctcccggcgcggtacgagcggcggcacctgctccggatggtgtacgccctccagcagccggcggtggcgtcgagggcgcgcgtggacgtccggttcgtcttctgccgcgtcggctcgccggaggaccgcgtcctggtgtccctggaggcgatggcgtacggcgacgtggtggagctcgactgcccggagaacatggacaacggcaagacccacgcctacttctccagcgtgccgcgcctcttcggcggcggcgaagccgcctacgacttcgtcatgaaggccgacgacgacaccttcttccggctgccggagctcgccgagtcgctgtcgcgagcgccgcggcgcgacctctactacgggtgcatggtgccgtgcgactacgtccgcggctcgaacgagtacatgtccggcatggggtacctgctgtcgtgggacctcgtggagtggatcgtggcggcggcggcggagatcgaggggaggacgggcgggccggaggaccggacgctctactcgtggctccgacgcggcggcaggggcaggaaccgggtggacgtgaagccggccatgtacaacttccccgggaggcacccgtgctcgcacgagttcataccggacaccatcgccgtgcaccagctcaaggacaaccgccggtgggcgaggacgctccagtacttcaacttcaccgccgcgctcaagccgttctacccggcgctgggagcaggcaccaccccacgacacagactacggcggcggcactggggggcatgggcgacggcggcggccctctcccgcctggatccgccggtggttgccctcccctgctccgatccgctggcggcggccctcccccgcctggatccgcaggccggtgccctcccccaccctgatccgtcggctgtggccctcccggtgcctcctcaccgtgacaggaggaggacgacgtcgacagtggctgcgaaggcttaa

SEQ ID NO: 65539 - DNA, 558 bp, Oryza sativa
  Clone ID: PAT_MRT4530_66578C.1
atggcgacggtcgagctgctatgctgccgagacgccgtattcgggctgccaccgacgatgtgccgccaccgctgccgagatgtcacctccgtccaaggccagagccgacggatatggcgagagctcagcggcgccatcgtttggtacgggagcttcatccgcaactccgagcgagcggcggggcgagctgaggcggggcgacgactgcggcgaccggcggggcaggcgaaggcgagcgaaggccggcggctgtggcgagcaaaggccacggcggggcgggcggaggcggggcgacggccacggcgagcgaatgccgcggttgcgacgagcggaggcgccgggctgcggcgggccgggcggaggctgcgcgacggctgcagcgagcgaaggccgcggctgcggcgaacgacggggtgggcggagggcgacggctgcgcgacggggcaggcgccgtctaagcctcccgtagcggcgagcggcggtgggacggcgcgcggcggaggcggcgcagagggcggcggcggcggcctgggggcgacggcggccggcgcggcggcg

SEQ ID NO: 65540 - DNA, 803 bp, Oryza sativa
  Clone ID: PAT_MRT4530_66579C.1
acacttaacgcggtaagcacaatttggtgctgaaaggaccttgatattgtctagagaggggttaataggcgtttcaaactttacggaaaagcataagctgaatttgtcgaatatttcctaatatttgaacaaccaaccccagttgaacaaattaaacctccaaaccaggaattatccattccaaaccaggagtcaaattaattaccacattattaacattgatgagtagtgtgagactaatcacgaaaaacattgctcaactcacccataaccgcggaaaattgggaaaaaggaaaactgatgacgtcagcatgacgtcatcaatggccggccggctagggttggccacctcgccggagctagaacggtcggccggggctttggaggacaagtacacgtagaggacgacaagacgaacccaacggtactcaccacaacgacaaacgacgcacgacgacggccggcgacgaggaggcgacggcggtggctcggcttgcgcggcgacggcgagctacggcgaccggcaacgatggggaaggggcggccgaggttcccctcaccacggcgcacctaaagacggcggcggcaagcggcggcgacggcaggagcggcgtggcggcgcaaccgaagacggccggcggcggcgggctaaaaggcggcggcgcggcggctaggaggcacgggagaccacgagagagagggcaaacgaaagagggcgacgaggtggtcctatatatagccttggattgaagagatcggactccaaacgagaggaatcgaagccggaaacaaaaaactcggac

SEQ ID NO: 65541 - DNA, 417 bp, Oryza sativa
  Clone ID: PAT_MRT4530_6657C.1
atggaggggggtatagtggtggcggtagtgaatttgccacccccacctactctcatgctggatccgcgcgtcagcaccgcccgcacccgagaccgccttcgtcgctcactggcggcgcccacctgcgaggtcgtcacctctgtctcagccgttggaggtggagaagagatgggcgccgccgccgccacgccgtgcagcaccgccgccctccgccgccgcaacgccgcacagcaccgccgccctccgccgccgtgccgcaccgccatccccttccgctgcgccgcgccgccgtcgccctccgcccccggccacagcgccgagcgccgccggccgcagcctccagggcgcagcaactccttcgtcgggctgccgactgtcaaccccagcctccgacgacgggctcaactgcttctctag

SEQ ID NO: 65542 - DNA, 528 bp, Oryza sativa
  Clone ID: PAT_MRT4530_66580C.1
ttgagaatggcacaatgtcaattttctcccgcccccaagccgccgcccccagaccgccgccgcgccggccgccgtcgcccccaggccgccgccgccgccctctgcgccgcctccgccgcgcgccgtcccaccgccgctcgccgctacgggaggcttagacggcgcctgccccgtcgcgcagccgtcgccctccgcccaccccgtcgttcgccgcagccgcggccttcgctcgctgcagccgtcgcgcagcctccgcccggcccgccgcagcccggcgcctccgctcgtcgcaaccgcggcattcgctcgccgtggccgtcgccccgcctccgcccgccccgccgtggcctttgctcgccacagccgccggccttcgctcgccttcgcctgccccgccggtcgccgcagtcgtcgccccgcctcagctcgccccgccgctcgctgaggcactgcccgtcgccccgcctccgcccgtcggcacgcaagtcgtcgtcgccgttgccgtccgccgtcgccgcaccgagatag

SEQ ID NO: 65543 - DNA, 402 bp, Oryza sativa
  Clone ID: PAT_MRT4530_66581C.1
atgctcttgctcctccttttcctcgcggtcctcgcgggcctcaccttcctcctccacttatccgtgctcgttgcccgtgtcaccgagctttgccttgaccacgtccgcgtcaacccatccccattcccagccatcgacctcaaggttacgacggaggaggggagcagcagtggcgaccggcgaggaaggcggtcctcagcggtggaggaaaggagggaggagagggagatggcgatgtgtcgtcaccatcgtcgtccgcagtcccaatgcgcatcccgtccatccacttcctctcctgatgtgttgtgctccatgaggccagcagcagtggcgacagcggtgctgttggtggtatttgttacggtcacagataaattctcaagcacacggataccgctgtag

SEQ ID NO: 65544 - DNA, 672 bp, Oryza sativa
  Clone ID: PAT_MRT4530_66582C.1
atggcggcagaggcagagaggggacaggcggccggcgacctccgtcgcctcgagcgcctcgcgacgggagggaaagggggagaggggaggcggccggcagaagatggcggaggggagaggcgcggcgacggcgccatggccagcctcaccacttgtgggtcccaccgcggaagggcgcagccaccgctgcctccggatgatgacttggaccgccttgtgttcgactcgggtctaacccggccaaacacccagcgcagcatccgcctccccgtgcacgcgcgcgcgccctccttgcccgtgcaccgcgtaaccacgcgccgcaccgcgccacactcgcgcgtgggccccgccgccgaccgagccgccggaaacccgcgccaaagccgcgccgccacgggagcgcgcgtcaacaacgtcacgtcgcccatcgtctcggagccgatagccggaaatccccctctcaccgagccgccactctgccgtcgcccatgtgcgcgcgtcattgccgtcgcatccgtgacgccgcgccacgccaggcgggcccgcgatcggaccccggtcaagacgccatcctcacgaaccttccactccaagggttggggagcgaaccgagtggataggcgcgctgccgtggccacgtccgccgcctcatccacaactaatgattactag

SEQ ID NO: 65545 - DNA, 325 bp, Oryza sativa
  Clone ID: PAT_MRT4530_66583C.1
atcaaccaacataatattagcttgcaaaaagaatttaaaatcgccatatatatggctttacgaacctcccccaaacttcaacaaatgcacaaacgtttgtcctacttgatatacatatatttatcgaattatcgcgtaatttaccatgtagaagtccaaggaccatgcataaacataaaatcaaaaacatgcgtggataatatatctaagaaaacaataagcaaccaagccaattcggagaaaggaaaggattaattaggagaaggttggaaaataggagggaatatgcttggcttcgtgcacgccattcattataggcaacctc

SEQ ID NO: 65546 - DNA, 3147 bp, Oryza sativa
  Clone ID: PAT_MRT4530_66584C.1
acatcaaatggtgttatgtgtttgcatcagtaaagaaatttgttgtttgatacagcaaaagtagcagtggtataaaaataatgaatgcacttttgatgtccatataggatctattttgatctaacaggctgaatactcagttttaccatgttagcaattcccagggctaaaataaatgccatctaccttatcaacctcgcggtagctggtattacagtattaatgatgccacatttcccacctataaattggcatgaaaacaaactgttccgttcagtccagactgaaccaccaatcagtagccgtggaacaccaatacaagcggcgtcaaattaaagtgagggattgtcatcaaggaggttaggctaatggtttcacggaagacaagaaaaccgttttcagattctcatcctcccatactagcttgttccaccatgtctgtgtacactggagttctttcaggcatcctgccacaagattaagcttcttaagcctgctgcatctgactactttgaggctcgccaagcttgggaaattcactgctatggattcagggcctatgcttctcatgtttggcaagtcgtgcaactctaactccttgaggcttggaaagaccgtctccgcaggcgatccatggctcaatccttctgtgtcgtaggatataagatgctcaagaacactgcaggatgaaatgctcaaggaggataaatactccaggctgccaccctgccaaacaatcttggcctttgggagcttgcgaaggatgatactttggagagaaggcagcaggggtaccagcttgcggcaatccatgtccaatgactggctagtctgtggacgatacacgctgtcaacgtccaaaggcttatcgggcaccctgtaacgcatcatgctgacagtccgatcaagtgaccatggttgctcgcccttgtattcacctccggtaataatgacattctccaggttgcagcagccactgatgatgatgcccttcaatctgctcatgtgcctccagaggctggaaggcgaaaactggatgctcggcaagtcgctgcagtcctggacatgcaaattccgcaagtgctctgcgagatgaggagactgcgagagcttctccagagagtggagcgtttgcacggatatgtcaagcatctgcaagcttttcaggctctcgagttcgcgcaggttgacgcgttgccggaggtcgtgccgccttcgttttcttgagtcaccggactcaggctcacagcttccgacgtccatccaactgctccagcagtggtccatgcacaggacctgcagcgccgtgagcgggtttagcacgccggcggcaatggtttggacgggcacattggacagcaacaagaatcgcaagttcaccagggctcctattccagcgggcaaggaccggatagtcgtgttgttgagacgaaggtactgcagggtgacaaggaggttgatctcggagggcaatgcggtgatcagcgtgtccgataggtccagcaacctgagacaaggcatgaagctgaagaagtcgtggcatatcctccccagcagccggttgctctggagcagcaacgttttcagaacagagcacgtcggtgcatcattcagctcgttgatgccagtccgcatcagtgacaccctctcagcgcctgtccatttatccgcccgtggcgcggcgcttgtcacaagacctgctcggactagccacttgttgtcaatcctgccgcaatctgcaaccacccacaaggccatggctcgcaccatgggatgcatggtgacatggtagtcaccggctgcttccagcagagaggaggtcactaggataccaagcatgtagtggcctttgttgtagagatcatccatgtcatcagcagacacatcgctcacaaatccttctccgatgaagctctcgacaagtaattccttggacgtctctcccgagaacaaagagcaatacaggaggcagatcctgaggctgtcgtcccgtaagctgtcatagctccgcttcaggctgacgaggaggttggcctcgacgccgtcgagctgccatggcgccagattgagcacggccatgctatgttcccactcccgcgttacccttttgcaagccatggcccgtgcaaccgtgatgagaccgaggggcaggccgccgcaccgcgacgccatcgcctgggcaagcggctggatctccctgctggtgacgaacgcgttgcccaccttgttcttgaacagctcccacgaatcggccgcggacaaacactccaccttgatcttcctcgtcacgtccatctggtcgcacacgtgctcgagccgcgtcgtcagcagcaccttgctcttgccgtgccggccgggcacggggactccgagctccgcgaggttgaggggctcccacacgtcgtccaggaggagcacgaagttccaccggtggagatacgtgcacagggcgagcgccttctccttggtgctcttcccgtcctcccaccggaggcctagtcggccgccgatggccttctggacggcgcccgcgctgtagcgctccgtgacctccacgtagatgacgagatgtatgtccatggacgccgcggacgccgagaggaaggtgttgttgaagtggtgcaacagggtggtcttcccgacgcccggcgcgccatagatgccgatcacgctggtgccgccctcctggaacgcattcgcgacccgcgccaggagcgcgtccaggccgatcgacggggccgccgtcgggagcacctccgtgcaggcgaacacgggcgcgtccgccaccttctggaaggtggatctttgctctacaagtgacacggcttcggcgcgcgcctcgtcggcgcgcttgctcagccggtaggctgcacgcaggccaagcccccccgccgccgcccctcctctagggaactccgcgacgatcccgatggcacgaaccaagagcgaggcaacggcttcgagccagtggctcacctggttggtcgcttccatgccctgcctctccgctaacctcacctctttcatcacatcgtcgcgctggctcttcagccatctagcctcggactcgagcgcccggatgtagcccaccgtccgcgtgaacaagttccgcagaggccggaagatgttgtcaatcgcgaattccat

SEQ ID NO: 65547 - DNA, 204 bp, Oryza sativa
  Clone ID: PAT_MRT4530_66585C.1
atgtggccgtcgtcgtcacgcgtggccgctagccttcccgatgttggacctactagcagtgttcctcggccgatcagctctggactcgttggcggcagcggcacggcggtgacaccagggcaggtggagcggtgtcgggtgctccgacggcgcaccaagcagagcggagaggggtggcggcggtggggtgcggaggagacctag

SEQ ID NO: 65548 - DNA, 163 bp, Oryza sativa
  unsure (1)..(163): unsure at all n locations
  Clone ID: PAT_MRT4530_66586C.1
gcacgngcntgagctccancaggtatcactacaccaagggaggtcntngcnttnaccagcntcaagnactacgtaaaccgctnanaggcggaccagaatgagctctntnacagcacttgnaagagcaagangcttnttacaggaatgcccctttncacataga

SEQ ID NO: 65549 - DNA, 3825 bp, Oryza sativa
  Clone ID: PAT_MRT4530_66587C.1
ctagcgcttgtgctcgccggctcgatagtaatcgagcgagacgtggagcagcaggtcggacacctgcctcgccgtgggcctctcccccggcgccgtcctcgtgcaccggagcgccacctccagcacctccgtcatcgacgactcctcccgcggcgccagcggcttcagcgccgggtcgaacacctgctcccgccccggcgacggcgcctccaccctcgactgcacccaccgcaccatgtccacgtcgccgccgaacgccttgtccgtcggcgtcagcccggtcaccagctccatcatcacgatccccatgctgtacacgtcgctcttctccgtcgtcttcaagctgtatccgcactctggggccatgtagccgtaggagccggcgaagcaggaggcggagtcggtgaagtccttgcggttgtcggcgacggacttggcgaggccgaagtcgccgaggtgcgcctccatgtcgccgtcgaggaggacgttgctggacttaatgtcgcggtggacgacgcgggggacgcagtcgtggtggaggtactcgacgccctgcgccagcccggcggcgaccttcagccgcgcgtcccagctcagcacgcgcttcttgcgctcgccgtcgccgccgccgccgccaccggcggcgatgccgtgtagccagtcgtacaggctgccgttctccatgtactcgtagacgagcatgctgccgccgccgccgccgccgccgccgacgtcgtggctggcgacgaagccgaggagcttgacgaggtggcggtggcggacgcggccgaggatcttgacctccctcgcgaagctcttgtcgtggaggagcatgtcgctgtccatgtgcgcgatccgcttcacggccaccgtctcgccggtggggagctcggcccggtacaccgtcccggacccgccggagccgatggcgaactggtcgctcaggttcgccgtcgcctccatgatcgcctcccaccggaactcccgccgcgccgaccccttcaccaccagctgccgcccgttcgtgttgttgccgccaccgccgaggctcgacgagaacgccgtgcagttcacctccccggaccgccgccgccgcaccgcgatcagcacgagcacgatcaccagcagcaccaccgacagcgtcaccgccgccgacaccagcgcgatcgtcgccgaccgcagcgccgaccggccgccgccgccgacgccgcagctcaccagcgggtggccgcagagccgcgcgttgccggcgaacgcgccacgcggccaccgcgagaactcgctccccagcctcccctgcagctggttgctggacaaatccagctgcaccaagctgctcatcccggcgagctgcggcggcacagctccggcgagcgcgttgtgggagagattcaagctctccagcttggagagcgacccgagcgacgccgggatgctgccgctgagatcgttgctgctcaaatccagcaagctctgcagctcttgcagctggccaatgtcgggagggatcgggccggacaagagattccgcgacaggttcagctcgtacaggttgatcagcttcgcgagggtagccggaatctcgccggagagctggttgccggccaggttgagcacgttgagcgagaccaagctgccgatctccgatggcactgttccattgatctggttgccgtcgagcgagagcttgatgagcttggagcagttgctgagctggacgggcaccggcccggtgagctcgttgccggagagcgccagctcgccgagctccggcagcgcgccgacccacgccggcacggggccggacagccggttgccgctgagggcgatgtggctgagccgcgcgcaccgcgcgagcgcgtccgggatgccgccggtgagcgcgttccccgacgcgtcgagcatcgtcagcgcggcggcgttgccgagcgccgccgggatcgggccggacagcgcgttgctcccgaagcggacgcgctggagcgaccgcgaccggccgagctgcgccgggatgccgccggagaaggagttgttggtggcgtcgaacgacaggagcctcgccgagccgcagagcggcaggaggccgccggcgagccggttgtgcgcgatgttgacgcgggtgatgttccggcactcgaacatgccgtcggggacgtcgccggcgagcgagttgttgtacagcatgagctgctccagcgaccggagcctcccgaacgtcgccgggatctcgccggagagcgcgttgtcggctaggtcgaggacggcgaggttcacgcagtcgccgagctccggcgggatccggccggacagctcgttctgccggagatggaggaacgccagctcggagagcttcccgatggacgccggcaagctgccgttgaaccggttcccgaagaaatcaaccatctgcaagctcgagcactccccgatcgtctccggtatctcgccggagaagtcgttctcgtacaggaagagcacctcgaggttcacgaggcggccgacggcgtccggcagccggccggtgagcccattgtgatacaatgcgaggaccttgagctcggtgaggttgaagagctccggcgggagctcgccggagagggtgttgttgttgagcagcaggtccgtcaggttgccgagctcgccgagcgccgccgggatcacgccggtgaggctgttgttcgccaggtcgagctgcgtcagcgcccggcaccgcgagagcccccccggtatctcgccggagaagttgttcgtcgagagcattaggtgctcgaggctcgtggactctgctccaccgccgccgccgccgcacaggtcgccagggatgcggccggtaaggtggttgccggagagcgcgaggaagctgagctccggcagctggccgacctcggcggggagttcgccggtgagcaggttgccggacaggtcgatggtgcgcgcgcgggagagcgcggcgagctcgcgcgggactcgcccggagaggcggttgttcatgaggttgaggtacgcgagctcgccgagcttcccgagctccggcggcacggcgccctccagcgttttttttttttttttcagcttttaaaacaatccaattgaagaggattctttgcttgatttgattttctcaaccacacaccccccctaaaaatcgcacaattttttgttacctcctttcacccaacaaagatggatctaattgaagccaccagaaacaagaatcagaggaaagaaaaaagaaaagaaaatgctcaggaggacaagtttccagcgtttggaaatcgtcctcgtagcctagcgcttgtgctcgccggctcgatagtaatcgagcgagacgtggagcagcagggcggagacctgcctcgccgggggcctctcccccggcgccgtcctcgtgcaccggagcgccacctccagcacctccgtcaagtagagcagcagcgccgtgagcctcccgagcgccccgagcgccgccggcaccgggccggcgagcctgttcgaagacaggtcgaccacctccagccggtccagccgcgccagcgccgcgccggggacctccccggccagcccggcgccggacaggttcagcccggtcaccctcgcccccgccgcgtcgcactccacccccgcccaagaacagaacgccgacgagtttccgccaccgccgccccatcccgccagaacgccgccgggatcctccacgaacgcattcttcacatccatcagcgcatcaccatcccccgccgccgccgccgccgagcaagaaccaagaaccaccaccaccaccattactaccaccacccacgccgggaagaatcgccgccgcgccat

SEQ ID NO: 65550 - DNA, 215 bp, Oryza sativa
  Clone ID: PAT_MRT4530_66588C.1
agttatatggatcgcggccgcgaatcatcgccggccttagggtttccttccttgtcaatcgcgcggcgcatgaccacgcgactagctctgggctccaggcaagggctagacgagcagggctgacccgatcttgggacctagcagatgtactctcgacgactgacggccacaccactaagaagagaaaatcagagagtaagagagattagacgact

SEQ ID NO: 65551 - DNA, 1916 bp, Oryza sativa
  Clone ID: PAT_MRT4530_66589C.1
ctctgtctagctattagctaagctgctctgctccaccactcgtcttccgcgcgcagcaactgttcgcggaaatgccgagcctggcgctgctcagggcggtcgccatggcgctgctgctgctgctcgcccgctcgatggagggggtggatgggcccccttcttgtgcgcgggccgccgcccgcgcgactacactatccacctcgccgccgccgccgcccacaaaaccctagccgccgccgccgccgccgccgccgccgccatggccacccaaacccgccccctcgtctccgtcaaggccctggagggcgacatggccaccgacaacagcagcagcctcgccctcgccgaggtgttccgcgcgccgctccgccccgacgtggtccgcttcgtccacaggctgctctcctgcaacaagcgccagccctacgccgtgtcccgccgcgccggccaccagacctcggcggagtcgtggggcacggggcgcgccgtgtcgcgtatcccccgcgtccccggcggcgggacgcaccgcgccgggcagggagccttcggcaacatgtgccgcggcgggcgcatgttcgcgccgaccaagacatggcgcaagtggcaccgccgcgtcaacgtccacctccgccgcgtcgccgtcgcctccgccctcgccgccacctccgtcccgtccctcgtcctcgcccgcggccaccgcatcgagaccgtccccgagctccccctcgtcatttccgactccgccgagtccatcgagaagacctcccaggccatcaagatcctgaagcaggtcggcgcctacgccgacgccgagaaggccaaggactccgtcggcatccgccccggcaagggtaagatgcgcaaccgccgctacatcaaccgcaagggccccctcatcgtctacggcaccgagggatccaagatcgtcaaggccttccgcaacctccccggcgtggatgtcgccaacgtcgagcgcctcaacctgctcgacctcgcacccggtggtcacctcgggcgcttcgtgatctggaccgagagcgccttcaagaagcttgaggaggtgtatggcaccttcgaggcgccgtcgctgaagaagaaggggttcatcctgccgaggcccaagatggccaatgctgatcttggcaggatcatcaactctgatgaggtgcagtctgtggtgaagccgctcaacaaggaggtcaagcgcagggagaagaggaagaacccgctcaagaatgtcgccgctgtgctcaagctcaacccctacttcggcactgcacgcaagatggccacccttgctgaggctgcccgcatcaaggccaggaaggagaagcttgactccaagaggaccaagcttagcccggaggaggctgctaaggttaaggctgcaggaaaggcatggtacaagaccatgatctcagacagtgactatgctgagttcgacaacttctcgaagtggctcggagtgacgcagtgagcgttgtcttgttttaagttttgagtagcagcgttaccggatcttatctcaaggatttatcaatctgtttttacctgaacatctccataagaagttatctgtgggattttgagactagtttctctgttttgttaatgtgctgtcgtgagaacatagagtatgtggtttggaccagctatctaaattatgtatgcacttccatgttctctgtgatgtcctgtattttgatgctgtgatcttgtatcgctgtatcatattgttctagggctcatggcttactcggtcaccatggcgctgattccattcacagtgttcagcctacttaaacatatttgcaattttggttagatgagtttgttgtgaaatctggtcagtgggcatgcctagcaagcctaaatcaagttgagcgagcctcaatcttatcttgcttttggtgagg

SEQ ID NO: 65552 - DNA, 942 bp, Oryza sativa
  Clone ID: PAT_MRT4530_6658C.1
aaagaagttcttttccccccccttcccctcttgggccggctcggcccagtccctccctctctctctcttcccccacggcccatcggcctcccccgcgcgcgcgcgccgctgacaggcgggcccgcccgccactctcgctgacgggtgggacccacccgtcgtcttcctcctcgcgccgcagccgccgcccgcccgtgccctagcgccgccgccgccgcggattccgccgcatcccgccttccccgcgcgccttcggttcgccgccgacgtcgctccggtcctccgcccgactcggcgacacctccatccgcttcgccgtgttgccgccgaccccgtccgccgctccgcttcgtccgccggctgccggagcaccgtcgccctcggcatcccgaaccgcgccgtcgccttcctccgctccggttcgccgccgtcgtcgctccggtcttcctcccggctcggcgccacctccctcggcatcgccgcatcgccgtcgacctcgtccgcgcctccgtttcgctcgccgaccgtcggagcgccgccgtcatcgtcatcccgagccgcgccgccgcgtttctccactccgttcgtcgtctccgccgtcctcgtgtctcggggtgagccgtggaccgtcccttccgtttccccctcctctccgctctctcgggcgctgctccgccgcgccgatggtcgccggcggtgaccatcggggcgcgggcgcgccgctcccgtcggccgtgccggcgaggccgccttcgggcgcgccctcgcggctgccaggtgggcccggccgtcagccgcccgcgcccgcgggtgcggctgacgcgcgggacccacggcgccgaccgccgccagccgcgtgcgcccggtccaccgtggaccgagaggctgacgcgtgggccccacttcccgtggacccggtccgcgcgcccctctcccggctga

SEQ ID NO: 65553 - DNA, 432 bp, Oryza sativa
  unsure (1)..(432): unsure at all n locations
  Clone ID: PAT_MRT4530_66590C.1
gagaacttcttgcatgtgcagtcatgagacctgtcgtgaatttagcaaacccaaggtttataaatgaaagaattgaattgtnggctctttctcatgccaacaaggcagaaagaggagttgcagaatcattggagcatgctacaatggttaagcaaagggaacctcctatgccaactgttgatgaacttgctgcactaatagatcccacgagttcagggggtgaacttgtgcgatttagtcaggatcagtccaaagctgcaccagatacgcaactcagtaatactagacatccatctnanctcaaacccaattccnctagtacttcttttgaccaataagttcacatccacttgagtntagcaattttatcntccactacccatggncattcgaattcccggtatgtcattggagttcccaagtagtgggagg

SEQ ID NO: 65554 - DNA, 356 bp, Oryza sativa
  unsure (1)..(356): unsure at all n locations
  Clone ID: PAT_MRT4530_66591C.1
agagccatggcttccatcgtggcatcgaagaggatcccactgttccgcctcgtggagcagctcctcgccgcgtcgccggcccaaggcgccgcctcctctcttaggccggtggccgtcgccgggggggggggggggggggacaccttctcgcagttccnccttcactagagggacnagtcggacgacgacagcggtcgtgggtactacaccaggcgcccctctcgcgacgccaccatgcccgccttnttntcagatgtgttccgggatccgttcagggcgccgnagagnctnnggcggttgttgagggtgatggacgacctggngacgccggtcgggcgcgccggcgccgngacgct

SEQ ID NO: 65555 - DNA, 109 bp, Oryza sativa
  Clone ID: PAT_MRT4530_66592C.1
atctgcccctgcagacagcgaatggcgcgaagagtgtcctggcaaccggcggccagccattggtgatgactttggtgagcgcagcgagtcccacaaagatgctgcctga

SEQ ID NO: 65556 - DNA, 1864 bp, Oryza sativa
  Clone ID: PAT_MRT4530_66593C.1
atgttatcctctatgttcctcttcctcctccctctctcccttctctctttctctctcttgggcaatctgtgggcaggggcggcgacgtcggcgggcgagggctggagcagcgtcgggctgcggctcatgctactaggaggtgctactccatttttctacattaacatcgagacggtgatcatcaccaacatgaactactacccggaggggtccaacccggtgtacttcgccgtgctcgtcaagtacgaggacctcgacggcgacgtcgtgcaggtcgacctcatggagtccaagtcggcgtacggcggcgccatcggagtgtggacaccgatgagggagtcatggggctccgcatcggcagtgacatcggcaagaccctttgtcaccaacaacgtcatcccagccatctggtctcgaatcgcgccatcactgcctccgtcaccccttccgcgccgacctcgttccgcgctcgcccactgccgcgcctctcccgcctcggtctctccctctgcccgcgcctccccgacgccaccctcgccgcgctcaccgccgcaccgtccatctcgcagtcgacatctcctgctctcggggattcctgctgctgcgcttgtcgttgcatgcccgaatctgaatgatctcgacttctccaatgaccactatggctcgacctcaggaatgcggcggcggcggaggtggccaagttgtgtggggttttgggggggttttggcgatggagatggtgatcgttattccatcaccttctctgcatatattgtagtgttaagaactcaagaggcatatgtgcagatcctacagcagttgcataggagtacatctttagaaatggacccacattcacacaagaaggcacatgaaggtctgattggtgacaaccctgacgcgtatgccgtgacgacataccaacctgtgctgatggtagaaccatcagccgctgctgccttccctccagctccccaggttgctccagcctatccagtgaacccaatgcagcttccagagcatcagcagcacgcaatccagcaagttcagcagctccagcagcagcagaaggagcagctccaggcgttctgggccgaccagatggccgaggttgaacagatgactgagttcaagctccccaacctcccgcttgcaaggatcaagaagatcatgaaggccgatgaggacgtcaagatgatcgcgggcgaggcaccggcgctcttcgccaaggcctgcgagatgttcatcctggacatgacgctgcggtcctggcagcacaccgaggagggcaggaggaggacgctgcagaggagcgacgtcgaggcggtgatcaagaagaccgacatcttcgatttcttggtggatatcatcactgatgataagatgaaggatgatggcatgggctctcaggctgcatccatggtttcgccatatacctcaggaggaatgggattttcctttgatctgtacccgaaccagcatcacctcgcatatatgtggcctccacaagagcagcaggagcagtggcctccacaggagcagcaggagcagaagcagaagcaggattctgatggtggtggacaagatgaatgagataaatcacattctgtgattacttattgtcgtagtgtggtttggttagcttgagtttggttggaaaaactttttttttccgtagactgtttttatgtttgttttgctgccttctggtagcgataggagggcgatccggtctgaaactgttggtagcattcatgatgaatttctcagtggttataatttatgaatcttagtaacagctgttgcaagaacaaatatttcctctggttagaattgttttttaaaaaaaaaaaaaaaaaaaaaa

SEQ ID NO: 65557 - DNA, 357 bp, Oryza sativa
  Clone ID: PAT_MRT4530_66594C.1
gggggagggcaaatcgtgggtttccaaaaggggggaaatccgaaagggggcaaacaaaggaatcggggggggagaaaaaaaaataaaaaagccccttggggggggggccttgaatttaaaaaagggtttaaaaaaaaaattttaaaggaaaaaaaaaaagccattggggggagaggtataataatattttattaaagtaatggtgcaccgctaggaaaaaaaaaaaaagggcgagccaaaaaaaaaacgtctgggacattttgttttgagagggagaaaaagcacccaaacaattttgtcttgttaaattgaaccaaagaaaccttttttttgagaagggaaaggatgatcataaaa

SEQ ID NO: 65558 - DNA, 606 bp, Oryza sativa
  Clone ID: PAT_MRT4530_66595C.1
atgaacacaacaacggcgcggctcgcggtggccgtgcaacgtatgcaggcggacggtgatgcggcacagggcggcgcgcggcgcagtagcgcacgtgtgcaggagcggcggccggcacgaaggcggagcagcggccacgcgaaaacggagcagcggccggcacggtggtggcacggctgcacagcacgcggctccgtctctgcctacgacctgcaaaccccgtgccctcatgcccggctcttctccgccccgctccccaaccccatggcatcgcggtggacccgcacctccaaccgtgttggcaatgaccaccacctccgtgcggtgctgctcgcctctttcccgccgtctccacctggatccgccgccttccttgcggaccttgtcaacaccggcttcgtcactgatggtctctcctatgaccgcgccgccagccggctcttccctcatgaacctcgctgcctggtgcccctttcgcctctgctgacctcgccagggatggagggactcatcgactctcgtcggcatgtctcctgcgtcgcctcactggcgtgctcggactccccgcccatctgctcccctaccggccgaggacgcgtgggttag

SEQ ID NO: 65559 - DNA, 457 bp, Oryza sativa
  Clone ID: PAT_MRT4530_66596C.1
ttatttatctgaagagttgttcagaggcttgggtagctttagttgatttcctgctgctccattggttcttgctcttgttcttgttgctgctgctgctgctgcttttgctcttggtgtgtgttcatgtgaggagaaggattggaagaagggaagtgaagccgagattgggaagagcaggtttggtcaagaaggaagaacagagtgggagtttcaggagaagctgagagacaccaggacaacactgaaacaccaatgtgatcaagctgctgccatcagatttcccaactcaaataatccatagcaatgagaaggcacatccttgtgatctgcctccctctaatcacactcctttcactctccatcagcttaagctgccaatctgacccccaaattcagacccaagcacttctccagtttaaggccggcttgaccgaccctctcaacaatttcagacatg

SEQ ID NO: 65560 - DNA, 847 bp, Oryza sativa
  Clone ID: PAT_MRT4530_66597C.1
aatgtcgaaccctgctgccaccgttgagtcacaagttgcattgacaccatcttccactcccactccaaccaatgctccaagcgtcgaaataaatgattcacaaggtacagaagtagaacatgataataagagactgaaatctgcagcatggcaagattttgttaagaagaaaataaatggtgcgtggaaagctgaatgcaaatggtgtcacaacaagcttggagctgaaagtagaaatgggactaaacatttgttagaccatattaaaacttgcaagtctaggcaggctagaaaaggtctaacacaatccaatttgaagatgggaatagatgcagaagggagggttaccgtagggaaatatgtctttgatcaagaggttgctaggaaagaacttgcactgatgatatgcctccatgagtacccactttctattgtagaccatgttggttttcgtaggttctgtggtgcattgcaacctttgttcaagattcgcactgagttagatttgtatttagaagagaaaccgttgcctaggacacaagattttgatattatcaattggtggaagtttgggggcattaggtacccaactttgagacagattgcccgggacattttggcaatccctattacaacagtagcatctgaatcagcatttagtactggttggagggtgataactccaaatcgtaatcagcttaaacctaatcttgtggaggcacttatgtgtgtgcaagcatggggtcgtgctgatatgttagctgaaattgctaacaagaccaatgcattgaacacggtacttgacgatgaatcagaatcggaagcatctactgtcactgaagcttga

SEQ ID NO: 65561 - DNA, 1770 bp, Oryza sativa
  Clone ID: PAT_MRT4530_66598C.1
atgtcgaaccctgctgccaccgttgagtcacaagttgcattgacaccatcttccacttccactcccactccaaccaatgctccaagcgtcgaaataaatgattcacaaggtacagaagtagaacatgataataagagactgaaatctgcagcatggcaagattttgttaagaagaaaataaatggtgcgtggaaagctgaatgcaaatggtgtcacaacaagcttggagctaaaagtagaaatgggactaaacatttgttagaccatattaaaacttgcaagtctaggcatgctagaaaaggtctaacacaatccaatttgaagatgggaatagatgcagaagggagggttaccgtagggaaatatgtctttgatcaagaggttgttaggaaagaacttgcactgatgatatgcctccatgagtatccactttctattgtagaccatgttggttttcgtaggttttgtggtgcattgcaacctttgttcaaggttatgaccagaaacacaattaggaaggatattattgacttgtttggggttaacaagatttctatcagtaattattttcacaagcttcagagccgtgtggccagtactactgatttatggacaacaactcatcaaaagaaaggatacatggcaatcaccgctcacttcatcgatgatgaatggaaattgaagagttttcttttgaggtttatttatgtaccagcacctcataccgctgatcttataagtgaaattatttatgaggttcttgctgattggaacttggagagtaggctgtctactatcacacttgacaactgcagcaccaatgacaagttaatggagaacctattggggacaatgctagataagttgcctgctgatactcttatgttaaatggttcattgctgcatatgcgttgttgtgcacatattttgaatttgattgtgaaagatggaatgactatcctagataaaatcattgagaaggttcgtgagagtgtttcattttggacagcaacaccaaagagacatgagaaatttgaaaaacaggcccaacaaataaatgttaagtatgagaaaaggcttttttctggtaccaaatatgagaagtattggaaggatgtgcatggtattttggctattgatagtgttttggatcctagatataaacttcatatgttgaacgctatgtttatacaaatctatggagaagaggtggcaataagaaaagttaatgctgtgaaagaagacttgtataagttagtgctacaataccaaaatcatgttgaggagggtgttggaacttcagatggagttaatgcttcttcaagtgttgcccctccagggggatttgatttggtggatgatatatttgatcagtatatgtctggacaaactgttgcctcttcctcacagattcgcactgagttagatttgtatttggaagagaaaccgttgcctaggacacaagattttgatattatcaattggtggaagtttgggggcattaggtacccaactttgagacagattgcccgggacattttggcaatccctattacaacagtagcatttgaatcagcatttagtactggtgggagggtgataactccaaatcgtaatcagcttaaacctgatcttgtggaggcacttatgtgtgtgcaagcatggggtcgtgctgatatgttagctgaaattgctaacaagaccaatgcattgaacacggtacttgacgatgaatcagaatcggaagcatctactgtcactgaagcttga

SEQ ID NO: 65562 - DNA, 1962 bp, Oryza sativa
  Clone ID: PAT_MRT4530_66599C.1
atgtcgaaccctgctgccaccgttgagtcacaagttgcattgacaccatcttccacttccactcccactccaaccaatgctccaagcgtcgaaataaatgattcacaaggtacagaagtagaacatgataataagagactgaaatctgcagcatggcaagattttgttaagaagaaaataaatggtgcgtggaaagctgaatgcaaatggtgtcacaacaagcttggagctgaaagtagaaatgggactaaacatttgttagaccatattaaaacttgcaagtctaggcatgctagaaaaggtctaacacaatccaatttgaagatgggaatagatgcagaagggagggttaccgtagggaaatatgtctttgatcaagaggttgctaggaaagaacttgcactgatgatatgcctccatgagtacccactttctattgtagaccatgttggttttcgtaggttttgtggtgcattgcaacctttgttcaaggttatgaccagaaacacaattaggaaggatattattgacttgtttggggttaacaagatttctatcagtaattattttcacaagcttcagagccgtgtggccattactactgatttatggacagcaactcatcaaaagaaaggatacatggcaatcaccgctcacttcatcgatgatgaatggaaattgaagagttttcttttgaggtttatttatgtaccagcacctcataccgctgatcttataagtgaaattatttatgaggttcttgctgattggaacttggagagtaggctgtctactatcacacttgacaactgcagcaccaatgacaagttaatggagaacctattggggacaatgctagataagttgcctgctgatactcttatgttaaatggttcattgctgcatatgcgttgttgtgcacatattttgaatttgattgtgaaagatggaatgactatcctagataaaatcattgagaaggttcgtgagagtgtttcattttggacagcaacaccaaagagacatgagaaatttgaaaaacaggcccaacaaataaatgttaagtatgagaaagtaattgcccttgattgcaaaactagatggaattctacttatctcatgcttagcactgcagttttgtatcaagatgtctttacaaaacttggaactcgtgaaaaaatgtatactccttattgtccatcaaatgatgattggaagtttgctagggagctttgtgatagattgaagattttttatgatgcaacagaggctttttctggtaccaaatatgagaagtattggaaggatgtgcatggtattttggctattgctagtgttttggatcctagatataaacttcatatgttgaatgctatgtttatacaaatctatggagaagaggtggcactaagaaaagttaatgctgtgaaagaagacttgtataagttagtgctacaataccaaaatcatgttgaggagggtgttggaacttcagatggagttaatgcttcttcaagtgttgcccctccagggggatttgatttggtggatgatatatttgatcagtatatgtctggacaaactgttgcctcttcctcacagattcgcactgagttagatttgtatttggaagagaaaccgttgcctaggacacaagattttgatattatcaattggtggaagtttgggggcattaggtacccaactttgagacagattgcccgggacattttggcaatccctattacaacagtagcatctgaatcagcatttagtactggtgggagggtgataactccaaatcgtaatcagcttaaacctgatcttgtggaggcacttatgtgtgtgcaagcatggggtcgtgctgatatgttagctgaaattgctaacaagaccaatgcattgaacacggtacttgacgatgaatcagaatcggaagcatctactgtcactgaagcttga

SEQ ID NO: 65563 - DNA, 887 bp, Oryza sativa
  Clone ID: PAT_MRT4530_6659C.1
ctatataaacgctccccgagctccccacctccgtttccgccactcaccgccctctctcctcgccggaatcgagctcgcgccgtcgctctctctctccgccgtcgccgccgagctccggtccgctgccgtcgtcgccccggaccacctcccacctcggcgccgcctccttcggcttcgccgcatcctcgccgacctcgtccacccctccgtttcgctcgccgaccaccggagcgccgtcgaccccgtccacccgagccgcgccgccgccttcctccgctcaggtcgccgtttccgtcgtcgccgtcgccctcggggtgagccgcggaccgccgcctcctttcccccttccctctcctctctcggccgctgctccgtcgtgccggtggtcgccggcggcgaccatcggggcgcgggcgctgcctcctgccggccgcgccgacgtggccgcctccgggcgcgcctagcggctgccgcgtggggcccggccgtcagccgcccgcgccctcgggtgcggctgacgcgtggggcgcacggcgccggccggtgtgagccgggtgcacccggtccaccgtggacccacctcggccatataaggaccggtcttcgggcctctgttgcaaagcactaccgtacttccacatgtctagtggggcaaatgaaggctacacgagctgcggcccggtagtcgagatgtcatggcagagggttggtgccctgctgctagggggctcagtcctgcctgcctgtcccgggtgtcccggccgtagggggattgggtcggtactcttgtctaaggctaggatgggttggaaactatgtcacgtctttcgtctgtataccggggtggtatgtggcacgtggttgcacgtgagaaagatgtgtcttgt

SEQ ID NO: 65564 - DNA, 951 bp, Oryza sativa
  Clone ID: PAT_MRT4530_665C.1
atggccaagaacacaacaacgcagcagcagcagacgacgaggtcgtcgaaagaggcgggcggcggcgccgcggcgaggtcgagaggggtgtcgtcgaagaagtcgccgtggtaccagcgggcggttgaggtgttgctgctgatatggaagcagccgacgggggcggggacggggacggggacgacgacgaaggccgcggcggcggcgggggtgacgggcgggaaggcggcggcgtcggggatgggggctcggctgcggaagtcgtcgtcgctgaacgtggcggcgtcgttcacgcgggtctgcctgtgcgcgcctatctcgtcgtacaatgagcaggcgctctacttccaggcgggcgacgtggcgccgcgccggagctacagctacccgcgggcgtcgtcggcgtcggcgtccgggtgcagcggaggcggaaacagcaacccgctggtggcaccgccgcccgcggccgagcagagggcgctgatgaggacgcctggccccggcggggagagcgcgaggcggccggtgttccgcggcaagtcgctgacggacgacatcctgatgcggcggttcgtcgtcgacgaggaggccacgcggcggcgcaacgagatggaggtgatccggagccgccacgcggccgccgccaagcggcggcgcctcggccccagcccgctccgccggatggccctagcggaatcggagtcggaggccgacgacgatgaggaggagacgacgacgacggaagcagcggagccgacgtcacgaaatcaagtgatacgcactattagaaaaagcattatcgcaagcggccaaaaagggtcttcgcaagcggggcggccgtccgcctgtaaacaaacgactatgaagatcgccggtcttctcatgcggagcggccgtccgcctgcgaagataattttcgcaggcggattttcgcaggcggacattggctag

SEQ ID NO: 65565 - DNA, 398 bp, Oryza sativa
  Clone ID: PAT_MRT4530_66600C.1
tcgttagttctagatcgcgagcggcgcccttgttgggttttttttttttttttggggttttttttttttttttttttttttttttttttttttttttttggggcgggaaacccaaattttactacttgttagcacgggaaacccaaccctaaacaaaacttctgggtggggcccaagttccccaaaaaaattaaatcaagaccccaacttgataaatacactaggaccatggccttccatgggttggtcgggagggaaaaacttttattaccccttgggggggaaaacccgcaccacaaaattgttggccaccaaaccgggcttgatctttccggtggcccccttgggaagcttttcggcaaagtacacctttttgggccccttgaaccccgcccggt

SEQ ID NO: 65566 - DNA, 621 bp, Oryza sativa
  Clone ID: PAT_MRT4530_66601C.1
atggcctcccgcgacgccgccaccttccaggtctaccggcccatggcaatgccaacgccggcggcgctgccaccgtcgtcccagcagatcacaatgccgttcacggcggcgctcgtggacgccgtgctcccagctccccgaaaggcggcggcgacgcagggcggcaaggaccggcacagcaaggtgaacgggcgcggccggcgcgtgcgcatgccgatcgtctgcgcggcgcgcgtgttccagctcacccgcgagctggggctcaagtccgacggccagaccatcgagtggctgctccggcaggccgagccgtccatcctcgccgccaccggctccggcaccaccccggccgtcttctcctgctcgtccgccccctccaccgcctcctcctccttcctcctcggcaagcgcccgcgccaggaggaccacgaggcgccgacgttctgggaggcgctgcagcaacagccgcggcccgccgtgtcgtcgtggggtgccctcgtctcgccgtcgcaggaggcgcaggcgtacgcgtcgtcggtggcgcaggtccaccacctcaacctactctccgcgctctccggcgccgccacgagacggccagcacaggaggagtcccggtga

SEQ ID NO: 65567 - DNA, 144 bp, Oryza sativa
  Clone ID: PAT_MRT4530_66602C.1
gggctcaatcagaccggcctcgactctggcggctctggatcgttaagccaagggcatccaactggctcagagggggcccggtcataccagccaacacatgccgatcagaccggcttgggtctagcggtcagacaatgcaaatga

SEQ ID NO: 65568 - DNA, 487 bp, Oryza sativa
  Clone ID: PAT_MRT4530_66603C.1
tcggttcactgaccagcttcttcaagttgaactcaacaccatttcaacatcatccaacggtcttgcttgcggtgtatgtgaacttcacagaaacctgattaggcagcatgagagggagctcggtttggatccagagagtgttgttgggaacacagcaattgctcagcatgctgaagcattagctggagcatgggctgagttcaacaatcaaagttcagtagttctggtggttgttcaaccagaagaaaggtacatgtatgaccaatattggataactgtcgccttgagagaaatgtatggggtgacgacaattcgtcaaacaatggcttgtatagatgcataaggagagcttccgtcctgacggtacactaacaattgatggattgccagttgctgttgggtacttcagagcaggttattcacccaaatgattacccttcagaagtcgaaatgggaagcaagactcttgtatgagtggttctttgtt

SEQ ID NO: 65569 - DNA, 243 bp, Oryza sativa
  unsure (1)..(243): unsure at all n locations
  Clone ID: PAT_MRT4530_66604C.1
gatcgttttcttctttgctctccttgctattgctgcatgcagcgcctctgccgagtttgatgctcttactcaagtttaccgncaatatcagctgcagccgcagctcatgctgcagcaacagatgcttagcccatgcggtgagttcgtaaggcagatcgacgactgacagcacagtggcaacccctnnnncagtcagacgcgttcaactgagaancagtcatgcagcagctgtgagtcaacagc

SEQ ID NO: 65570 - DNA, 380 bp, Oryza sativa
  Clone ID: PAT_MRT4530_66605C.1
acgcttggtcgccctgtttttttttttttttttttaccaaacatttattcattcttattattggacatgatttttactggaatggccaaggtttttccaagaaaacccagggtcaatgtggaaaattttaagggtccgcaccagaccattggtaatgggggttggagtatttcgaaccaacttggaggattggttgagtaccccagggcagggaattcttaaaaggttagggcccaattgggtttaagctttattttttcttcctggccttaggtcttataacctacctaagtaggtttttttattaaaaaaaaaagcccggatgtaacaggaaaacccatttatatctcccatcccacacctatggtgatttggggggg

SEQ ID NO: 65571 - DNA, 231 bp, Oryza sativa
  Clone ID: PAT_MRT4530_66606C.1
caaataaaaacaacaacaccgtatctgggggtatcacccagggtcacacatgggacatatgaagaaagaaaaccggatatttaatttgcccaaaactttactgtcgaatcaacttgccagtcaacagttaaggtggctatggaactgtaaacatctttttacgtacagtgggagctatgatactatggcaaggagagaggctccatggcgacgggttgggtcacatttcat

SEQ ID NO: 65572 - DNA, 457 bp, Oryza sativa
  unsure (1)..(457): unsure at all n locations
  Clone ID: PAT_MRT4530_66607C.1
cccacgcgtccggttcatcaccaacaaacaaaagaggaaaaaaaacatatacancttctagtgattggtctgattgatcatcnaatggcttagcaagggtcgtcnnttcttcgcggcggcgctcaatggcggccccatggtggcccatcttctcggcgcgcanngctgagcgagtcgnnngagatgaggttcagggacagggcnnagtgccagcgggagggtgcaggacccagcccgctggaccgcgtgcnncggcaggtgctttcgaccggcagcttcacnncggccggnngagaggttccagccgatgtnntccgccgcccgggcgcgcttcggcccctgcggatgcagtgctgccagcagnnctgcaggacgtgagcccgcgagtgcccgctgcgccgccatccgccggatgggtgaggagctancgaggagagcatgccgatgcccctggagc

SEQ ID NO: 65573 - DNA, 172 bp, Oryza sativa
  Clone ID: PAT_MRT4530_66608C.1
atgcacctccccgcggtgccacacaccctctacgcctggatggtcaccaccaacaacgggggccccatctgccatgtctgcagtagaagcgaaaccccacgagaattcgaaaccatttcaaacctcccccgccagcgcaacgccgaaaacgcgaaaataagacagttcccac

SEQ ID NO: 65574 - DNA, 458 bp, Oryza sativa
  Clone ID: PAT_MRT4530_66609C.1
ggttggaatggaccatattttatggtaggaagcagttgcaagcaacacatgtagagttaattagctgaactagatgacactagatcaaaaaacaagcagtcactaacagtctgacacttgaccacatatatttgaaccatcaaatatatagatcaaatatttaaacgaactctttacaaagggcacttcattgaactcatagtgcacagcacacctgaccaaagagagaagacgtggaagcgtatacttacagtctggtaatgtggcagagggtgttgttgctgaaagtgcagtcgcacttgatgaatggattgatggtgggggtggtatcccaagcggttttggtaaaaggcaggaccgttgcagggctggccgttaatgttcaattccgacaacgccttttggcccaattttccaagattggtgttaagggccgccgcctcgagtggatcagtttt

SEQ ID NO: 65575 - DNA, 273 bp, Oryza sativa
  Clone ID: PAT_MRT4530_6660C.1
atgggagggtcgaggcggaggacgggaggaggagaaggaggtggcgaacccgcagccaccggctactcaccttctcgatttaggtttaattatcatgcgggtcccacattagtagacataaaatttttatgggacaaagatttaaagaaatataccgtcggtctcgcacaactgttgcgcaaaaatgatgtgggaatgacgtcgtgggcggtatcgcgtaacggaatagcgagaccgaacggtctcgctaaagcaacgagcgacactgtctga

SEQ ID NO: 65576 - DNA, 2148 bp, Oryza sativa
  unsure (1)..(2148): unsure at all n locations
  Clone ID: PAT_MRT4530_66610C.1
atccccgcgccacgaggcgctcatctccgcctcctccgagctcactgacaggtgggccccctccctcctccgagtcctcgccgtcgccgccgttgcctgctccgacctgacggacggagaggcggctggggctcgatcggacgccgccgccacgggaggccggaggaggggaggcacggcgaccggcgaccggccacgggtgggtgggtgcatgtcgacggccgccgcgtcagccgcgcgcggtaggtagatgaaattaaggaacacagcaataacacgagctaactcagcctgtcttccaatggaggattgtgttggtatcaagtacagcagtgtcaatgagggcgaagagcgtaagggaggccatggcgtcccaaaggtttccatcatcccactcattttcctcatattctatgaagtttctgggggtccgtttgggattgaggatagtgtcaaggctgctggcccactcctagcaattgctggatttctgctgtttgcactcatatggagtgtcccggaagccctgattactgcagagatgggcactatgtttcctgagaatggtggttacgtcgtctgggtctcttcagcccttgggccattctggggttttcagcaaggctgggcaaagtggctgagtggtgtcatagataatgctctctatccagtcctcttcctcgactatgttaagtccagcattccagctcttggaggtggtctcccaaggaccttggcggtgcttatcctcacagttgcacttacttacatgaactacagagggttgacaatagttggctgggtggcagtctttcttggcgtgttctctctactcccgttttttgttatgggattaatagctattccccgaatcgaaccctcaagatggcttgaaatggacttggggaatgtgaattggggtttatatctaaacacactgttttggaacctcaattattgggactcaatcagtacccttgctggagaggttgagaatccaaagagaacactcccaagggcactttcttatgctctagttttagtggtggggggatacctctaccctctgatcacctgtacagcagcagttccagttgttcgggagttctggacggatggatatttctcagacgttgcgagaattcttggtggtttctggttgcactcgtggcttcaagcagctgctgcactgtccaacatgggcaatttcgtaactgaaatgagcagtgattcttaccagcttctcgggatggctgagcgtggaatgcttccagagtttttcgccaagagatctcgctatggaaccccacttattggcatcatgttctccgcgttttctaccctctggctgcctgtgatgaggcagttccagttgttcgggacggagaactacctgtactgctttcatatgatcctggaattcatcgccttcatcaagctgagggtggtccacccaaacgcctcccgaccttacaagatcccactgggcaccatcggcgctgtcctgatgatcatcccacctaccattctgatcgtcgtggtgatgatgctcgcgtccttcaaggtgatggtggtcagcatcatggcaatgctggttgggttcgtgctgcagccggctctggtgtacgtggagaagagacggtggctgaagttctccataagcgcagaactgccagatttgccgtactcgaacgttgaggaagacagcacaatcccacttgtgtgctgacctgcatatgcatgccatgaaagtagaatccccaaccatagccatgctagacggaaggaacactgcgatttgcgacttgtttcgtctcacggcttttcaaagcctcttcatctgccatgtataattagaagagaagcaagttcaaaattgtgatcatgctatttgtataccatgttggcgtcagggaggattgtaaatcccagggccagtttgaggaaaatacttcacttggctattgccaatagcacctggttattcgttcattaaaaaggggcggagaagcgtgtgtcggggggtccgaggcccccctccggggtttgtgttttgctatcgatatatgcaggttctagaaaataacattgtacnataagatatgtcatcgctatcgaggttcagtcaaaaaagaaagaaaaaaaaaa

SEQ ID NO: 65577 - DNA, 3697 bp, Oryza sativa
  Clone ID: PAT_MRT4530_66611C.1
atgcggggttccatcgcgacctaccgggagagcctctcccgcctcgccggcgaggtcgacgacgccgcggccgacgaggcggagccccaggcctccgccgcgtcgtcgcccccagcgcggggcgcagccgatcgctcccacacgacgccgccctcgtccgggcggcggaggcgctactccgcctccgcctcctccgccgccgccgcccgccccgaccccgccgagcccgacgaggtgccggtttctaaactcaaagaagatattcaaaagcttcaagtttcagaagctgaaataaaggcattgtccttcaattatgttgcgatgttgaaagaaaaggagggtgctttggaaagatcccctcgtggagtgcaaagaaacacagttcaagataatccattgaatgtctcaaagcaaaatggatatggtggtggtgcttcacagggtatccagccaaatggcttgcactcaatgacagggcatcgcaaggcagacatctcggaaggggaccgatctttctttgctgctaaacaggctagccttgaaaatgagatcaagcaattgaaaaagcaacttagtgataattctgagaaagaaactgaaacaaaaaggaggttagaggatgaacacaagcggaatgaattgcttcagcaacagctaaatgaactaaatgtcagcaaagagaggatttcaactaacatggaagagctacacaatgagttgagtgagaaggaggcaaagttgagacgcttgcaagaggatttgagtagaagggaaaaagagcatgtatcagatgcttcccttcagagcctaagaagtatggtgatggctttacagaaggagaactcagatctaaagatagagaagagcaggctcgaggcagatcttgtgaggaagaaaagtacctcacaaataaatgaagttggtacatcagatgttaatgggatttctgatgtggaaaaggttaaggaagaaatggcttcattgaagaaatcattacatgatgcttcctatgaacgagacaaagcagttcaagatttggctcggttgaaacagcatttgctagataaggaccttgaggatcaagaaaagatggatgaagatagcaaactcattgaagaactgcgggcaatctgtgaccagcaaagggctcatatagtgcagttagaaagggctttgaagtttgagatggcgaagcaggaggagagcaagaaaatcattagtgaagaacaccagaggtcaaatgaacaaataacagatttgaaatacaagcttgcaaactgtatgaatgcccttgaatcaaaaaacctggaattgctaaatctgcagactgcccttggacagtactatgctgagagtgaagccaaggaacggcttggaggtgatttagctatggccagggaagaattggctaaattgtcagagtcattgaaggtggcaaatcaagcaattgaaatttcaagaagagaaaaggaagaggtagctgccaggctttcacaagtggaggggatgttggcagatgggaagcgctccatgcagaagcttgaaaatgacaattccagattacgacgagcgctggaacaaagcatgacaacgctcaataggatgtcactcgattcagataattctgttgacaggcgcattgtgattaaactactggtcaccctgcccgccccccccccgcggcgcggcgccggcgccgccgcctccgcctccgcctccgcctccggcggccccccccccacacgcggggcgccgcctccgcctccggcgacccccatccatcacgcgaccgccgcttcgtcggcatcctcccaccgcatccatcctgaagaagatcatcgtcaaaacatgtcgctcatttcgaagctgcggttgatcactgtggatgtcaccggtactctgcttgcctacaaagggcagcttggtgattactactgtatggcagctaaggctgctgggaagccatgtcctgactaccagcgaatgcatgagggcttcaagcttgcatacaccgagatggcaaggcaatacccatgctttggatttgcagcgaagatgccgaatatcgactggtggaggatgtgcgtcaaggattcttttgttaaggctggttatgagtatgacgaggagacatttgagaagattttcaaacggatttactcttcttttggctcgtctgctccgtactcggtattccctgatgcgcagcccttcatgaggtggcttcgcgggaaggggctcacggttggaattgtcagcaacgcagaataccgttacaaagacgtcatcttgcctgctctaggactgaaccagggctccgagtgggactttggggtgttctctggaatagttggtgtggagaagccagatccaagtatctacaggattgcactggaaatggcgggcaaggtcgcgccagaagaagcgcttcacataggcgacagcatgcgcaagcttcacccctgcacggagcatcggaatgcacgcgctgcttctggaccgattcaagaccgccgatgctgagagctggaggaagtctggagcaactgtgctccctgacctggtagctgctcaggagtggctcagcaagaatctcaaggatgagccagtagcagctgaacaaaatgtctgaccttagaaaattcagttcccctgtcactgagctgaattccctcttgtttcctagttatgaaacgagggaggcaaaagaaatgtgccattgatgtatttgtattgtactgatggaataggttatgtgatggttcttggctgctggattatgtaagctgtttggtgttgaactgttgatgctgattgctgaatatgtcaagcaaatcagtgtggcagagcattgttgtagtctcccatgaactgtgtttcagcgaagaaaactagttttgtttggcatcttcgcctgtctgaagcaataaaagcagggcaatttcagttctgtttgtcatgctggcaagggtgttgtccggggtgttttgggtcttccaggacgcttagttggaggcattgttggcggaaattcagcaggcaaacctactcaagcatctcaggacaaccagtcatttgcggatctatgggtggacttcctgctcaaagagacggaagaaagggaaaaacgagaagcatccgaaactgcaaggctgtcgcaggaagagaaccagactgccagcaccagcaacgcatcaagcgcgcaaccatcagggcatatctccaaccaagcacctggcccttccacaagccatcacatgttcggtcgtcaagacaccgaatttgcaacggttccactcacatcctcaacatatacctccacacagactccattctcaagaccaccccaaagatgattgtgatcaactgtacagtatcagatgcctttttcttcaaagcgtgcatcatgatgtaagctattcgtttcatttgttgacaatgttatgatatagccaaattcaaagttaccccctcattttttgttccccttcatcttcccgggatgtaaagatgtcatatgtaaatggactcctatcgttctacagaaaatggagataacatattgccagagtatatgattctgcaattgaaacgtttttgtacccctgttctgatatatacaagctagaatctgtttgcacttgtatgtgtgagtaatcgagtaaatacaagggagtgttgcaaaaaaaaaaaaaaa

SEQ ID NO: 65578 - DNA, 314 bp, Oryza sativa
  unsure (1)..(314): unsure at all n locations
  Clone ID: PAT_MRT4530_66612C.1
ttgntgtacagtgnacgtggttgtggcgaggttggcagttaagccgtcttcatattttaggactttttccttttatgtcccacactttccactacatattgtaaatcttataatctggcatccctgttgagcaaaaaaaaaaaaaaaaaaaaaaaaaaaaaaaaaaaaaaaaaaaaaaagggggggggggggaaaaaaaaaaaaaaaaaaaaaaaaaaaaaaaaaacataaaaaaaaaataaaaaaataaaaaaatattatattatttaaaataaaaaaaaaataatttaaaataataaatttatatataaaaa

SEQ ID NO: 65579 - DNA, 168 bp, Oryza sativa
  Clone ID: PAT_MRT4530_66613C.1
atgtcgtcttccgccagcccatctggtgcaccatcagccgaatacgccgagattccgacgttcccggaaagtccgattttgcaggagaagaatttgaagagttccaaggccagcaaggcaagtcacacagatcccaaacaaccctttgagcatgttgatcccgtttaa

SEQ ID NO: 65580 - DNA, 682 bp, Oryza sativa
  Clone ID: PAT_MRT4530_66614C.1
caccaactaagcctatcctgcttcatgattgttgctgcaaactttctctgcttgctgctggtgaaatctgagccggctggtggcagatgggagcctgccctatgttatgaacagctttcttcaacccaaagatcacttgctgcctgtggtcttgttcatttcttttttgtgttgtcaatttaattattatgatttcccatgtgctcgccgctgggtgttcttgtttttatctgttttgtttcaaggtgtcattatcactgagtagcatgcttttttcttatttttttgacagccttgtaaaataggcatatatacgggatgggagtaaatttctccctttttaaaggattttatctcaaatatatagatagtgaaggcaaatatacacaaaaggaggagctgtttgagggtaggtacgacaatctctcaattgactgggaaggcaaatctatatgttgagtttaaatctgctgtatctttggattcagcaccaaacttttgtacatgggaattctgctaatctgcaccggccattttgatgaaaatactctttggatcctgtcgttaattgttctccattcccatttttttggcagaggatgggcaattcttggaaaatactatatatttcttgtcgttgaatgtgatcatgtcccattattttggcacattgctgccattg

SEQ ID NO: 65581 - DNA, 1671 bp, Oryza sativa
  Clone ID: PAT_MRT4530_66615C.1
tccgtgcttttttccataccctagatcgagcgccgctttttttatttttttttgaaaggttcaaaattcagaacttattaattattacacaagccaatacatcaattacttctttgcatataaaaagaagtaacaaatccgtattgcacacaggcatatgcagcaaagccctgcatatttcattgccctatgtttcagagcaaaagaaattagcagccagctagctggcagtatcttccttcttaaatcttaacccacaagcttaattgttcccttgaaagaaattaatacatagatcaaagcaatgcacacacttgcactagctagcttagatttgttcttttggtagagctcatcgatccttaccttgtcgacgatcgaagagtgttgttccagtgtgtgtactgtgtagatggagcttgcttagcttcctgtctgatcatggaaagctctcgccgagctcagggacaagccctgcgagccaaggttgtctactgtgaactgctcggcctcggaggagtagaacaccagctgatgatgcggccctggagccaaggaaagcagtgaagggaacggcgaggtgtggtgagccgcggcggcggccacctgcggcgagccggcgccgctgtcttgcacgctgccattattccatgactcaccggcgtagtggaacggcatggcggcgccggcggcgctgttgaccatccccagcgggttgttcagccccatgaaccggtggtagccaccggcggggaacctccccactatgtgcgccgctccgccgccgcccccgccgtcgacgtcgtctccccctcctcctcctccgccgccggccgccgccgcctccttctccgcggccagcgcggccgccgccgccgcgacgtggtacttatcgtcgtcggcgtggtggtggtggccgtggtggtgcatcagcggcatggccgacggcaggtggtggtggtgtcccatgcagaggtggtcctgcggcgggaactgcagcggcggcagcttgtcgatctcgtggcgcgccgcgttgagcagccagtccaccaccttgctgggctggttgagccccagccggtcctgcaggtcgtacagctggatcgccgtcggcaccgacagccgcacccgccggtcgcgcagccccttcaccgtcttcaccttgctgtgccggtccttgccgccgaacacccgcgacacgcgcacgatccgcgactccgtctgcgccgaccattgccgcgacgtcgccaccgccgccgtgtgcttcctcgctagctccgccgcctcctcctccgccgcagctgccgcagccgcggcggcggccgcttggttgcttcctagtatcattcgtgctgttattgcttgtcatcttgagctgctcatgattagacaagcatgagcaagagggcgcttctccctcctctctctccccggagatatagatcacctcaattagcctcctgcaagcttggaattaatcaagccggccgattttcagctaggtgatgatgagcccaacagcctcgccgtcgccgtcgccgtcgccggccgggagagagggagcagcaagagggaattgaaccctagctctcagctagctgatggtgaggatcctcgtgccgggtccgcggcccgggggtccgctagtggagctcagagtgtgcctcgtgc

SEQ ID NO: 65582 - DNA, 409 bp, Oryza sativa
  Clone ID: PAT_MRT4530_66616C.1
ttttttttgttttttttaaattttttttgtggttttttaatttttttttttttatttttttttatttttcattatctttttaaaaaaacccccaaaaactgtccaacgtataatcaaaccgaaaacacccgttttttatcctcaaaaaatggggtccctttttcccttaaaaaaaaaaaaaaacaaatttgggggggaaaaaaaaaccttttttcttaaataaaaaaaaaactttttttttttaacccgaaccactgaatcaattaaaaaacccctgataatccttaaaaaaacccccttaactttaggaaaagttcccccttaaaaaaaatccccatttatcccattcgtttgaggggaaaacttccaatttaaaaaggggtcttttttttttgccaaaccccaaggg

SEQ ID NO: 65583 - DNA, 182 bp, Oryza sativa
  Clone ID: PAT_MRT4530_66617C.1
atggacatctctagggcaaatgaaggctacacgggctgcggctcggtattcaagatgtcatggcacagggccgcttttcctgggacggggattaatacactagcgttctggaaaagggagttccccggcgggatggtgttcaccaccgcctgcacctttggcaatgtggggcacgggagccg

SEQ ID NO: 65584 - DNA, 252 bp, Oryza sativa
  Clone ID: PAT_MRT4530_66618C.1
atggagacggtagagtctcaagcatccactactgacgcgagaaagcacaatgatgattatgcgtggcatatcaaggcggacgacatcccctccttgttgggagaccactgcttgtgcatgattctcccagttcatgaattcccactcccacaacgatgcccgtgcaccgcgcggacagacaagccggccggccacatgcgcgcaggatcggcaggtggctgctccacgcctcagcgagctactgctacgagc

SEQ ID NO: 65585 - DNA, 293 bp, Oryza sativa
  Clone ID: PAT_MRT4530_66619C.1
aggccgggcccgcttacatctgatagctttcataggtcatagactgccctcacagaccaacacaattctgtgctgcacacttttgtcctcactcatgtgcacccgggaaaaatttcccagtcagtcacccatcccaaattgctccaggccaagcacgctttaccctgaagttctttggagatcggcttccgaaaaaaaagttgcaacttgttgatatgagtattctattaatcctattaagccctaggccggaatgttacattgatacgccatgcatgagcacaaactcagcg

SEQ ID NO: 65586 - DNA, 430 bp, Oryza sativa
  Clone ID: PAT_MRT4530_6661C.1
ggaaacccaaacttttttaaggttgggaaagaggggagggctcgcagaaaactcaccaaaggaccagaaccctttgacaaagcacaggtccatggtgcgcatggaagagagatgactcctccaggaaagtatgagccttttaatgaacctgacggattttgctagtgaagacccatatgttgccgtccattactggcagggaggtctctcaatcagacagctccaagggaccgctataggcaaccaggggctgttcaaagaatacaacattggagagcatcgggaaggggccagccttgaaaggctggacacggacttacagaaagcggacacaccagtcaaggagagcagaactggacaaaacactgtccacggggacaaagggaaaatcctctgcagacccccctgagaacgattgtgcgggaaccct

SEQ ID NO: 65587 - DNA, 2382 bp, Oryza sativa
  Clone ID: PAT_MRT4530_66620C.1
gctagcagctgtatcaccccgccaaatatctataataaataaagcatccaatgccaccatagccaatgttttgtttccaagtttatttaagattaaaaatttccacaaacatcacaagggactaactcacaaaagggagaaaacattcaactgccccacccatttccactcgaaggaaagtaaaaaaaaagccccggcgctggacgtcgccagcgggaagaggggtggtaagaagaggaggtccctgaagccgagcttcgagaagcaggccatccgccgctggtccgcgagggcgccgtcccagcgcgcctccttcccctggcagcagcagcagcagcagcagcagccgggcggaggtgagggtgaggccgcgggcgatcaggaatccgcctcggatggtgatggcgatggcgatggcgatggcgtcgtggtcggcggcgaagcggccgaggcccaggaggatgggccgcgtcccgagccgagcttccttctcgggagccggccggtgtcagcgccgtggatgcacggggaagaagagcccatgacgaaccaattggtttctgacgaggaagggttggatggggatggtgcttccgaggatgagatgggtttagttgatggagacggagacgaagacgaagatttggggagtgaggaggagacgctaagtgagagctcagacggggaattctccgaggattatgcagcaccggccgcaaattcttcttctggccgagaaagcgcagcaacacggagctggctgagaggactatcccagagcacgagctgcggaggcttagagatgtggcattgaggatgaaggagaggatgagggttggtccaggaggggtcactcagctcattgtggagagcattcatcagaaatggagggtggaagaggtggtcaagctgagatttgaaggacctccaagcctgaacatgaagagaactcatgatatactagagaatagtgttgaacctatccatgttgaacataaatttcagaagtcaggtgcagatggactgaatcgctcagcatatattgtcaattcctctgaaaaacctacagagacatttgatatcgatagcttcttggatcagttgggaccgcggtataaagattggtctggtcgtggccctattcctgtggatgctgacttgcttcctggtgttgttcctggttacaagacaccatttagactacttccttacatggttaaaagtacccttcggaataaggaaatgacggctctgcgtagacttgcaaggcaaactgctcctcattttgctctagggagaaacagggaacaccaaggattagctactgctatcgttaaattgtgggagaaaagttctattgcaaagattgccatcaagaggggggttccaaatacatgcaatgacagaatggcagaagaaatcaggaaattaacaggaggagtgcttctatcgaggaacaaggagtacattgtcttctacaggggcaatgatttcataacacctaaagtaaggcaagtcttggtggagaagcaagagcaagcaatcacttggcaggatgaggaagaattggctcggcttaaagcatcagcctcgatcagtgtcaaacccaaagtatttaaaaatcccccagttgctggcactctcgcggaaactagagaggcaaaatctcgatggggagattccattaatgctgagctcaggaaaaaggagaagaatcacatgattcttacaaaacatacctctcttttgaggaacttgaagagaaaattgattttggcaaaaacaaaggtcataaaagcagaaaaggccttggctaaagttcaagaatttctctctccagcagagcttccaactgatttggaaactgttacagatgaggaacgcttcttacttcgcagaattggcctgaaaatgaaggcctttctaatgcttggaagacgagaagtttttgatggaacagtacagaacatgcacttgcattggaagcatcgagaattagtcaaggttcttgtaaaggggaagagctttccacaagtaaaacatattgcaatatctctggaagctgaaagtggaggagtgctcatttcagttgataagacgacaaaaggatatgcaatcattttgtaccggggtaagaactacaagacgccccaaattttgaagcctcgaaacctattgtcaaggagaaaagcattggcacggtctatagagctccaaaggcgggagggattaaatcatcatatctcaaatctgcgagacaagatctggaagctgaagtctcaacttgatgaccatcaggtacgaatgcaagttgctggggaaaaaccagatgcggagttacttcaaacagttgaggctgatttgtctaaagatgacgataaa

SEQ ID NO: 65588 - DNA, 633 bp, Oryza sativa
  Clone ID: PAT_MRT4530_66621C.1
gcacaagatgcgggttttctccttcaaaagcggcgtttggagcttcttcatactcgggacggcaagggtgatgattggtcttttttatggaattctgataaatacacagctaagaagttctataaactcacattctcgaatgtgcaagcaccgaggccttttgtttggatctggaaaacaagatgtgttatgaagtaaagtttttgtttagctcctcttcatggataggcttaacacaagggatatgctagaccgtcggcaatgtgcaaaggagaatgatgatctaacttatgagctatgcatgaataatgtaagagagacaagagagcatctcttcttttttttcccttcagttagaggtgttggcagcatttgggagtcatgtggaattctaatcttaacttctttcaaatggttgtttcggctcgcattcagttcaaccagaagggcttcttggaaatcttctttattgctgcttggcacatttggaagcaaagaaatggaaaaatctttcggaatgaacttccctccttcagttcttggagggcattgttcaaaacagatgttcttttgcatatgtgtagaatgaaggatcctttaaagcagatagtttttgattggttacaaactgtg

SEQ ID NO: 65589 - DNA, 3046 bp, Oryza sativa
  Clone ID: PAT_MRT4530_66622C.1
atggcgctgctcttcccaccaccaccccacgcgctctcccccaaaccccccttcccctccactctccgctccacgaggtcactgcgtctccgccgcgccaccgccgccgccgccgccgccggggccggagtctcctcctcttccccctcgacctcctcgccggagaaggccccggcgctggacgtcgccagcgggaagaggggtggtaagaagaggaggtccctgaagccgagcttcgagaagcaggccatccgccgctggtccgcgagggcgccgtcccagcgcgcctccttcccctggcagcagcagcagcagcagcagcagccgggcggaggtgagggtgaggccgcgggcgatcaggaatccggttggagtgggagctccacgctgcagtccatcgtggattacttcgacttcgactacgattcctcggatggtgatggcgatggcgatggcgatggcgtcgtggtcggcggcgaagcggccgaggcccaggaggatgggccgcgtcccgagccgagcttccttctcgggagccggccggtgtcagcgccgtggatgcacggggaagaagagcccatgacgaaccaattggtttctgacgaggaagggttggatggggatggtgcttccgaggatgagatgggtttagttgatggagacggagacgaagacgaagatttggggagtgaggaggagacgctaagtgagagctcagacggggaattctccgaggattatgcagcaccggccgcaaattcttcttctatgatggattcggtactggaccatgtttcttcaggtggtgggttttatagaggtactaggcggagtagcgtaaattcaattgttaacacaatgaggaattcgatggaggaaagtagtagaaatgctgcgattgagtgtcccgagaccgaggattttgtccagaagctcggtcctgtgctcctcccatgggagagggagggggatgtcgataggccgagaaagcgcagcaacacggagctggctgagaggactatcccagagcacgagctgcggaggcttagagatgtggcattgaggatgaaggagaggatgagggttggtccaggaggggtcactcagctcattgtggagagcattcatcagaaatggagggtggaagaggtggtcaagctgagatttgaaggacctccaagcctgaacatgaagagaactcatgatatactagaggagaggactggaggaattgtaatatggaggtcagggagatcagttgttttatataggggaatgaactacaaccttcgatgtgtgcagtcgtatacacaaactacagaggttaattttgataaaagagttagtagtaatagtgttgaacctatccatgttgaacataaatttcagaagtcaggtgcagatggactgaatcgctcagcatatattgtcaattcctctgaaaaacctacagagacatttgatatcgatagcttcttggatcagttgggaccgcggtataaagattggtctggtcgtggccctattcctgtggatgctgacttgcttcctggtgttgttcctggttacaagacaccatttagactacttccttacatggttaaaagtacccttcggaataaggaaatgacggctctgcgtagacttgcaaggcaaactgctcctcattttgctctagggagaaacagggaacaccaaggattagctactgctatcgttaaattgtgggagaaaagttctattgcaaagattgccatcaagaggggggttccaaatacatgcaatgacagaatggcagaagaaatcaggaaattaacaggaggagtgcttctatcgaggaacaaggagtacattgtcttctacaggggcaatgatttcataacacctaaagtaaggcaagtcttggtggagaagcaagagcaagcaatcacttggcaggatgaggaagaattggctcggcttaaagcatcagcctcgatcagtgtcaaacccaaagtatttaaaaatcccccagttgctggcactctcgcggaaactagagaggcaaaatctcgatggggagattccattaatgctgagctcaggaaaaaggagaagaatcacatgattcttacaaaacatacctctcttttgaggaacttgaagagaaaattgattttggcaaaaacaaaggtcataaaagcagaaaaggccttggctaaagttcaagaatttctctctccagcagagcttccaactgatttggaaactgttacagatgaggaacgcttcttacttcgcagaattggcctgaaaatgaaggcctttctaatgcttggaagacgagaagtttttgatggaacagtacagaacatgcacttgcattggaagcatcgagaattagtcaaggttcttgtaaaggggaagagctttccacaagtaaaacatattgcaatatctctggaagctgaaagtggaggagtgctcatttcagttgataagacgacaaaaggatatgcaatcattttgtaccggggtaagaactacaagacgccccaaattttgaagcctcgaaacctattgtcaaggagaaaagcattggcacggtctatagagctccaaaggcgggagggattaaatcatcatatctcaaatctgcgagacaagatctggaagctgaagtctcaacttgtacgaatgcaagttgctggggaaaaaccagatgcggagttacttcaaacagttgaggctgatttgtctaaagatgacgataaaatagaggatgaaggagaggaggcctacctgcaaacttacatcagtgaggatgaagaggaacctgaggatgatcagaatgaatatctctgaatcttaactggcgaaacttcggtgagtccgggagaaaagtcagtagtaaagcattgcatgttcatattgtgaaatttctgcagtgttactcaagaggcaggcagttttaagattcatctatggattattgccaacacaaattgacctgcaacagcattagtggcctttgtccattgcgagatcaacgacaaaggatgtagct

SEQ ID NO: 65590 - DNA, 283 bp, Oryza sativa
  Clone ID: PAT_MRT4530_66623C.1
ccacaggctgtctgattgtgggggctgtgtgtgaacccgtgggccaatgtctgagatgatgggtatctgacccctgacggtacctgatgggtggcaacccagtgaccatgtacccaaccccttgggcggtggtgcttggtaatggagtgtttgaacagtgatgagtgggttgcgggaagttgaaaaatgaagctgcagatatcatcatatgtgacatgtgaaactttgggtgatataaatagcaaataaagttgtctttcatatttaaaaaaaaaaaaaaaaa

SEQ ID NO: 65591 - DNA, 125 bp, Oryza sativa
  Clone ID: PAT_MRT4530_66624C.1
cggccaggggctctgcgcctctgctgcagcagatgcttgcccatgttgcgccggtgccactgccaattagctggtgggggcgcggcgcgttaaactcggtgtacgtgctctggcatggcatctag

SEQ ID NO: 65592 - DNA, 159 bp, Oryza sativa
  Clone ID: PAT_MRT4530_66625C.1
aagctttttttttttggtgtaacaactaatttattagcaccatattattagggcaattgtgccaaaagctctcggatatttaagactcacatggttcaagatatgacaatgttttggataaacagagtgatatagataggttatggcgttgagaagctt

SEQ ID NO: 65593 - DNA, 565 bp, Oryza sativa
  Clone ID: PAT_MRT4530_66626C.1
cccggtgtcgacccagcgttcttaaaaaaaataaaaaaaaaaatataaaagtaggagtgtaaataaaaaaaaaaaaaaaaaaaaatggagtaataaatataataagatattgaatgaatgaaaggcacataggaaaaaattgatgagtgggggttttttttgttaagcaaatgttaagtgcagtttgcttgtcatgctacagcactatgttggggggggggggtgatgagttcgtagggtggcaattctattaattttgggaagctgggttattttttatggggtgcctttttactgggaagtagtgaatttttgcttcagttcaggttggtgttacaacattatgcttaccgggtatattaattgttaagcaggccttactttagaatgtacatatagagcagttcgttaatttgttcattgacctggatctgggtcatgttcaagctttgctggcttttaacttgtcgtgtacttatggtgtctaccttttgccatattgtgggagtctttgcattacctgccttgggtgtgttttgttctgaattttaacagttttgttttt

SEQ ID NO: 65594 - DNA, 687 bp, Oryza sativa
  Clone ID: PAT_MRT4530_66627C.1
gtcggaaggtacctatacgccgatctgtatgcatcagcgatgtggaccggcacagaggctccagagagcagcgggaactacagctcgagtctgatctccttcagctgctccaagagttctcctatagcgtgtgacactgctgctggaagccccctcccatcacttgggtacatatactcgtttggcgaggacaacaacaaggacacctacgtcctgtcgagcaagggcgtctaccgggttgtgcggcccagcctctgcggctacacctgtccaacagagaaacctgcgacgaacactgggacgacgacgccttcgtcagcggcatcagtgacaggcaagcagatgatgggagcgcttctgctgtcggttcttatgttctgggttttggtaagatagaaactgcaaaaataagcctcttgcactgttagctagtactcctatataagtcatgatttgagtcctgatgcacccctcctcactcttttttcctttttcctttgtctgaacaatctcactgtcttgataaccgtatgtaaataatcagtatttcagttatgcaagagagggttgcatcattatcaaggtgaatgaagtttatttcatcatacagtaacatatattgtatatcattccataagtggcgacgtgcagtacagatacagtgtggcatgtgacagtttatttccc

SEQ ID NO: 65595 - DNA, 246 bp, Oryza sativa
  Clone ID: PAT_MRT4530_66628C.1
agctcacgacatccgagctagtcatttgggtatccatctcggagatcgtactcaggccgtccgtgcaccaagctcgtcttgtgaacgcctgccagcttaagccgggccctccggagcacgggatgacagatgaacccggcgcccacgaagccggagaagaaggacgccactgatgcaagaaaagacggacgcggcgtcacaaactgagccaagaagacatgagcgtcgcgccgtagcagcggaaaa

SEQ ID NO: 65596 - DNA, 1968 bp, Oryza sativa
  Clone ID: PAT_MRT4530_66629C.1
atggctctcgtagtggtaccgcccggccaaatgctactgtatttgctgtacgggccggtggtggggaaggtggtgcaggagtggagggagcaagggaggttgccgctggggacgtcgtggtgcctccacctcatcctcctcctcgcgctccggtcgctcacctaccagctatggttctcctacggcaacatgctcttcttcacccgccgccgccgcgtcgtcgacgacggcgtcgacttccgccagatcgacaccgagtgggactgggataacatggtgatcatgcaaaccctaatcgcggcggtgctggtcaccagccgtgtcttccctgccacgtcggatctctcggcgtgggacctacgtgggtgggccatcgctgtggtgctgcacgtggccgtttcagagccggccttctactgggcccaccgggccctccatctgggcccactcttcagccggtaccactccttgcaccactccttccaagccacccaagctctcacagctgggttcgtgacgccattggagagcctgatcctgacgctggtggcgtgggccccacttgcaggggccttcatggcgggacacggctccgtgagcctggtctatggacacatcctcctcttcgactacctccggtccatggggtacagcaacgtcgaggtcatctcacacaagaccttccaggattttccctttctcagatacctcatctacacaccatcgtatcttagcctacaccacagggagaaggactccaatttctgcctgttcatgcctctctttgatgccctgggagggaccctcaaccccaagtcttggcagcttcagaaggaggttgacctaggaaagaaccatcgggtgccggactttgtgttcctggtgcacgtggtggacgtggtgtcgtcgatgcacgtgccattcgcgttccgagcgtgcagctcgctgccgttcgcgacgcacctcgtccttctcccgctctggcccatcgccttcggcttcatgctcctccagtggttctgctccaagaccttcactgtcagcttctataagctccgcggcttcctccaccagacctggagcgtgccccgctacggcttccaggtcacacgtttcatccaagcctcaaggctgatttccattgaactgtatttcatcccttcggcgaagaagggcatcaatgagatgatcgagctcgcgatcctgagggcggacaagatgggcgtcaaagtgctcagccttgctgcactcaacaagatgtcactgaatttgacggcaggaaagttcagtgaaagatcgaatatattaactgaaactgtaaatgaggcgctcaatgggggtggcacgctgttcgtccgcaagcatcccgacctgcgggtgagggtggtgcacggcaacaccctgacggcggcggtgatcctcaacgagatccccggcgacgtcgcggaggtgttcctcaccggtgcgacgtcgaagctcggcagagccatcgctctctacctctgtaggaagaagatcagagtcttgatgctgacactgtcaacggagaggttcatgaatattcagagggaggcccctgcggagttccagcagtatctggtccaggtcaccaagtaccaggctgcacagaattgcaagacgtggatcgtggggaagtggctgtcgccgagggagcagcggtgggcgccggcggggacgcacttccaccagttcgtggtgccgccgatcatcgggttccggcgggactgcacgtacgggaagctcgccgcgatgaggctgccggaggacgtggaggggctggggacgtgcgagtacaccatgggccgcggcgtcgtgcacgcgtgccacgccggcggcgtcgtccacttcctggaggggtgggaccaccacgaggtcggcgccatcgacgtcgaccggatcgacgccgtctggaacgccgcgctcaggcacggcctcacgccggcgtga

SEQ ID NO: 65597 - DNA, 2610 bp, Oryza sativa
  Clone ID: PAT_MRT4530_6662C.1
atgacgcctccaccgtcccagacagagattagtcaggacaatcttatccctgccacgatggaaagtttgaatgatgaacaatgggcagagatagggaacatggtgcagcagctgcaagaagcatgtctcaagaccttctccatagcgcaacaaggaatagtcgttcagaagacaaagtttcgaacgtcatgcggagaaggggaaggatcttgtacgaaagacatcaaggttgaacaagatgaggagatgcaaaaggttctcaccaaattcaatcaactggcgattcaagatcatgttgattcagctgtgaaccacgcattgatcaaccagtctagggtcttggtcaatacacttgctaatttgatcaagtcagtggttgatggatccattgctgagcacgaggagagagggtcagtttacttgccgggtggagaatttcctaactatagagaactcaagactagcattggaggtggccgttttcaagacaataatgtgatggtttcaagatcgaagcagccaccgacatcaggggtttttggttcaaacacgatgatacccgaaaagctggctgaaatacttaagagtaatccacttcagccgataggcaatcagtttgagcaagtccaaggggtcatccaacaacagcccttggctggcatgattgcaaatatggtgagagaacaatttggcatcaagccaaaagacagcgggcaggatattgtttctacatacgagcacatcagccggttcctagcacagtgcggtgaagcatcggctgtagaagccctaagagaggcttcggatcgttcttaccctcaccacttcgtcgcatccaaccttgccaacttgccacggtggctggaggacggcgccagagaggctggcaccgtctcgttggatgatggtgccaacgactctggcgcccccaaaaagaccatttcagtgaacttggcacctaacgcggggctacatcggctttcgatctccggcgaaggggaccaaactgactggtacgtccgcatctcaccaaccttgggaactgcactggagctaaccaaaacggaaagagaaatattggttaaagacaagtttgcccatgggcccacttgtcaatccctctttctctctctctttctctgctcatcttcctcccgcgtccccggggtgtggcgctgcgacgaggcgtggaagctgtacgaggctgaggacgagaacgacccgttcgacgtcatacactcggagagcgtgccgtgttccaccgctgggacctcacccggcccgcggcgacgacgagcgcatgtcgccggcgtccaaccacaacctggcccagtcggtgaactggtgctgtctgaggtgcgcttcttccggagctatgcgcaccacgtggccatcagcgacgtcgcgagggagatgttgcgcgacatgtaccagatccccaaccgcgtgcacgtcatcctcaacagcgtcgacgaggcgcagttcgagcccgacggcgctgggccgcgcgttccgggaggacctcacgctgctcaagggcgccaacctggtgctcgcgccctagcgtcgtgtgcccttgcgccgccgtcgccgccgtcgctccagccgtgcgccgccgccgttccagacgtcgccgtcgctcgggaagaccgtcgtcgtggtcgccaagtcgtcgccgtcctcgtccgccccttcgccgtcgctgtagaccgccggagcaccgtcgccgtcgtcaagccgaagagcgccgccgcttcttcttcgtcgccgtcgccgttcgttcctcttccgccgtcgctttggtcgccgatgcggcgttacaagcctgagtacttgtttggtgttgagggatttatccaggagttgcgtacgatgtcctttgtcattggatttgggactgcccctttttatgcccagattcctcatgatcgtcacgaagagaagtgccgagtcaaagtcaccttgaacagtaatagtgaagatatcccctcagtgatgttcgaagctggaggaagaaactacatccatgcatgtcaggaggtggcaaggatcgccataagagagctccgcgatcgctacagtgatcagttggccgacactgagtatcgctaccatcctcgccaatcccaaggaagtgaccgtggcagctaccttgagactgaaggaattgagaatgatgctaccacaaggcatttggttgagatgctgtgggctatggatgaaagtcgtgcggagactgtgttagcggctcaagatcgtgaagaccggaatcgtggtaagatttgcaagctagaagacaaagtggatcgtttggagaaggagctagctacgttgaagggagaagcaccgccgcagaaggccaggattcgtcttaccgcaaggaagagagctctatttgtccctcgctaccaattggcgccaaaggtccgtgtggtggagaaagaagttgccccaaccctagcagatcctccggtcatcatcataagtgatgatgaagaagaagaatccaagcgcaaccattccaagattgagtgggtagctacccaagatgatgaagacgagccgaacgagccttcaatcgacctccgatgctcggaagaactagagtga

SEQ ID NO: 65598 - DNA, 2298 bp, Oryza sativa
  Clone ID: PAT_MRT4530_66630C.1
ggggcggcacctacggcacgaggcagagagagagagatctctccattcttcccaacccagcagttctagctagctagctatctagttcatcatccccatccaccgagctcgatatccctggccatggccatctccatggcctctcccttgtcttcttggccttgggcattcttaggctcatacaagtatttgctgtacgggccggtggtggggaaggtggtgcaggagtggagggagcaagggaggttgccgctggggacgtcgtggtgcctccacctcatcctcctcctcgcgctccggtcgctcacctaccagctatggttctcctacggcaacatgctcttcttcacccgccgccgccgcgtcgtcgacgacggcgtcgacttccgccagatcgacaccgagtgggactgggataacatggtgatcatgcaaaccctaatcgcggcggtgctggtcaccagccgtgtcttccctgccacgtcggatctctcggcgtgggacctacgtgggtgggccatcgctgtggtgctgcacgtggccgtttcagagccggccttctactgggcccaccgggccctccatctgggcccactcttcagccggtaccactccttgcaccactccttccaagccacccaagctctcacagctgggttcgtgacgccattggagagcctgatcctgacgctggtggcgtggtgcccacttgcagggcgcttcatggcgggacacggctccgtgagcctggtctatggacacatcctcctcttcgactagcttccggtccttggggtacagcaacgaactggcaagacgtggctggtggggaagtagctttcgtcgagggagcagaggtgggcgccggcggggacacacttcccaccagttcgtggtgccgcctaccattgctgcctgtccaggcttcacttacggcaagctcgccgcgaccctcaatcccaaggcttggcagcttcagaaggagctggacctaggaaagaaccatcgggtgccggactttgtgttcctggtgcacgtggggtgcacttcctggaagggtggggtcaccacgaggtgggcgccatcgaacgtcgaccggatcgacgtcgtctggaaggcggcgctcaagcaccgcctcacgttcgcctgaccgctgctgccggaggctagcggcgaagccattgagaacgagccggcgatcttgtgggatttggtgtgctgtaagatagaagaaatgtacgactaaggattccattatttctgggatttaaattaattaaaaatttaaatcaaatctccctctaaaaaaaaaaaacggacaagatgggcgtcaaagtgctcagccttgctgcactcaacaagaatgaggcgctcaatgggggtggcacgctgttcgtccgcaagcatcccgacctgcgggtgagggtggtgcacggcaacaccctgacggcggcggtgatcctcaacgagatccccggcgacgtcgcggaggtgttcctcaccggtgcgacgtcgaagctcggcagagccatcgctctctacttctgtaggaagaagatcagagtcttgatgctgacactgtcaacggagaggttcatgaatattcagagggaggcccctgcggagttccagcagtatctggtccaggtcaccaagtaccaggctgcacagaattgcaagacgtggatcgtggggaagtggctgtcgccgagggagcagcggtgggcgccggcggggacgcacttccaccagttcgtggtgccgccgatcatcgggttccggcgggactgcacgtacgggaagctcgccgcgatgaggctgccggaggacgtggaggggctggggacgtgcgagtacaccatgggccgcggcgtcgtgcacgcgtgccacgccggcggcgtcgtccacttcctggaggggtgggaccaccacgaggtcggcgccatcgacgtcgaccggatcgacgccgtctggaacgccgcgctcaggcacggcctcacgccggcgtgaacgccggcgacggcgacggcggctagtagtaactacgtacagcacggggacgccgaataactttcgtgttgtgcgtgtgtgtcgatcgattgtacgttgcattgttcgctcgcccggctagcttaattaattatcgggcgtgcttgtgttgtgtgttgatagctagcgtcgtacgtaagaataccgcagaaatgacaagaaagaatggatgattcctcgtaaaaaaaaaaaaaaaaaaaaaaaaaaaaaaaaaaaaaaaaaaaaaaaaaaaaaaaaaaaaaaaaaaaa

SEQ ID NO: 65599 - DNA, 2887 bp, Oryza sativa
  Clone ID: PAT_MRT4530_66631C.1
atgctccgtaggcagaggcagtactttgagcaaaagaaaaggcaacagcagagtccaggagtacagagccaggttgatgtatcaggcactggcagtcaagcttatcatgatcaggctcctcgatcgcttgatgttataaacctgaacaatctggcaaccccaattagtcatagcagtggccctgaaactgtagataatgttgttccaccactggattgcactcttttaagtgcttctcctatagagggactaaagaagatcacttctgcgtgcagcaatctgaaggaaccatgttctcagccaagattgtcatcatcctctgaccatcacgatggtgcagcttctgctaacccatacaaggaaccgcttggttgcaaaatacccccaccaaaaagcaacagtgtcaagaaacaaaatccaaatgtggaactcaataatgaaatttcactttttgatttggtcagtgatgagggaccaaataataaatctactgcacgacctgcccgtgaagctcatgtttcgttttctgttaaaggccttggccatgtcaagatggaaacacctcctcaatcaccaagatccaccaaaaggactttgcctttgcctcccaaggtcatgcggtacacacagaacaaagctagaaggtatattccctttgatgcgacaaagcaattggattctataataaatgatatcaacgtgctgaaagagcgaagattttcagaaaagaggacttgtcctttagatgaatcaggctatgaaagaagcaaacagtctaactgttattttccacattcatttgagaaccacaataataaattctttcctgaggatgaagacatgttttgtgaaacaaaagctgaagaatgttggcgatcaaagcatggtaggttggatgataatttaactgatgaaaattctgagagattgtggaagatggaaccatttaattcagaggatcgttttcctactccaatagtggaacagtttgatacacgtgattatggttttaaagatagatactctccagaacaaagaacttcaacaagaactaacacaagatttgagacatcaggaattacagcaacacatgacctcttttctgatcaatcgatgatggacaatggcaacgatacagtactttttgactgggaaagcatttatcttgttttattttgtcaattcaaagtaatgaaggatggatcctgcaagaaaccatcactgtcggtagaatgtgaagagaataaaatgaatgagaaggatgacttccacataagctttgataacttagatattccaaaaatggatgcacatcttgatggagtttcactattcgacaatctggaagagcaccacaaaagaacagatgatcagaataatcttgaagctggatattggtcagacaaggctacagagaaacagagaactcgagaaccaagttgtcgtttatcacttaaggagaagttttccaattggggttctacttctcctactacccattggaagggtcaaactggattaagtaacccatcaagttgcactgtgttgcatgaggataagcctttcaattctgcatcagaaatgagcacgtatcaaactgcagggtcaagttcacctgaaaggaggccagcttcaaaagtttctcctgtgtttcatagacctgacaatgccatttttgatgatgacattcacctacagagttctgtttcagatatatttggcgatagaattgaattttcaaaaccaaactgttccatgggtcttcagagtgacattgatatgagtactttcttggcagagaaggttgacaaacggaaagaagataatttagatacctccaagaaccaaaatgcagacatgtttcttccaaacaaatctgtgagttctgttagacagaatgtaggtggtcaacacagttcatgtgctcagcagcctggcaaggattcattactccaaggtttcagtcctggtattgattttcaggattccagactaaattcattttgggaggatggccttgctgataatggcacttttcagggagatattgaactgaccgatctgttaacaagaaaaaatagtgacaagaatgaagacagaattgagaagctctcgaagccagaaacaaaaatgttgacagaaacacctcaagcatatccagatcacagaaatgagatgagagaaactgaaacctgttctgatggatcagaagtgactaatcctcctggagtgcagaagcaaacatcattagcgacacaagttcctgcaaacttgggttgtcttcaggaaacctcaagagaaatgctcaaggttcatgctcatactgaatgtgtaaaaagggaaaagataggctcttttcattctattgccagagaatatccctgtgttgatttcagtactccattgcatttgaggaacaagattcctgatgttgatcattccaaaagcaattttatgttccattcacctttcgttggagaggaggtggggattgagaagaagataatagcaagtgtgtcaccgaacaacagtgatgttcagtataaagttatgcttgaacatcgtgttctccgaaggctttgtgttcaaaagatagtggttgatacaccaatcaagaacaagctagacaaggataatcacttcaggatgatggaggatgggtatcatgtccttccaaaaagtgtttaaacaggtaagcaacaggaatgcagcatgtcttattgtaagatcttgtgttgaagtgagaggtgactcgagtcattgggtgtgattcgtgaagttagaatgaaatgggatacagtatgttaagcattcgcccacattgcctgctacgatctgttacctaagtgattattagggggaaatgattccagtgtttttgtcttcc

SEQ ID NO: 65600 - DNA, 597 bp, Oryza sativa
  Clone ID: PAT_MRT4530_66632C.1
ggagagagagagagaactagtctcgagttttttttttttttttttttttttttaccaaacattcatgcattaaccttgaagtcttgaatacacacattattcagcttggcaagagcatcatggcatggaattctaattcctgctgcattcacacaccaagagacatgatgacaaagttcagaacttcagatttacgaaaattaacggttgaccttggtggcatcaaatggagcagaatatgaccgtacatacacgatcaatttgctggtttgtcaaaaagagttacttctgtacatcaaactagaggtgttgccaagcaagtaggtgagtcagcgacagttttagggctctgcagaaaccaggctgcaaatgatggcggatttcgcctgagccaggctgagcctttggcacttgaattttgtcagacacctattctctgcatctcttcagcatattataaattatacacaccatatagagttcttttccaggatttcgttgcacatgctgatgtcatcagtcatcaccccacatttgatggtatggtgtaacagtggaaaatcctctccgaacaatccagagttgcatatagagttt

SEQ ID NO: 65601 - DNA, 444 bp, Oryza sativa
  Clone ID: PAT_MRT4530_66633C.1
atggagccgcacgaagaagatgaagtcgaagatgccgaagagtttgaagaggtgttcaccgtggaagacttaatcgtagaggatgatatttttgaagaaatagtagcagagggattcaaggccgacatggacagagaagcatcgaagcatcgactgtacatcgccgacgtcgacagagtggaccaaggagcggccatcaggatgttagcttatggaacctcggctgatcaacttgatgaggtcttgaaaatagctgcaagcacttgtttggagattttgggaaaattcgctgaagttcaagtcgtcattcattacttcgacaaacagtctgccgagttcatcaactcagctgctggggccatcaccgtctcctacgtcatgcagctactgactgccggcgcagcctccactcatctcaccgtccccgtccacttcggccgctag

SEQ ID NO: 65602 - DNA, 717 bp, Oryza sativa
  Clone ID: PAT_MRT4530_66634C.1
atggaggcaatggccaaggcggcagtggccgcgatggcgttggcgaaggtggccatggcggtgacagccccgcgacagctgcgacggccaaggcgtgcaggcggccacgatactggtgagcagtggctgtggcgaggatggtgggcggcgggggaggtgggcgggcggtggcgaggctggtgggcggcggatctggtggtgagggaggctcaagggcgtgtatccggcgtcttagttctagccgacttccaagcatacttcatcccgcctcccgaagttaccgccgtcgcctacttcctcgacatcgccgctcgtgggagccgccgctgcgaggaattgcctcatggtttgtcgccttcgtcgatttcctggctccctcaacacccggacacccaagcgccttgccggtgagggccgccgccaagcttccgccgcttgccgaggccgtgcactgccacttggagcttgacaccgcaagtcaaagccatcccccgaaatcaggttggatctcatctcatctcaccaattgctccgtagcaatcttgtggaatcctagttgtatttatggggttgatttcatccgttcttgagtccaaatcgaatccgctatgtctttcgtgttgaacttggtatccgcccttctgtttttgtttttgtttttgatttggattgtcatggtttgagattttggcgagaatgtgggattctatttgtgtg

SEQ ID NO: 65603 - DNA, 806 bp, Oryza sativa
  Clone ID: PAT_MRT4530_66635C.1
tttttttttttacagtagaagaggataaatacgatgcttcttaatttcaaatacgcacgcacgcatggttggaacgataattaaacagatgcatgcatgcatgcttattgagatagatgctatatactactccctccatattttaatatatcacgccgttgactttttatccaacgtttgaccattcgtcttattcaaaaaatttatgtaattatcatttattttattataacttgattcgtcatcaaatgttctttaagcatgacataaatattttcatatttgcaaaaaaaaattgaataaaacgaatggtcaaacgttggtcgaaaaatcaacggtgtcatacattaaaatacggaaggagtataacataggggtacacaaacataatgatacgatatatatatatatattttgcagcaagcagatgatggatagatggatggatgggttaggcggtagattccttgaggtaggcgatgaggtcggtgcgctcctgcggcttcttcaggccggggaacaccatcttggtgcccggaatgtacttcttagggttgagcaggtagtcgtagagggtgccttcctcccagacgacggccatgttcttgttggcggtggagtaggcgtagccgggggtggtgccggactggcggccgaagaggccatgaaggttgggaccctgcttgtgcgcgcccccgcgctccaccgtgtggcactgcgcgcacttggtccggaagatcttcttgccgctcgccgcgtttccaacgggggccacgccgaaagaagccatctagctagctcgtcga

SEQ ID NO: 65604 - DNA, 657 bp, Oryza sativa
  Clone ID: PAT_MRT4530_66636C.1
atggcgtcgatctggtcgctcgattcacacggtttgtcacggagctcgtggccgtggaaggggagagaggacgttgtcgccgtcgctgctccgctcaacgccgagctcgtagctgggtcagggaagatgggagaggtagaacggcgttcggaagtggagaggcgccaacggggagaggggagaggccgccggcagcgggagttcatcgtagaggtgggggagtggggggacaccggaggcgagttcgtcgccggtgaacttgccgaggtggggggaacgtcaaccacgcgtcatggttggtacgatatcgtttgtggcatagtgattgcacgatgtcatgaacttgttctggttggtagccatgtcgcaaacatcatattcaatcaaaggagggaggcttgctgcgggtggcaagcgagcgcggtaggcgggtggatgcgggtgtggagacgcgcggggaagaagtgggagatagggagaggaggccggctctcattgcttgtcaccagcagacgggctaatgcgggcatggcgacgcgtggggaagaatggggagagggggagaggaggcgagcacgggcgcggcagtggctgcgggagagggggagagaggcggtcgggacggcgggagcaatgggtggggtggcggcgaagtga

SEQ ID NO: 65605 - DNA, 276 bp, Oryza sativa
  Clone ID: PAT_MRT4530_66637C.1
tcctctccgctactatactgtcctctctgtgctccgccacctaaccgcactacccggagatagagagagtgagagagagagagatccacatcactcacagcatcaaatcacctcccactttgtcccagatgcaagccgtctgcaccacccattggccctcctcgcagacccctccgggcgatctgatgccctcacacacagcggtggtggtcatggccaatgcggcgtaagcctatgtcgtgggattacaaacgcgttcctgacaaagacgccaac

SEQ ID NO: 65606 - DNA, 118 bp, Oryza sativa
  Clone ID: PAT_MRT4530_66638C.1
cattaaacttcggatgaccatgtcttggtcatacgagctccgaattgacccgttcaactctcttaatcttctgtcgttccggaggttcctgaagcgtggtttgcagtcgttgccgaag

SEQ ID NO: 65607 - DNA, 411 bp, Oryza sativa
  Clone ID: PAT_MRT4530_66639C.1
atgtcggtaatatcctccaaccgccatagggaagccatccacaccgtctatccaaaacctggatccaatggtgcttcggttggttctgccgaacccagcccaaactcgcatgatgtccctatggtcgagcttgagaccataatcaaagcactgccaggagatagtccagattactacgcatttcaggttgagattaagaatgagggtcagacgatgcctaagtacacggttagctacatcaactttacactttggcgatcctcgggtttagatcaagtgttggaaatgtcagaaatggtatatttttctatgttatgtgatgtagaattggaggctgagtcggtgtttattcaggtgataccacttcggaatgcaactagagttcatctcgtcatcggtaaaggcaagtaa

SEQ ID NO: 65608 - DNA, 465 bp, Oryza sativa
  Clone ID: PAT_MRT4530_6663C.1
caaccaaaatctaaactttgcgctgaactaaacacagtcatagtctactactagctccaaatcatctatagttaatgtaatagtcaattcatacaatagttgcttactatactattaatacatagtcccacctgtcatatacacattacgttggtcccacctgtcatacacacattacgtcttggagtccatgctacagctggctacagatttgtagcccgctgttcttctctctcttcctttatctctttaaaatatgtttatagctggcttatagcctgctattgtactactacacagatcattttcccgtgcggtcgaatcagattttcacgtgcggaggttcggcccgtctggggcaattcgtttgggaaaatcgctatttttgtgtgcgggtggcggaaccgcacgcgaaaatcggattttcgcgtgcgggtgcttatgttgcccgcacgcaaaaataaa

SEQ ID NO: 65609 - DNA, 502 bp, Oryza sativa
  unsure (1)..(502): unsure at all n locations
  Clone ID: PAT_MRT4530_66640C.1
ggcgnaaagaccaattagcaacaagagtgatgagggtcataatgaacagctcgtgatcctcctacgatcggccgttgttgctgcaacttgaacgcaaaaccgctccaattattcaaggcgctaacacaatcattaggccgtggtcaaaagggacagccttgcacccacgcaggcaccaccaccatgcctcctccgggtgctcattcatgcccaattggtaattggccaatcctgttctcctgtctgcaaatctaccgcctggtcatttttttctgaatttttgacagagccatgcctgcctgtctaaaatttgccgttctgacaagatgctggattttactggagcagcgaaaagacggcggcagcaggagtgtgtgcgactgcaaacgaatcagctacagtagttggtcagtctcatgctgttctttgaatcccaacattacctgaaaaaaacgcacacttgttactgcttctgttgnngttgtggtcaaggatgctggct

SEQ ID NO: 65610 - DNA, 787 bp, Oryza sativa
  Clone ID: PAT_MRT4530_66641C.1
gttagaatgacttacattgtgaaatgaaggaattatcaattaggcctaaagtaattgattttgcccctttggtggatagagtggagagacgtctttcaacaacaatagcactcctttcttatggtgatagattgacaattgtaaatgcagtactctcctctttgccaacgtattatatgtgttttctgtctcttccaaaatctgtaattgagagtatagatagggcaaggagacattgtttatgaaggggttcagatataaattcaaacaaaaagtctttggtgatgtgggacagagtgtgtcagccaaagtacaaaggtggtttaggtttgttttggaaggatctgtggaataataagctcagatcatctgtatttcctaggattcactctttttccaggaatgtcaagatttcagttcatatgttctccttaaaggatctttcagaactttttgtcttgcctttgtctgagcaagcctctcaggaatatatgataatgtcaacttctgatcctatagatcaacttaatgatgagaaggatagctggacttatatgcttggggtaatggaattttctcttctcagaagtaagctacaaatttttcgtagattcaggtgccagcttatatcaattgaatctgaaagagcaagtgtgtttccaaggtcaaagtttttggttggcttcttttaatagatcgcttaaacactcatgatatgctggacagaaggcactgttctcctcaaaatgcttccttgatgtgttttgtgtgctacaggagtgagaaa

SEQ ID NO: 65611 - DNA, 684 bp, Oryza sativa
  Clone ID: PAT_MRT4530_66642C.1
gcctaaagtaattgattttgcccctttggtggatagagtggagagacgtctttcaacaacaatagcactcctttcttatggtgatagattgacaattgtaaatgcagtactctcctctttgccaacgtattatatgtgttttctgtctcttccaaaatctgtaattgagagtatagatagggcaaggagacattgtttatgaaggggttcagatataaattcaaacaaaaagtctttggtgatgtgggacagagtgtgtcagccaaagtacaaaggtggtttaggtgtaattgatctcagactccaaaataatgcccttctcctgaaaaatttgcacaaattttataataggttaccaattccctgggttaatctgatctggaatacttactacatctcaaaagtacatctcaaaagtgccacatgttgtcgcccctaaaggatcctttttgtggagagatgttctgcaatttgtggatatttttagggaaattttaaactgtaatattggggaatggtaaatcatgtttgttttggaaggatctgtggaataataagctcagatcatctgtatttcctaggattcactctttttccaggaatgtcaagatttcagttcatatgttctccttaaaggatctttcagaactttttgtcttgcctttgtctgagcaagcctctcag

SEQ ID NO: 65612 - DNA, 390 bp, Oryza sativa
  Clone ID: PAT_MRT4530_66643C.1
atggctgtctacgacacgccgacgcttgtggtgattgttgttgtggtggtggtggtggacacggtgaccgccgcagatccagcggaaaatgggcacaaggggcagccggagccatgccgcggaggcgcagcaggcgtcgccgctatcggtgcccgtctaaacactgaagccgcaaggcgagtcatcctctaccgagcaaccctgcaggagctgaggatggaggcgccgcggcggtgcacgttggcgccgggcggaagactcaccgacctcgcgcggcggcgtcttcctcttcttccccttgagctcgggagacgcattctgctttggctgggggcgcaggctccggcgggccctcatcgttaccggaatcagacacttcgtcctggctaa

SEQ ID NO: 65613 - DNA, 2343 bp, Oryza sativa
  Clone ID: PAT_MRT4530_66644C.1
atggccgctgctccccactgcctcctgctcctcctcgtgctgatcccgacgctgttgcgaggcgtcgtcggcgggagcggcgccggtggcgaggcgaggaagacgtacatcttccgcgtcgaccacagcgccaagccgtcggtgttccccagccacgcgcactggtactcctccgccgccttcgcctccggtgccgacggggccccgctcgagccgctccatgtctacgacaccgtcttccacggcttcgcggcttcggttccggcttcccgcgccgacgcgctgcggcgccacccggccgtcctcgcggcgttcgaggaccaggtccggacgctgcacaccaccaggtcgccgcagttcctgggcctccgcgctcggcttgggctttggtccctcgcggactacggctcggatgttgtcgttggggtgctcgacaccggcgtgtggcccgagcgccggagcttgtctgataggaacctcccacccgtcccctcccggtggcgtggcggctgcgacgcgggtcctgggttcccggcgtcgtcctgcaacaggaagctcgtcggtgcgcgattcttctcgcagggccacgcggcgcactacggccttgcggccacggcgtccaacgggtcggtggagtttatgtcgccgcgcgacgccgatgggcacgggacgcacactgccacgacggcggccggcagcgtcgcctacgatgcgagcatggaggggtacgcgcccggggtcgccaagggcgtcgcgcccaaggccagggtggccgcgtacaaggtttgctggaagggagctggctgcctcgactccgacatccttgccggattcgaccgcgccgttgcagacggcgtggacgtcatctctgtctccataggcggtggcaatggcgtcgcgtcgccattctacctcgacccaatcgcgatcggcgcgtacggcgccgtgtcgcggggagtattcgtggccacctccgccggcaacgaggggccgactgccatgtcagtgaccaaccttgcgccatggctcgccaccgtgggcgccggtaccatcgaccgtaatttccctgccgaaatcgtgctcggcgacggaaggcgcatgtcaggggtgtctctgtattctggcaagccgctgacgaacaccatgttgccattgttctaccccgggagatcaggtgggctgtcagcttccttgtgcatggagaactccatcgacccctctgtggtgtccggtaagattgtcatctgcgaccgcggcagcagcccacgcgtggcgaaggggatggttgtgaaggacgctggtggcgtggcaatggtcctcgcgaacggagcggccaacggcgaaggccttgttggagacgcccatgtccttcctgcttgctcggtgggcgagaacgagggagacacgctcaaagcatatgctgccaacaccaccaacccaaccgcaacaatcaacttcaagggcacggtcatcggcgtcaagccagcgcccgtggtggcctccttctcggcgcggggccccaacggcctcgtcccggaaatccttaagccggacttcattgccccgggcgtcaacatcctcgcggcatggacgggcgccacgggcccaaccggtctggaatccgaccctcggcggacggagttcaacatcctgtcgggcacctcgatggcgtgcccgcacgcgagcggcgccgcggcgctgctccggtccgcgcaccccgggtggtcgccggcggcgatacgctccgcgctgatgaccacggccgtcgccaccgacaaccgcggcgaggccgtgggcgacgaggccgagcccgggcgcgtcgcgacgccgttcgactacggcgccgggcacatcaacctggggaaggcgctggacccggggctggtgtacgacatcggggacgacgactacgtcgcgttcatgtgcagcatcggctacgaggccaacgcgatcgaggtgatcacgcacaagcccgtggcgtgccccgcgacgagcaggaacccctcgggctccgacctcaactacccgtcgatctccgtggtgttctacggcggcaaccagtccaagacagtgatacgcacggcgaccaacgtcggcgccgcagcgtccgcgacgtacaagccacgcgtggagatggcgagcagcgccgtgtccgtaaccatcaagccggaaaagctcgtcttctccccgaccgccaagacgcagaggttcgccgtcacagtggcctcgtcgtcgtcgtctccccccgcatccgcgccggtgtacggacacctcgtctggtccgacggcggcgggcacgacgtgcggagccccatcgtggtgacgtggctgcagtccatgtga

SEQ ID NO: 65614 - DNA, 417 bp, Oryza sativa
  Clone ID: PAT_MRT4530_66645C.1
atgtcaagcgctggttcgctcggtgtcgtcgtgtcggtcgccgcggcatggcggctgcgggagaaggaggtcgagctcgacgtcacccgacgccacgccgtcgagctggatgagcggctccgtcaggccaccgccgagagccaggcgtggtgcggcctcgcccgtagaacgagcatgagcacagcaaggaggccggacagcgagcggggaaggtggccgaaggaggaagaggcagaggaggaggtcgccgacgagctcggcctccctcctcgcccggccgccgcgcgtcgcctctcctcgcgcggctacagcgagctgcccctcctcgcccggccgcctccctcctcccccggcaccgtgcgccgcctctgggatgggagaggggagagaggaagaagaagagggggagagagttga

SEQ ID NO: 65615 - DNA, 370 bp, Oryza sativa
  Clone ID: PAT_MRT4530_66646C.1
gaaatgcacagtactagtagtagaatttttggcaataagtttcgggccattgaatgcttacagtcctttgaatttcctaggctgccttcaccataactgttgtctagattccagaatcgctccccctggccgccgaagaaaccctgttaaagtgtataccaccctggagactttctgaggagggggaaattcacagagaagcttccacaatcgcaaaggcctcctcttagtatccccacttataaaccaaagggttcatacaaccagaaatggagaagggaacgtggactaaaagcctcatgtaaatttcaaggatatattcggcaaggggtcaaggactcggggttttgtaattccctcttcccttttc

SEQ ID NO: 65616 - DNA, 1318 bp, Oryza sativa
  Clone ID: PAT_MRT4530_66647C.1
atgacgtgggagaagaggagccgagataggagagcatggcctggtgggcttcaggccgacgcgcttcttggcgccatcgccgacatcagtgacatgatgacccacgagttcttggcgatggaggaggggctcagggcgctcgagtccctctacaagaacgcctacgagtcctcttccaccaccgccgccggcacatcccctcgcaagaatcaccactacaatgactccgacgacgagagtacccagttcagcatgggcgacgtccccgtcaccactgctaggctcccatcgcacctcctcctcctccgcggcaatggcatcgccaagagtggagcttctctatggcggatcaagcggcggtgccggcgcgacgtggtagtgcctggccacaaggacgcaggcagcggctggcggaggctcgcggcgccactgcgcacggcagctggcagcggacgggcgcagacggtgactggcggcacagcggtggatggcgacgcgacggcgcacatgagcaggcggcgggtggtgacacagcgacgcacggggccaagggcgcatgcggcagtgtacgatggcggtggtggcgcagatgtccggccctcattggagattggatcatctatttgttactatgataccgataacaacggcgctggatatgtccaactttcattggtgattggacaatctaaccgatgttttacaaaatatattttgataccatgcacacacatgggagccattcgggatatttgcgctggatggtttcggcaaaacaaagccacctatatcacagttatcattaaatctctgcaccaacctcaaccttcggcgagcaatcaattttgaagacgacgatcacaagcgcagcttaatcgaaggtgttccatagcaagatcacgccatggaaaatcacattatggccaggaccaaatttgtgttcgcctctaccttcgccgcatccaccctcggctactccgtcgccatcgcctacagcctcagcgggcgtgcagcgaagatgtcgctgatcaggccgagggctgaccacgtcgccggcacaccaaccaacttccgcgctcaccaaggtggcctcttgcttcgtcccgaccggtttcgctctgtgcaccgtttcctacttcttgcagttcttgtgcctctcgagggcccaccgaagcaaaaggaccttatgcaccgcgagatgaggcaacgcggcggcaatggaggtggagatggaaacaaccgcgtccaagaaccgttcctgtatcttgatggtgtctgtggtagattcagatcaggtagtcaggcactcgctatttga

SEQ ID NO: 65617 - DNA, 1790 bp, Oryza sativa
  Clone ID: PAT_MRT4530_66648C.1
tcatttgctaggtgcatctgtgtcaatgtcgatctctgtggcttcttcttccttggtaggtattttgatggattcttcagaatggagtgacattaccttatattggtagaagtgtgagcatataagaaaataaataaggttcaggactcccataagggcaataaaatagaagtaatagtcgagtttgccaagattaatgttgtctgttaaccagcttgagtgaccatctctggtcgtgacctttctcatgatgtttgccagagcagtactcaggtagtttgctccagctatagtacagaagaacagagatcctgctagggtttgcatgttctctggaaactgcttattgtagaattctatttgtccaactgcattgaaggcctcagcaatacccattaaaacaagttggggtgcaagccacaagactgacataggcgatattcctccattcgacaaggctgagttcctcctcttacgttcgacaagtcctgctaccaccattgaaatgggagaaatggccaatcctataccctgtctctgtagaagtgtaataccactttccactccagtgaatcctctagctattggtactaaaatccggtcataaatggggatgaatagagttagggcaataagggatatggatacaacagagcctgctgggatttcaaagtgcgtcccaaagtgacagtccattgtaaatgtttgcaagattatataggtgaattgctgagccaatgcgacaaagcataagactccagaaatacaaaccggcacaattcttattaagcatttgacctcctctatttgttggacgttgcaaagctcccaagagtttcttgcagaaccatcaacatttatatcatcacccattacaattgcacccttgttcagaaacctgaactgggaagtaagtggcaatctgaatacgcggttgcccttggaaggagggttgtagagcatcaatccttgttggtttatatcatgaggacaaggaagcttgagatttctctttttaaatgaagccactaaaacctgggcaattccagcaaatatgcttccctctggttgtacatggacgtacaggttggtacccagaaataacatgataatggcgagaaacatgagtaatgtgggtatgccaaatcctattggccagctgacattgttctggatgtagatgatgacaatcatagataacacaagggcagcagtacttgttccatagtaccaattataatagctgtttagtccctttcgaccttcttcgtcggtcttatcaaactggtctactccaaagggcaagctacaaggccggatcgctcctccaccgataattagaaagcctagagaaaggtatagcacacttagctggagtgttgatggactgttgcagcctccgcctagtcgggttttttcatggcagatcggtggcttgagagctggaagtgatgcatacaaagtcattcccagcatccccaggaggctggcgaagcatccataggctagtgttttgaaccttcccaagtagacgtcggagatgaaggcgcctagcaatggcgcaaagttaagcgtaccgaagaatatgttggtaatattagctgcctcaatttgcccaatgttgaagcgcttcacaagatagaccgtcaaatttgctaccactccaattgtcgcaaccttttcaaatgtctcagttgcttgcggcgtcttccccctcttgcctgccacaacttcaccaccgacgacacccccgttctcaacggcgccgatctccatagtaccaaacaaaa

SEQ ID NO: 65618 - DNA, 602 bp, Oryza sativa
  Clone ID: PAT_MRT4530_66649C.1
gcgccaacgaggttggcgctgagtaagggttatggtttacgtcatatatcacatgaaggaaatgaagatgacgcaaaccaagttgatggattgcgtcttagcaagaacgaccaaacttatcatggtccatccacgcacagctgtgctaggaaaatacaacaagaggtaaattcactctttgctcaacttaacccaaatcttagtgagtattttatactaccaaaatgctctacctttgtattgctaaagtttacacccgagaacatcatcactactccaagaaggatgggtcacgttgaggacaacaagggagttatgtcgaggaggaatcaacccatgcccaaccagcagctgtctacaccaacaagaaaatggtttacgctgtaacagctcaacttctaaggcttgtgcgacccatccagtcaagagacgagttgcatggcatacatgttgaaaagagggacaagtctagtttccaacgcatcaaaccctacctcaatattattttccaataagaagttatagcatttttacttaagactgcgcaggagctgaagggctgtgcgcgaacccgagtaaactctttgcattctcatttatgc

SEQ ID NO: 65619 - DNA, 266 bp, Oryza sativa
  Clone ID: PAT_MRT4530_6664C.1
ccggccgggatcgatcaatcttaacttctccaaatacctatggtagctactacctctctattgccttcctgtctctgagctcgtctcgttggtcccgtctttagccaaggtgtacatgcatgtataaagccgacaaggtgcttccatggcagagcatatttgataggttacaagcatttgagcccctaagataggtaccatcggaatgtgccgtcacagagtactttgatgagagatatgagaagtgacgatgcgctggtgtcttt

SEQ ID NO: 65620 - DNA, 655 bp, Oryza sativa
  Clone ID: PAT_MRT4530_66650C.1
cctttctgttgcgagatctaccatttgatgctattcagttttgcatatatgagcaacttcgaataggctataaactggcggcaaagcgagacttgaaagacggagagaatgcacttattggtgctttcgctggcgcaattactggggctataacaacacccctcgatgttttgaagacaagattgatggttcagggacaagcaaaccaatataggggaatcataagctgtgctcaaacaattctacgagaggaaggtgctggtgcttttttgaagggtattgagccaagggtattatggattggcattggtggatccatcttctttggtgttttggagaaaacgaagtcaattctagctgagaggaacagccgtaaagtacgaatactatgaaagggggatgattttgcgtagatgctgctattttcccaggatgtctactgatatgtgtgctcgatcaattaattttaggagctccgattcacatccttgtcaatcccatccgaatcttgtattttgctagagcattacatggggttaaagttataatttctgaatttcttttcgtctggctagcttgttttgtacttgagctaaaaagataattttctggaagcgaaatgcttctgttcaaacggatgatctgttgtcattgc

SEQ ID NO: 65621 - DNA, 425 bp, Oryza sativa
  Clone ID: PAT_MRT4530_66651C.1
actctatataagagctaacccgtcatgcgcacgcacacgagagcgtggaccctatagtgtgcgccctgtggcggcggcggtggtgtcctgcatgctcttgtgcccccgagacagacgtttagtcgactcgccgacaacgacaacgccaaggtttctgacaacgacattgaccctccttctagaatgatctcgaaacttggcgaccatatgcttgcagggcgcatacttggtcaagctggatggctcgaaggcgcacggatccgtcctgaaatactcagaggcgagggcttcggtggcggcgccacgggcggagggctcgactgagaggagcttggagaggagcgcgaacgcataggggcccatcatgaccccgaacgtttccatgagccggctctcgtacagttgatgagggcggaacccggagc

SEQ ID NO: 65622 - DNA, 2422 bp, Oryza sativa
  unsure (1)..(2422): unsure at all n locations
  Clone ID: PAT_MRT4530_66652C.1
atgtgggcccattccagggtgctgctgctggggagtcacgaggggtttgacactgtttgctggtgcctgaacccgtgtgaccgacagtctcgcgccattgctgcagtcacagatctctctctagtcccaccattttcttggaaccggcaccagggaacaatccatccatccgattcgccgttcgtccgagttggcattcctccatctcttctcctcttcttgagcagcgcgccattgctgcagtcacagatctctctctagtcccaccattttctttcttgggtgaggagaagggagggggagggatgaaggagatagtggttgggtcggtggcggcggcggcggcggtggggaggtggggagcggcgccgccgcaggcgatgctggagaggatgaaggattacgggcaggagggcgcgttcgcgctctgggacgagctctcgcccgaggaccgggagctgctcgtcagggacatcgagagcctggatctttcaaggattgatcggatcatccggcgctcccttggatcacaaggattcactttgcccaccgtcgagccggtgccggagtccagcgtgtccaaggtggagggagaggttgccggcagagacaaagaacggtggtggaagaaggggctgaaggccatttcggaggggaagctagccgtcgtccttttagccggtggtcaggggactcggcttggtagctctgatcctaaaggatgtttcagtatcggacttccgtctggaaagtcgcttttccaactccaagctgaacggattttgtgtgttcaaaagcttgctgctcaatcaagtgatagtccaaataacaccgtacctattcattggtatataatgaccagccccttcaccgatgacatcactcgcaaattcttcgaaagccgtaaatactttggcttagaggcagaccaagtgacatttttccaacaaggcacccttccatgtgtttctgctgatggcagatttattatggagacaccatacaaggtagcaaaggctcctgatggcaatggtggagtttatgctgccctcaagtccagaaggttgctggaagatatgtcttcacggggtgtaaagtatgtagattgctacggggttgacaatgcactggtccgcgttgctgatccgacgttcctaggttacttcatagacaaagctgtatcttctgctgcaaaggttgttaggaaggcttacccacaagagaatgttggagtatttgttcgacgaggacgtggtggacctctctctgtagttgagtatagtgaaatggacgcagctatggctactgaaattaatcagtcaacgggacgccttcgttattgttggagcaatatttgcttgcatatgttcactttggattttttgaatcaagtagcaaacagccttgagaaggacagtacttatcatcttgctgagaagaagatcccttccatccatgggtacgcaatgggcttgaagcttgaacagtatatattcgacgcgttcagttactccccatccacagcactttttgaggttttgcgggaggaggaatttgcgcctgtaaagaatgcgaatggcgcgtcttatgatacccctgatagcgcaaagctgatgctgcttcgtctccatagtagatgggtagttgctgctggtggcttcttcactccattctgtcccattgtacatgacaggtgtggaagtttctccacttagctcctatgctggagaaaacttggaagccatttgccgcggacggacattccatgcgccgagtgagatttccttctaggtgaacctgtgacacaaacagctctgtaacttcaaatttgtggaacagtggcagagaaaggattgcaggatttcatctcaaacagaaaaaaaaaaaagatcacagggtttccattttccctatgtcatgggatgaatggatgctgtacagttcagtgagctcctcagatattggccgggttgttttatgttgtgtcatctgtgagtattgtaatgtagcccccaaaattctaaggccatcttgattttcacacaaaaacatttgtgtggcagtgccattttggttgctcctatagtcctgtgttgctcccatgtaatctgtagatgttttttcccctttcaaaacaatatagatcttggtttccattttccntatgtcatgggatgaatggatgctgtacagttcagtgagctcctcagatattggccgggttgttttatgttgtgtcatctgtgagtattgtaatgtagcccccaaaattctaaggccatcttgattttcacacaaaaacatttgtgtggcagtgccattttggtttctcctgtagtcctgtgttgctcccatgtaatctgtagatgttttttcccccttcaaaacaatatagatctttgaatgcccatgatttcatttc

SEQ ID NO: 65623 - DNA, 531 bp, Oryza sativa
  Clone ID: PAT_MRT4530_66653C.1
tggggacaagagctcaagctagagagacgacggcagatccgggaggacgacgcctcccctgctgcgagtgacggcggcagcagcgtcctcctggggcttccacaggcggatcaagcggtgtcgtgcggcttcccgcgagcggatctggcagcgacggcggagtcgacggcgccgcgggctgatctagcggcgactgcggcttcccaccggtggatccgatggcaacagtggcatcggtggcttcccgtgagcggattcgacggtgacgaagatcaagataagatctctgtggcggagctaagcacaaacccaaggtcatcgtcgcctcccgctacctcttgtttcctccttcaaatccacttccctagccattggccccaccacgacctcgacgatgatgacctgcggcactgcgtgtctgcgtccccggctgacttgaggcagccgacgctattgctgaagggcgacgcacaagctgacgctgcatcagatcaggccgggttccggggcgcagtggcgctgtcgcattaa

SEQ ID NO: 65624 - DNA, 606 bp, Oryza sativa
  Clone ID: PAT_MRT4530_66654C.1
atggcagagatcagtcgaggtcatccagccgtccacattcgatcgaaccgtccgcccagggaactgcatgatatacacgagcagacgcgtcgtgaatctggccaaggctggcccaacaagttgtttcccagcgccgtccgtcactcctaccctttttacagtgaacagatgcgttttggtggccgcgctctcctttttggcgccaaacgaggccacggcgccggacgatcgtctgacaacgcactgcgatggcaaaccacggattccaccgtgctgaacgcaggggatgacatgattggtgttgagcacttggaagaggattctgatggcatggctcttcttaaagcacggagctctgccggatcaatgatcaggagaagggccgctgtcgccaccgctacctcttccttcacgccggtcttctctgccgtcgccactggatttgggctattgtgtgtggctgccgcggtcctcctccacctccgcctccgctgggagagaggggggtcggaggaggagggaagcggccggaggggagggcaacggtggaggaggcgatgccgcaaccgctccatcgatgccggtaaccacctcacagcagactaa

SEQ ID NO: 65625 - DNA, 1950 bp, Oryza sativa
  Clone ID: PAT_MRT4530_66655C.1
atgccggcgctgctcccgcgcctcctcaaggccggcctctgcgtcggcttcctggaccccgtctccaacatcgtcgtcaacaccatcacctacaagaagcgcgtcccggtggtcgccggcggcgatcccgacggcaagtcggcggcgatcccgacgcggcggcggcggcggaaggcgctctcccggatcgtcgccgacaccagcaacgtcggcggctgcggtccgagccaccgcctcctccgcgacatgggcgtcgccgcgcggtcgctccaggcgctcgtcgccttcctcaccaactacttcccctacctccacacctgtgaggcgctggagtatctccggctggccgacgccgacctctccgtcgccgtgcggctcatcgagcaggaccgcagctctgacgccttcagcttcgcctcgctgaccaccgagacagccctcacttgcgccgccattgctgggtggcacccaaaccccaaatcccttgtcgagaggttgtattccatcgcttctcagattggggaggcttccaatctcctaagcatggaaggttgcctctcgtgcagagccgtcaagaacatcagcagattggtgaagcaccagcaacaagaaccagtggaccttgttggagctacctttcttcctcggtcacttgagattaaggagaagcagccgccgtttgtgcggatgaaatcattgaagagcatcctgcttgacaagatctatggattgtaccttgatgttattgcctgcctgccgatggatggcttgcgaatgcgctaccacagggggctcctcaaggccggccactgctatggcccctttgagaaccctgtgcacaacattgtcctcaacacagtttggtatgagaccatgtttccaccacaagaggaggtttcagtgcagatgacatgctcaagaagccttgttcgtgtcgcgtgccgctccctcaatgctcttgttgcatacctccgcgcttgcttttgcacaatctctgaacagcaggctatgcgttacctgttcttgacgggcgccaatctttggggagcggttgaaatggcaaggcaagaatgccatgctgagagaaacatgttgggcctagaccttgcttgcatggttgcagccaccgcagcacatcatcctgatcctgatgcactagtgaagtttttcatgtcaaccttttccatgaagccccttcccctgcagacagatccatttatgtttcaaactggtgggattttaaatgtgcagctcctcgtgcacaatctgatgcgattctgcccctcttcctgtggttcagttcagacagttcctgtactctctgagagggcctccatgactttgtcgtgcattcaggaagagttcaaggctgagcaaagttttatttgtgggaaggttaatgatgcactgaagaaatacaaccagaggactaggggacttgagtatgagctacatgttatctgtggcttgaattcacacatagttaattatactatgtttggccgacattatggacctggatatagccggcatcgatccaaatctcagtattctcacgtcaactttttggcgagcccaagagatttgcattcttctcagacagtccccatacttttttttgctgagtgctgcaacaaggaaggcgtgatcgatgaactgacctgctgtccagtcatggggcatcctggtcgttgttatcattgtgagtgtgaaggggctaagattgtccatccagatctagagaagtacaatggccgcactgactttctggaaatggctcgcgataaatcaagtggcacgacaactgaagatgttatctctcgttgcgagtatcttcatgatgctgtggatatatgtgaggaggattgcgtctgttttgatgccagttgggatgtcgagtgtgcagagttcttgaattcccgtgctgctaacaagattagactggagtag

SEQ ID NO: 65626 - DNA, 189 bp, Oryza sativa
  Clone ID: PAT_MRT4530_66656C.1
atgggatctttccttgaccagctgcgcgattccctccttgcccgcatccaccgcacacaccgcggcgccggccgcctccgcctccaccgctggcagtgccaggatggcgacctggtggggagcaaagacggtggcctccatggtggctcgtctcaatggaggaggtgcggtggcatccgtaacccgtag

SEQ ID NO: 65627 - DNA, 252 bp, Oryza sativa
  Clone ID: PAT_MRT4530_66657C.1
atggtgggttgtgagcacatggttttgaaggtcgtgttcatggcaattaaggaccggttcgcgagctactattgtgagacattaaccgtgccaactacaagccagcgtgggcaacgactttaccttttgtataacatgattcattgcggggtgccagactgtgaagcgtggtacacctctggccagagtaaaactattcgaatagccgtgcccgcggttatgggcgagttgagcaatgtttttcgtgattag

SEQ ID NO: 65628 - DNA, 907 bp, Oryza sativa
  Clone ID: PAT_MRT4530_66658C.1
ccccctggggtttttttttttttgttttttttttttttttttttttttttttttttttttttttttttttttttttttttttttttttttttttttttttttttttttttttttttttgcgaaacaacgggacaatttcacataacatgcttaaatgagttatgtttcaacaagtatttgtcgatgtttgatacaaagttgcattgccacccaagggagtggataggggtggtgcgcaattagcatgacaagaaaccatcaaatggagatcagaggctggctatagcctgaaagttaaccatcatcacaggttattaggtagatagtgcatctacacctttcgaatgaggaggaacagcctctggtccagctcaaagctagcggcactggaggggtcacccttgagcatcatcagaaggccaccaaacgatgcatagatctccactttggtggcttgaccactggaactgtcttctgagatcttgtagagctttccatgcatgacatagtcaaacttgtcagcaagtgtttttctgccagcctgcgtgtagaagccagtgtccggagttccatccagattcagagtaggagctaaaaccatggtgaatctgtcaccagcacgcatcggatagacctcagtagcaacatctaactgcatgtacatgtcgaactgctcgctacgagcttcgatgcgactaactctgtcgaacttcttcccatcaggatcgagcctggtcacagtgaagatatcctcgaataggtgctcaaccattttcctcggcggcggcggcggcgtgagaggtcgcgaggggaaagccggagttggctgcgaaaattggcaagggtttttacatggttgggttcttgtgtatgtggcggaaagaggggggaggagtggggcccacat

SEQ ID NO: 65629 - DNA, 358 bp, Oryza sativa
  Clone ID: PAT_MRT4530_66659C.1
ccggccgggtacacgaccccgactcctactccagagagaggaagagagagagggagagctccggggaacagcgcttgtgagatagggcaacgtctgacctaccgagagcccgacagatgcctcacgaaatacaaacacacccgggtacccaagacccacgctgggaggcttggataccatgacacacaggaaaacgggctaccgatccaaaccgcccagatcatgcgaagacgattcagcgtaattctacaccttagacctgcgtgaacacaccaacatacagatcgtcaacgaatcgcacgacccctaaccgtccttacggtggtgttatgtctcatgctccacccaccgacaggat

SEQ ID NO: 65630 - DNA, 376 bp, Oryza sativa
  Clone ID: PAT_MRT4530_6665C.1
gcaaatgaaacttattgtcctagcaaaaaaaaatcatgtaagttttaacctctgtgataatgcctttttgtgtattgcagattgggagatcaaagttgaacgggagtgcagcaagttcagggttagtgttgagagttgacgctcccctccatagctttggccggccctggttctctattcagatgaacagcggtctggagttctgaacttctggttgttcagtgtttttcttcaaactgaacaatgcagaaagtattacattgaagaaacacttgtatagacagtcaaatgttgcaggaaccgattgcttctttgttggtgatcggtggaatgccagatctcctagccaaaatttacaaaacaaaatttgtggaca

SEQ ID NO: 65631 - DNA, 352 bp, Oryza sativa
  unsure (1)..(352): unsure at all n locations
  Clone ID: PAT_MRT4530_66660C.1
gctgtacccaccaacctgtcgatataaggcaagccgtttcggcgaaatcgattgggtttctttccgctacctgtttccccttccacctccagattgattgatatgcttgcttgcgcggcggtggaagctgacggctcggtctcgcgtgcccggaaaaggccgcgcattggcgtgacgcsgagcccbcbbbkycgacgggccaatkctgggatctgaacctccgtgggttggtgctcccgctggtgggtccctttctcgacnbscgagttcgctcgcgggvgggcctyctgcgtctccaccgcctgtccgcgaggcgttcacccgccgaggavcctcttgtcavagckcttgc

SEQ ID NO: 65632 - DNA, 1288 bp, Oryza sativa
  unsure (1)..(1288): unsure at all n locations
  Clone ID: PAT_MRT4530_66661C.1
ttttttttttttttttttttgaggaacttagttcngtaataacaataataatagcatacatagtacaaaaaaaatgagacaaatcattagcgctatcagttatcaaggaacatgctactttacaatttccaataattactgaaccgaatgcaaactggtgtagctggtgttgtcaaacatggtaactcgaacattgtcatcaacggggaaatatagagggacagggactcacagttgacgatgacgacgacgatgatataaacatgtccagcggcttttagcaacttagtaaagggtgattgacagatccaggagcgcgcatgagaagtgaggctgtgtgaaccatgtacagggttgggacatactgaaacgtatgtcctccagcaagtaggcagagctcgatgggtgtagaatatatggagtaagacgtactatagttgttgtctttggttagcaaagaagtcgaagaggttgaggcgcctcccttggatcttgtttgcaatgctcagcctggtgctggtgctgctgtttcttgtgagaggagtgagatggaatcggagcgtgcctgtatcgaggctcctaatctgaggcgaggagcagtgaacactgcgactgcggccgaggcggtagagtctcttgaacaaagaggactgacgtggggcagcagcagcagcatggatagaagaagaatccccccccaaggatatctcggagtccattccggcagaagagacggaggcggctttggttgggacggcggggcgagagcgggcgtgcctccaagactcggatagggatctcctgagcatctgggcaggcctggtgacgaagcccctggccctgatgatggggttggaattgggcgggggggcatcggctgagccgtcccatgactggcgggagtcggcagtggcgtcgcagcagacgatccactcgcaggattgacggagggagcgcttgcgctgcagctggcgaccttgctcgtcttcctggtccacccggacttgctgcccttggtcttcctggtcgtcgtcgagctggaagaggtagaggagcgtagtccgaaccctgggctgagggatttcggtggagatctctgcggctgcggctactggggacggggaggggaagcagcgcgcaggcgcagtggagagcctctcgagcaggcaggcggagcagaatcccgtgaaggggggctgcgacgggtgcttcgggcaccggctcgacggcacatcgccattgtattcatcgactccaagccgtaggcgtaggtagggtgggggatctg

SEQ ID NO: 65633 - DNA, 291 bp, Oryza sativa
  Clone ID: PAT_MRT4530_66662C.1
aaagatggaaaaaatgaggtttttgggctccctcaggagggcttgtggccccacatttttgccgcgctttttttccgtcccacatccaaaaatccaatttaatttttttgaacttttagcaacccccttttacattagctttgtttagagccttaaaccacttgttcaagctaaataccccttaactcatcccttttatttaaacaaatagattcccgttcatccatatttcatctaattcgaacggggaagtcctttatatgttgcaggtttactcatgggtacccatgc

SEQ ID NO: 65634 - DNA, 882 bp, Oryza sativa
  Clone ID: PAT_MRT4530_66663C.1
atgtgggaacaggatgaaggaggaggatacaaaagtgcgacggccaatgggtggtggggagacaggccgtggccgacggggagaaggggcggcgtgcggcggtggccgccggaggagaaggagatgcggctagggctccgagacgagcagcggctggtggggtggacgggagaatgggaagggagaaggggtggcgccggcagccgatggggagatggcgctccgggacaggcagcgaccggcagggagaaggggcgccgggatgggtggcggtcaatggggaggacgaccaatgagcggcaaccggcaggaagaaggggaggcgcgcgtgacgacctaggcggcacccttcctgcttctgtcacggccatcacgtcctccatccaccgtgacgaggagatggacgttgtggacgatgccgcgaaggcggccgggagggagaagcggggcacgccgatgtcgttctcgccgctgatacgatcagtccctgggaaggagctcttgcaacgcgcgaaggcggccgcctcaggctgtggttcaccaacgcccctgcaccttctccccgccgactactttggcggccactacatggtcagtggagggggaggctgcggcctggtggaggccatggcgcggcaggcaacgacactagatccacttgtcccgaggtcgtcgccggcggatctgcccttcccttggccattggcagtggatctagccctcccgcaatggtcgccggcggatccgcccctccccgcctccgctatccgcgggcgttgctgcgccgctgtatgccgcagcgtcttcactgtctacgggcattatgctgtgcaaccgtatgtcgcagtgcctccgccgtccgccggtagcgccgccgtctga

SEQ ID NO: 65635 - DNA, 552 bp, Oryza sativa
  unsure (1)..(552): unsure at all n locations
  Clone ID: PAT_MRT4530_66664C.1
atgtcgtcagncagacagccatgttcccacgacgcgcctgcttccggcggaagtggagatctaccaaaacacaggagtagggtattacgcttctcagcggcccgaacatgtatacatcgcccgtgtcttgtgtgtttccactctcgcgaactttcctcaaaccaagagcttagaacctcacccagggcccccggccgaaccggcaaaggggggcctgcacggtctcccgatatataaacacgtacgcacgttttctcgtacacctaatctaaaccgtatacagaatatagattgtatctatggcctttttcatggaaagttggaaaccatcatggttgagcacgaggcaaaccatcgccggcgagatccatctgatcacggcggcggcggcggcggtaacgacctgatcggctacctctgtgacgacgtccttgtacatgtcctcagctccctgcccaccatcaccgtatcaccaggtacatcgtcagccgttcgatgacgcctaatggacggttgagatttaaatcctatacttttcgggtaatttatcct

SEQ ID NO: 65636 - DNA, 308 bp, Oryza sativa
  unsure (1)..(308): unsure at all n locations
  Clone ID: PAT_MRT4530_66665C.1
cccacgcgtccggtttagtgggttgagatggcggcgccggatgtcgagtaccgctgcttcctcggcgggcgcgcctgggccaccgacgacctctcccttcacgtccacttctccacctacggctagatcatangctccaaaatcaatgacaactttgtagacggtgacttccacagcttttttgatccgtacctttcttctgcgctctttcaatccatcaagaaagaaactgaaaacatggtgggtgaatgaaaagcacaatattcggcaatccacaggaataaaacttggtatctctgcttgtgtga

SEQ ID NO: 65637 - DNA, 201 bp, Oryza sativa
  Clone ID: PAT_MRT4530_66666C.1
atgatgctcttggtccggaccaaaatacagcagcagcagcagcagtacaaagctctgacgctcgggtcccacatccgtcagaccatccgtccgtccgtccaagattcaggagacgaagcccatccgttggatggaccaaaagatgccgcgcacgacatcgccgtctcacagggcactggaaatgatgggtcgcctgcctga

SEQ ID NO: 65638 - DNA, 201 bp, Oryza sativa
  Clone ID: PAT_MRT4530_66667C.1
atgggcagccccatcattgcctggtggaaggcagtaaatgaggccgagcatgtggttcagactcctactaaggcctccacccctccggacatccctcaccctgagcggtacgctcttcttgttttcggatgggccacgtgccacccctatttcgatcctcaacgcctgtaccaggtgtgcggtgagctaccggagcgttag

SEQ ID NO: 65639 - DNA, 221 bp, Oryza sativa
  Clone ID: PAT_MRT4530_66668C.1
aaacagaagaacatctgagttcatcatttattcatgatacatgcttccaagataaagggaacacaaattatttactttccacctcacacacatgatcaggcaataactggctacattcagtttgctagtacccaaaatccggtcgccagtagcagacaccgactacgccattggggatgcccacgttggataacgtcgtgaggctcgccgtcaaccgctcg

SEQ ID NO: 65640 - DNA, 252 bp, Oryza sativa
  Clone ID: PAT_MRT4530_66669C.1
cccgggctgcaggaattcggcacgagggtgagctgcggcagctgcagaagctggacctgagctccaacaatctcaccggcggcatcccggtcagcatcgccaacctgagctcgcttaccttcttggcgctgagcagcaatggcctgagtggtcacttccctcctggactctccggcctccgaaacctccagtacttgatcatggacaacaacccaatgaatgtccccttaccttccgagctcggtggtctcc

SEQ ID NO: 65641 - DNA, 2629 bp, Oryza sativa
  Clone ID: PAT_MRT4530_6666C.1
tttttttttttttttttttttttttttttatatgatattagcaatatttttctgcatctcagtcttgagcatgtgcgaattgtttaattttgtctgccattgttaacaaccctcttcctccaaactaattgttctcaagaacaatagaattcaatacaaactcagagaatagaagagaaattgagtgagaagaagtagaggaagcttctagaaatggcagtgaagaggaacacgagagagtaagaaagagatagagatcgacgaggttcaaccgaaccaagccgccgccgtggccgaagccgctgatgcctgatctgttcgttgcttgaagttctcctgctgctgccttttgtatccctctcctttgtttgtttggcccttggcatggattagcaattgagtcagcccatgtgcagcccaatgggttcctgacaatctcctctccttgaaactgacttgtccataagttgatgacaagtaaacttcagaaatggcaaacctccactttgatttctctagtattcttgcatcgttccaaaagcttcattaatgtccaatttgttttcagcgtgccaacagaaaacttgcatctcaaaagaacagctcaagcaaatcctggcacttcgcatgtgaaagagagaactgtcttgcaatgagaatttgactgcctgaaatgtgatttgtccaagagaagagatagctagaaacttgagtaaacataaaccaccaggatcccatggcatttgtagatcaggtgcactaagacacaattcatccatttgatttacacagcctctgaacatattttgaatgaacaggccacatctttcatcttgctggatcagattcttccaagttttcatccaagatatccataggcgccgcaagcttgtttgacactgatcagaaagaccatacaacagaactgtaatttccacacagacccataattccaatactgtagtggcaatggtatagagttggtaaatgaggtacttgctgcaatggtgacaaccctgccactgcccttacttttgataaaactagtactttgataaacccaaactgtagcgaactcctctttgtggaatatcaattgttcatacaagaattcttggcccatagtattcaaccagtacacatctacttcaccatcttcaagtgttattttgtatgataatttgcagctctctgttatagtccaatccgcactaattaaataggtagcactagaagtagcttctgattgcatcaatttatagccagtgggcttctgccataattccattgagagcaaagtatacaactcgaaccaattctgagaagaatcactatatgttttttatttaaatttcctttcccagcaaacctcataggatgtcatgttcgatctccttcgctgcataaaactcaccacccaacaattctcctttaccacaaaataactgtagatacttccaaacttctctagcagaaagcagcgaacagcccgaagaccacaatattcttctcacataattccagctcatccaactaggaaccatagagaaatcttctcacataatgttctttgttatgttacccaacattgcatatctatttgtgttcttgccacgtagcatcacatgaaaaggagttccgtgatgattggacaacctccattgttaacaacgacttgtctgtgcacggtgctggcaaataatatggacatgaaaggaaaatattctccaacttgtaagatgaacatgctttcaaaatccttgtgcgcgagcaaaatccgcatgataaatacagaacaatagaatgaccatctccattttagttcactctttaataacacttgtatattgccagtgatatgccaacaaaatataatgacaacttccaataaagtccgaacagcatgatgcttctcaagccacagaaatacggatctctggacctacaaatcacgccatataatgattataatcactttgtaattctctcgcctaatgaccatcccgactgagattcaggtcccgaaacttcaatcatcgcacgtcctcattctcttcaagtccaaatcctctcgaaaaaatagtccccttcaaatcaaatactctcgacaaaaaaaaaagagttgacctcatgaggcatcaccaatcgcaggcggatgtcatatgcgacaagaccataccggcggaaaagccggcgcctttggccgctccaacaagcgcacggtcgctatccatcggaagaacagcatacagagcttttcctctctatcttgagaaaataaatcgtttatacatacaaggaaaaaaaagagaaaacagagacaagaatcaaataaccgtcaccggatacatccggcgaagaaaagccgccgccgccgccggccggcgaggagatcgatttccacttctccagcgcaccggccggcgccggacactctcccccacggcgagagcagaacaccatcccccgacgtcgcggatccggtgtgccagccttccagagagccgaatcgacgggggctggccggccggggagagtaccccggtggcggcggcggcggcgccgatctagggtttgccgggaggaaaaagaaaaagctttttctttcttcgcagggggagaatacgac

SEQ ID NO: 65642 - DNA, 321 bp, Oryza sativa
  Clone ID: PAT_MRT4530_66670C.1
atggatctgagctcgtacatggatggaggcggcggatctggcgtcaagaaggtgaaggaggcggcgaccggcgaaggagctcggacggtgaaggaggcagcagtcggagcccgggggttccagatccggtggtcccgaaccacctggagaccagatttggcacccaccacctcaaggcgaccaccggcgaccaccaccgatcctcatggacgaagaagatccgccggagatctcccgcatccggcaggggcgggagggaggcgcggtggcgcgggggcggccgacgacgggaggggaggcgtcggtggcgttggtggctag

SEQ ID NO: 65643 - DNA, 537 bp, Oryza sativa
  Clone ID: PAT_MRT4530_66671C.1
atggtgccgccatggcagccgaatggcagcatcatgcggtatcatggcaatgaggagaaattgtggcgcagggttgtagcggtgatcatcctcagagaaggcgccgttggtgcagtagtcctcagggctagtggccacctctatcacccgtgcatgaagagccgcaaggaggagggtggacatagaggagagagtcaaacggtggaggaatgcagggcgcggctgcagctgcgatgtagcgctgccgaacacagcccctttttccctaaccacgcacgcgaggtcgacggagtagacaactggcttgcgctggatggagtgagagcagtccgtggctcttcagaatggtggccctggcccaagcatgtcctagtctacttcgtggacgtcgacaccacgaacatggactccttcgaggacgagcgctcccagcgaagcgtccgggagggatatagtggtgagccagcggttctgcagtgtaccatggtggttgtgaggggttcctacaccgtcaccaacttcctctccgactcctag

SEQ ID NO: 65644 - DNA, 586 bp, Oryza sativa
  Clone ID: PAT_MRT4530_66672C.1
ggaagagagagaactagtctcgaggaaacacctcaatccaattgcagatattatgcattcagtcaacaaaacatccataagatggggccgcattgcacacctgcaaatagtcggcatgcaacagcaaagggagaacacccacataaaacggcaaggagaatcgccacgagcaaccaacacactgcggcgatcactggctactaaataatgcatagaaagagcgaactgacgaagagacttacgaatgctcaatctattttcacctctttttttttacaggaatgatcctacctaccggaagtaaatggagatgagagggatgtcgacgtcattcccatcatcatcttcacaggcaacgacgacatccaggtgcctcctgtatgccggaacgtccaccttcgccacctccttggcgacatccacgagcttcttgttcactcgatccttgtgtctcggaaacatggtgttgtaaagcaatgaagtgccgcaggagacactgtacgcgctcaggcccttgtcactcagccacttgaggagttctgcgacagtgatgttgccctcgatagaccaccgacccacgcgtccg

SEQ ID NO: 65645 - DNA, 330 bp, Oryza sativa
  Clone ID: PAT_MRT4530_66673C.1
atggagagcacacggcactaccgacacaatccggttgagctgacgttgacagacgacagggaggagacagcccttcacctgaagcttgcgcatcgagcagaaatcttggtgggcctgaacctcacccattttcttactgggcctaaaatgggctctttgtgggctttcttaggcccatttctttactttcttctttttgtgcacggagatttgaggcatcctgctgctgctacactgaaaccaaataatacaacctcacatgccagcagctcagcaacagcagcagcaaccgagcctgcatctgtaaagaaaccctggagcctgaattcc

SEQ ID NO: 65646 - DNA, 1541 bp, Oryza sativa
  unsure (1)..(1541): unsure at all n locations
  Clone ID: PAT_MRT4530_66674C.1
tttttttttttattttctctgcatttgatncctttctgttttcttttttttttttatttttatgggacacacataacaatttctgcatttgaatgtaatatgtacagggtaatggagtatgcataatttttacaacagatgtgggggcacacaagaaagccccagtcagggtcatgataacatggagaatagctacctgagcctgatcatcgtttcaacgaattgcaacacaatggtggactaatatattaaccccaactaatgaagatatcctttttggagtttcgacgacagtgcagctgcatcaagttccactggtaggagattcaagaaaatcatttagtgttttcatcagcatctccattgtgcaaactcccgttagagtcctcttctgtatcttctttgtcaaaactcccggtagcactctcgtacccatcttctttgagcaagctcccagcagtattgtcatccacatcttctttgtgcaaactttctctagtattctcatccgcatcttctttgtgtaaactcccattagtgctttgtgaagtagaggatggctccctggaatttccagggttatgtaacatgtttgaaaaaccctgccacaatcttgccggcagaaaaggcgcactttcttgttgctcctcagatggcacttcatacacaccagccgaacccggattcaactcagagaacctcacagctccaagaagtctctcggggagctctgattcggtctgaccctcaataaggaatgctagatctactgttagcgtctgcacgtaaccaaacgccaaatgaacaattgcgtttgcgacaatagaagatccaacatccacatcgatttcaatgaagtttgatccctgagtatacttgcacgtaagagccctacccaatatgcaaatagcttgttctcccacagctgttcgaacaatccaaggccctctaactatgttcgcgattagcttaagcctagatttccggaaagcctcatctcctttcaagaactgatccataagtgagccttccggtaccggctccagcgacacaaagtagaatatagcactgtaattatccttgctgggcagttgcaggttgaaagcccagacgaaaggctgattaccacgcaaaacctcgccgtcgatggctttcctcacacgatgactcttgttattcagaatctcgcatatcttcgcggggcttttcatccaatcaaacccgagaggctttagaagatactccccacctggtatcttcaccttggttgcaagataatcagggcctctgaccatgaatgtgtcccctgggggagtagcccagccattggggcagttgtcagggtcaagaaatgggactgctcctcctgacttgacatcctccatccactgatgctgaacctcaccattggaacaatccatctgtggatcttggttgggccttcgggcgtggtttcggatgcagcaggacgaacagaggcgagcgttgtggaagggagggagagagagagagagagagagagatagagagagagagagatc

SEQ ID NO: 65647 - DNA, 438 bp, Oryza sativa
  unsure (1)..(438): unsure at all n locations
  Clone ID: PAT_MRT4530_66675C.1
cgaccttcctctctgaccaaatctcctcctgaaaaaccacaaggaaaacccggcttcattttttaggctgggataaggatggccaaatattacaagcgtcatccttatcgatctttccatgattattcaaagatggattcttttagacatttgactagctagtgatcgtatcagtgtctgtcacctgcaggatttgtagttgaatgtagcatgtaagggtcttaaggattcctgaaagaggcttggaaagaggagacgggttttatgctctcctctgttcttacttgatgcttgtgttttcttcattgcttccacgtactatcatgtatttattcatgtgtgtcttcttgatttggaagagatgtgccatcggcaaggtacttatttgtactgtagtctctatggtcaataatancttaatgaangtacangtntccn

SEQ ID NO: 65648 - DNA, 411 bp, Oryza sativa
  Clone ID: PAT_MRT4530_66676C.1
atggggatcgtcccgcacacggaccccggcgtgctcaccgtcctcgcgcaggacggcgtcggtggcctgcaggtgaagcacacgaacgaggatggggagagctactgggtggataccaagcctgtgcctggcgctcttgtgatcaatgtcggggacctattgcaggcaacatcaatgaggaacaaagagcaactgctcctggagctaagggactccacagtctgctcctctggtcatttgcctaggcctcttgttggtatcagttgctttggtcgtggccgacatggcatgaggaacttcgtctaccaagttgggacgacgaagaccatggcgccgcagccgcttgccctcccgctgctgagtgctgactccttcgccctcctcctcactttcctagctctgagcctctga

SEQ ID NO: 65649 - DNA, 5309 bp, Oryza sativa
  unsure (1)..(5309): unsure at all n locations
  Clone ID: PAT_MRT4530_66677C.1
ggnangcgtgggcggacgcgtggcccgccgcgagggagcatgtgccatcctgggctgccgcctctgccgccggggtgcgaggtcaagcggcggagggcgccgccggtggcgcgagtgggttccccgccgcccgtgccgcggcgggagcagcctcatcaggctcagccgcaccactactgcgtgtgctcgcccacggcgcaccgcgggtcgttccgctgccgctggcaccgccgcggctacgagtggggcgctggccgccgcaggagcgtggcgccgtaggcaaaagccgtctggtgacgcgtgcgcggatggtggcacctgctggccgcctcgccggcgtacaagtgtacaactgctattctcagctccctcagggcgtctccttgtgcatcaattgctcgtgtgtttgtacagagtgtatagttgttagaactcaaaaggaaagacaattatacaagtttgtgcattactctctagtagtctgtacagttgttatatttcattcggaagtacgtgcattggtgaatcataccataagaatagcaatcgtgtatactccggccattaaaatgccgtcaaaattcagttcatgcatatacacaagctatatatcaccgcgagaaagaataatactataagagagtgtaactaattctagctgtctcagtccattgtgatccggcctggccctcccttcagtgagcggtacaaaggtctggatcgcttgaagccgaatatgtcagtgattcggtaagttttgggtgtatcagcttcagcaatggccttcttgaactctgccaaatgttcgccgacgaagacttgcacgcttacagttttcctttgaggggcaccaagtcttatatgctgatcaaaaaattcgatgaattcttctttcttcagctctcttagaagagctacctcagactcgaccctgtcaaacttgagagttcctgcctcaatctctccccaatagaagtgggattcctcccacaaatttttgaacttctccagtttcgaatcgacaagtgattttacattcctcttaaaatccttgtctgacaattcatgaattttgctttcaaacatgttcacgcacccatcaatcctagccgaaagacctaaatcatcctgcactttgttctgaattgcgatctcgattgcccaatctgcagactcgagccttgggggggggcggggtaggtcgaagctcctaggtctccggcccgtctgccggatcgcacgccggaccgggattagccgccagtaccgcgactccggcggcgagcttgcagtgggcggtggacgcggcgcggcagttccccgtgcgagcggcctcgtatttatgtcactgcctccggcccgagacgggaggaggagccgatgggggagggtggcattttggaaattttctcttcgattttggaggagcaagataacccttttaatcagatattgtgatggagacattgatttgaacacagaattaggggtattgaatatagtatcttcaatctcctggacaatagatgttgcctcatttggttcaatgttcccatgaatatagcattccaaaaatgtcttcgatagcaaatgtggcatgaactttgcaagagaatctggttcaagcttagaaagagcctcaagtttctcagccaaaggccatttctgatcctccaatatcaacgagagatagtatgaagcttgagagtatggttggctgaacttgaaattttggtagtccttgacagcagtttccttcaaggcacaaaacctgttcggtttaacttcaaagttagatatatgcttcataatggcatctagcagaatccgcattttgtcattgtaaccacctactgagacctggaatccagcagaagtgcgatatattgaatagaataaaccagcaatttgagcatcatacgcatatgcattcaagtaatcagctaacaaatcaacaaagagactcgtagaaatgactgcctcgggggaatggcttgttaacggacagtggaaatcaattataatgtgaacctttggagtggagaacagcatgtcaggcttataccacaaccgtgaaagtggtgtctttctcaatattgctggatatttaaccttttcatgcgcttctttgagcgataaatcttttggaatgaaaatgttaggctttgggatacagagcttctcagtaggagctttttgaatccattgctgtatcatggaaggagtaacattttcaacagaatacgctgtactataccatggctcaacagaatcagtagatcctttgaactttttagattcccacagtatccttactctttcagctgacaactcatcaagtatcatatttattctatttggagcatacttggacggtagtgatgctccaaccagccattcttctggtgggaataaccgcatggttgagacagtatctgtcacatagctgattggatggactttgtcctgatagtggaattccgtttcatttatcgccacaagctcatcaaagatccactcatggatcccattttcttttagtagaagaatatatttgaaaaccaagccaatgatgtcttccatgtgttcttctttgtaaaagtggatgttgggtgtaacgggccatgatatttttaggtaatcgccttcagatatcgggattgctttgataacaagctgcatatgctgctctgaaagaggttgacttgggcatttgaagcttctctgatcagtgttttttatgtcactaaacaagcgctcaacaaagctttggatgcaatccaggctctcctttccataaacaacaaggtgcatcaggtttgctgaataattctcatagaacttcagaagctcctgtctaatgtccaatcccctctcttttggttttgtttctagcgtttcccaactcccagtactgaatttatgataggggtgatcctttgaagccagatgtttttggagctgatacattctccagccatcagacaacaagtttttcttgtgttcagaatcaacagccttaatctctctaagaacagcatcttgcgacatcaatggcttaataaaaaactgagcaaatctgtctaatgcttcttcaaaattggccacattgacatcaaaatagaaatttgttgtctccgaacttgtgtaggcattgcaagagccaccatgctctgtgatatacttcgtgtaatcttgttccccagggtatttctcactggcataaaatagcatatgctcgaggaagtgggcgaggccctcgagcccctccgggtcgctgaacgagcccacgccaacctccatacacgccgccgccttgtcggtttcggagtcgctgatgaggaggcactcgagcgcgttggggagcaccacccggcggtactcccgcttgtcgctccgcgcgcggatgaactccacattgctctccgccggcgccggtgccgccgccgccgccatgtccgctcgctctccgctctccgcctccacagcctctgctctctcttccgctctccgcgcgatactccagtagttctccggggttagattggaggctaagcaagtggggtcttttgctcctcttatctcatctaatcggtacttgatatcatctgcaagggctttggccaggagtataatctcatgaggagaatatttgcaacttgcagtctggggcgaggaatcagtaataagctccatctctatatcctgctgttttttgagatattcttgagctgttgatgtgacgatcttaatgaagaagttcacaagcacaagccacaccacagtgttccagaccaatgtaaaagagaaattccactgtgtatcctccatttttgaggatgatgtggccgatgttggtgttgataaatacttatccttcgcactgtggagctttgcaatcacagatggcaaggaggcagaaaacccaggaatgtgaccaaatatccagattaattccttttccataagatacaagagttgattgttgcacaaggagataataaataatgtctgaatatgggtcttgatgatggccttcccaatcaaagtagcaaagaagaactcccagaagggaatgccaaattgcccacacattataccagcaaggtcaaacagtgggtttggaaccgaagcaagaatcaagatagtaatgaagttgagatgctgagagtgggaaaggagccagcgttttgttcgattgagagtggatgctattggaccatgttcatccgaagcagcagcatccagctccttcacagcttctggttcacttcctgacaaacgagcagctcgtgatataaaataaggagggagctccccaagcgctgtgccaatgccccaaagaacagcttccagctgaacctgagggagtaattcaaagactgggatccggacagaatgagccgatgcttggtacactggtggtccaaaatctgaacacttcttgtccagccatgatggcccttgcttaagctgtatggtatcgtatggagcagttttcaaatcaatccgaccacattgaacagccttaatagtgaagagggcaatatgagggcccagatacagaacaaatgtatgcaaacctgaacctttctctagattggaaagtaaaaggctaattgcagcagtagcccacaacacaaatctagcataattcaggaactcctgcacatgctttttatgcagaccatctgtaaccgcaagtaaaattccaggagctagcaccaacacaatgaggacaacaaacaaagcacccttactcaggatatatgttgctaatcttttcaagtattgcaacatagctaacatgaaaaaacgtaatgtcctgaatggatgctttgttagtgtcaaattctccagttccaatttgtgtttctcacggatttcggatatgacgccgcccccggccttcgacgagccacgcggcggcgtcgcagccgccgccgcggcgaccttccgacgccccatcgctccctccccacccccgaggcgccgaaaaccctagatctcgctgccgcggctgccgccctgcggtaccgaccccaccatgggccgcccagatcgcggggggggggggggggggtcgaagctcctaggtctccggccagtcagccggatcgcacgccggaccgggatgagccgccgtccgcgacgccggcggcgagcttgtggtgggtggtggacgcggcgcggcggttccccgtcgagcggctcgtatttatgtccgccccggccgagacgggaggaggaggcgatgggggagggtggggtgttggaaattttctcttcgattttggaggagcaaaacg

SEQ ID NO: 65650 - DNA, 633 bp, Oryza sativa
  unsure (1)..(633): unsure at all n locations
  Clone ID: PAT_MRT4530_66678C.1
gtagacatggacttgatgaagaaaaagaataaagtttttttttttttttgggtcagtgatcaatgatgtttgtattagtcagtttctctgtcttctcctggcagtacagcaaatctatccactggacttgtcactatattctcagcctctcaggtttcaaaatcttcatctgtagtaatagtcgtggaacattcttagttggttatggtatagaatttctactttctgttagtacagcagtgcttaagaaagggctattgctcattgggccttatagtgaaatttctgttggacccgagcaatagtactttgggtgcaatttgattcctttttctttgaaatgaaattctaataagtttgtttctattcatttggaatagcctcagtttcttgtagcctgtattgagatttctatgctattagctgcgatttacctcctttttttgtcacgtcagttttgcaatcttagtagcactagtaataagtagacgaaccaaaagtatagttgctaatacatctgtatcttgctttcaggcctnttgggttccaattagaccaacggcgtccctattgaanagttggtttgatggatcgtaatgacagagaactcctaacattacttccatttttgca

SEQ ID NO: 65651 - DNA, 2043 bp, Oryza sativa
  Clone ID: PAT_MRT4530_66679C.1
attcagagcagtagcagtcctccagctggtgaacgtattcgcatggcagaaggtaaatctagtcagtctcatcttaatgagtttaattcgcgtgattcttctgtatcaaagtccagatctaaatcaagagacagtaaatccataattttttttcattattgtaagaaagataatcatgatatttatcagctttataagttgaaaaggaagaaagaaagatctaaaactcaaaatgaaaaacctgctgaggataattttgttgctaatgattctgatggcgaggttctaatcagcactgctagtatggagaatcgaactacttggattattgattcggcttaaactttttatatatgtcaatagaaagagtgattctctacttacgattctgttgatagtggtgaggttgtgatggttggtgataggtctccaattgaaatttctagaattggttatgttcaaattaaaacaaatgatggcattgtcaggacccttacaaatgttcaccatgttcttagaatgaaaagaaatattatttttttaggcactcttgaatcctggggatataaatatgttggtggcaacagtgttcttaagattttaaaaggcaaccttgttgtgttaaaaggccatagaatcgacaatctttattatttacaaggatctacaattacaggtgtagtagttgtttccactattgcatcagatcctcacactaccaagctttggcatatgccttttggtcatatgagtgagaaaggtatgcatcttatttgcaagaaaggtcatttagataatattggcaaacttgatttctatgaacattgtgtttttggcaaacaaaagagagtcagttttagcattgcaactcatcaaaccaaaggaattcttgactacattcattctgatctttgagataagtctaagtttcattctattggtggatgtgagtactttatagcattcatggatgatttttctcgcaaagttgggtttatttcttaaaacataaagatgaagctctttcagtgttttagaagtgaaaaattttggtggaaaatcaaactggcagaaaaataaattaaagaagcttagaactgataatggattggaattttgtagtggtgagtttgatatttttttgtgctaatcatggtagtgcaagacttttgactgttccaggaactccttagcaaaatggtgtggcagagcgtatgaatcgcactcttctagaaagagcccgttgcatgctttcaaatgcaagcctgtggaacaagcatgcgtttgtgggctgaaactatttctacagcttcttatttgatcaatcgttctctaaattttgctataaatttctagattccagaagaggtttggtctggtaaactagttgattattccaatttgagaatttttggttgtcctgcttatactcatgttaacactaggaaacactaggaaattagatcctagagtgagaaaatgcgtatttgttggttatgattctggtgtcaaaggatatcgtttagggtgttctgatgctcacaaattgatcattagtcgtgatgtcacattaatgaagatatttttctctcatcaggtatctatagtcaatcctactatacagcttctgattcgtcattttatgataataatgatcattgtattgctcaagatagaaatagaagaaacattcgactgcctgctagatatcgtgacattgatgatatggcctgttatgctcttcttgctgcacaagatattaatgatattattgaaccttcttattctgaagctatctcatgtgaaaattcttcgaaatggttaactactatatgaatgaacaaattgagagtcttcataaaaatcatacataggatttggcaaagctttaaatgggtaaaaaactattaaagtgcaaatggatttataagatgaagaaatgtacgtatttctggagttaaacctgcaagatggaaagcccgtttagtgtacatgcatgacttatactccaattttaaaacatatggggaaaaaagtagttat

SEQ ID NO: 65652 - DNA, 1110 bp, Oryza sativa
  Clone ID: PAT_MRT4530_6667C.1
atggccgccgccgccgatgacctcgcgcgccgcctcgccgcgttcataccgctcccgcagccgccgcagaaggagcagctctccggcgtggccgcggcggtgctcgacgccggcggccgcctcggacgcgctgtgggcgacgtgttccgacgcctgcgcatcgacgaaggcctcgacgtcgccttggcgcagcggcaccgcaggaacgggggttccaggatcgccgccgccgccgccgccgttgatgcgcgggtcagcaaggacagcggcggcggcggcgtcgccgggcacgatccggggagcatgaacctgtcggcgacgtacgacagccggacgagcgacgtggagagctcggtggtggcgaggggggacctgtggcgcgccgaggcgtcgcacagcagcgccgccgcggccgcgccgccgctgttcatggtgcagctcggcccggtgctgttcgtgcgcgacaccacgctgctgttcccggtgcacctgtccaagcgccatctcatctggtacggcttcgagcgcaagaatggtgtgcattcagtctgtcctgcttactggtcagctcacagaagatggttcttcatgtcaatgatttgcctaaatccttttacttgtattgggagatcaaagttgaacgggagtgcagcaagttcagggttagtgttgagagttgacgctcccctccatagctttggccggccctggttctctattcagatgaacagcggtctggagttctgaccggcgacggcttcactactcgcgcatttcttcctctctaccgtgggatctttcaagcccatgcgaaattcccgggagagaagaagtttagttactcattcaagttccggcctggacggggctgcactctggtggtgcagtgtttttcttcaaactgaacaatgcagaaagtattacattgaagaaacacttgtatagacagtcaaatgttgcaggaaccgattgcttctttgttggtgatcggtggaatgccagatctcctagccaaaatttacaaaacaaaatttgtggacagtgatgtgtgtatatatgtgtgtcagaaagtatatatattttttaataatgaaattcatttcgaccttt

SEQ ID NO: 65653 - DNA, 127 bp, Oryza sativa
  Clone ID: PAT_MRT4530_66680C.1
tgagagaccgagtaagactgtctactactcagtgaaatttatcaacaagggagacgggcttaccagaatccactcttaaagatgttcctattctagctcgacaatagaaccactaaattaaaatata

SEQ ID NO: 65654 - DNA, 1457 bp, Oryza sativa
  Clone ID: PAT_MRT4530_66681C.1
gcttgtccttcaactctgcaagggacccatacttccggagttcattttcttttattttgaagaatattattcctggttatgttcctcctgattgcaaaaggttgaagacaactcttctgcaaaaagaaagggctcgcattgaagacttactaaaacccatcaaaagcatgtggaggaaggcaggtgtgacgatagtttctgatggttggtcagatattcgacagcgctcacttgtcaacattctggctgtcaatgaatgtggacccatttttctgcaagcaattaacaatgaagatgaggtgaatacaaaggagtacattgcagagaagctcattgctgttattgaagaggttggtccagaaaatgttgtccaagtgatcacagataatgatcctgtttgcagagctgctgggctgctgattgaagaaaaatacgatcacatccaatggatgccttgtattgctcatactttaagtcttgccttgaaggatgttttttctcctaacaatactggagatgttgccttcaaagatagccattggatttctgaagttgtagaggatgcaattatgatcaagaatttcataataaatcataccatgatatcatctatactgagtgagttcaacaacttgagaactgtcaagtcagaatatggagagtttgctcttctgggaacaaaacattttagcttgaattcaagagctgatagggataaacttgaccccaagatgtggtgggcgacccatggaacttcagcacaggcagttcagagtttggctttcaagcttctcagccaacctgtttcatcttcttgctgccagaggaactggagaacttacgattctattcgcgacatcgtgagggacaaactccgtcctaaatgggccgatgatttggtttttgtgcacaacaatttgcggcttctatcaagaagatcagaagaatatcatacagaccgagaggcaaggtactgggatggacgcgttgtctctgatctcgccgggcatgaactcgaggaagaagactaccctgatgtcgactatgagtcagatcttcagaccgccatgtcgataacagttagatatgctacccaaatattgtactggatttcgacgagatgggttcaaaaagatggattcttcaacaataagctactcgactacttcgaaccagggagatccaacccagccaaagaacaattgagcactcgaatagtttgtggtcgagtacaccgtattatcgagaacaacctcgacaaatgcagagtcgtcgcgcccaacctaccaacgaagaccgacgacctatctcatagcaccggccatggctggactactcgagaaaagggatctagcgctgtctctgatctcgccgggcatgaactcgaggaggaagactaccctgttgttgactacgagtcagaccttcagaccgccatgtcgacaacaattagatag

SEQ ID NO: 65655 - DNA, 2296 bp, Oryza sativa
  Clone ID: PAT_MRT4530_66682C.1
atgaggttcctatgcgactattgcagttgtgtctttcgtggaagctattccacagtgaaggcacatttgcttaaaatttctaaacaaggtgttccagcttgcccaggagtgaccttcaatatcttaatgaaactatccagtgaagttgatgcagcagaagattcaattctaatccaggtgcgtaaaaaaaggaatgtaacagaatcttgtagcagtgactattctggtgacgaaccagaatcttgtagtagtgactattctggtgacgcaccgtgtatgggcaaagttattgtacaagcgaaaagaaagaagagcagagctgaatgtcgagataacttcgatgctcagtttgcaagaatgttctattcttcaggcttgtccttcaactctgcaagggacccatacttccggagttcattttcttttattttgaagaatattattcctggttatgttcctcctgattgcaaaaggttgaagacaactcttctgcaaaaagaaagggctcgcattgaagacttactaaaacccatcaaaagcatgtggaggaaggcaggtgtgacgatagtttctgatggttggtcagatattcgacagcgctcacttgtcaacattctggctgtcaatgaatgtggacccatttttctgcaagcaattaacaatgaagatgaggtgaatacaaaggagtacattgcagagaagctcattgctgttattgaagaggttggtccagaaaatgttgtccaagtgatcacagataatgatcctgtttgcagagctgctgggctgctgattgaagaaaaatacgatcacatccaatggatgccttgtattgctcatactttaagtcttgccttgaaggatgttttttctcctaacaatactggagatgttgccttcaaagatagccattggatttctgaagttgtagaggatgcaattatgatcaagaatttcataataaatcataccatgatatcatctatactgagtgagttcagtaagttgaagattcttgctatttcgaacacaagattcgcttcagatcttgttatgttaaagaggtttcggctgatcaagcaatctctaataatgttggtcatcagtgacaagtggtggccggtttactgtaatgataacatggagcaagcacagcttgtgaagtacaagcttactgataactcgtggtggaaacaagttgattacattctttctttcactgagcctatatattcgatgatgcgcgtgacagacactgaagagccacgccttcatcttatcaatgaaatgtggaatactatggtcgagaaggtaaaggctgccatttataagcatgaatcaagagagcctgaagaggagtcagcattttactctgttgtgcatggcattctagaagattggtggagcaggagcaaaactccgctccagtgtttggcgcactcactaaatccaaggtattacagtgacagctggattaatcaagctgctaatcgtctacccccacatagagatgctgagatttctcgagtgaggaataattgctggaggaaattgttttttactacagacaacttgagaactgtcaagtcagaatatggagagtttgctcttctgggaacaaaacattttagcttgaattcaagagctgatagggataaacttgaccccaagatgtggtgggcgacccatggaacttcagcacaggcagttcagagtttggctttcaagcttctcagccaacctgtttcatcttcttgctgccagaggaactggagaacttacgattctattcgcgacatcgtgagggacaaactccgtcctaaatgggccgatgatttggtttttgtgcacaacaatttgcggcttctatcaagaagatcagaagaatatcatacagaccgagaggcaaggtactgggatgtaggagacgacaactttaaatcattgggtggtgctggcatccttgagtctgctaacctctctcttgatgaaccgtagttcgagcttgccatgatagaaaacatcgtgtgatgaagaaaaccaaatggaaatcaagacagaagcttagcttagctaagctacccatgcttcaacttgtctggcgttttgaactcccagataacccctgtaatcgagtatgttttggctaagaacatgcaagactagagctaggtagacttatgggatgtttggctgtgtaagctggatggtgctgttgatcaatgttggtggagggcaattgaactttctttacctggctaattggcagctaatctgccagatttttgcaacttgc

SEQ ID NO: 65656 - DNA, 419 bp, Oryza sativa
  Clone ID: PAT_MRT4530_66683C.1
ttatagatgatgcatccgaaactcacagtgttaacgaccaaatttggtaacccaacgatcggatgtgaaggaggaatcgagacggagttcgaggtagagattgttccggaaacagagtgaggatcggctgaagtctgaatcggctgcgactaggatcgccagagttcgagtcggacagggttagccgattgagccgaatccgacaatatgatatgtttgggcaaaagtctgccgcaaagacttatgatatcttagagtttgttaaagataagagtcatgtccgatatggacatattttgatcaaatcaactggcatgctcacacacctaaaggcaagcttttggacctgcactggagttaagcagatctcccaggcctcgtgtttttacatcaacactatctcaatgaataaagagaga

SEQ ID NO: 65657 - DNA, 634 bp, Oryza sativa
  unsure (1)..(634): unsure at all n locations
  Clone ID: PAT_MRT4530_66684C.1
ccggccgggaaatcctcgctcgatccgcctccgcttcttctcgcgcaaccaggagtggacaccgacgggactcctccggcgagatgcgccaccgccgggactcctcctccggcgagaccccaccgccaggactgctccggcgaaacgctaccaccacaccagggatctcgcggaggatttatggcaaggaagctcagtgcaagaagggtgagatgggaacgcagtatatcatcctcgacatgggtggcatacaggttctgttttttttcgagatgtcttggagccagaagcatatttctacacataactgtgtactcttctaagtatatctgggcttctattgagtcagtattggatgtaatcacatgggttgttatgtcactttcatgggtggtgtcattttgggacgaagtatcctgttgtcgcatcgagccatctgctatcgcactatcagttgtggatggaaaaaaaataaaaaggatcaaaatctagggagtcaaactaggatcacattcctcaaatcggctataccgttctagattattggtctgaaacatattccatagttntagaagagatataccccctctcggtccacttcctcaatccatcgatgcaagaacctttgagactt

SEQ ID NO: 65658 - DNA, 857 bp, Oryza sativa
  Clone ID: PAT_MRT4530_66685C.1
ctagtggatccccgggctgcgcccgccgggcctcttctcgcgcaaccaggagtggacaccgacgggactcctccggcgagatgcgccaccgccgggactcctcctccggcgagaccccaccgccaggactgctccggcgaaacgctaccaccacaccaggaacggccaccgtcaatcttgctcccacccgaagcaacgcgacgcgctctatccagcgccagcaccccatcccccaggtcaacctcgacagtgacctcgtcggccatccctaagcacggccagcacggcgactaagttctaggctgatctcctcaggaccccgcggaggatttctggcctgctagcgcggcgctagtggggtgaatcgcgtgcgctgttttgcctcctccacgggggttgtcttcttgggacgaagtatcctgttgtcgcatcgagccatctgctatcgcactatcagttgtggatggaaaaaaaataaaaaggatcaaaatctagggagtcaaactaggatcacattcctcaaatcggctataccgttctagattattgttctgaaacatattccatagttttagaagagatataccccctctcggtccacttcctcaatccatcgatgcaagaacttttgagacttagacaaaacatctttttggctgctttagctatgatactttaagcttaattcaccaccaaaatatggtccaaatgtttctatttgaatgcaaggatgtaaagtcggaacctttttaagttatgtaaacacaccttggatcaagtgaaatatgttgtgacgtgctaaatatgtgttaaaacaggatagcttgacattatgctgatgttcaattattggcttc

SEQ ID NO: 65659 - DNA, 445 bp, Oryza sativa
  Clone ID: PAT_MRT4530_66686C.1
agggtgtgtttggcaaatagaatataggagatgggattgggaaagggaaatggatgagtggctaggattaaatgatgtgtgaagaatgaatggctctcaaacttgtttgactgtgtcatcccaatccctaaacttgcagatcactcgtttaggtcctccaacttgttcagttgtgtcaccccggtcccgtcctatttgacccagatgatattcaaattcaagtttagggaccggggtgacacaactgaacaagttggaggacctaaacgagtaatctgcaagtttagggatcgagatgatacaatcgaacaagtttgagaatctaaacgatcgatttgcgagtttaggtaccgagatgacacagcagtataagtttagggacaggtgacggactttactctattattattattattattattattattattattattattattat

SEQ ID NO: 65660 - DNA, 639 bp, Oryza sativa
  Clone ID: PAT_MRT4530_66687C.1
ccggccgggaaaatcctcgctcgatccgcctccgcttcttctcgcgcaaccaggagtggacaccgacgggactcctccggcgagatgcgccaccgccgggactcctcctccggcgagaccccaccgccaggactgctccggcgaaacgctaccaccacaccaggaacggccaccgtcaatcttgctcccacccgaagcaacgcgacgcgctctatccagcgccagcaccccatcccccaggtcaacctcgacagtgacctcgtcgaccatccctaagcacggccagcacggcgactaagttcgaggctgatctcgtcaggatctcgcggaggatttatggcaaggaagctcagtgcaagaagggtgagatgggaacgcagtatatcatcctcgacatgggtggcatacaggttctgtttttttttcgagatttcaaagagtcagaagcatatttctacacataactgtgtactcttctaagtatatctgggcttctattgagtcagtattggatataatcacatggtttgttatgtcactttcatgggtggtgtcattttgggacgaagtatcctgttgtcgcatcgagccatctgctatcgcactatcagttgtggatggaaaaaaaaaaaaaggatc

SEQ ID NO: 65661 - DNA, 318 bp, Oryza sativa
  unsure (1)..(318): unsure at all n locations
  Clone ID: PAT_MRT4530_66688C.1
actcctctccttctccttctccttcttcttcctccattggcatctccaagaaacccaagcctttctacgtgcttcgagctcggccaccggcggccggacgcgcgcgcgccancaccatgtccggcggcgcgtcgccttcctcctgctcgtcgccgccgccgccgtggccaatgccgccgtcacctacgaccacaggtgctcaccatcaatggccagcgccgcatcctcatctccggctccatccactaacctcgcagcacccccgagatgtggccggacttgatcaagaaggcaaggaagggggctcgangtgatcaa

SEQ ID NO: 65662 - DNA, 202 bp, Oryza sativa
  Clone ID: PAT_MRT4530_66689C.1
ttttttttttttttatatcgacacttattccagggggacatagtcatttaactgatcaaacctacattccaatctcttcatattcaccatccaaaccattaaacacaataaactgcttatgcaatactttacacttacaaaacctttatccacagctccaattttcttatctaaaaatcaaaacatataacaaatgctgatt

SEQ ID NO: 65663 - DNA, 423 bp, Oryza sativa
  Clone ID: PAT_MRT4530_6668C.1
atggcgatgggcgggatcggcggcgcggcggcgtcgacgtcgtcggtgccggcgatgccggcggcggtggcgccgccgccgttctggtcgacgccgacgccgtacctgttcatcgggttcggggtggtgatggcgctcatcgcggtggcgctcgccgtgctgctgtgcacgcggcggaaggacggggggcgcggcgtcggcggcgaggagcgcggcgacgtcgtcgtcccgccggggatgatgtcggtgcgcgtgctggcgccgctggacagggaggcgccgcccagggtggtggtcgtgatggccggcgacgactcgccgtcgttcctcgccagcgccaccccgctcgccttcgccgccgccgccgccaccggcgtgccactcgcgccagcaccaaaggtggtggccccgccgcagccgtaa

SEQ ID NO: 65664 - DNA, 246 bp, Oryza sativa
  Clone ID: PAT_MRT4530_66690C.1
atggaaaatgcagatggtttagacatattcgggccgtttctaaccatgcgcgccttaccgcagtatgggcacgtcccaccacaccgaacgacacgggcggacacccgcatcattccttctttgactaacgacgacttcctcccacggagcatggcgcaggccatgctccctgacagcagtaggcgcacgcgcgaggcgctctgcccgcgatcacatcaatcattccgactttgggcgggcgagtag

SEQ ID NO: 65665 - DNA, 507 bp, Oryza sativa
  Clone ID: PAT_MRT4530_66691C.1
atggcgatcacgaggactcgtggacgacaacgcagagggggtgggctcagcacccaacatggcttcgtcggctacggccgcgagggagaagacaaggttgcgcgggtccaccactgcgtggggttgggcccgtcgaatctggaggccgcgactggtgtttgcctccagctctacctccttccacctggtgttgagctcgccgttgtcatcagatttgtatcgctgcagccggagaaagccccctttgcgtcaccatctacgagcctgagtgttgaaggagatttgcctgagttggagaagaaacgtaggctgttgccggagttggagctgacggatgtgttgatagaaatcgtgatggagtggcacactgccggtgagccggacaccagcgacttgtcctcgcactggcgatctaccagccaccgcccggagatgatgcactcacgtgaggaggggcttggcgccacgccgcagactaactactgcggcagcggcttcaggagttag

SEQ ID NO: 65666 - DNA, 177 bp, Oryza sativa
  Clone ID: PAT_MRT4530_66692C.1
gtaaaagttctctcgttaataaattacaccgtaaataagttcgccaaatgagatggttgcatgtatgcatagtgaagaacaaaaaaaaaaactccatgaaattacctgtctggctgtcctgtcctgcccttgttgttgttggttctgaataacagaataagcgtgttccttttgttt

SEQ ID NO: 65667 - DNA, 860 bp, Oryza sativa
  Clone ID: PAT_MRT4530_66693C.1
tttttttttttttttgtcaaatttaaccgctcttaataatatgatgcacatataacgatacaaattaaaaataactcacggaaactattttaaatatgaatgctcactctggagagctaaattaatcacggcagggtgcatgcatgcagtaaactcaaattgtcacaacaaaaagtcaccgagtctaatcacgatcacaacgacaaactgtagaatgtaatgaggctacgaaaggactcctcgatcagaagtgaaagaaggcgagcagaggagctgccacggcggcggcgacgacgagcacggcggtggtcgatgccatcggagacctcgctgcggcggcgcccttcgccggtgccgctgccgcaccgccgctgccggacgatgtccccggggccacggacggcgacggcgccggtgcgaggcacttgctgaaggcggaggcgtcggcgccgcaggcggcggggaggtgcaaggcgcgggtgatgttgatcgggaggggcagcgtcttggaggtgaaggcggcgcacaggcagcccacggcggcgctgtccttgagcgcgcccttcacctccccgcagcacagcttcgacggccggctcggcgccgtcttccccggggtcacgtagtccaggcagtccgccaacttcagcgcctccgccgtgcagtccacggccggcgccggggccggggagctcgccgtggcgccgtcgacccccgccacggccgcgaggcctacgaccaggaggcacgccacggcggcggctcttgcggcaacagccatggctagctagctctacgggtgagtcggtgagcaacttggctttgctcggaagtcggagcagaggtgcaagcccggccgg

SEQ ID NO: 65668 - DNA, 544 bp, Oryza sativa
  Clone ID: PAT_MRT4530_66694C.1
ctctctctcgagtctcccgtctcctttcccctccttcctcctcccctttcgtcttagcctcagctcgccgcgagacgaatcctcccctcgccgccgccgggtccgatcgacggcggtatcgagggacggagggggcgcgcccgttctctcgccgtacaccgtcgtcgccgaccggctccctcgacggcacggtaaaatgaaaaataaaaagcctcctcctcctcctcctcccctatgatggcggatgcggcggcgggggggcgggccgatctggacgccgttgacccgcccgattcggctcggtcgcatccccccgtgcgcgcgtttactgggaggatctgttgtatttggacgttttagactggatcgagtgagggggattttgcggtgttcttgctgtgacgggattcagctatgtaggtgtaggaatcttatgttaacttgttgggtggctctgctgcttctgattctttctgtgaatctggagtaacaaattctttctgtgaatctggagtaacaaggacttgtgctatggccgatctct

SEQ ID NO: 65669 - DNA, 1548 bp, Oryza sativa
  Clone ID: PAT_MRT4530_66695C.1
gcactcttcgtcgtccggcgttcgctgcccttcatcgaaactgtttttctttttttttttttttaattgctataatggatttcagattaatttctcaaccatcggagaaaaatattacaatattacaccaacacaacttgcaagttacaaatggatcgacaacgacgagatgcatatgcagctagctagcaactacagatatgtgcccataattaattaattaagtagataatatctggctcctgacccacgggggcgtccctgccgctccgggccaccaccccctgcttatttcaacctgattaattcagtgcttccttcccgttacattacactgcattacattaaattacagttacattacatggctgggcaaaaatagatctagttcccgtcgcggctcgcaccaggaatgtcccagggatcgcagcttgaagaggttggtggaggtcggggatgaactggcggcggggagcggcaggccgaacgccttgcggcggaggtactgcaccacgagctcctcgtccgtcgggtggaacctgaaccccggcggcaacaccactcctccatgcctcaccaccaccggcgccgccgaagccgccctctccatcgtatcaattctatcaattcacaccaccaccgacgccgacgacgacgacgacgacgagctagagctactcagtcacacagccaagaagctagctagctcaaagctcagtgaagcacaagttaatggcagagagctaagctaagctaagctagctcgatacagttaaagatcgatactgaagagaagctgcagctgctgcttcttcttcttttttttactttgcaggagccatgcatttgcttggaacgttcatcccggccattcgctagagctacgaggctagacccagagagccgggccaccaccaccggcttgtcccgcccgcccgccggcttccagcacccaccgctcgccgtcacatgctgcctcctccccctcgccgcaggtggccgcacggcgaagaagtacttgtccccgtcgctgctcgcaccaggaatgtcccagggatcgagcttgaagaggttgtggaggtcggggatgacggcggcggggagcggcaggccgaacgccttgcggcggaggtactgcaccacgagctcctcgtccgtcgggtggaacctgaaccccggcggcaacaccactcctccatgcctcaccaccaccggcgccgccgcagccgccctctccatcgtatcaattctatcaattcacaccaccaccgacgccgacgacgacgacgacgacgacgacgacgaggagctagagctactcagtcacacagccaagaagctagctagctcaagctcagtgaagcacaagttaatggcagagagctaagctaagctagctagctcgatacagttaaagatcgatactgaagagaagctgcagctgctgcttcttcttctttttttactttgcaggagccatgcatttgcttggaacgttcatggcgcggacgcgtgggagcacgcgctagagagagagagaggagagag

SEQ ID NO: 65670 - DNA, 608 bp, Oryza sativa
  Clone ID: PAT_MRT4530_66696C.1
ttttatgcttattcatgaggagcccttaggggattattggtattaatagtagatatgatgggatagcacggaccaaccccaccaacgcacgagcgcgctcaagcggactatacatgtacaaacatattcgacgactcattaccacgcttttatgtgctattagagactaatagagcctctgttctccggtgattactggtgaacactgtaaaaccgtctatctttggttatattctcatctatgcgcagcgatgagcagaggaaaggctaaggagagctaacggaatcattgtgggtgccaggcgacgccaggccacaggacttgaggagacttgctgaggcctacttacgggttgatttacgccgtttgccacccaaggccacccaagttcataggcgttgttgtgactaattgagactaatcgatcagaccataattgaccataacagcctcgagaaacctctatacacagaaagtatcggacaggatacgccatgtgccggcctttggaagcctgtcgactgtggtaaaatgagatacatccacgtccatgtatgtaaaggctggcatcgggtgccatccacggtctatcacgttaagagacact

SEQ ID NO: 65671 - DNA, 422 bp, Oryza sativa
  Clone ID: PAT_MRT4530_66697C.1
ggggaaacgaataaaattatttttggaaaaacattatctttttttttatttttttaggggacccaacaccaactcgatcattattttgtcggactaaacccatttttcccaacccaaaaacaacgaacttgttgggcacaaattccttcaaccccaattaaccactggttagctacgggcccccactttactttccggggacaaaattgggggcgtacccccaaccctttttgttaacggggtccgccagggggtccgccaggttcttgagggggcccttgccggtgacaatggcctggaccaaaaaacccaacatggaaaacatggggagggggccgttcttgatctccttaaccttgagctccccaaacccctcggggtcatcggcaaagcccaccgggtcaaaaggccccccggggtaa

SEQ ID NO: 65672 - DNA, 878 bp, Oryza sativa
  Clone ID: PAT_MRT4530_66698C.1
atgtcaccgacacaagtcgagttagaactcgagttggattggagacaaaaacttgagctggaaaaagaacagttgagaggaaagatagaggtaatgaaaatgatgggatctgaggaagatggaacattgaaggaacttgatgagttgcgtacaaagctggaagaaaaagatgatgacatggagtccatggattctcttaaccaggccctgattattaagaatcaaaggaccattgatgagctgaaagaggccaagaaaggccaagaaagaactgataaatgtgtgaagagaatgggtgagcttgatcagaaggccttttataatgcatgcaaaaataaaatgccaaataataagatgaaattggcacttgtttgttcaaaatgggaagatgagataacaaaaccagaatggcatcctttcaaagttatcgagactgctggacagacaaaggaaataatcaaggaagatgatgggaagctgcaggctttgagggcgcaatatggggatgaggcttgcaacgttgtcgttaaggcccttgttgaaatgaatgaatacaatcccagtggcatgtatcctgtccctgagctgtggaacttcaagcagaaccggagtgcccctatgccagaggcagcaagttacttgctgaagcagtggaagacgcacaagaagagaaacacctgagtgagatctggaccctgctcgtggtatcgttatctgtagaattcgtcccctgacatgtagttggatgaggctgcctattagtgaagcaagtattcatatctcccagacattgtctgtctctactggcgacattgtagtgcacatttgagagttgaggctatatgaatattcgcaaactccagtaatgtaaaaaacaa

SEQ ID NO: 65673 - DNA, 421 bp, Oryza sativa
  Clone ID: PAT_MRT4530_66699C.1
tttgaaagaggccaagaaaggccaagaaagaactgataaatggattagaaaaaatggcaggagttcgatccattataggtgtgaagagaatgggtgagcttgatcagaaggccttttataatgcatgcaaaaataaaatgccaaataataagatgaaattggcacttgtttgttcaaaatgggaagatgagataacaaaaccagaatggcatcctttcaaagttatcgagactgctggacagacaaaggaaaatcattcaagcaggatttttgaggaacaaaagagaaggttaaaataccggaaataatcaaggaagatgatgggaagctgcaggctttgagggcgcaatatggggatgaggcttgcaacgttgtcgttaaggcccttggtgaaatgaatgaatacaatcccagtggcatg

SEQ ID NO: 65674 - DNA, 480 bp, Oryza sativa
  unsure (1)..(480): unsure at all n locations
  Clone ID: PAT_MRT4530_6669C.1
accccccaaacctcaccgccgctcgatcccatccaccgcccatggccgccgccgccgatgacctcgcgcgccgcctcgccgcgttcataccgctcccgcagccgccgcagaaggagcagctctccggcgtggccgcggcggtgctcgacgccggcggccgcctcggacgcgctgtgggcgacgtgttccgacgcctgcgcatcgacgaaggcctcgacgtcgccttggcgcagcggcaccgcaggaacgggggttccaggatcgccgccgccgccgccgccgntgatgcgcgggtcagcaaggccgcggcggcggcggcgtcgccggcacgatccggtcggcgtctccggccggttcgcgcggtcgcaggggagcatgaacctgtcggcgacgtacgacagccggacgagcgacgtggagagctcggtggtggcgaggggggacctgtggcgcgccgaggcgtcgcacagcagcgccgcc

SEQ ID NO: 65675 - DNA, 222 bp, Oryza sativa
  Clone ID: PAT_MRT4530_666C.1
atgtcctcacgtcgcccttgtacccggcggagtgggggtgggtatgacccgtcacatccgagcgtcactcgaggaagggctatcgcaagcggggggcggcgccgggttccactcgagaaccggttattgcttagcttccgggagaaggcacggtttgaagcccaaagtggagtgggatccccctccgatagagggtagccgaggtgcttgaacatgtcggcg

SEQ ID NO: 65676 - DNA, 481 bp, Oryza sativa
  Clone ID: PAT_MRT4530_66700C.1
aaaaagtgcaacgaaggtccctcaacttgtcatcgagttacaaaatcatcccccaaccacaaaaccagatatatgacatccctcaagttacaaaaccgttcaatttaggtccttcggtggttttgaccctggtattgtccgacgtggcggttgagtcagcgtgggacccgcgtgggacccacatgtcagactgtccatgtcaccagggcgtggccggcgaagagcagccagggcggcgcggcaggacggtgcggcgggcgcgggcgcgggcgcgatcgccggtgcagaggagcacgccgcggtcgggcgtcgccatggcctctcttgtccccgtcgaagtcaccccgctcgatgaggtcggcggcagcgagcacggtgtcccgtcgcggcgtgccccgttgaagtcaccccggtcgacgaggtcggcgcacgcgagcggggaggggtgtcggtggcaggaccacaggggcagagcgaaggg

SEQ ID NO: 65677 - DNA, 992 bp, Oryza sativa
  Clone ID: PAT_MRT4530_66701C.1
ttaaccttcttgaacacttccgaggcacttacgatccttcgaaacgacggaaacgacaagctaacacgcaaaacgagaaaaaagactaataaaaaccaaataaacaatacatataaagatcaccctaatgatcaaccgaaaccggcgaatggaaccggcggctctgaacagctctaaactaaaggacgactcaacacgggcgaacgaacgaagcacggggaacacctcgttcgaacgaacgagcgaacaactcaacaacggctgcgactaaaccggtgagctagacacgaaaatctcaccgaaccaaaacgattggagagggagagatgacgacggcgacccggcggcaacacacggagacgacgacgatgctagacaaacaacggattagattgaattaaggccctagggaaaaacttacaccggtgaaacacttacgcgacgacggatggcgacggaagatggccggcgacgagatcgggacagcgacgaggtactgtccacggcggcgacgactttccggcaatgtgcggcgacaacggaggggtggccgggtttcacttcgcagctgcgaatccaatggaggcagcggcgaccgaaggcgacgaccacagcgacggcgcggggctgctggagacacggcggcgacggcggcgctccggttcacgtcgacgggcaacctccggtgggatttggcacaaaataaccagtggccggggtagaggtcgaccttgcgaagccgatggaggtggcggcgcaggaaggaggcagatgaggcggcggctaggggcggctgtagtggcgccggcgcttggagagagaaggagagcgcggggagagcgtttccggcgacggcggaagatggaacttgaggggataggtagaggacgactagggggtcctttatataggcacggaagctcgggtccgggcccaaatcgacgagaaaaaaatcgggaaagtctagggttctcgccggaaaaaggaaggat

SEQ ID NO: 65678 - DNA, 369 bp, Oryza sativa
  Clone ID: PAT_MRT4530_66702C.1
ccgcgcccggcggctccggctccgatggcacgcggaggcggctacgggtgggcgctcgcggcgggcctcaacgccgcgctcgccgccatctccgccaagttcttcgcgcctccgcttctgaaatacagcatggtgatacttttcaatgtgacaatgtggggctgctatgtgaacagcctcaaagcactgtcatccctccaagcaaccgtcaccaattttgctgccaacttcatttcatcaggtcttgcagggtactttctgttcgaggagccactgccttctaagtggtttgtaggtgctagtcttatcattgttggtgtttttatcctaagcaaatcaagcatcgagaagaaactgaactctgactag

SEQ ID NO: 65679 - DNA, 1190 bp, Oryza sativa
  Clone ID: PAT_MRT4530_66703C.1
aaccccggcgccggcgacgagctcctcgacgagctcctcgacagcgccctcgacgacttcaccagcctcgacctctccgccgcccccaaaaggtagccccccccccccccccccccggtcagagcctaccgctggaattccgatcgaatccctggggctggggctggggctgccggaccccagggcgccgaggcggcgggcggcgaagcagcccactgccgcgcacgcgtcggaggcgctcgagaagctgacgcgcgagacgcgggaggcggtgcgcgggctcgagacggccaccggggccatagcggggctggatgacgatgcgatgatggaggagttcgttaagcagttcgaggagttcgccggcgcgcaggatatggactccattgttgaaacaatgatgcaacaacttctatccaaggagattcttcatgagccgatgaaggacattgtggaaaaatacccaaaatggctcgaggaaaataaaagcaaaataagcaaagaagaatatgagcgttacaacaaccagcttgaactcatgatgaagcttaatgaggtctacgaaaaggagccggaaaacatggcaaagatttttgagatcatgcaaaacatgcaagaatgtggtcaaccccccagtgatcttgttcaagacattgctccagatcttgatctgagcaagttgggacaactgtctccggagatgcttgaatcagcaccaaattgctgtgtaatgtgatgagtaaaacattccgttatggattatgaagtagctaccttatctctaccctttccctaaagttactttcatatggatcaattgtaaagcttcacagatacatatgaactcaatgttttcttattctttagcgaaagatacatttgttcgaattgatgtactgtgaaagggaagaaaaatatatccgtttgccttgtgcgaggtgtgcaaaaaacaatcatgaatgcacaagttatgtcggaggcaactcttaacacagaaaaggatattgctgaatttgtgaagcatgctgctcgcgccgtgctctccctctccctcggacgtaatgtgacgctcaccatgtcacgttgttccgctttcctttcatatgtttttgaatgtgtttgaacaatgtccttttttttggaatggtgatgtatggtcccatcgtccatcaatgaaaaaaaaaaaaaaa

SEQ ID NO: 65680 - DNA, 304 bp, Oryza sativa
  Clone ID: PAT_MRT4530_66704C.1
acacaaaaacagtggggagcggttttcactaagatactaactcacacggcttttacaaccaacaaccatgctggctgctattggatcacatacataacctacatgatccctaaaatccacaattaaatacatgcacacccccggggccacaccttacacgaccgctccatcgacagccaaaattccttcttgagcctatgcatatctcaaaatattaagggctgaccattcttctaaacctggcaacttcttcgattgcattacctgcaaaccgagatccgtctattgttgctcctactctagg

SEQ ID NO: 65681 - DNA, 312 bp, Oryza sativa
  Clone ID: PAT_MRT4530_66705C.1
atgaaggaaccgaggcgagttgacaatggagagggaggagatggagaggagcagggtgaggttggcaatggcgatggcaatggcatgtgcgggggaataaagaagggggagtgcaggtgtcggcaaaggacgacgacggtggaggggcggccccggcagcgttcgacggtggcgtcggcaaagcaggggcggcgccgtggaggagcggcgcggaggggcggcgtcggcggcgtggaggggcggcgcggagaggtggtgcggaggggcggtggggcggagccggcggacgggcggtggcacgaagcagtgaag

SEQ ID NO: 65682 - DNA, 737 bp, Oryza sativa
  unsure (1)..(737): unsure at all n locations
  Clone ID: PAT_MRT4530_66706C.1
accaatntgcttgcttggcanccctctggcgtggtgggttctgccttgcgtcttntccttggaatgatgacaacaattgctttccttggaacgaatggtatggtgactacagngtttgggagatagaaataaaggattgaaaaggacgattctcgttataagatctggcctgctctagtggagaacaaaangggaggatccaaatgtaacctggtggcacaaggaccactctgccacaggataggatatgacgaccaaaagtgtgtntgcgaaaacgaataacganacacacgagaggacctaataaaaatgtttggggcaaaggtaattgtgtggtggcttaatgtgacatgcaaggaatggaaggctgagacaatggctgagatccgcaagtgcaaatgatgtgatatggctaccccccatgcggatacgcaatgaatgtgatgaaatgtgacaattgtgtggggtgttaatgcacagcttttggataatgcatgtgagatgatgtgtttgcaaactgtgaaaaagtgagtattcgtttgcatgtgactggtgatgtacatgtacacccctggccggtgccctggctgctgctgctagatggggtgtgtgcgtagtgtgttctttgaacctgtggcttgacccttgtgcttcaaatgcatccagggggactaaattcccaacttaataagttctcctcttcctttctagaggcgcaaaaaaaaaaaaaaaaaaaa

SEQ ID NO: 65683 - DNA, 810 bp, Oryza sativa
  Clone ID: PAT_MRT4530_66707C.1
gcacgaggccttccccttttttttttttttttttttttttttttttttcggggcctttttttttttttttttttatattcatatgaaattcctctgttccaggaggccatatattccccacaacattatatatgatcgatcaattaatcaatttatcaacccatcatcactgatcggcaagaactctgcaactaattaacatctcgatcgatccaagtactgatcaggtgatacatacatggattgatcaaaactaatggtatctctctaaaggcagatcgatggatcgatcgatcgaaccatacaataatggtggattaataatcgattcttgctttgctttcttcgtcgtcgtcgtcgtcgtcgtaattgagccgtgtgcatggtggttgtagcttgtagtatacttaggtgtgtgatgctgatgagctcggcgttcttgctaggtagctagaggctgtggtggctatcgatcgatcatgccgccgccaccgtgccgccgctggtggtggtcttgctggagcggcggcggccgttgggcggcgccggcgcctccttcttcatggacgtcaccccgcacttgtcctgccactcctcctgcgtcatgtgctgctgcctgcactccaggctgcagaacgccgcctctcccttgtacatgaacctgccgcccccggggccgcggcggcggcggcagaggccgcaggagcggaggaacgaggcggtctcgacggagcagtagtcggcggagttccgcctcagccccgccctcgccggcgcggcgcgcgccggtacgccgccagcccctcgtgc

SEQ ID NO: 65684 - DNA, 984 bp, Oryza sativa
  Clone ID: PAT_MRT4530_66708C.1
ggcgccccggcgtcatcgccgcaccggatccgccgcccccaccacccttcatcattgcaagcgctggatctgccgccccaccacccactgtcgtctccagcgccaaatccacgcagggacgggccgccggatcaaggcggggtggtggcgcccactcctgctccgccggcgcctccttcttcatggacgtcaccccgcacttgtcctgccactcctcctgcgtcatgtgctgctgcctgcactccaggctgcagaacgccgcctctcccctgcgaagcacacagtgcgtgcgttagccgggcgccttccgcctcagccccgccctcgccggcgcggcgcgcgcgcggtacgccgccagccagtcctgccccggcgcgcctcctcctcctcctccgccgccgccttcgcggccgaacgacgccagccagtcctgcgccccgtctccgccgccgccgccgggctggcccaccatcatcatggcctcgagatcctcaccctcctcctccaccaccgccgccagcacgtccggcggcgagaactccgtcatgctcgtcgtccgcctcatcgggttattcttgctccctcccctccccctcttgcccaccatcatcaccaccacgcaggcgagcagccagaacgcagagagacggcctcctcctcctccttctccgacgacgacgacgaggcggcggccggcgacggcgagcgtgcgggcgcgcggcgagccaggcccagcccaacgcccttgcaggatagggccactttcgataggcccaacgctaaaagcccaataggacacttggccccgctcggttccaccacccaccgtcgcgattcctccgcgactcctccgccgcgccggcaatgagcgaccccggtcaccaccacgggccacggcggcattgtaatgctgaaaaatccgcagaaattttgccagaggaaggatttgaatcttgcattgctctcgttatgcgtagaaaacat

SEQ ID NO: 65685 - DNA, 606 bp, Oryza sativa
  Clone ID: PAT_MRT4530_66709C.1
atgacggagttctcgccgccggacgtgctggcggcggtggtggaggaggagggtgaggatctcgaggccatgatgatggtgggccagcccggcggcggcggcggagacggggcgcaggactggctggcgtcgttcggccgcgaaggcggcggcggaggaggaggaggaggcgcgccggggcaggactggctggcggcgtaccgcgcgcgcgccgcgccggcgagggcggggctgaggcggaactccgccgactactgctccgtcgagaccgcctcgttcctccgctcctgcggcctctgccgccgccgcctcggccccggccgcgacaccttcatgtacaagtacgaacacctcctcctcttcttgttcctccatgaattcatccatggcgcccggctaacgcacgcactgtgtgcttcgcaggggagaggcggcgttctgcagcctggagtgcaggcagcagcacatgacgcaggaggagtggcaggacaagtgcggggtgacgtccatgaagaaggaggcgccggcgccgcccaacggccgccgccgctccagcaagaccaccaccagcggcggcacggtggcggcggcatgatcgatcgatag

SEQ ID NO: 65686 - DNA, 1794 bp, Oryza sativa
  Clone ID: PAT_MRT4530_6670C.1
atgttcctctcgaagcttccgaaccctccccgcccgtggcgtccttcccttctagaagcccctcccctccgcaccctcccccgcctcctcccagcggcggcgccctcgccgacgagacggcggcgcctcctcgcgcctttggccgccgcctccaattcaggttctccgtcgaaggattccaaccggtcgccgccgccgccgtcgaagaagaagaagaagaagaagaaggcggccgatgagagtgggaggtggaagtcggtgccgcccgggatgcgggaatccgccgcccccgtccccgacgaaccgcccgcctcgccttgcaccacggcgcggcggcgggcgcgggcggcgtggcggaaggtggcctcgttggtgccccggaaggcgaggagcgtcgtcttgctcaatctggtcaccatcgtcttcgcaagcaacatttctgttgttaaagaggcggagactatgttagatcctgatcttttcaatgtattgcgcttcactatctcagccattccttttgtaccgctcttgttgaaggcactcaatgatgttcaagtctttattagaggagtagagctgggcatttgggtagccattggttaccttgctcaggctattggtttagtcacagctgatgctggtcgcacggctttcatttcgtccctcacggtgatcattgtccctttcttggatgggatccttggagcagaaatacctgcctatacatggattggagcacttttatcccttattggggttggtattctggagttaagtggttcaccgccatgtgtcggtgatcttctgaacctccttagtgcctttggttttgcaattcatatgctcaggactgagcatatttcccgaaatatgaagaaagagaattttccagctcttgttggatgccaggtggctgctatgcgtgatgtatcagctacggaaactgcaataatttatggtctggaacctgtatggggtgcagcttttgcatgggctatgcttggtgagagatggggcatgacaggatttgttggagctatcttcatcatagctggtagctttatggttcagatactgggatcatttcctgatgccctgtcgtctttcatcgtcatcgagcttgtctcgcagcagaggatcagaaaacatgtcaccgttcatcgtcaagcttgtctcgcagcaatctgccagaaacatgtctatctttcatggacatcagagacacctccagagcctgcacaagtgtacgactctgtcctccagcaatggtgcccactgccctccaaggcttctcagcaacgtatccctgcaaacattatccattgctacaacgacagcatctaccatcacctatatggacaatctgatttattttcatcgcctcattgctttgtcctcactcttgaatttcatttcaccatgatccgacatgtcaggtccacatacatgtcagcggactgtgtcccctggctgtcctcctccactggagagacggtgatatcggtgagtgcattcactggcgtcacgaggcaagcaaccaagctgccattcagcttcgtctcgctgcgcatcggcatgtgcaaagatcgactgaaaaaagggcggtgcttttcgcaagtttcctgtgtcgaggtcgaacgctacatgatgcagccactaaactcccaaagctttcttgacagtggaggtggtctcggcagctgcctgcctgcctgctccactgatgcagctgagctgctcatcaggtggtgggtgcggcaacacaacatacagccatacaggatacagcagtag

SEQ ID NO: 65687 - DNA, 598 bp, Oryza sativa
  Clone ID: PAT_MRT4530_66710C.1
atggagttgaaggaggcggcgttgctaccaacgccgacgttctttttggcggatccagagccggtggggaagttggatgtgaaagatccaggatctccggatctgttgagcttggtggcggcagtgacaacggcaacgtctcagacacgccatccttcccgagcatgcaccggcgatgtgcaggagactgaggtcaaagcggatcttccccggctccatttgaccttactgattaaaacagtgatggtgtggatgtgcaaattgatgaacatgtgggatggaggggtagcaaccggcaatagtagtgccaccaggaggggtagcaagtcgctatcaacactatcctctaaagttgcttgaggcggacggcagtaacagcagccagcggcgagctccatggggaaggactttgctcctccaaccccattttcttcttgctctccctctctctaatccagatccagagccggtggggaaggttggatgtgaaagatccacggtctccggatctgtcgagcttggtggcggcagtgacaagggcaacgtctcaaacacgccatccttcccgagcatgcaccggagatgtgcaggagactga

SEQ ID NO: 65688 - DNA, 828 bp, Oryza sativa
  Clone ID: PAT_MRT4530_66711C.1
atgacgcatcctctgcacggcgcgttctcgtcctcgcatctctcatcagtgggccccgcgctcgactttttgagcgaggacgaagtaacgctccacgtagacgaaggaacgcccactgtgaagggcctaagcaacactcgcatcctcattttcagcagccatcggcttctgtttcttagtccctatactttgtgtgccgagcctggcctgccgggccagcccagcgtgtcggtggggaggcccaggcatggcccggcggtcgggccgggccagcacaggaccgacccaagtcgggccgtgccgtgcttgggccgggcaaaaagccgtgctgtgggtcgggccttcgggcctagtgctttatggccatctatagcactaaccatacgatgcagatccccacataaaaaatcaatagcattccacgcaaatcacaaccccggcaccggcaagagcagccagatcccgcgcctgctccacgtcgctggccacggccgcgtcgtggggtactccgtccccctcgacgaccgctccttggacgccgacacggtcgtcaagtacacctcgcacggcgcgcttctccgcgagctcgccgccgacccgatcctcacccgctacggtgccgtcgtggtggacgacgcgcacgacgggatggcgctcaccggcgtcgtgctcagctgcgtcaaggccgcggcggcgcgccgcctggaccttcgggtcgtcgtctgcctgaaccactacagcaccctctgcaagggcgttgtacacggcttcttctccggctccggcatggatgtcaaggagctctggctccgtactactccggtctaa

SEQ ID NO: 65689 - DNA, 734 bp, Oryza sativa
  unsure (1)..(734): unsure at all n locations
  Clone ID: PAT_MRT4530_66712C.1
ccggccgggaaaccaaaggaaaggccttcttgtcatccttccttcctttatatagaggccccttcttctccccctcctctcccctgacttaatttagctccgcctccattcacgcattcacactagcatagcatataagatagcacttgtagagaggagatactagtacacatagagaagaggagaggagattgatcggtgagggaggatgatggcgtcttgtcggagaggagggggaggggatgtggataggataaaggggccgtggagtccggaggaggacgaggcgctgcagcggctggtggggcggcacggggcgcgcaactggtcgctgataagcaagtccatcccggggaggtcggggaagtcgtgccggctgcggtggtgcaaccagctgtcgccgcaggtggagcaccggcccttcactcccgaggaggacgacaccatcctccgcgcccacgcccgcttcggcaacaagtgggccaccatcgccaggctcctcgccggccgcaccgacaacgccatcaagaaccactggaactccaccctcaagcgcaagcaccactcttctctcctcgccgacgacctccgccctctcaagcggacaaccagcgacggncacccgacgctctcctccgccgccgcccccgggagcccctccggctccgacctcagcgactcagnccaccatagcctccccctcccagatggccctctcacccccacacctcctc

SEQ ID NO: 65690 - DNA, 384 bp, Oryza sativa
  Clone ID: PAT_MRT4530_66713C.1
atggcggtggcctccttcgttgatgacgaccttgcgccgcctccttcattgatgacgacggcaggggcaacgacgcgccgaccaggcggagcacagtggtgccgtggtctggacggcggtggaggagaaagagggcggcgcagggagcaggtggttgtgaaggttgaggaggtgcccgctgtgtcgcggtgggctgtcgtcgttgccgccgcttctaaagcctggctaccggtgagcgcccgcgggctgaggaggtcggagaggaagacggtgacgcccgcggggaagtggagggagcgcgtggcggatgacgtacagatgcaaacacccatatacgcgcagctcatccttgtgaaagtgtacatacgcaccctatccctatga

SEQ ID NO: 65691 - DNA, 733 bp, Oryza sativa
  unsure (1)..(733): unsure at all n locations
  Clone ID: PAT_MRT4530_66714C.1
tgacagttgttgctctgttttgatgtacctttataaatggcacacgttactatgtaattctgtttctgtacacttcttcgacttactccgtgtatgctagcatttatgtgattgacatgttctttgataccatttttatataggtagtccatgtgtacttccaattttcttcttctctcctcttacaagttatggtgtaatggcaatactttatccactggtatggagaaacactcactagcagcattttttgtttccatttaaacagcatgcagacatacttgctcttgtaaaataggcatagaagctagacatggaaaatcccttaaaagcactaactcataatgccattcccaattcttatttgggccaatttgtttggttccatcacaaaaaacacaagagttggaaaataccgtcgcacgtgtncattgacaggtgggtccagacaccacatgtcaattgtcattcttacatatgatgttaaattttaactcatttatctctacgatggtatttttccaaattctcttattaaaaagaactcaatccgcaattctacatccagtccttttctccaccaaactggtgtggaaactggatgagaaaaaacagtatcttcctttgttcccttccatctaataatatttcccatccaacatatttctgagtgcagttattgcaatgtttgtctggttgcaatttttgtattgactgctggcaggtacccaag

SEQ ID NO: 65692 - DNA, 2079 bp, Oryza sativa
  Clone ID: PAT_MRT4530_66715C.1
atggacgcggaggggttgctggcgtcggcggcgatcaacctgggcctggcgctggtggcgctctcgctcttctccttgctcaagaagcagcccggcaacgcgccggtgtaccttgcgcggcggatggccgccggtggcggtgggggcgggctgccgctcggccacgggcggttgaccccgtcgttccggtggatccgcgccgcgctccggctctccgaggacgacgtgctgcggcgccacggcctcgacgcgctcgtcgtcgtccgcctcttcaaattcgggatcaagtgcttcgctgtttgctcaatcgttggattgttcatccttgcaccaacaaattattcctgtgaaggtctacaagacaccaaaaggtcaaattcaatggaacttttcacggtatccaatgtggcaaggggttctaacaggttagctattctgcagcttcctttcaccctcctctccaggctttgggtgcattttgcatgcctctgcttcatatcattctatgtggtgtatttgcttcataaggagcacaaagaaatgtccagcagaagaattgcacatttgaagtatcacaggaaacggcctgaccaatataccattttagttcgaggaattccactatgcccagatcatggaacttatgggtgttatgctgaccacttcttctcaaagcactaccgaacataccaatcgtatcacatagtacacgacattggaaacatcaaggcacttcagaagttggcatcctcccttgaggacaagataaagaggaaaagagaaaccagaagatgtaacttttggaagtggatctggtttaagttgacattagaagcgatagatactcgcaaactggaagaaaaactgaagaacgtccatcactctatccgcctcctacagtgtgaaaatatgcttaaacggaaggaattaccggttgcttttgtctcattcaaatcacagctggatgctgcccaagctgccgaaatgcaacagcatgtcaatcctctgtccttggtgacaacatatgctcctgaaccacctgatgcactatggacaaatctggctattcctttctgccgtattgctatatacaaacttggtgtcttcattgctgcgtttctgctaatagtgttcttcaccatccctgtcacagctgtgcaagggatagtacaatttgagaaaattaaaatatggtttccaccggctagagctgtggaacttataccaggtttgaattctgtcgtaactgggtatcttccaagcatgatcttgaatggctttatctacttgattcccttcgcgatgcttggcatggcatcatttgagggatgcattgcaaaaagtcagaaggaaatcaaggcctgcaacatgataggagaatcctttacacatccaaaagacatacctagccgtctggcccgtgctgtttctgcacagtcagatttcttcatcacatacattttgaccgacggcatgtcagggttttccttggaggttcttcagtttggtttgcttacatggcatttcttcaaggcacattcaattggacatagtgagcagccatatctttatggcttcccttactacagagttgtgcccatcgtttcccttgcagtattgattgggttggtctatgctgttgttgcgcctcttctacttccaattcttgttatctactttttgcttggttacgcagtgtacatcaaccagatggaagatgtatatgagattacatatgatacttgtggacaatattggcccaatattcatcgctacatcttcctttcggtcacactcatgcaaattacaatgctgaagtcgaaaccgggggcttcattcgccacggttcccttgcttgtgtcaaccattttgttcaatgagtactgcaaggttcggtttcttccaactttccttcatcgaccggttcaggttgccaaggagaatgacgaccttaatgaagctgaggggatgagaggtgacctggaccatgccattagcgcctataagccaccatggatgcgcccgacgaacttctctccagattgtagttcggtacaacctttgatccgttctgtatag

SEQ ID NO: 65693 - DNA, 444 bp, Oryza sativa
  Clone ID: PAT_MRT4530_66716C.1
atggctgctgagtcagcgtgggacccatgtggaccccacatgctagccgacgggaggggaggaggccggtggggcgcgcccaccgtgcgctccgcgaggtgggtcgcagcggcggcggcgtcgtcgtcgccggccgcgccatctccgtccagttcgccacgtaccgctggcgcagacccgtcctctggcgccgcggcggcggcggggaggcgggtgtacgtgaccaacgttgcaccgggcgcgagcgcggagcggctgcgtgccttcttcgcggggttcggggagctcgagggcggcccgttcggcttcgacgctgagacaggattctcccgcgggtgcgcgctcttcgtgtaccgcgcggcggagggcgccagctcgccgcctaccccgcctggaagagcaaaccacgcatgccgccgccgctgcgtggaatcacatttgtaa

SEQ ID NO: 65694 - DNA, 152 bp, Oryza sativa
  Clone ID: PAT_MRT4530_66717C.1
atggcggctgatggtaacaacagggaagcaatggcatgcgagggcgggaagtttggggcgaaagcccaacctgtcagggctgacagtactaatgacgttttcgggcgccgcaacctcccgagggcattgttgtggcttcctttccctcactg

SEQ ID NO: 65695 - DNA, 4240 bp, Oryza sativa
  Clone ID: PAT_MRT4530_66718C.1
ggggctaaaatatactggctctggaacatgggaatttacataattttcgtagtcctccaaaattccccccaaaatttctcagccttcaaaggaggtgttaattggtaaagcttggggcatataaatctccagttcactatatgtaagcaaaatattctctactagactactgcagcaaattacacatttcaaagcttggaggcacccatcgacagggcctgctgcttaagctcccgccgaaggatctttcctgcggcgatagcactagcgacagcagaactgctaccgttcctctgtagcaagctatctccgctacctgaaagtgcatcacttacagggaccgttcctgtgagacattagccgatcaaacgcagctccactactgcaaggagcagcagctttctgtcacgagtttgtggctgcaaagtacaaggggatgttctccctatggagtcacaaccagctagcttcttaatcatctgttgatacatcctcgttagctgttggttatcaaatgcaaaacttttaccgctcaaagtctggaggtggaggccatggcctgcagtacaagctctcgtctcaggatcttccctgcaggagatttcggtattgcattgacaaaagccacacggcgcactttcttgtagggcgcaacatgtttagcgacgcagttcatgacttgttgctcggtaaggtatgcacccggttgcctcactacaaaagccattggcagttgcccagcttcttcatcaggatatgggacaacagcagcatcagcgatttcaggacgagactgtagaatgtgctccagctcagctggtggtacctgatatcccttgtattttatcagctccttcaatcgatcaacaacgtagagataaccatcttcgttgaagtagcagaggtcaccagttttcaaccagccgtctggagtgatcgttgctgcagttgcttcaggatcacccacatagcctgaaaaaaagatccccatatatgacagtgtcaagcaaagcccctcgccggtggccgtgtcgacgatcttcgcctgcacgcgcggcgcaagcctccccaccgatccgtacgccgccgactcctccggcccagccatggtggccaccggcccggtcgactccgtcaaaccgtaactctggacgatctgcacgctggggaagacggtggcgaagcgctgggagacctcgcggcccagcggggcgccgccgacgacgatggcgaccagcgacgagaggtcacggcggcgcgcctcgtcggacttggtcagcgccaccaccaccggcggcgcggcggacagcttcgtcacgcggtaccgctccaccgcgcgcgccgcggcggcgaggtcgaaccggcgcatcaccacggccgtctcccccgacgagatggtgcgcgtcagcagcccgaaccccatcacgtggaacagcggcaaggggaacagcgtcacggcggcggcggcgcggcgacggcggcggcggcttgcccttgcccgcgtcggtggcggcctccctcgccaccgtctcacgtatcgcgttgtacgcgctgatctgcgcgatgaggttgcggtgcgtgatcgccaccgccttgacccgcccggtgggcccgacggtacagcaacgccgcggtgctcggctgcttcatcgccaccgccggaggcgccgcccatccgccggcggcggaggcggaggctagcctgtcgaacacctccgacccgatgacgacgcggctcacatggcgtggcaacctcgcggccacctcgggggccacgaacgcgatggctggcctggatagcctgacctgatgcgcgtactcgtcggcggtggaggccgggttggcgggcgacacgacgacgccgatggacatgagcgcgaagtagagcacggcgacgtcgaggcaggagggctcacgacgagcgcgacgtccccgggacgcagcccgagggagcaccagaggccgccggcgaggaagcggacccgcgcgacgaaggccgggaggagacggcaataccgtggcggcgtcgacgagcgcggggccccggccggcgacgacgagcggcggcgccgaggacagcagcgagaacgcgtacgcggcgaccgtcagcgggagctcctccggcgggagaggtcccacggagcggaggctgtggaacgtccgcgtggcggcgcagaagccgctgcgactgcgacggtcgacgccgccaccgccggcggcggaggacgcgtacgggtacggcggccgccaccgctgctcggccatcgggatgtgagcgggctgcggcggaggcgagcgtttggacatgtggccgtggcgggggtcggacactccggagataaagccgcggtgtgcggcgcccctgcagactccggcgacggcgatggcgagagcgagcgagtgggagagtgagagtatgccttcattattttgatttgtgaccacgtgtcttgttctttgttacactgtctatgctccgtttgtttgaacatccaaagagatgttatcgaaaggttgtcgctcgaagtatgtatgcatactcgagctcattatcttccctaatttataagttcaatcagcacagttctgtttgaacaagctaacaccaaaggatcttccctgcaggcgattttggtattgcagtgacaaaagccactcgtcgcaccttcttgtatggcgcaacctgttttgcgacataatccatgacttgttccttggtaatatttgaacctggttgccttactatgaaagccattggtagttccccagcttcttcatctggatatgggataactgccgcatcagcgattccaggatgggactgcagaatatgctccagttctgctggaggtacctggtatcccttgtactttatcaactccttcagtcgatcaacgatgtatagaaaaccatcttcattgaagtagcagaggtcacctgttttcaaccagccttctgagtcaaccgttgctgcggtcgcctcatcatcacccacgtaaccggtggagggatctacaatcttagcctgcaaatgcgaccccagcttcccgaccgatccgtatgccttcgattcctctggcccgactgtggcagccaccgcgccagacgattcggttaaaccgtagccctgaacaagctccacgttggggaagacggaagcgaattgctcggcgacctcgcggcctaggggagcgccgccgatgccgatgaccagcagggaggagaggtcgcggcggcgcgcctcctcgtacttgaccatggcgacgagcacgggcggcgccgcgggcagcagcgtcacgcggtagcgctcgatggcgcgcagcgcggcgatgaagtcgaaccgctccatgagcacggaggtctcccccatggagacggagcggagcaccatcatgaacccgaacacgtggaacagggggatggggagcagcgtcaccgccggcggcggcggctcctcgccggcctcggcggcctccctcgcgaccttctcccggttgtcggcgtgcagcgacatgagcgcgatgaggttgcggtgcgtgatcgcgacggccttgacccgccctgtggtgcccgacgagtagagcaccgccgccgtgtccgattgcttcaccgccaccgccgccggagccgccgcgcggcggccgtcggacgccgccagcctcccgtactcatccgacccgataacgacgcacctcacatgctcgggcagcttggcggccacctcgggcgccgcgaacgcgacgaccggcctggacagcgcgacctggtgcgcgtactcctcgggcgtggacaccgggttcgccggcgacacgacggcgccgatggacatgagcgcgaagtcgagcacggggacctccaacctcgagggcgcgacaaccagcgcgacgtccccggggcggaggccgagggagcaccagagcccccccgcgagggagcggacggcggcgaggaaggacgggtaggagatggcaatgccagtggcggcgtcgacgagcgcggggcggccggggagcgtcgacgacgacaggagggagaaggcgtaggccgccgcggtcatcgggagcgactccggcgggaggtcgcccggggcgcgggtgctgtggaagatccgcgtcgccgcgcagaagccgctcctggagtcgatcccggcgggcggcggaggcggaggcggcgcgcggtcggccattggggatacggatcccgttcgcggcggggaacgaacagaggacagaaagttcgc

SEQ ID NO: 65696 - DNA, 278 bp, Oryza sativa
  Clone ID: PAT_MRT4530_66719C.1
aataaactcagatatcatcatatttgacatgtgaaactcagggtgatatatcctagtacatcatcgtagctaattaccatcaaaaaaaaaaaaaaaaaaaaaaaaaaaaaaaaaaaaaaaaaaaaaaaaaaaaaaaaaaaagtaaaaaaaaaaaaaaaaaaaaaagggcggatggtgaagaggtaccaggatagcatgcccatgcatgcaagagcaaagcatttacgaaggagtaaccaaaatacaattgaagggaggggtattaaaaacgagcgggg

SEQ ID NO: 65697 - DNA, 327 bp, Oryza sativa
  Clone ID: PAT_MRT4530_6671C.1
atgcctctgccaacaacccgcatccgtcgacgttaccaccgccttcacggccgccgtcgccgctgccaccgacgccagcctccgcctccgcaaaccactgcgccgtccacatccgccgatgttgccgccgctgccgctactagtcgtcgacgccagccactgccatcgcacaccgccgccaccgccaacgcagccgctgccagcaaccgccccaacgcagccgccatgccctccgtcgccgtcgccagccaacgccgccaccgcgacagcctcgtcgccgtcaccagccgccgtgaccgccagcagccaccggacgccaagcactag

SEQ ID NO: 65698 - DNA, 444 bp, Oryza sativa
  Clone ID: PAT_MRT4530_66720C.1
atggcgacgctgccgcagcggttcaagctgctggcgacgcggtgcgcggcgggggcggcggcgccgagcccgtcgcgcagccccgcgccgtcgtacgccggggccagccccgggggtggtggtggtggggggaagaaggcggccgccgcgcgggagcaggaggagtacaggaagccgctcgtgggccgcggcggccgcacgctgcgggatctgttcgtcgcgtcgccggaggcggcgcgacgccgcggcggcgatgacgacgaaggtgggggcattggcggcttcaggtcgggtcatggcggcggaggcggaggcggcggtggaggcaggaggttcggttccggcgggctgcggagcctgctgatgcggcggagctggcggccggtgctggtggcgatcccggaaggcgagggccggccggagctcgccgtcatcgaggaataa

SEQ ID NO: 65699 - DNA, 175 bp, Oryza sativa
  Clone ID: PAT_MRT4530_66721C.1
gaacgaaatgaaatggggtttgaattatttttcttttctttttccccactttgttcattcattcagtagtgctgccgacgtcatggatcttcaccacttttttctccgtttgttccaaagacctacgtgcgaaatatctctgcaatatagtacatcagtggctaccactgaagta

SEQ ID NO: 65700 - DNA, 318 bp, Oryza sativa
  Clone ID: PAT_MRT4530_66722C.1
aatgcatgggattccgcactatgcaaagtgcattcagcgagatctgactaatggcagagatccgggtgggtgggcaaggctacatgatgatttggtgagtgtgctgcaagtggctgttccccctgaatgattgagcgccgcgggatgcccatagaacaatacctgcataaagagaatggatatttttttttgttgttgtttgtttgtaagagaatctcaaaagacttaaaagtaatgtgtggttaatgctatatttatatgaattgttgcccgaagcgccacccccccctagtccaattatttaaaaaaaaaaaaaaa

SEQ ID NO: 65701 - DNA, 924 bp, Oryza sativa
  Clone ID: PAT_MRT4530_66723C.1
tcaagctgctggcgacgcggtgcgcggcgggggcggcggcgccgagcccgtcgcgcagccccgcgccgtcgtacgccggggccagccccgggtaccgcctccgccgccgccgcaaggcgccgcggcggcgtcgacggccggctgcggcgcttcctgtcccgccgcgtcggcgtgggcggctgcggcaggggtggtggtggtggggggaagaaggcggccgccgcgcgggagcaggaggagtacaggaagccgctcgtgggccgcggcggccgcacgctgcgggatctgttcgtcgcgtcgccggaggcggcgcgacgccgcggcggcgatgacgacgaaggtgggggcattggcggcttcaggtcgggtcatggcggcggaggcggaggcggcggtggaggcaggaggttcggttccggcgggctgcggagcctgctgatgcggcggagctggcggccggtgctggtggcgatcccggaaggcgagggccggccggagctcgccgtcatcgaggaataaataacgaacagcaggagcagcaacgacggaagagaagagatcaagaaaccctgaagaggacatggattcctccgctcgtccccatcttgttcctcttcttgctctgtttcttgcgtcttcttcttcctctctttggtttcttcttttcattagttttgatccacttcttgttgtaggagatttgccgcatcgtgcttgcagccatggccatggccgccggagtcaacggaggaggtagtggtagctcgtagtactccggtcgggatcgggacgggctcgaggcacgaagctgatgcctgatgctgggatcgttgagccgacgagtccatgtgaccacaaccaacccggcttgttagctctccacactccatgttcactgggtttgttgtaggtatgaccttaaac

SEQ ID NO: 65702 - DNA, 502 bp, Oryza sativa
  unsure (1)..(502): unsure at all n locations
  Clone ID: PAT_MRT4530_66724C.1
aattcggcacgagagcaagttagaaattacaaagcaaagaaataaaaaagaaagtcgtaattttttaagaagcaatggcgagcaagaagtttgcatgtgtggttgttgtgatgtgcattggtggtgttgggtgcattcgtgtcagaggnccgcaatctcatgcggagagatttcaactagacttgctccatgcctcccatttttgctgggtggtgtaggtccatcgggtctctgctgtgatggagtgaagacagttaacgacactggccagcaaccacccctgaacctccaggctacatgcaactgtttgaaagacttagctgctggcgtttctnggcttnaacccntggtaacnccgaagcactccccagcaaatgcngtgtcnatgtccnttaccaagattngcccntccnccgattgttccnccataacncgctgaagagcgtctatgtngggaagaagccgatattgcatggaccncttttctactgcaggaatgtat

SEQ ID NO: 65703 - DNA, 401 bp, Oryza sativa
  Clone ID: PAT_MRT4530_66725C.1
catacactagcttcatatctccctactacttctcctcctccttgtggtgcggttgtatttatgataacgctgacaatcccggacgacgtgcggtcgaaggcggaagagtacgtcgactactaggccgggcaagagaagactcggctgctgctggaagagacagggctccccagcggcctactccctctacgcgacatcatcgagtgctgctacctgtaggagaccagtttcgcgatgtctaaagcagcagcggaaggttgaccactttttctacaaggccggtcgtcacgttagctactccgacgaggtctcctccatcgcctagaagggccgactccgcaagatctccggcgtcaatgccaaagagctcctcatctgggtcaccctccacgagatcgccg

SEQ ID NO: 65704 - DNA, 146 bp, Oryza sativa
  Clone ID: PAT_MRT4530_66726C.1
gtcgttaaacatgagaggaagtgatgttccaggggcgcctgtattatataggtgccgggttgaggaggatacccctgctacattatttgtggacttcaacaaaccatctgtagatgttttacacactctataacaggcttggagta

SEQ ID NO: 65705 - DNA, 321 bp, Oryza sativa
  Clone ID: PAT_MRT4530_66727C.1
ccaaaatctttcattttatcttattttttgggggatttttttgttgtatacaaaattttgccaaaaccttcatttttattgaaatccaagggggccgtctgcttaataccccaccttctgttttaaaacaattaattttgccccaaccaggaaacccttgggttcccgccaaaaaaaattttatcgccccgaaccgggagcccaccacccgtttttccccccccggggaactcacagaagaagtgacgggaattttggggggaacaccaggtcccgccccaagggggcccttaccaagggaaaaaaggggagacccccccc

SEQ ID NO: 65706 - DNA, 350 bp, Oryza sativa
  Clone ID: PAT_MRT4530_66728C.1
gggcctctatggactcaacgagtgacggcttcctcgcctgcgctccgcttcgctgaacaagagtacatgtcaatcaggcacccaagcaaaagcatccaaaaacacagataacacacagactgttctgttgtgatgacaactacagtccaaaattcatacagtccaattataaagcaataattcaggctcccttggctgcaatcaatctgaggttgacccaaggggttgagttctacacaagcaaatttgacttcccccaattccaaatttttaacagtttgttccaagaacaactagcatcttatctactgtacagtgaaaaaatcaccaggaagattgaatagaggccc

SEQ ID NO: 65707 - DNA, 1073 bp, Oryza sativa
  Clone ID: PAT_MRT4530_66729C.1
gccccgggaacaggagctcgtcgacgttgacgcggagcgagaagtggagcagcgggaagacgagcacgaggtgcagcgcgtagctgaggcgcgccgcgtcgttcagcgcctgcgggaccccggcgccggagctgcggtcgaagttggcgagcacgtccgccatggtggcgtcgccgaagaggaggaagccgaagaaccccaccgccgcgtagatggccgcgcagagcacgagggagatgcgcacggccgccttcatgtccgacgtcttgcttagctccgttcggatcgggtgcacgttgaagtggaaggtgaaggcgacgacgactatggggacggcggtgaagagctcgaacggagaggagaggcgcgagaaatccggcagcatccgcggcatcttcgctgtgccggtgaagagggcgtacaccgcgatgcccaggctgatgaacatgaacaccactgccagtaggatggacacggctgatgtgaacttcagtgaatcgacgcggcggcggagcacgagcgggagcagaacgacgatggccgtgaccagtatgacgagctccctcgccgtccaccactgcgctccgaacagctcctgcagaacaccggcgtgctcgtctcctgctcctgcgctcccagacagcacatccccgatgatgatgaggtagacgacgagggtgcccgtggtggtgaaggcgatgcagacattgagcgccttggcgccggcgcggccgaacgcgtcgcccatgatcccggcgtacgacggcgggccgctgtcccagcccgtgtaccgcagcatgaattccacggaggcgtcggacagccgcggcgacggcccacgcgtccgcggacgcgtgggagcacaccgagcacccgcattgccgccgggattgacatgattccggctccgatgatgctcgtccacacgttgaacaccgcgccggagaccgacgccccatgcccgccgccagagaactccgtcagcagcggctcctccacctagccggcgctggcgccggtgcacttgcccgtgctcgccggcggcgtcattttcggtggggatttcaggcgtg

SEQ ID NO: 65708 - DNA, 261 bp, Oryza sativa
  Clone ID: PAT_MRT4530_6672C.1
atggatccggcgacggcggccatcctcgcatggatccggcggccggtcgccctccccctgagcggaatccggcgcgtggcgacctccctcccgacgacgggcggcaacgatgacggcgatggtggcggcagtctcccaacaacggtagcgttggatcctccgccgctgggcctcgggcggctgaatccgtcaccggcgaccgcagggatgacgacggcgggcctcgggcaggacggtggcggcgacggcggaggtggctag

SEQ ID NO: 65709 - DNA, 585 bp, Oryza sativa
  unsure (1)..(585): unsure at all n locations
  Clone ID: PAT_MRT4530_66730C.1
gtgggaaaccttgcatggtctataaaacttatggatctttatcttcaattctgtcagcaaaacaatccagtttttatccaagcgtttcaagctgacgaacgatgtcaaattcggtagctagatcgatacacatagatagataggttcgccaaaaaaaaaaacacatagagatagaaagtgttttcaagctgatgaacgatgccttatttcatagctagatagacacacatagcgttgtctattgcataccaccacctatagcaatactgatccacatcaaggattatgataataaccactgccaccaccaccgttttgaccgttgccaccacctccggtataggcaccacggtacccaggttgcatatagcctgaaccatacccctctggaagttgtggctccgatggccccgcttgttctgctgcatgcgctacatcgtgggagacgagaaggagagtggccaatatgacaccaagaagaattgggaacttcgcagccatttctgaacttctgtgagtgtgtagagctagcaagctcgcgccgagcggccgctcgcgatnnagnncnagcncnngacgnntgng

SEQ ID NO: 65710 - DNA, 481 bp, Oryza sativa
  Clone ID: PAT_MRT4530_66731C.1
attccctttttaaatcactttcagcattgcatacatatatgatggggaaatgggaaagtggagttacaaatagatttcaaccgattccagcagcatatccaaattacaaattcatcagggaaaaaaaaaaggattcgagggcctgtcttgctcacaatttccatcataggagcaacttcttctggccacagcatacatcataccctcttcactccatgtttgccatcctcaccgggctttctgttcatccaccgtggcaaaacatacctccgatctttcacttttcaaacaaatattgttcatgagaacaagaaatgcataattcacactgcctgattaaagttgtcatcagaggagttgagttccaaattagaacgatcctcgtactcacagatattacaaacaatttgtaactctcactgatatcatggtaggactccgtttaaggcagaacaactttctactcaaagttttcaatcag

SEQ ID NO: 65711 - DNA, 444 bp, Oryza sativa
  Clone ID: PAT_MRT4530_66732C.1
ctcattcttacgtccacgcgtacgtccactcgtccgctgactcgtctccaatggaggttgcttctatatgcttgatcgcgttggaaacgcatggtctcctctacgacgccgtagcgaaagcggaaccgcacacacaagatatatggcgtgccgcgccgtcggatccgtcgatccacaccggtaccttgcgcaagaggagcggtggttggaccataccctcgaccacttaaaccccagcggccatcggcaattcattcaaggccactatgaattccttgattactaccgagctgcaaaagggccagttctcttatatatatgcggagaatgttggtgcaactgaattcctaacagctacttatctgtgatggcaaaaaagtttggagcgagaatggtcccccatgagcatcggtactacagaaagagtttccgctttgagagttt

SEQ ID NO: 65712 - DNA, 190 bp, Oryza sativa
  unsure (1)..(190): unsure at all n locations
  Clone ID: PAT_MRT4530_66733C.1
ttacaacaagatgattttcaaaccttttattttcctttgtattctggctggggtggtccttatctctgctgtgactgctgatgaaccatctcaagatgagagttatgaactcatagggtgtcaccacaagaaggaagaatatgttggtggtaggaaaatgatattggagtcgaataatggtgttaantgc

SEQ ID NO: 65713 - DNA, 333 bp, Oryza sativa
  Clone ID: PAT_MRT4530_66734C.1
ttttgatcagtggcaaagcaagtgatctcttgggctgggttcatttatgcattggcaggggcagctgctcgtcacggcaatggcatccaccaacagttggacccacgagatcgagtcgccggtggccgcgccgagcctgttccgcgccgcccgtatggactggcacacccttgcccccaagatcgcctcctacatcagtgtcagcgcccacccactcgacagcgaccgcagcgtttgaagcgtcaggcagttcaacttcaccttagccatgccattcagccacatgaaagagaggctggagtttctggacgtggacaagtgctagtgcaagtt

SEQ ID NO: 65714 - DNA, 2217 bp, Oryza sativa
  Clone ID: PAT_MRT4530_66735C.1
atggctcctcgcaagccaaacccagcctcagcgacgggccccgatcccggccggatcgacgatgacactaccgcctttttaggggcttcgctcgtggatgacgatgagctggcgaagttggtcagctccggcgtggtggtggaggagcaggccttcaccccggggaaggccatggtgccgaagcccggtgacaaccggacggtggtattcgccatcttctttgaggcggggcttcgatttccatgcaacgtgtggttgccggagatccttcgcctcttccaggcatgctggaccgccaggttcgaaccgagtgccgagctcttcggtgccgtattcttcgccaccatgaactcgaagacggtggtcaccctggctaggacgaagaagacggcgttcgggagtgtgaacttcaatgttcgcctcgaacgctctgatctctggctggtgaacgccgccatgtcgaagtgggatcgccattggatggcgaagtggtactactactccatcaccttcgaggctgggtccgaagcggcgaaagccctacggtgtcggcgcagggcgattgcaccgaacaggaagcccaaggtcgctgttgacggtgccatggaagctcggttcgccctgctgcgcaagatctgttcccgccttagttgccgcgacttggtggaggagttctgcatgcttcacattttccccctctcccagtcgtggcaagttgtggtcgatcaagacgaggaggtcgacggcttgccgaagctggttccgcctgcgggggtgaatgtgttgactcttgatcaggccgacgccgaagcccgaaagatgatcggcgatgtgtcggtcaccgagttcagccagctgctcaaacggcaggcggctggtcgggcgaaccgggtttatgacggcgaactgccttctcggatgaaccccctcagggtcgatgacgccgcaggtccttcgcgaaagcggatgcgtggggaagtgaagtcggcccctcggaagcgaagggcccttgcctccactgactccgacgccgatgacaaagacatcgtcgaagacaacgacgacggagtggagggggaggatgtgggggagacggaagttgcggccgaaaaggctgcggaagaggctgccgacaatcgcgccgggatgcctggctacactccaactccaagccccgagcacgttgagactggggtggagtcgaactgctccccccttcgccgaaaggatatggagagggcgaaggcactggtcgcgatcgcgtcggccaaggtggcaaagcggggtccggtcaagaagacctccaaaaggatagggctcgtcgagggggtgagcgccctcgtctccccagctggtagctcgagcctgttcacggagctaaacgagttcgacgagggatgctctgccattaagagcttggtggttcggatcctcgcagcccattgtttgaccgagcgaaccatgcgggctcgtcttgacggtttgaagaaccgtcttcgagccaaggacgacgaactgggctacaagagcctggaaatggaaggcctcgcccacgcccttaaagagacgaaggccgagaacaagcggctccaggctgaactggaaaaagggagtgaggcgaaggcggagatcgagcgcctcaaggccgagctaaaaaaagagcaaactcattccgccgctctgaccgactactacaacctcactgagccgaagatggaggctcttcgccaagaggttagccaagcggaggcaaaaaccaagagggaggcgcaacggttcgcgcgggagatggtgaaggcaaccgagtttgtgaagaccgcttgccagacgctccgccttgcctttccgacatgggggcgagggtgcgtggagtccctagcgaagatgcttccgcctttgacttctcggagtggactcagcaggcccgcggtgcggtctcggactgcgccactgcatatggtgattgctgtgcacgcatgtcggcggccttcaccatgggcctcctgcagcagttcggctgtgagcacgtcgctgagttccctaactttgcgaatggggactaggagctacaaggttttgaaggttgccggctggatacgggcgcaccccaggcgatccctggaggactacgattgtgtccatatagaacgccgggaggacatggtttgcttttggcgaaaccatcaaaggactgatcgtcaggaagcgatcgcctag

SEQ ID NO: 65715 - DNA, 1293 bp, Oryza sativa
  Clone ID: PAT_MRT4530_66736C.1
atggcggcggttttcctccgcgccgccgctcgtgccacgaggtcctccgcgctcgtccgcgccatcctcgcgagccggagccccctctcgtcgtcctcctgtgccgcctcccctacgaccgcggcgcccgtccccggcaccgcgccgcgcgccgccgcggctggcgatggcgacgagggatgcgcggcggccgcggccacgcccgcggacgtgggaggggacgaggacgacctgagaagccgcgtcttccggctgcgcctggcgaagcggagcgcgaccgcggcgctcgagaggtgggccggggaaggccgcgccgcgtcggcggcggagctccgcggcatcgcccgcgacctcagccgcgcaggccggtacaagcacgcgctcgaggtagcagagtggatgaagacacatcatgagtccgatttatctgagaatgactacggaatgcgcattgacttgattaccagagtttttggtgctaatgcagctgaagatttttttgagaaacttccagcttgtgtgcaatcactggaagcatatacagctctcctacattcttatgctcgatccaagatgacagacaaagctgagaggctgtttaaaagaatgaaggatgccaacctttccatgaatatccttgtttacaatgaaatgatgaccctgtacatttctgttggtgagcttgataaagttccggtcattgctgaagagctgaaaaggcaaaaattttccccagacctcttcacatacaatctccggatcagcgcttctgcggcatcaatggatctggagggcttcaaaggaatccttgatgagatgtcaaaagatccaaactccaatgaagggtggaagctgtaccagaacctcgctgtgatttacgtcgacgctggtcagcttgttggttcaggaaactcgctggtggaagcagaggcgaagatcagccggagggagtggatcacatacgatttcctcgtaatcttacacaccgggctcggcaaccgggatagaatcaaggacatttggaaatccatgctgatgacttcacagaggatgacgagtcggaactacatctgcgtgctctcatcctacctgatgtgcgggcagctgaaggatgccggggaagtcatcgaccagtggcagcggtcgaaagccccagagttcgacatctctgcctgcaataggctgtttgatgccttcctgaacgccggtttcaccgacacggcaaatagcttcagggaactgatgctgcaaaagagctgtatactgacaagcaggcaagaacgctcttcctga

SEQ ID NO: 65716 - DNA, 634 bp, Oryza sativa
  unsure (1)..(634): unsure at all n locations
  Clone ID: PAT_MRT4530_66737C.1
gttgtggagaaagagggctacttaggaagcaaggtaactctatcaccttccgtccgtcttttcttgaacatttgacttcgcgaatcctagcttttataagggaaaaccaacatcacgtaagatgaggcctatccttcccgaaagcgtcggctagttctattctattctaacttgactgacttcctctaaaagaagagttaacacggtcgaaggtcaaagcagaaagggtttgagcttctttggcaacttagctattctttggcaacagagctattgcaatagagaaatcgagggaaataggcttaacctacagagaaagagtgtaaggaaagaatgcagaaaaagatagaaaaagtgagtgaaacaaatgaaatcagagtaagaaatctcacaaatagtaggttttaccggactagaacaaacgaattagcttgttttaactaaaaagcacagttgagcaggaacgaagtgtgaacataggcacaaaaacaacgttttgggtgatccctgtgtagtntgcttgctttccgcttgagctactttcactgtgaagaaagaggactcatctcttcacttacccaagaacttggaaataacgcgtctggcttggaagctagttanggatattcgatag

SEQ ID NO: 65717 - DNA, 2914 bp, Oryza sativa
  Clone ID: PAT_MRT4530_66738C.1
atggctcctcgtaagccaaacccagcctcagcgacgggccctgatcccggccggatcaatgatgacaccaccacctttttaggggcttcgctcgtggatgacaacgagctggcgaagttggtcagctccggcgtggtggtggaggggcaggccttcaccccggggaaggccgtggtgccgaagcccagtgacaattggacggtggtattcgccgtcttctttgaggcgggtcttcgatttccatgcaacgtgttgttgccggagatccttcgcctcttccaggtggagctcccccagctgagtccgtcagcgctcgtccggatcgccatcttcgactgggcatgctggaccgccgggttcgaaccgagcgccgagctcttcggtgccgtattctttgccaccatgaactcgaagacggctgggtccgaagtggcgaaagccctacgatgtcggtgcagggtgattgcaccgaacaggaagcccaagttcgctgttgacggcgccatggaagcccagttcgccctgctgcgcaagatctgttcccgccttagttgtcgcgacttggtagaggagttctgcatgcttcgcattaccccctctcccagtcgtggcaagttgcagtcgatcaagacgaggaggtcgacggcttgccgaagctggttctgcctgcaggggcgaatagtgagtccatgcttttcttatgtgcatctgtgcttcgccctttaggcgacgtgtcggtcactgagttcagccagctgctcacacggcaggcggccggtcgggtgaaccgggtttatgacggtgaactgcctcctcggacgaaccccctcaaggccgatgacgccgcgggtccttcgcgaaagcggatgcgtgggcaagtgaagtcggcccctcgaaagcgaagggcccctgcctccactgactccgacgctgatgacgaagacaccgttgaagacaacgacgacggagaggagggggaggatgtgggggagacggaggttgcggccgaaaaggccgcggaagaggctgtcgacaaccgcgccgggacgcccggctacactccaacttcaagccccgagcacgtcaagaccggggtggagtcgaactgctccccccttcgccgaaaggatgtggagggggcgaaggcactggtcgctatcgcgtcagccaaggtggcaaaggggggtccggtcaagaagacctccaagaagatagggctcgtcaaggtcggtcgcgcttttagcgatgactagtcctccgacgaaacccctacttcgcctactagccgaagcttagggctttcaaccgttcctagcgccacgatcgatgcgggcggagcgggagggagtgttgccgggacctcggcttcgtccgatcaggttgtcaagaccgcgactagggtttttcagtagcccagttcgccagccggtcgtttcgccgctcggccttgggaaggggaggaagacggcggtcgaaacatccgtttcggattactcccttgcggcgccccatttcgcccctgccaatttcgagactcgggcggagcttatcccttttgttgagggggtgagcaacctcgtcttcccggctggtagctcgagcctgttcatggagctaaacgagttcgatgagggctgctctgccattaagagcttggcggttcggatcctcgcggcccactgttcgaccgaatgaaccatgcgggctcgtcttgacagtttgaagaatcgtcttcgagccaaggacgacgaacttggctacaagagcttggaaatggaaggcctcgcccacacccttaaagagacaaaggccgagaacaagcggctccaggctgaactggaaaaagggagtgaggcgaaggcggagattgagcgcctcaaggccgagctcaaaaaagagcaaactcattccgccgctctgaccgactactacaacctcaccgagccgaagatggaggctcttcggcaagaggttagccaagcggaggcaaacgccgagaaggaggcggaacggttcgcgcgggagatggcgaaggccaccgagtctgcgaagaccgcgtgccaaacgctctgccttgccctttccgacatgggggcgagggtgcgtggagtccctggcgaatatgcttccgcctttgacttctcggagtggactcagcaggccggcggtgcggtctcggactgcgccagtgcatacggtgattgctgtgcacgcgtgtcggcggccttcactatgggccttctgcagcagttcggctgcgagaacgttgccgagttccctaactttgcgaagggggactgggaagttagtgcgcaggacgtttcgtgcctggcggaaacagttctggcagagggatggccgatccactgccaaggcgcgtctccttgagcaactagcgaaggtagaggcggcggaccagggcgaaggggaagatgctacggccggagagggtagaggcgatgccgaagatcacccagaggacattcgccggaaattgtgtgttcggcctccctttgggaatcggcgaagtaagaacgagaagttcgtggcggtgaagggtttgccgaaggtgcgatgtccgtttcggccagtttaccgcgagatgataataaacggcaaaagctacaaggttttgaaggttgtcggctggatgcgggcgcaccccgggcgaaccctggaggactacgatcgtgtccatatagaacgccgggaggacatggctcgcttttggcgaaaccatcagaggaccgatcgtcaggaagcgatcgcccagcgtcgttatagtctagtttgtgttccacccccctccctccttaggatagtgtatgacattagtagtgatgacgaaccatgttcgtcgaatcgttccttagggagtggggattgctttgggggcggagacgtaatttatttg

SEQ ID NO: 65718 - DNA, 546 bp, Oryza sativa
  Clone ID: PAT_MRT4530_66739C.1
atgaactcgaagacggtggtcaccctggctaggacgaagaagacggcgttcgggagtgtgaacttcaatgttcgcctcgaacgctctgatctctggctggtgaacgccgccatgtcgaagtgggatcgccattggatggcgaagtggtactactactccatcaccttcgaggctgggtccgaagcggcgaaagccctacggtgtcggcgcagggcgattgcaccgaacaggaagcccaaggtcgctgttgacggtgccatggaagctcggttcgccctgctgcgcaagatctgttcccgccttagttgccgcgacttggtggaggagttctgcatgcttcacattttccccctctcccagtcgtggcaagttgtggtcgatcaagacgaggaggtcgacggcttgccgaagctggttccgcctgcgggggtgaatgtgttgactcttgatcaggccgacgccgaagcccgaaagatgatcggcgatgtgtcggtcaccgagttcagccagctgctcaaacggcaggcggctggtcgggcgaaccgg

SEQ ID NO: 65719 - DNA, 480 bp, Oryza sativa
  Clone ID: PAT_MRT4530_6673C.1
atggcagaggtgaccaatgtgggaacaaagtcatccatcaataacaatgaagacaccagtcggcagcgacgaaggcggtcgatgacgcccaacaacggcggcataataggccagccgtgcaggaggaaacaccagtcgtcggcggacgaggcggccggcgaaaacaacagttggcggctgcggaggcaggccggcggtgaagtcgtagacgcccaccagcagcggcataataggccagccatgtacgcggagacaccagtcggcggcggcgaaggcaagccggccggcggtgaagtcgtagatgcccaccaacggcggcataataggccagccatgtacgtggagacaccagtcggcggcggcgaaggcaagccggtcggtgaagacgtgaatgcccaagaacggcggcataataggccagccgtgcaggcgaaaacaccagtcggcggctgcggaggcaggccggcggcgaagtcgtag

SEQ ID NO: 65720 - DNA, 2092 bp, Oryza sativa
  Clone ID: PAT_MRT4530_66740C.1
cgatgacgccgcaggtccttcgcgaaagcggatgcgtggggaagtgaagtcggcccctcggaagcgaagggcccttgcctccactgactccgacgccgatgacaaagacatcgtcgaagacaacgacgacggagtggagggggaggatgtgggggagacggaagttgcggccgaaaaggctgcggaagaggctgccgacaatcgcgccgggatgcctggctacactccaactccaagccccgagcacgttgagactggggtggagtcgaactgctccccccttcgccgaaaggatatggagagggcgaaggcactggtcgcgatcgcgtcggccaaggtggcaaagcggggtccggtcaagaagacctccaaaaggatagggctcgtcgaggtcggtcgcgcttttagcgatgacgagtcctccgatgaaacccctacttcgcctactggccggagcttggggctttcgactgctcctggcaccgcgatcgatgcgggtggagcgggagggagtgttgccgggacctcggcttcggccgattaggttgtcaagaccgcggctagggtcttgagcatcccagttcgctagccggtcattttgccgctcggccttgggaaggggaggaagacggcgatcgaaacatccgtttcggattactcccttgcggcgccccatttcgcccctgcctatttcgagactcgggcggaacttatcccttttgtcgagggggtgagcgccctcgtctccccagctggtagctcgagcctgttcacggagctaaacgagttcgacgagggatgctctgccattaagagcttggtggttcggatcctcgcagcccattgtttgaccgagcgaaccatgcgggctcgtcttgacggtttgaagaaccgtcttcgagccaaggacgacgaactgggctacaagagcctggaaatggaaggcctcgcccacgcccttaaagagacgaaggccgagaacaagcggctccaggctgaactggaaaaagggagtgaggcgaaggcggagatcgagcgcctcaaggccgagctaaaaaaagagcaaactcattccgccgctctgaccgactactacaacctcactgagccgaagatggaggctcttcgccaagaggttagccaagcggaggcaaaaaccaagagggaggcgcaacggttcgcgcgggagatggtgaaggcaaccgagtttgtgaagaccgcttgccagacgctccgccttgcctttccgacatgggggcgagggtgcgtggagtccctagcgaagatgcttccgcctttgacttctcggagtggactcagcaggcccgcggtgcggtctcggactgcgccactgcatatggtgattgctgtgcacgcatgtcggcggccttcaccatgggcctcctgcagcagttcggctgtgagcacgtcgctgagttccctaactttgcgaatggggactaggaggttagtgcgcaggacgtttcgcccgcgcttcgtgcctagcgtaaacagttctggcagagggacggccgatccactgccaaggtgcatctccttgagcaactagcggaggcagaggcggcggactagggcgaaggggaagatgctgcggccagagagggtggaggcgatgccgaagatcacccagagggtgtctactcttttcgcccatttgttcggcctccctttgggaattggtgaaataagaacgagaagttcgtggcggtgaagggtttgctgaaggtgcgatgtccgttttggccagtttactgcgagatgataataaatggcaacagctacaaggttttgaaggttgccggctggatacgggcgcaccccaggcgatccctggaggactacgattgtgtccatatagaacgccgggaggacatggtttgcttttggcgaaaccatcaaaggactgatcgtcaggaagcgatcgcctagcgtcattatagtctagtttgtgtttcgccccccctccccccttaggatagtgtatgacattagtagtgacgacgaaccatgttcgtcgaatcgttccttagggagtggggattgctttgggggtggagacgtaatttatttg

SEQ ID NO: 65721 - DNA, 345 bp, Oryza sativa
  Clone ID: PAT_MRT4530_66741C.1
atggcggccgaggcggcgctggagcccaaccaggagttcctcgaggcctgcatgccgtcggccgacgacgacatcgggtggctccactgcgagagatctgcgacgagccgaggctgctccacgtcgcgagcgaggccccgcgtcgcggcggaggaggagaggtgcccgtgcgctgcgctgccctttcccggacttccactgcgactgcgacgccgtcgtgcaccccggaggactttaagaattaacctgctctacctctacatcggcggcttcgacgtacgcgtggtggcgtcgcgctctgcgagctcgccgtcggtcagcggctcaggcgccttcgcgcgctag

SEQ ID NO: 65722 - DNA, 462 bp, Oryza sativa
  Clone ID: PAT_MRT4530_66742C.1
atggctgatgctgctgctgctgcggcggcggcggcgggggtgcgaccccgaaagcacccggtggtcggaacatggcgggcagcttccctcaaaatcccctcccttaggtcagttcaccacgctgcagttgaggcgaggaacgggcggaatcaggctcaggggaaatcgagtcttaccagggggagaccgggggaggacgaagaaggtgacccctgcgacggaaggcggcggccctcgcctccgccgccgatcgcctcgacggtgggctcggttgcggcgggcgtttcgcggcgctccgccggagcggagggagaggggaggaggaggaggaagccgcgggctcgctcggtggagtccaggaaacgaaacgcacggcccagtggcccacgtacgtttcgcctcctccccttggtgggccgcaagaagaaggcccgtgccgcgaggacgcgtgccgccgggtga

SEQ ID NO: 65723 - DNA, 1756 bp, Oryza sativa
  Clone ID: PAT_MRT4530_66743C.1
ataaagagaagatgcaatggatggtcatggctccttgaaatgttaaacacagcggtgatcactctgatccccaagaaagactcccctacactgctgaaagactataggcctataagcctcatacatagcttcgccaagttagcagcaaaggtcatggcacagaggctagccccaagaatgaatgaacttgtgccctacacacagaatgcattcataagaggtcgatctattcatgaaaacttcatctttgttaaagggctcgttcagcaataccacaggcaacacaaggaaatgattctactcaaactcgacatctccaaagcctttgacacagtgtcttggtgttttctattggatatgctgaagtggagaggtttcggtgccaagtggagattatggttggtatctctgttcctcacggctgaaaccagcatccttatcaacgggaatgaatcaaacccttttaagccggctaggggattgcggcagggagaccctttatcgccactatttttcaaaccaagtcaacaagaagccaaggtagtcaaggcaattctacagatttttggtgcagccagtggattaatgaccaactacaataaaagtgcaatcactccaattcaatgcagtcaggaacaacttcaggtggtggctaatgagttgcaatgcaatattcaattattccctatcatctacctgggattaccactgtccacaagaaagccaacaaaagctgaggtgcaaccaattctcgacaagcttgcaaacaaagtggcaggttggaagcccaagttgttgtcccctgatggccggctctgcttgattaaatccgttctcatggccctcccagttcacttcatgtctggacagcaggaggtgagtggtggacattgccttgtagcctggaaagatgtctgtacaccagtggaaaatggcggcttgggcattcgaaacctggagctcttcggcaaagcgctgcgcctgaaatggccagccaatcgcttacatcagaaggataggccctggacccttgttgacttcagactgagcgcagatgacgagaaaatcttccaatctgcatctgaattctgtgtgggcaatggtagagacactaaattttggtcggacaattggctaggtggaggaagcattgcctggagatggcccacccttgcgacttttattggtagaactaagctcacagtagaacagggactcctgggacatcgatgggtgagagatttgcaaggatctctctcggatatagcaatgatgcagtattttcagctttgggacgaaatccaacaaatcaatctcagtcaggaggaggacacaattcgctggaagctcactccggatggttctttctcagtgtcctcagcttatgatctctttttcatggctcgtgagatttctccttgcggacagctaatttggcagacaaaagctccgtcgaaggtcagattttttctttggctagcaacaaagggcaaatgcttgacggcggacaacttggcgaagagaggatggccccatgaagatcactgtgtactctgccaacgcgaataggaggattgcctacacttgttcgtcacctgtgatttctccaggcgagtatggcagctgctgcgagcatgggtcaatgtggatttccctctgccaggacaagcgggagaggggctgataggctggtggatggtggcacgatgccattttcgaagcagctacaggagcaactttgacagcgttttcgcct

SEQ ID NO: 65724 - DNA, 560 bp, Oryza sativa
  Clone ID: PAT_MRT4530_66744C.1
caaaaacaaacggggggcccctctttcccttttcgaaggaaaaaaaatatccataccttttaaacccaagggggcaccaaaaataagaaaaaccaatttctacctgaaccctgaaaaccataaaaatttatgggggcgggctgcaaaaaacccgggcccaagtaagaactaaatccatgggttcaaaactctggaaacctaaatttttctccggccccccccttccttgacaggttttatgcggaaaaaaaattttcagggtttctctacacagggcttttaattttacccttaacccacagggttgaaatttctccggccagggaaaaaaaaaccccccgattgctggaacccaaaaaaacgcccggggcaagcaacttttcaatcggggaaaggcctgccatggcgttcatcccctcaatcccccggggaaggctgaccctatcaacagggtttcccagctgttaattgcctctctaaaactgggggcaagaatgcccttccataacatgggaggtcccatcctcacgggcccccctaaagaagggccatgcctttcc

SEQ ID NO: 65725 - DNA, 1051 bp, Oryza sativa
  Clone ID: PAT_MRT4530_66745C.1
cacgaggccggccggatccttctcgactccagcgaccaaacaccccagcggaccaaatcgccgcagcagggcgcgccatggagccggcggcggagaagagggaggccgagcaggaggagctgcagcagcagcacgacgagcccgccgtcccttccgccgacgacgacgaggctgaggcggaggagaacgagcgccgcaaccgcgagctcaaggccggcttccatccccttaggcgtagattcgtgctatggtacacgcgccggactcctggggcgaggtcgcagtcctacgaggacaacatcaagaagatcgtcgacttcagcactgttgagtcgttctgggtttgctactgccacctcacgcggccggttagcctgccgagccccaccgacctgcatcttttcaaggagggcatccggcccctctgggaggatcccgcaaataggagcggtggcaagtggatcataaggtttaagaagaccgtctctggtcgtttctgggaggatttggtgttggtgctagtgggtgatcaacttgattatagtgatgatgtttgtggcgttgtactcagtgttcgtttcaatgaggacattctaagtgtctggaaccgtaatgcatctgaccaccaggctgtgatgacattaagagattcaattaagaggcatctgaagctgccacacagctatctgatggagtacaaaccacatgatgcttcactgcgggataactcatcttacaggaacacgtggttgagaggataagctccatggtcacatatttagctgttatcttcctctaaactatcgcctcgtggatttcttttgaacctgtgcttgcatgggactaaaccttgctatgtgttgtgcatccaaactctgttatgctatggacaatcaaaatgcccagaattatcgtgatgccttattgttataaaaaaaaggttaaaacagggtgctggcctgggtgtgatcgggagcatgagtggtttgggaagttgtgcaggtagggtggggacggtagaagcgtgggagaaggtggagtgagagggggg

SEQ ID NO: 65726 - DNA, 2808 bp, Oryza sativa
  Clone ID: PAT_MRT4530_66746C.1
atgaagggtacattacaattaaagagcttacaacgacagtatgctgtcgaaaacagattggggcaaaagcccacacccgaagttggctcaaagaaaaacagaaaaggttcagagctggaacggaaacaacaaaaacagttcactgatcagcacgacaacaacatcacacggacgcctcgatgtgaggcaagcacatctcatccagatcgatcggcagaaagctcatcttacttgggaaaccaagccggcaaaaaagccaagtaccgtcttgatgtagcacaggagcaccgtgagctgacacaagcagagtacaggctgcgtatgggcctcaagaggaggctcctcggctttgcagttattgagagagcaaggaagaagcaagccgcgcgcatcactaacatcaaagaaggagatgccaacacaaagttttttcatcgcaagattaatgcaaggaaaaggaaaaatcacatccaccgcctaaagaagcaaaatggttgggctgtcacgcacgcagaaaaagaacttgtcatcgccgaacacttccaacatgtgatggggcaaccggagccaaggtcctgcgacctcaactggccggaattagggtacacaccgcttgacctctccgggcttgatgatcctttcactgaggcagagattcacaaagcgataaaagaaatgcctgccgacaaagctccaggcccagatggcttcacggggaagttcttcaagtcgtgttggggcatcataaaaaacgatgtggtggccgcttttaatgcactgcatgatgcaaggaacaagcatttcagcctcctgaattctgccaatgtggtcctaatccccaaaaaagaaggagtggaaggaatagaagattatagacctataagccttgttcatggcttcgggaagctcttttacaaggtgctagcaatccgcttacggcccctaatgcactcgctgatttcgatgaatcaaagcgccttcattcgagggagaagcatacatgacaactttatgtatgtaagaaacatggtcaggaagcatcacaggaccaaacgaccgatcctcctcttcaagctagacatatccaaagccttcgattcggtcaggtgggactacctcctcgcactcttgcaaaacataggtttcccaccaaaatggcgtgaatggataacgggcctactttcagcttccgcctcaaagatcgtcctgaatggcacaccaggagaggcaatcagcatggcaaaggattacggggtgataagcaaactgcgggggagagcagtacgcttccgtacttctatgtacgcagatgacgcagcagtcttcataaacccgaacaaagaaaatgtacaagccttcaccgatctccttggtcgctttggtcaagcaactggcttatgcacgaaccttcaaaaatcacatgtggctccgatcaggtgcgaaaacctggatttagacgacatcctccatgacacgccaacaaccagagcaaacctgccattgaagtatcttggacttcccttgacaacaggccgactgcgcaaagtcgatctccaacctctctatgacaaattgatgagtcgtattgctggctggcgagggaagcacgtcgggctcacgggacgttctaccctggtaaaggtggtgctcacttcgcagcctgtcttccttctgacaggactaaaagcgtccaaggagtccctcgaggttctagacaagcaaagaaggaagttcctctgggcgggcgaggaagctttgacggggggaaaatgtaaagtcaattggacacgaacctgccttcccactgcctccggaggtctgggcatcctaaacttagaaaagttcgcgagagctttgcgtctgcattggctttggcatgaatggaaatcatcggaaaaagcctgggtgggaaccggcacaccatgtgacgacaccgacaaactccgttttgcggcggccaccttcataacaattggaaacggtgagaagacaagcttctgggattcggcctggtgggaaggaaggagaatgaaagatgtagctcctctagtctatgcagcatccaagaaaaagaacaagacgatccagcatgcttcgcaagccaaccaatggcttcttgacttggacctgccggggactgcaggatggacgacagacctgattgatcaacttgtcggggtctggagcgccattcaggctctacacctggtagagcacgaggaggacaatataacatggaagcttactaaccacggcgagtacacggcagcatcggcatataacgcgcaactccttggaaccaccgctaccaacttcaacaggctaatctggaaagcctgggcgccgcgtaagtgcaagaccttcgcctggctaatcatccaaaatagagtctggacctctgacaggctggcgacaagaggttggccaaacggttccatctgccccttatgtcgtcggacccaggaaacagccctgcacctcctcgcagcatgtagatacacaaggagagtctgggcggcactagcggagtgggcgacgtgcgagcaactaaatcctagccaatggcggcaaacttcaacggtgctagattggtgggaggctaccgcaaatatacaagagacacctaagaaggcactccgcactttgatgttgttggtcgcctgggagatatggaacgaaaggaatcgcagaaccttccaacagaaggagctttcagctacctcccttttagccaagatcaaggaagaggccaaaacttgggtcttagcaggagcgataagtcttaatagctggctttcttttagttag

SEQ ID NO: 65727 - DNA, 414 bp, Oryza sativa
  Clone ID: PAT_MRT4530_66747C.1
atgggcggcagcgcgtcgtctggtggggccgcatgggcagtcggcacgcgggggcagcggtgggcggcagcgtgtcatcaggcgtggccgcgcgggcggtcggcgcgcacggcggtgcgcaagggctggcggtgggccgagaagatcgatcctgatcctctccggcggccccgtcttttttgttcttggtcatcaggacttcaggagagatcgatctccttggttttgtcatcgtcaagcagcaacaacggcacctcgctggctaggtcatcgtcgacggaatctgctccggtcttcgccgcgaccgcggtcgaccttggggcctccagccccgacctcctccttctccggtcatcgccttctcctggatcatgccgtggaaattcggccgaccacgatagttcggggggataa

SEQ ID NO: 65728 - DNA, 1128 bp, Oryza sativa
  Clone ID: PAT_MRT4530_66748C.1
cgcccccccccccctctccttcttcttctgctccttgggggctgcatttccctcataaattaagcaatttttttaacgatcggaggtgaagaaagttttttttgcatgtgcgtgcgcgcaaacgggttttttcggcggcggcggttttttggacggcccatgcgtttaggagagcgagcacgtttagggccttggacgacgacttttttttggtcgcccgatccaaaaaacttgcagctggctttccccaagccggtgtgtttttgttgtgaagatgtccccccctttttttttttttttttttttttttctttttttttttttttttttttttttttttttttttttttttttttttttttttttttttttttttttttttttttttttttttttttttttttttttttttttttttttattagaagtactagtactagtttttattgacatatactcatgtatagtaacatatatcggcacaaaccccgccgccgtatgcacgcagatacatacgtacgtacgtggtccatatatacatatacgtgcacagacttttatatgtacacatatatacgtgctggcatacacattttcattattcagtattcacttggtttagttgctgcgtacgttgctagcgagctccggcgccggccgtacgtacgtacgtcggacgatcgtctgagacttaattagttgtgcgcctcggggcggtacatggggtccggcttctcgtcggcggtcgcgcagcaacggcggcagccgccgtggtatccgtagccgccgcagcatccgtgatggcactgcccaccggggtagccgccgccgccacctccgtgatggccgcccccaccgtggtcgtcgtgccagtcctggacgcccgcgccgccgccgctctccgtcttcttctgctccttgccatgaggttggtcggcggcggcggcgaggaggacggcggatgcgaggaggacagcgagcaagagcagggccttggacgacgacgccatggtggtcgatcgatcctactagcttgcagctggcttttgctaagccggtgtggtactgaagtgaagatgtaggagcaaaagctagctagctacccgcgcgtccgaagggtcgacccgg

SEQ ID NO: 65729 - DNA, 526 bp, Oryza sativa
  Clone ID: PAT_MRT4530_66749C.1
gtccgtgctacagcaaacaggggctttagcccacatatatatgagttcgtaaggcaaccaagtatggcatagcaggcaagcacccttttggcacagtcagcgtgccatttccactgagtgaacacaacccagtcgtggcaaacagttcgcgctggtggcacgccaaccatcttcaactatcgaggaccattaaccattgttcaggccctagcgccagccagcttaccaactcccacgccagtttggtgatcttctacatttgatctggaatcttggcgtcaagctcaagctcttgttggcttttaacagttccatctagatatggtatcttaccctaggtactatggtgcacctagtacccttaccccccttggcggtgtcttgtaatgagttttacaccagtatagtggttcaggaagttaaaaataagctccagatatcatcatatgtgaccatgtgaaactttgggtgatataaatagaaaaaaagattgtttttcatattttaaaaaaaaaaaaaaaaaaaa

SEQ ID NO: 65730 - DNA, 380 bp, Oryza sativa
  Clone ID: PAT_MRT4530_6674C.1
aagcttgattgcccattattcctttggtaagggcggaaaaacttgagaaagtatagcccttccgatgtagacgtggtctggaggtgtggacgaagctgatggcgtgagcctcagatggaccagcctctagtgcagatcttggttggcgtagcaaagatctaacggagtactcatgaacatacaacgttggatgctggagcggggaaggatttcgtgccaacggcactcgtacacgagttgttcggaaactgagcacagcgttaactcgttttgttaggaaagtgaaggtgtaccggctcacgttcttcggagcgcgttctggtcacgattgaaatggggcaacagagaacctgggatcatattccaaaaaaaaaaagctt

SEQ ID NO: 65731 - DNA, 315 bp, Oryza sativa
  Clone ID: PAT_MRT4530_66750C.1
gtgactactggcgaccaagccgccgccgtctctcccctcgccatccgcgtcgccgtctcccccgccatccgcgccgccgtcgccatccgccggcgccgtccagacgcgccgacgtctatccccgtcatctcccctcgccattcgcgccgtcgtctttccccgtcattcgcgccgtcgtttcccctcaccatccgtcaccgacggtcagacgcgccgtctgcttttcccgtcatccgtgcagtcgatttctccagagtgtttcggcgcttttctcgtttagcacgcatccgaaggagccgaaggcttcattcgctt

SEQ ID NO: 65732 - DNA, 408 bp, Oryza sativa
  Clone ID: PAT_MRT4530_66751C.1
atggatgaacataaagcacaagtgggtgtgagagaggtgcaaggggtgtatgcaattgaattaggtgccaagagagtccccttgccgctggtgggggagtatttatactcccacccaccaaaactagccgttggtggcgaaatctgccaatcattgtgctctgccggtctgaccggaggtatgcggccggtcagaccgtgctactctgcaacggctagaaaactagccgttgtagtgctgtcagagggccccatcggcctggccggtcagaccggcgttgagtgggcggtcagaccggcctcggctcggtcagaccgccatcggctcggtctgaccgaatacggctccgtcggctctgtatcggccaccccgagcagcaccatcccggcctccagggggccggtctga

SEQ ID NO: 65733 - DNA, 315 bp, Oryza sativa
  Clone ID: PAT_MRT4530_66752C.1
atgtggcccgatttgacggaggcggcgacatcaggaggcatcgggaagatgaggaaccctggacggagttccctaacacgtggtaaagaaaaagaacaaatcggaccactggttcacccgtccaaccgccagtttatcggtctaaccgccggagcaataatatatttacttcatgttaggcaaaacagaacaagttgtgaaaggcttcagtttggtgggcccaactgcgaacgtgacactggatcccatctagtcgtagacgtggcaagctcaggccagatgacaaatcaccgcactgtgaaagcccttagagcc

SEQ ID NO: 65734 - DNA, 702 bp, Oryza sativa
  Clone ID: PAT_MRT4530_66753C.1
ccctcccagcgaaatgggcttcttgattcactgtgctcgctcgatactccgaccccgtctttgcttcccccgccgccgccgccggcgcctgcgccgctgcgctgtctccaacactgcgaacagcgctgccgacggcctgctcctgatacttacgccgtatactctcgcttgtgaccccttgcgctcaaggcaatcttcccttgcccacgggctcgactcgcgtactgctcgcgagttctcccggcgccgactgagccgatcaccatcccgcgagcagtgtaggcgagatcatgctgcttaggactccgggacgcccccgctgctccccgaaccatggctgggctttaggaaggagagaagcacttcatccgcgggggcatcgcgcaggacctgcgaacagacggtcgcaggcgggtggagatccaggccatctcggccgagaccggagccatacctcaggcatacggttctgcagcgtgttagactcggtgcgactgaagtcatagctactgtgaaggctgagttgaggaaaccaagcattcttcatcctgatcaagggaaagattccatttttgacgagtgcagcccaactgcagcacccatgtttgagggtagaggttctgaagaatcttctgctgagctctgtgttgcactgcaaagatgcttactccgcggtaaaagtggcgcaggagctgcaattga

SEQ ID NO: 65735 - DNA, 1656 bp, Oryza sativa
  Clone ID: PAT_MRT4530_66754C.1
atgaagtacgtgtccgggccgtacttcgagccggatttcgatccgctgctctaccgcttcggtacacctggggtcgtcgttgacaatgagacgcgcgaggactgcacgctcgtcaaggttgatagcgtcaaccgcgatggcgtgctgctggaaatggtgcagctgctcaccgatctcgacctcgtcatctccaagtcgtacatctcctccgatggcggctggctcatggacggcaagaacactacttcctttggatcgttgttccatgtgacagaccagatggggcggaagctgacggacccgtcgctgccggagttcatccagcgggcgctcgtcccgtgccagcgccccggcggcaacgggccgtcgcccaggttcacgacgtgcctcggcaacgtggtcgggccgggcgggcccgacgtgtcggactgcgcggcgctggagttcacggtgcacgaccgcccgggcctcctgtcgtcgatcacccaggtgctcgccgacaacggctgccacgtcgcgtccgggcaggcgtggacgcacagcgggcgcgccgcgggcgtgctctacgtcacgacggccggcggcggcgccgcggccgaggcggcggcgccggcgccgagccggtgggagcacatcgaggggctggtggacgccgtgatgggggcgcgggagaagctgaccggggagcgacactgggtgagcatgtcggcgccggtggaggggcgcgtccacacggagcggcggctgcaccagctgatgcacgacgaccgcgactacgagtccggccccgccgcgacgcccgtcgacgaggagcatttcagcatgggcgacaaggccgccaccacggcgcggctggcccgccgcgtggagacgcgcgtgtccatcgagagctgggaggagcgcggctacgccgtcgtcaagatgaccagcagggaccgccccaagctgctgttcgacaccgtgtgcgcgctcaccgacatgcactacgtcgtcttccacgccaccgtcgggtcccagggcccccttgccatccaggagtactacatccggcacaaggatgggcgcacggtcgacagcaacgccgagcggcagaaggtctcccggtgcctcgtcgccgccgtggagcggagggcctcccatgtcaggctcatcatcgccattctccatttttctcctgttggatactcctacgcgcgacgccacggtcggtcactgacaatgtttccgcagggcgcgaaggtggaggtgcgcgccgccgaccggtcggggttgctgtcggacttcacgaggatgctgcgggagcacgggctgtcgctgctgagggtggagctgaagcggcggaaggacgaggccatcgggacattctacctcgtcaccgacgccggcggcgaggtgcgcgccgaggcgctgcacgcggtgcgggcaagggtcggcaaggtggggatctcgttcgaagtggccaaggacgcgcctggctggccaccggtgaggaagaccagcgtgccggcaccgcccgccgaagcggctccggcggtggcaacgccggcggcaccgccggcggcggagggccaggagaggccgaggtcctccctcgggagcctcctctggtcacaccttgggaagctctccaataactttggctacatcaagtcttaa

SEQ ID NO: 65736 - DNA, 336 bp, Oryza sativa
  Clone ID: PAT_MRT4530_66755C.1
atgacggttgtgacggttggaatggtcggaaataccctccaaccgtcattgggagctaatccacactgtccagaagaaaccctgcatccagcggcgaagaggggggttcggccgaaccaccaggttcggccgaaccaccagtgtgctcagcttgaaggcattggacagtggatcgacatcagcctaaaagaggagtgtcgccgcgccagccgttacgccggaggtcacgtcctcgcctgcatccaagatcgccgctcgcaaatgtacctcagattcttgcgcgggggttttcgccgttctcggttatcggcggatgagatcgaccagttggcgtga

SEQ ID NO: 65737 - DNA, 245 bp, Oryza sativa
  Clone ID: PAT_MRT4530_66756C.1
tcgctgacgcgtgggtctcaagcaggcaatcatcggcgaggcaccagcccaccggccggcaatggcgtccacctactgcttcctgcaccagttcacagtccgcgttgacgtgagcgtggactccacgtacctggggaaacggacccacctccttgtctgccgcgcccagaagcatgacgacgccgacgtctcccgccgcgcggagctcgctcttgtggactgagcgacagtggcagtgggggaga

SEQ ID NO: 65738 - DNA, 684 bp, Oryza sativa
  Clone ID: PAT_MRT4530_66757C.1
gtcgaggcagctcgagctgcttctggaatcttctcgaaccctccgcttcttccgcgatcctcctcctcctcctcgtcctcccactctctcgcgctcgggacctctgcccctcgcgcttcttccacgaggctccacgggccacgggcaagaccagccgcccgttcgccgcgtgcgccgccgccgccgtggatgggacggctggggtggctccggctcgcgtcgaggtctctcgcgctacgctccggcgaggtggctgcgcaggggagcaaatggattcggcattccacgccttgcagctccagtggcatctatattggtgataaatgctatggacggttcatgttgacatcatttacattgagcaggtcttttcatgctacaggtcaacacagttcaccagagaaggactattacaagattcttggtgttcctaaagatgcttcgcaggaagaaatcaagagggcttttcattcacttgcaaaaaggtaccatctagacacaaacagggggaatactgctgcaaaaggacatttcaggaaataagagatgcatacgagacattgcgcgatctttcctagagagagcaggatgattatgctattttattgagggtttgaaacaaattctctcaatagggggatggaatttaatggggtcctttcagatccatttttaggattttca

SEQ ID NO: 65739 - DNA, 1393 bp, Oryza sativa
  Clone ID: PAT_MRT4530_66758C.1
actactagcttaattagcatgaaacacaagtagtatatgattacaccaccacggcgccacgcgcgcgcatcattacacatcacgtacatgggcatatggcgtgtcattacatcaagcagatcaagctgctggagctaattaatggtgcattttgcacggtctttgtgctttggtttcagcagatcgaagaccgttggaaatgcaccacatcacgctgggatctctgttaataacctctcccaaccatgaactacgtacaccatgtagatagttaacaaactgaggcgacagacacgctatcaatagcgctggtaacaagtacactagtaatatagctagtggttaacacgattaagaagtatggcgtgcatggtggcgtcgcgttgaaacttggctagaactggcagggggacggcggggagaagaggccgttgcgagtccagaggtcggcgaaggcgtggaggatgagagggtggtggcgcggcgagttgagggagaggaactgatggaggaggtcgttgaggtcgtcccacgcgtagatctccttctccaccaccatctgcaccatcgactcccggaagtcctcgtacggctccgccgactccaccgccacagccacgctctccttcgccacgcgccggtacggcgcctgctcctgcagctgctgctgctcgtcgtcgtggccgccgacatcgccgccccgagcgaaggaggtggcgccggcccgcctccgccgccgacgctgctgcctccgcctccgcctcgtctccagctgctcctgctcctgctgcgccgccgccggctcctcgaacagcgagttggtggtgaacgacgcggggccccacgaggagtcggtggaggtggccgtgccggcgcccccggtcgtggccgtgaacgccgtggtcgtcgacgtggaggaggcgttgggcgacttgggcttgctaccgccgcggcggaacgacgaggacgacgacgaggagaagatggagaacagcttcggccggcggcagttgcagccgatgtccaccaccggcggctgccgcagcgagaagctgcccctccttgacgacctgcccgacatggacaatgccactggtgtacctctaagctcaatagccttgcactcctgcactcactgcagaagccaatgcagctcagctcagctaagccagtgagagcgacgtgtgcgcggcgagacagtgagagctaagctcggagagagtgagtcgtgcccttggagcttggagctggaagaggagctagctagtggtgctatatattaatggggcgccatgtgagagcgcgaggcaacgattaaatggcgagtaaagatagagcgacatgaacagtgagagggagaagagagcgcctcgtgccgaattcctgcagcccg

SEQ ID NO: 65740 - DNA, 113 bp, Oryza sativa
  Clone ID: PAT_MRT4530_66759C.1
caacctcgtcgtagatcttattaagccattaagagacagccacataagtgacataacgagggcaagagcacgacaaatcccataactaattagcacgcagggtcactctgcca

SEQ ID NO: 65741 - DNA, 391 bp, Oryza sativa
  unsure (1)..(391): unsure at all n locations
  Clone ID: PAT_MRT4530_6675C.1
gacatcgccntgacgccgcacttcaaggagaagntggcgaccaaggntgaaaccatccagccgaccacgacctggtgggccaatttcggcgattccaacctcaaccgtctggtcgaggaagcntggcgcagaacatcagcgtcgaaacctcgcgcgaacgcgtgcggcaggcgcagattgccgcccgggtcaacattggcggctatctgccggtcggtggtctgcaaaaanataaaaaaaaaaaaaaaaataaaaaaaaaaaaaaaagaaaaaaaacaaagaaatagaggaataaaaaaagaagatggagaaaaaagcagggggaaggaagaacaaaaaaaaaggaaaaaaaaaggaaaaaaaaagaaataaaaaaaaaaaaaaaaaaaaa

SEQ ID NO: 65742 - DNA, 246 bp, Oryza sativa
  Clone ID: PAT_MRT4530_66760C.1
ttatattcttccaatcgatcctctcccgagctggggcgactttaaatggctgggaggattgacagcgcaattagagacatgttgatccttagtggctattactgagctgtatatgccaaaaagtatgaggccatggacgctagtgctgctggcataataacaacggtgaacacgatcttcgaaatcacgtcagcacagcgccggcgatcacggtaagacagatgacaccaaagctgactagaaatg

SEQ ID NO: 65743 - DNA, 1038 bp, Oryza sativa
  Clone ID: PAT_MRT4530_66761C.1
ctatccttcccttcttcctccttcctccctctgtctctctcccttatctctctctcctccggccttccgccccgtgacgagctccaggatgagcacgccgaagacgccgtagatgtcgcacttctcattgatccgaaggctctggcacgccagctccgccgccacattccccataccgtcctggaaccggctgctcatcacgtgcttgtccagcttcggcagcagtcgcgccagccagaagtcgccaatcatcgggttgcactgctcgtcgagcaggatgttgctcggcttcacgttgtagtgcaccctgccctcgccgaccgacgcgtggtacaccgtcccgaacacgccgcggccgatctccgtcgccttgctcaacagcgcgtcgcgccgcccacgaagtcctcggaacggaggaggctgttccccggcccaaacgtcaccatattgcccgtggcaagcttgctggacttggtcgagcttgacacgatgctctccagctctttctccggagtcgtcccgccgtcgctggccctccgccgcgccgatatgttgagcagggtagatgccgaggttgccctcgagcgcgctcgcgtcgaggctctggaacacgcccgacgccggcagccggccgacgaggcggttgtgcgagacgttcaccgccaggaggctctcgatcccgctcaggttgttgtactctagcctcagaatctccagcttattcagctccgagatgcccaccagtatcggccctgtcaagctgttgtgccccaagctcaggtcgctcggcattgtcccgtacaagccgctgctgtggaggtcgagcacggtgaggttgtggagcaggccgagctccggcggtagctgggtgcggaggtcgttgcggtacaggttgaggtagcggaggttcatgaagagcgccatttccgccgggatgcctccggtgagctggttgacggagaggtcgagccattgcagggtctccgccagcttcgtcgagcccaacggcacgacgccagagagcacgttcgacgacat

SEQ ID NO: 65744 - DNA, 334 bp, Oryza sativa
  Clone ID: PAT_MRT4530_66762C.1
ggggttggaaactagaaccccggtttttttttttttttacccagggttttatgactaagcaaatcctcaaagggggggtttcttaaaaaaaaatgggaaaaggggatttttgggggggggtttttaaaaaaaccagggggggaaaccccccatgggggatggccgggccacttgttgggatttcagggttccccacttttttaggacccccccggggggggttatttaggcggccttgcggggggtttaaaagggggggggcccttttgcttggaggaagcaagttttttaggaaaccccaggggcaatatcggtttttttgttggaaaaaggg

SEQ ID NO: 65745 - DNA, 3363 bp, Oryza sativa
  Clone ID: PAT_MRT4530_66763C.1
ggcacgaggaggaactagtctcgagttttttttttttttttttagatcgaacaaggcaccacgtgatgaataatgagatttatctgacatccaaaagcagagacaaaaaaagaccctgagaaaattagcacggcaggaacagttgtacgtactactattactgcctactgctcagacctttcaatttttgcactagggaacacgtagtacttgcggatgcatgcatgcaatgcaatgcaagtgatcgattcgatgatttggaatcattaaccctgtggtttagtaggagtaatgatgtggcgtcgtcagatcgatcagaattcagaaagcttcgattctggctgacgatgcagcgacgggggccttgatgacctgcaggatctggacgacctcggccatggacgggcggttggatgggatctgcgacgtgcacaccatcccgagcttgagcaccggcagcacctcctcctccgggaactcgccgatgctcgggtcgacgcactccagcacgttgctgccgccgccgtggtcgaggaggacgcggacctggtcgatgaggatgaccacgtcgtcgtcgccgtactcgacggccctccgccccgtgacgagctccaggatgagcacgccgaagccgtagatatcgcacttctcgttgatccggaggctctggcacgccagctccggcgccacgtaccccatcccgccctggaaccggctgctcatcacgtgcttgtccagcttcggcagcagccgcgccagcccgaagtcgccgaccatcgggttgcactgctcgtcgagcaggatgttgctcggcttcacgttgtagtggatcatcggcggccggaacgactggtgcaggtgcgcgagccccctcgccgtgccggccacgatgcggaaccgctccgcccatgtcagcggcgggaacgcgccgtcgccgttgccgtggagccgcgcctccaggctgccgtgcggcgcgtagtcggtgatgaggagctggagctgcggcgtccagtagtagcccttgagggggagtaggttggggtgcctcgccttccccaggatgcggacctcgcggtcgaagtcgtcgcgggactccacgatgctcgccgtcgcgagcttcttgatggcgaccaccctgccctcgccgacggacgcgcggtacaccgtcccgaacacgccgcggccgatctccgtcgccttgctcagcagcgcgtcggcgccgcccacgaagtcctcggaacggaggctgttgcccggcccgaacgtcaccatcttgcccgtggcgagcttgctggacttggtcgagcttgacacgatgctctccagctccttctccggcgtcgtcgtcccgccgtcgccggccctccgccgcgccgacatgttgagcagggtgatgacgatgaccccgaggatgatgaacaccgccgcgcagatggccaccatggcggacacgctcaggaaccgccgtttcctcggcgacgccgggccgcggccgctggtctcgaggttgttgtcgccgtcgccgccgtgcgggtactcgttggggtcgagcacgagcggcttggccacgttcatcctgcacggctgcgtcaccagcgggctgcagatgccgaggttgccctccagcgcgctcgcgtcgaggctctggaacacgcccgacgccggcagccggcctacgaggcggttgtgcgagacgttcaccgccaggaggctctcgatcccgcccagctgctgcggtatctcgccgctcaggttgttgtactccagcctcagaatctccagcttcttcagctccgacatgcccaccggtatcggccccgtcaagctgttgtgccccaagctcagtaggtagagggacgaacagttgccgatgttgtcggggatggggccggcgagggagttgccgtcgagctggagcacggcgaggctgccggcctcgcacaggtcgctcggcattgtcccgtacaagccgctgctgcggaggtcgagcacggtgaggttgcggagaaggccgagctccggcggcagctgggtgcggaggtcgttgcgggacaggttgaggtagcggaggttcatgaagagcgccatctccgccgggatgccgccggtgatctggttgacggagaggtcgagccattgcagggtctccgccagcttcgtcgagcccgacggcaggacgcccgagagcgcgttcgacgacatgtcgagcgtctccagcccgacgtcgaacagtgcatccgggatgctgccgctgaggttgttggccctcaggtgaagctcggcgagcttcgtgcagccggacatggcgtccgggatggcaccggagagctggttctctgacatgctcaggtacctgaggtccttgagcttcccgagcgagtccggcaagcggccggtgagcgcattgtcggagaaatcgaggtgctgaagcgccgccaagtcgccaagccaagcagggacatcgccggagaagcggttgccggacgcggcgaagtagacgagcgagccgagatgggcgatagagtcagggagctggccgtcgaacgcgttggagcttatgtcgacggtgctgaggtgagggcacaggccaatgtcgctcgggacggcgccgaagaacctgttgccgctgaggtcgatggtcttgaggttgtggaggttggcaatgccggtggtgacggtgccggagaactggttgcgggagaggtcgagggcgcgcaggcgcgagagcggccagagcgcgccggcgaagtccggcgagccggagagctggttcccggacaggttgaggtggagcaggaaggagctcttggagaggccctgcggcagcgggccggagaactggttgccggagagcatgaggaagcggacggtggcggggaacgtggcgggcagcgggccggagaaggcattgccggtgaggtcgaggtagcggagggaggcgaggagcgggacgtcgccggggagcgggccggagaaggcgttgtaggagaggtcgatggagcggagcgaggcgagcagggagagccccggggggagctcgccggagaggttgttgcgggcgacggagagcgactggagcgcggcgaggcggtcgagcccccgcggcatgcggccggagaggccgagcccgtcgagcgcgaggcggagcacgcgcgacgtcgccgggtcgcactccacgtgcgcccacccgcacggcgtcgcgtcggactccgtccacgtcgccagcgcgccggaggggtccgacagcgccgacttgaacaccaccagccccagcacctcctcgttcaccggcatcggcatcgtactgtcagccgccgccgccaccaccagcacgaacagcagtaacgcgataggcgtcgccat

SEQ ID NO: 65746 - DNA, 1334 bp, Oryza sativa
  Clone ID: PAT_MRT4530_66764C.1
tttttttttttttttttttacagagaaacctaatgagactgcaggtatgcacttgcaggtgtcctcacttcctcagaaccaagatccatcttaaaacacaatgttaggtcatcgtatgtacagataaaaaagatcgtttaaatgctgttggctcatacatctcccaagagaaaaaaacagctcattttcttcttcagaaccaatggcaagagagagaaactgaattgcaaaagaaccctatatcaatctgtacattctgaatataaccccatgcattttccttctttttcttctttcagggagtaatgaattatttaccgagctcaagacatctacagtggcggctacatcttatcagcgattctgtatagggcatcagccaccttgccaagcacaccaagtaggctgctcacttggtccttcctctgctccctgtccagttggcagttgatgttctgcgcctccagctgggctgcaaccatccggctgctccggtctaggatttcgatcagctgcccctgcagatcaggagcttctcctgaggcgtcgtcgctgcgctgcctcttgtgcgcgccctgagctggtgagtcctcgacaatttgttccggttgcttggctctggacgtccccgcttgctctgaggcatcttgcctaggtggatcactcttcttctcggatgtcaggacgggcaccgccggcgccggagccggaggtggggccggggcagcggccggggtggtcgccggcggggtcgcctcgtcgtcgtcctcctcttcctccgacgacgagaagagcccatcatccccgccgccgccgccgccgccggccgcggcgcggccgctgtcgaacaccgccgccttctcctcctccccctccttccccgccgccgccgccgccgccgcattaccgccgccgcggccctcgaggatgtcgtacacctcccggtcgaagaaccccggcagccgccgctcccgccgcgcgtcgttgcgcatcgcccagaacgacacctccttccccatccccgccgccgccgacgacgacgacggcgacgacagcgagcgctcccactccctgatcttcttgtagtcgccggcgaggttgctccaccgcttccggcactgcacggggccccgctccagcccgtgccgccggcagtactccgccaccgccgcccacttggtcggctccgcggcggcgccgccgccgccgccccgccccctccccctccctcgcccctccaccacccgcttcccctctatcagcaccagtatctcctgcctcgtccacctcggcagccgcggcgccctccccgacacctcgccgccgccagacat

SEQ ID NO: 65747 - DNA, 241 bp, Oryza sativa
  Clone ID: PAT_MRT4530_66765C.1
aggtctaaatacatcttatccataaagcatactgatgtcccacaggatactgcgtaataatactaacatatcatacggacctcgctgttacattaaaccagacacaaggcgacatcatcaccacaaatacttatttttacagaggatggggacgaccaggctcatctgcagctgcacctaattggctgattactgaccaccacggaggccgagcaccacgtggagggtggactccttctag

SEQ ID NO: 65748 - DNA, 388 bp, Oryza sativa
  unsure (1)..(388): unsure at all n locations
  Clone ID: PAT_MRT4530_66766C.1
ttttttcaagtgagtggtgtttgtccactgcaaaatacaatcttgttcacaatcattcatcaaagccaagtaaaacaatcccttttaagttcagtgctccagctatatacatacacaattagaactgaactaatctggatacctcacacaaccaaccaactgcttcaaaccactgatacaggaaatacaagggacaataaggaggaacagaaaattaaaaggagaaatggaaatgtgaaatcaaccagccaaggtcataggcctaagaacatcagtgacctcaaatctcaacccaaacaccaaattagcaacaagccggcactaaaaatccctgagtctnnnactataactgcatacatgnnnnnttagacattgtcatcatcgnnnt

SEQ ID NO: 65749 - DNA, 105 bp, Oryza sativa
  Clone ID: PAT_MRT4530_66767C.1
gttattgggtttggaggagaagctcgctgaagcccaggatggcagtggcccgtcgagcagctttgaaagcccaaaaggttttgccaagttgggctcccgtccaga

SEQ ID NO: 65750 - DNA, 200 bp, Oryza sativa
  unsure (1)..(200): unsure at all n locations
  Clone ID: PAT_MRT4530_66768C.1
gaggttcgtctaaggtttantgggttgananggcnggncccgaatgtcaagtcccgttgttttntangnggctttgcttgggcaccnaaaaaccgtttctttaagggcgcttttttaccttnagggnnaatctttanttcnaaatttttaacccanggggaaccgggngggnccccgggntttggnttttaaaacttttt

SEQ ID NO: 65751 - DNA, 184 bp, Oryza sativa
  Clone ID: PAT_MRT4530_66769C.1
tggtgctgggactgcgggcatgcaagcaagatagatggaagatgggcgatgcaacgatggcacataacatgtggcatacatggcccctgtgcaaactgtgccaaactgctgcttgcactgtggttggttgttgatcaaacgttggttacatgtactctagtaataaggtgttgcatactatcgt

SEQ ID NO: 65752 - DNA, 306 bp, Oryza sativa
  Clone ID: PAT_MRT4530_6676C.1
atgcagtcttttgaggttgaggattgcgatgtattgttcatgaagagctgcaagaagactagagatccaaactggcaaaagatctctcatgttccggaagaactcgcggttgcagccgttgacgacgacgcgcagcacgcgagcgaagaggaagtcgagccgttgtggacgaacagggagcagtcgtgcaacgcgcttcccaaaaaccttattaccgccctctcccggtgctggacgtcgaaggcggaggttccggagacctgctatcccgatcgccggtgcacgccggtgagcgggatggactag

SEQ ID NO: 65753 - DNA, 624 bp, Oryza sativa
  Clone ID: PAT_MRT4530_66770C.1
ttttttttttttttttttttacacctgtaaattgtgagcttcagtagatagctgaattacacctgtaaatcgtgaacttccgatgaagtgaaccaatttgcaaccaaatgtattacatttataatatcctagaatatacagcttgtgacccaaaatttattgtccctatctgcggctcagtggaaagttcgtaaaagaatgagaaggaaaaaaaaaatgcctctcatatccgtgatactgtgacgccaaaatgtataatgtgtgcctgtactccattaatctcttgcgactatagcatttgcccccctgcttgtggtctgagctcacctttcattatcgatactcccatcttgcagaggatcaaaacttgccgagagtgtatccctctaagatcagctaggttgattttctagccaagaagatcttgtcggagtctcatctgttctgttagtttcaaaccgagaaaatcttcgtaatctgttcaccttcaaccgaattgagggcgcctttcgagctatggccttccagatcatctgaacagcatcatcattttgagatgggtactggtattcgaagtgcctttctacttccttcagcctgttccacatgcgtgtccagtcttct

SEQ ID NO: 65754 - DNA, 180 bp, Oryza sativa
  Clone ID: PAT_MRT4530_66771C.1
atggccaagttcgctgctcagctcaaggacaggtttctcggcctcgtcgagcgcgtcgccggctgcggccgcggcgccggagacaagggcgtcaaggaacccaccaagctgtcaactgtgcagatctatcttgaaatgggtttccacaatctcatgaaattatcagatttttatccttaa

SEQ ID NO: 65755 - DNA, 1830 bp, Oryza sativa
  Clone ID: PAT_MRT4530_66772C.1
atggagatgtcgctaggtggtgatgcgttggcggtatacgcacttgccactctcttcaatcgcaagaagaaactgcagcacgacaacaatggtagccatgatctagaggtcgtgtgggctcctatcctgctgatgcatctcggcggccagatgttcatcaccgcctacaacatagaagacaatgagctgtggaggcgccacatcctaaccgcattatctcaggtcacagtagccatctacgtcttttgccagtcgtggtcgtcgtcggctgacagaaggctattggcagctgcaattttgcttttcatcgttggtattgtcaaatgctttgagaagcccatgtctctcaaggccgcaagctttaatgaattagtcagctctaattatgatgctgaattggatatagtcgttaacagagaagaaatgctggaatctttcgtcaatgaagcaaaggctttacttcagcgcagcgatcattctcctccagcatcacagcaaggtactagagaagaaatttcatccccagagttcgatgtgcccaccatgttgtttgtggattttgcctacccatattccgatcgccttgataacctaaaatacttctttacccttgatctcacacaagtttgtaaaacaataaatagtgggctctccagcatctttgatattctatacaccagaaataagattgatagcgaacaacctgacgcaaaccgctattgttggttatcaacatggatgctagctatactactggtgatcccagccgttggtctcctccacagcagccataaacaagcctatagccataatgatgtcattgtgacatttctaatggcgtatggcacccttttactagagatcatttccatggctgtagtatggaaatatctcgatgtcttgcctaacactatggcacaacaaagcctcgtaggattcttcacccgaaacaaaaggcacgcatggttgataagcatcgcaggatgcttacaatgcaagggtttgctagaccaatactggtgcatgaatctatgcgatatgtccaccgatattacaaatttggttcacaattatgtgaaagatggatggacaaaatacatagaaacgccgagagctacaggagtttcaatgacaacatgggacagtgggcacttgatgatgtcaagagcaatctccaactacataatgcatctgttgttcgctaatcctgagatgctgatggctggcagcagaagtaatctcttcacaactgcgtaccgcgaacttgactccattctacacaaggagaaaaatctacctgtggatgatgaagaaaaacttacgctaaaagtaattgagaaggtggagcataaaaggaattgtttcattcatgatgctttccggcttgcccgagatttgttattggctcggggttacaagaagatgtgggatgtcataatagatgtgtgggtagagatgctatgcttctccgctggtagatgccgaggatacttgcatgccaagagccttggatcaggtgttgagtacctctcccatgtgtggctcctgctggcacatgccggcatggagacgttcccagagatgctccagaggaggcaactgtttcacttgccaacagaggaacctgaggatgaaagggaagatggtgtcatcggtccatccgattcgcaaggctcgaaaaatcctcacaatctcaaggaggaaggaggacatggtgttgctccaactgacacctcccaaggggcagagtctcgcaaggagaaacaagaccagcatgtagctccatcggctccacaaggtgatatagttgtcccaccggccaccgaatag

SEQ ID NO: 65756 - DNA, 263 bp, Oryza sativa
  Clone ID: PAT_MRT4530_66773C.1
cgggcgccctcttttttttgggttttttaaacaaatgggtttaccactcatattttggccggagggggggaaactaataccttacaaaaaggcgatctgttttcaaagccacatacagagcgagctggcggataccagggtcacaaatagaaatgaatgaccacgaatttggccattacagggcatctaagagactcccccacatgacgtctggtacgcggaccgccaactcacgagataacagtgatttttattgaacgaag

SEQ ID NO: 65757 - DNA, 436 bp, Oryza sativa
  unsure (1)..(436): unsure at all n locations
  Clone ID: PAT_MRT4530_66774C.1
tttnttttttttttttttttttttttttttttttttttttttttttttttttttttttttttttttttttttttaggggggcaaacctttctttgaagggatcaaaaccccaaaacgggggttttttaacacaaaactaaccccttgatttttacctggataaaaaagggcaattttattagtggggttctacaagagtaaacttaacaaaacatttttgccgtggactttataaacttggaaattcttttttttttttttttggggggagcgggacccccaccaaaccttttttttttggggaccccacccatttttttttttttttttttggcccttttgggggggccaaattttttttttgccacttttagggcacccttgttttttccaattttgaaaagcttagggattcctttttcttagggagcaaatc

SEQ ID NO: 65758 - DNA, 355 bp, Oryza sativa
  Clone ID: PAT_MRT4530_66775C.1
ctgatatgtactttctgttcgatttgtgcggctggggatttaggatgacatagctggctaaaagaacatattcttatttgccttgatagtactgcatatcctttagtctaggaccgttggttccattctcattaatagtctattggatgcctggcatagctgtgtttacatctgttgccagggtaaagaatttgtccatctggtatcagtcaaagcttcacaaatatttatgtaatgattgatcacccaaaatgatgtacctagttgctagtatgtaccattggctatgctcacatttatgcattgttaggtcttcttatttgataaaaaatcataaatggtgattcagattaag

SEQ ID NO: 65759 - DNA, 657 bp, Oryza sativa
  unsure (1)..(657): unsure at all n locations
  Clone ID: PAT_MRT4530_66776C.1
gcacgaggcccacacacgcttccatcccatggcgacctcgccggcggcggcgccgccgcggcgcgtggtgatttgcggcggcggggtcgtcggagcgtgcacggcctacttcctctccacccacgcggcctccccgactgtcccgaccctcgtcgagaagtcgtccccggcctgcgccgcctcgggcaaggccggcggcttcctcgcgctcgactggtgcgacaaaaccccggccctctccgcgctcgctcgcgcctccttcgcgctccaccgccgcctcgccgccacgctcgacggcggctccgcctacggcttccgccccgtccacaccctctccatctgcctccccaccgacccggaccccgccgccgccgccgccgccgcggcgtccccgctgctccccgcctgggtcgaccccgccgcgtccgccgcgccgccgagggagctcgggacgacggacaccaccgcgcaggtccacccgggcttcttcaccaaggccgtcctcgccgcgtccggcgccgaggtggtcatcggcgaggcggagcgcgtcgtcgtccgggacggccgcgtcgccggggtttgtggtcaggggccgcggcgaggtggacgccgacgccgtggtgctcgcgctcgtcccctggtcggnggaggttcgag

SEQ ID NO: 65760 - DNA, 539 bp, Oryza sativa
  unsure (1)..(539): unsure at all n locations
  Clone ID: PAT_MRT4530_66777C.1
aaacaaaccatctgcaaatcgaagcggaatccgccggtgagccgcggcaaccgcagccatggacgagaggccagcgctgccgccgccgccgtcggcgcacgcagtccccgccgttctccgcgccggcatcgccgtactcggcgctccacccgctgctcctcccctcccctaacccgcacctcctcctcaagcccaagacgctgaccctctcgctctcctcgtcatccctcggctcgatgccgtcttcctccccgcctggccccgccgtcaccgacgcctgggagctcgtgacgcccaccgccaccgtcgtcgccgtgggcgctgccgccgtggacgacggcggcctcgacgactgcgacgtcttccccccgcgccttccacgaggggctcggcgtcgagggggaggcggaggaggctgcggcgaaggaagggagnaagacgacggcgaggagggatgatgatgatgatgatgatgaatttggtgatngggagtggtgtgggggtnggggaggtgccgcgcggcggcgagggcgaagcgt

SEQ ID NO: 65761 - DNA, 183 bp, Oryza sativa
  Clone ID: PAT_MRT4530_66778C.1
ataatcttcccacgggattaaataaatacgatacccttggaatactctcgggtgaaatgctacaatggtatatccgtgcgcttgcggataaattctgtaaccataatatactaggagtatttctgcgccattgctgggaattatacttttagtaatgtcattaagaaataccaataccggccc

SEQ ID NO: 65762 - DNA, 543 bp, Oryza sativa
  unsure (1)..(543): unsure at all n locations
  Clone ID: PAT_MRT4530_66779C.1
tcggtgatttcccatgagggtagatttgtgaaagttttacttttgggaaagagctgtgtcaggataaattaatgaatatagctgtgtggtcctgtgtggacgcaatatcctttttgggttggttggttggttaaaaataccgtgattgcaaatgttgtttaaattaaatttgtatccatttattgtatttaagttcgcaaatgcctttatgcaaatgaaccctaaccttcctttgaagccgtgtatcatatattgcatattcccgtacacttgcgagtacgttatgtactcacccttgttgtctcacnaaatttcagagaaggtcagctgtttccagaagttctgttgctgaggactgtcgaataggtttcgtgcctcagtcgattgcctatggtgtctcattggtgcctctcgattctttttccgctgtttatctttgtttggccctgtgtggaaagaaattgtaaaatctggtcataagaccatgtaaaaattatatttgtcttcctatttattaacataattgtgaaaaaaaaaaaaaaa

SEQ ID NO: 65763 - DNA, 762 bp, Oryza sativa
  unsure (1)..(762): unsure at all n locations
  Clone ID: PAT_MRT4530_6677C.1
caccgcccatctccctggcgggcagcctcggcctcgcgagggaggggaggaggaggagagtggcggcggcggcggcgcgccatggcgttcctgctcggcgccttcctcgggctggtgctcggcgtcgccgttgtcatggcgttcgcgcgcctcgagaacacccgcgctgagcagcgccgcgagctggctgctactgtttcatccttctcaaagttgactgtagaagatttaaggaaactaattcctcttgagttatatccatcatgggtgtctttcactcaaaagcaaaagcttaaatggctgaatcaagaattggtaaaaatctggccatttgtcaatgaggctgcatcagaactgataaaaacttctgtggagcctatttttgagcagtacaagtcattcattttgtcctcactccatttctcaaagttgacacttggaacagttgcccctcagtttacaggagtttcaattttggatagtgatagttctggtatcactatggagcttgagttgcaatgggatggcaatccaaatatagtactggacattcaaacaacacttggaatctcacttcctgtgcaggtgaaaaatattggattcacaggagtacttcgcttagttnttaagcctctggttgcagaactgccttgctttggagctgtttgctgttctttgagagagagagcaaggtcgattntaccctcaggttattggtggtgagatgacagncattcctggaatttctgatgcaattgaggg

SEQ ID NO: 65764 - DNA, 354 bp, Oryza sativa
  Clone ID: PAT_MRT4530_66780C.1
atgacgagcaagttccccgatgcagtaatactaatagaatccgtaagtaaaagtccgaactttcagatgcagacaagcagcagagttggggatgctcgatcgtgcgcgcccgcacatggcggtccggccggcctcgcagcgaacatggcggtgtggtgggcaggggttcgccgtctcagacgaggaaagcgacggcggcgggcggccggcgacggcgagggcttggcgagcggccgccctggggagatcgtgggctgctacggccggatgcaacgtgcggcccatattgtatggcccatcaaggggattctctgtggaataagttcactttggttccctctatttgtcgcctag

SEQ ID NO: 65765 - DNA, 127 bp, Oryza sativa
  Clone ID: PAT_MRT4530_66781C.1
atctcttcgaacggcacactaacccaatcaccatgactcatagtaaacaaaggccgaatgcccgacaacatctcgaatatcgtggactacaacgtccacctttgccattacctatatttaagggatg

SEQ ID NO: 65766 - DNA, 301 bp, Oryza sativa
  Clone ID: PAT_MRT4530_66782C.1
gttcgcatgaaggcaatttgtgtattggaagcaattgtaaggaaacaggatactgatccttattcaatcattacttcatatttctgtgagaacagtgcatctgttgttagatgctgtgagcttccgcacgtttctctcagagaaaaggcttcgaaggtcttaaatctgctggttggggaacaacctactggaagcaataatttttcagaaacaaagacaacagtacctgctgcacagatgcctgatttgattgatacaggggatcaagatgacccaggagctcaaaattcagctcaggaag

SEQ ID NO: 65767 - DNA, 1512 bp, Oryza sativa
  Clone ID: PAT_MRT4530_66783C.1
atgcaaccactcgctgccggcggcggcgtctcttggccgttgtacgccgccaccgtcgcggcggcgctgctcgtcaccgccatcgtcctgcggctcgccgcgcggtcgacggcggccgcctgcaaggcacgtccccccgccgggtctctcggctggccgctcgtcggcgagacgctgcagttcatctccgccgcctactcctcccgccccgagtccttcgtcgagaagcgctgccgccggtacgggaaggtgttcaggtcgcacctgtgggggtcgccggcggtggtgagcgcggacgccgaggcgagccgcgcggtgctgcagagcgacgcgtcggcgttcgtgccgtggtacccgaggtcgctgatggagctgatgggggagtcgtccatcctggtgctcggcggcgccctccagcgccgggtgcacggcctcgccggcgccttcttcaagtcgccggagctcaaggcccgggtcaccgccgacatgcgcagccgcctcgccgccgccatggacgcgtggcgcgccaccgccgccaccggcgccggcgcggccgtgcgcgtccaggacgaggccaagttgattgtttttgaaatcttagtgagggcactgatagggttagagcaaggtcaggaaatgaattacctcaggcagcagttccacatattcattgccggcctgatctccctgcccatcaagcttccagggactcagctctacagatccctcaaggctaagaagaggatgacaagtttgatacaaaatatcattcaagagaaaaggaggaggatctttgaaggcaaggatctctgcgctgtttcgcgcgacttgatcgatgtgctgatgagcaacgggagcgacgagctcagcctcaccgacgagctgatatccgacaatatgatcgacttcatgatccccgcagaggactccgtgccagtgctcatcacacttgccatcaagtacctcagcgaatgcccattggctttgcagcaactagaggaggagaacatggagctgaagaggcagaaatcagacgtgggcgaaaccctagagtggacagactacatgtcactgacgttcacgcagcatgtaatcacggagaccctacggataggcaacatcatcagcgggataatgaggaaggcagtaagggatgtggaggtgaaggggcagggtgacgtggtgatccccaaggggtggtgtgtcctcgtttacttccgttctgtccacctagacgccaacatctacgacgacccctatgccttcaacccatggagatggaaagagagggacatggcggccgcgactgccaacagtggtagcggcttcactccctttgggggcgggcaaaggctatgcccggggctagacttggccaggctccagacctccatctttctccaccacctcgtcactaatttcacgtgggtcgcccaggccgacctcgtcgtcaacttcccaacagtgcggctcaaacgaggaatgcccatcaaggtcacgcccaagacataa

SEQ ID NO: 65768 - DNA, 310 bp, Oryza sativa
  Clone ID: PAT_MRT4530_66784C.1
taactgctaactcgatgttctttcggtatgacgccattatcggaggtagccggcggagcacatcaaccgtcatacatggaaacaggaatcgaacggcacatgtgattgatctccgggcttcttctgaagttgattccatcgcacttttcgacaggtaattcgacgcatcccctacctggcgcgccaactgtcgaaacatgaattcggcaataataaaacggggtagcgcacgagacctaaaagtggatggatgcagagacaaaggatttagacaggttcaagccctctcaatgagaggtaataccctact

SEQ ID NO: 65769 - DNA, 318 bp, Oryza sativa
  Clone ID: PAT_MRT4530_66785C.1
atggcatttggtgttggtcgccttcctcatcctaaccagatggagaagaagaggaagctttaccagatcgacgaggcttgtgctctcatcaagcggatccaaaccgtccgtgactgctcatccaagtatccgacggcgcaggaaccaactgccctgtgccgtctgatggtgtccacgtgtgcggccgcgatgtgccttgagcagaggaggaggaaggggggtacctccgccgctgccgccgccgccgccgccgtcgtcggcggtgctcgatgccgcccatctgtccgcgagcgcagcggaggaagacggccggcgtag

SEQ ID NO: 65770 - DNA, 2550 bp, Oryza sativa
  Clone ID: PAT_MRT4530_66786C.1
atggcggcgcgggataagaggattaatggtggcctccaaggcttcgcggtgtcgtcctcgagcaagaaggagaaagggatccggatcttggatgcccctgcgccgccggagatcccgacgcggcgtgccgggttctctttcggggtaggtgatggtgaggaggcggaggaggaggtggtgctggcgccgtcgtcggcgctggcgagggcgcgggggtgcgacgtgtacgtcgggtacggcggcggcggtggtggtggcgcggcggcggaggtggagcggttcgtggcgtggctgtgcgccgagatggaggcgctcggcgtgcgctgcgtggcggcggaccggcggcggtgccgcgacgcgccgtcgcacgcggcggcgcgcgccgcgatggacgccgtggtggcgggcgtcgtggtcgtcaccccggcgtcgctcgggaacccctactgcgtcgacgagatccgtgcgttcgtggagaaggggaggctcgtgccggtgttcgtcgggctcgggaagggcgactgccgcgcggaggacgtcgtggagaagcgcggcgatctgtgggggaggttcggcggccacctgtggaaggtctacgacggcggcgagcgggactggagggaggcggttggcgcgctgtcccgtgctgatccggccgtggaggtggacgccgcgagccagaggcaccgcctgatcgatctcctcgagatcgtcgggtcgaggcttgggcggcgcgcggtgacggacgccgtccggtcatggcgcgcggcggcggcggtgcacccggagcttcccttcgcccgcaacgagcgcttcgtcgggagggagagcgagctgctcgatctcgaggccgtcctgttcgggaagaggccgatgcatctggtcgaggtcgaggtgttctgcggcgagccggcgttcatggacggcgtcgtgtgcatctccggcgcgtcgggcgccgggaagacggagcttgtgctggagtacgcgcaccgccacgccatggagtacaagaaggtgctgtgggtgcgcggcgaggcgaggtacctacgcatgggctacctcaagctcgccgaccagctcggcctcgccgtcggcgacgacctgtccctcatcgccgccggagaccggcgtagcagcggcagcaagaaggccgagaaggagtggatctttcgtggcttggagagcgacgccattgccaagatccgaaaggagctcacgcgcgagatcccctacctcctcgtcatcgacaatctcgagagcgagacggactggtgggacagccgcgacgtgcaggacctcctgcccggcgccgtcgccggcgccgccgtgcgcagccatgtcatcatcacgacgacgcggctgcgccggctgcagagggtcaggacgttctcgctggcgccgagcatggagtcgccggaggccatgctgctgatgacgaggaacggggctctcgcgttccacggcgaggaggacaccattgccctcagggcgatccagcagaaggtaggtagcatccctctcgccctcgcgctcgtcggcgcggtcctctccgagctcgccgtcagcccggcggagctccggcaagccatgaacgacgcgccgtaccgcgcgccgacgtgggaggagaacgacgcgccggcgctgcgggacaacccgggcatggtgcagctgctcgacgtgtgcttcgcgctcctggacgaggagaaggacggcctcggcgaggcggcggtgaggatggtcgagaccagcagcttcttcgctccgtcgccgatcccggtggccttgctggcggcggccatgggcggcgagcccaagaggccgctgtggaagcagatgaagctcgcgctgcgcctctcctgctcatcatcccggcgagcgctggacaaagactcctcctcccgccgccgcgccgccgccgccgccgccgagccggaggcgctggtggcgctgctgcggctcgggatcgcgcggcggtgcacgacgcagccggcgccgtgcgtctccgtgcaccgggtgttcaggctcttcggccgaaaggccgtcggctccggcgaggcggcggcgcgttccaccgtccgcgccatcaccgccgcggaggtgcacgacgaacacgcgtgggcggcgtgcatgtcggtgttcaagatcgcgccggccatcgccgccaacctgccgacgaaggagctgccccagttcgtcacgcacgtcgccgtgccgctcgccgcgcgaggcgtggttgcgcactcggcgtacgccgccgtcaccgacctgctcgtggagtccagcaacgtcgtccgcggcgaggagagcaggtacgtcgcgagcggcggcctcgatgagaacccagctctgtaccatgagcttgcacattctagggcacagctgctgaagctccgcgccaagctgatgctccgaggaggcgagttcacgctcgccgaggaccacagcttggcggtgatccacatcctggaggtggtcgccggcgacgatgacccggagacggaggaggcgagggcggccttggaccgcgttctgcaggttcagccagagtga

SEQ ID NO: 65771 - DNA, 429 bp, Oryza sativa
  Clone ID: PAT_MRT4530_66787C.1
atggaggaccaggccgcctgtgatggattgaggaggttcggcggccacctgtggaaggtgtacgacggcggcaagtgggactggagggaggccgtgggcgcgctgtcccgtgcggaatcggccgtggaggtggacgctgcgagccagaggcaccgcttgatcgatctcctcaagatcgttgagtcgaggcttgggcggcacgcggtggcggacgccgtccgatcatggcacgcggcggtggcggtgcgcccggagcttcccttcacccgcaacgagggcttcgtcgggagggagagcgagctgctcgatcttgaggccgacctgttcgggaagagaccgatgcatctggtcgaggtagaggtgttcggcggcgagccggcgttcatggacggaaaagaatgccatgggtccacgaaaatcatgctttag

SEQ ID NO: 65772 - DNA, 255 bp, Oryza sativa
  Clone ID: PAT_MRT4530_66788C.1
atggccggcgccggcgagtgctcctccgtgagaaccttcttcctctcgaggttgtccagagaggctaagattttgcaatcacctggactcattatcttgatgaggtctgttcagttcgttgcatctcaaactgttgagttcgtgcaggatctggcacagcagtacagtgcagagctaagccctgttttgtttggagatggagattgtttccttgtatatgtccaaagatatttcatcaactcttgtgcggaatga

SEQ ID NO: 65773 - DNA, 2026 bp, Oryza sativa
  Clone ID: PAT_MRT4530_66789C.1
atggccggaggcgagggcggcggggctgccgccgtccctgaggaggggcggtcattggcgctgacgccgacgtggtcggtggccatcgtgctcactctcctcgtcgccggctcgctgctcatcgagcgctccattcatcgcctcagctattggttgaagaaaacccaccgaaatccactccacaaagcaatggagaagatgaaagaagaaatgatgttgcttggtttcatatctctgcttctggcagctacatcaagaatcatctcaggtatatgcattgattcaaagtactacaacagcaatttctccccatgcaccagagaagaggttgaagaatctataaagattaagcatgccgtatctagtgcacgcaagcacctaattgaagtcattctgcaccatgcggccaggaggaaccttaaagctcgttaccatcataatcaaagttgcgctgagggatatgagtcatttgtttcacatgaaggtctggagcagctgcaccgctttatatttgtcatggcagtaacccatgtgacatacagttgcttgacgatgctgcttgctatactcaagatccattcttggagaaaatgggaagatgaagcatttagggataaccatgaatcattttctcagattgcctatatatcagctactagaaggcaaccagcacttggcagatcttattcattccgctcttggagtgaaaataatgcgatcaagtgtgtgttttgctttctcgcacaatttggtcaatctgttgttcgagcagattaccttatcctccgcaagggtttcataatgacccacaatcttgcaccaacatatgatttccatgattacatggtacgctcaatggaagaggagtttgagaagattgttggagtgagtgggctgctgtggggttttgttgttgctttcatgttattcaatatcaacggatcgaacttgtacttttggatagccattcttcctgttactcttgttcttctagttggcgcaaagctgcaatacgtcatagcaactttaacagcagagggtgcaaagatgaatgcatacggaccaaggataaagccacgggatgatctcttttggttcaagaaaccagaatttctcctgtggctgatccatttcattctctttcagtggcaatttggttatgattcatgcttcatcaagaaccacctgatagtatattgccgcctcatattggggtttgccgggcagttcctgtgtagttacagcacattgcctgtttatgcccttgtcactcagatggggtcaaagtacaaggctgccctgatcccgcgaaggatcagagagacgatgcatgggtgggggaaagacgcgaggaggaggaggaagaagcaccgcggcggcgacgactccaccatccgcacggagaccagcaccgtctgctccctcgacgacgacgacggcgacgacgagcacggccagttcgtcgagaccacgccgtcgcggccgtacctgaagatccagctgcagccgctccgcagcggcggtggcagcgctaggcccggcacgccgtgccaccccggcgtcgtcgggctcccgccgttgcacagcgtgtcgacgcagggcagctcgcacccgatgctgcagcggcaggcctcgtcgctgtcggcgccgtcgtcgccgtcgccccgcggcggcggcatgacgaggtcgatgtcgatgcccgggttcgcctcgctgacgcggacgcccggaggctcctgccccggcaccggcgccggcacgccgacacgcctgagcgacgcgcgtaactgaagcaaagcacacacatacacacacatacatagcagagctatttgtgagatagatgtaatttaactttaggaagggagttcgaatcggaggaattttggagaattttagaggatttcaactaaatcctgtaaaattcgttccaaaggagtcctgagtgtattggactttgtacatggatcaaccaatggtaattgaagcgtcattactggagaaccttcttccagctttcgacaac

SEQ ID NO: 65774 - DNA, 2292 bp, Oryza sativa
  Clone ID: PAT_MRT4530_6678C.1
ccacgcgtccgcgcaccttctcctccgcatcgaggcaaatcaatcaatccaatccatcccacacaccgcccatctccctggcgggcagcctcggcctcgcgagggaggggaggaggaggagagtggcggcggcggcggcgcgccatggcgttcctgctcggcgccttcctcgggctggtgctcggcgtcgccgttgtcatggcgttcgcgcgcctcgagaacacccgcgctgagcagcgccgcgagctggctgctactgtttcatccttctcaaagttgactgtagaagatttaaggaaactaattcctcttgagttatatccatcatgggtgtctttcactcaaaagcaaaagttgagtatttctttatctttgcttatgttttgatgttgttgatgtcgaggatttgtttgtgctaacactttattaattttaattagtacagcttaaatggctgaatcaagaattggtaaaaatctggccatttgtcaatgaggctgcatcagaactgataaaaacttctgtggagcctatttttgagcagtacaagtcattcattttgtcctcactccatttctcaaagttgacacttggaacagttgcccctcagtttacaggagtttcaattttggatagtgatagttctggtatcactatggagcttgagttgcaatgggatggcaatccaaatatagtactggacattcaaacaacacttggaatctcacttcctgtgcaggtgaaaaatattggattcacaggagtacttcgcttagtttttaagcctctggttgcagaactgccttgctttggagctgtttgctgttctttgagagagaagagcaaggtcgattttaccctcaaggttattggtggtgagatgacagcaattcctggaatttctgatgcaattgagggaacgatacgtgataccattgaggatcagttgacatggcctaatcgcatagttgtacctattgtgcctggagattatagtgacttggagctgaaaccagttggactattagaagtaaaacttgtggaagctagggacttgacgaacaaggatcttgtggggaagtctgacccttttgctgtgttatacattcggccattgcaagataaaatgaagaaaagcaaaacaataaataatgatttgaaccccatctggaatgagcactacgaatttgtggtcgaggacacatctacccagcgcttgactgtgaaaatttatgatgatgaaggactccaggcatctgagcttattggctgtgctagagtggacttgtctgatcttcagcctggaaaagtcaaagaagtttggttggaccttgtcaaggacctggaaatccagcgggataagaaacgtcgcgggcaggtacacctggagctcctgtattacccttttggtaaacaggaaggggtttccaatccttttgcagatcagattcagttaacttctttggagaaggtcctcaagactgagtctaacggatttgatgttaaccagaggaaaaatgttattatgagaggagtcctatcagtaactgttatctcagcagaggacttgccaccaatggatgtgatgggcaaggctgacccatttgtagtcctgtacctgaagaagggagaaaccaaaaagaagacaagggttgtaactgagacactgaatccaatatggaatcagacgtttgattttgttgttgaagatgccttgcatgatttactcatggtggaagtatgggatcatgatacgtttggaaaggattacatagggagatgcatcttgacacttacgagagtaatactcgaaggcgagtttcaggatgagtttgttttgcaaggtgctaaatccggaaagctgaacttgcacttcaagtggacgccgcagccaatttatcgtgatcgtgatcgggaccagtgaaatctgtgtagatacatcacgtcaagcagctgataaatatttcttcccctacggtgcctgtacattagtttttctgtacagttaattcacttatcttgtagcaacaaggtgtaatggaataaaagaatggtggtttcatgttccgacggaaatgcgatgtgctatgaatggagggttgcagaaagatggatggtaacacggggagatgggttacccaagtatggaaacattaagttcatcatgcaagcagatactttatgcatcttctactggtaaaactaaacgtgtttgtctttaaaatgcaacttgtaatataattccttgtactaacaattactacctccgtcccataataattgcatttctag

SEQ ID NO: 65775 - DNA, 473 bp, Oryza sativa
  Clone ID: PAT_MRT4530_66790C.1
aaactaatatctccaaaccccaaaatcattcacaaatcaccaccaaaataaattgacataacataatgaacatattcaacaacaaattcatcaacaaattcacaaaaaacatcatcgccatgtgccgccgccgcagcccatcgcctgtcgcctcccacctcccctcccgccagatccaggggaggggagggcgccgccgcaacccgtcacccgccacctcctgcctcccctcccgccagatccaggggaggggaaggcgcgccggcggcggctgaacccttgcggcggcgccttccgcctccctgcctccagatccgagggaagggagggcgccccggcaacccgtcgcccggtggctcccggcagatccgagggaggggagggcgccgccgcaacccgtcgcccgccgcctcccctccagctggatccgacggaggggagggcgcggctgctgccgcctccgccaggccgcc

SEQ ID NO: 65776 - DNA, 279 bp, Oryza sativa
  Clone ID: PAT_MRT4530_66791C.1
cccttcgtttgcttaaattttggattgcaaaatggagatgggttttttagtacatatttaagctgttgcgcaaataatattggttcatcacaccaagaagcaatggtatgaccaccaaggggagctctagattggatgaagacactgatatttactctattaatttttgcccctctctttggttttataaaatattgtatacaagaattccaacaagagtttttattttactcgatatatattcatatatatctttgggcatcaaaaaaaaaaaaaaaa

SEQ ID NO: 65777 - DNA, 2079 bp, Oryza sativa
  Clone ID: PAT_MRT4530_66792C.1
atggcacatgcaccccgggtgcacatgagtgaggacaaagtgtgcagcatggcacatgcaccagaggcaaggacctgtccaagccaagcgagcccctgccaggcccccagccgctccttggaaacccctcgaatggcgcctcctctcctcggctgcaccgacgcgtcctggcggaagcactccacacagccggcccggcctggccacgccttcctcggacggagggggagccgcctaggcttagccgacctggccaagggccgacctacctgaagaagggggcttcccgggcgggctttcgtggaccccgtggacgagcagaccagaccctcacccaagccaggccaggaatccacacccggggatatgaggcccgttatttggggcactacttcaaaggcacagaatcgcatgctttgtggatgaggactgagctaatgcatgactctgcctctttttgcttaatcttttgtatgctatatactatgaagctcttggtgtatttcttggaaagggaatgagtgaccccgttgtataaaattggctgccaaaccggtaaaacattctcagccgggggataactggtgtccaccaattggtgccggctgggaaactggtatctatagccggttcgtaaccggtacctatactgatttctgtagtagtggcggcagagcagccgcggagggctcgggctcctggttcctcgtcatggaggacgaggcggccctcgagcgggcgaccgtctgctgtgggttgtgccatggcagtggcacacaccgacacacgtgctcggcctcccctttccgcagaaccggaaattcgtggtggatggagcgatacatgagaggatcgaagaaaatgtacgtcacaaggccgttgtcaaggtacctggacaacccagaggcagcggcggagccactgccagagggcccaggatctgggttcctcattgtggaggacgaggcggccgtcgagcgggccaccgtttgctgtggattgtgccgtgacccgaaggtgcacaccctccccttccctcagagccggaggcttgatgtgggtgaagacgacattgtcctcttcgtccccgtcgtcggcgagccgttgtcggccggccgctactacgtcgtcaaggccatcggccaccacgctgggaaggtgttggcgtgctcacgggaggaggacaagacaaggatcctcttcttctcctttgtggacgatgcgccaccgaggccattccaccacggcgacatctaccagcaggtggaggtggtggccgtggcgcaagcgtcacactggctgaggggattcaaggcggtggcggttgcgccggatggcatcccgccgagcttgctgaggaggaagggctgggaggtgagcaaggccatgcgtacgagctacgacggcctcaatgacgacgcgcacgggatagactggccgctccgtcgccagatgccagacctcgacggcttcggcatcggcgcgggaggctcgccggccaccgtcgttggcaagtggtactgcccgttcatgttcatcagagacggcgagcagcggctcaaggaccaggtcaagcggtgcaggttctatgagatgacgctagagcagagctgggaggagatataccgctgcgacaacactcaccggggcagcatcagcggcaagccgccggatgagatcaaggtgaacgtgacagtgcgccggtcgacggcgctgctgggcggcaccggtgcagtagtgcaagaaggtgggcctcaggtggtcgatggggtgatgtggttccgaccggcggcgccgccgacaaactctggcgtggcaggtggagttgggctggacatggtggtgtgggagaagatgaagtgggagctggagagaggagggtgggtcgccggtaatggcgacgtggagagttcgagaggggtggaaaggggtgaggcgcgggtcattgggacaaatttgggtgctacctgctgcttgagagcttcgtgctcaggaggatggacggcagcgttgcactcacctgtggtttcaggcacaccagcaagattacaaccaaatgggtatgatcaaacgatgtaa

SEQ ID NO: 65778 - DNA, 348 bp, Oryza sativa
  Clone ID: PAT_MRT4530_66793C.1
atggatcaagcagcgctctggagcaacaaggacacctcacagttcactgttcgatgcgggggagaaggagcacagcgtccggcgggcaggaggccacctctacggctctacccatggccgccgtcagcgtcaggccaagatcgacaagaggtaaccctcctgcgcctgctccccccatgccttgtcgccgttggatcaagaagcgccgccgttcctccctcctccaaggtcgtcgccgtcgaatcgagaagcgccgcttctccccttgaccatctccttgggatcaagaatcgatgcgagaaggcattgagcctgccgctgccgcggggaatgaggatggagaattga

SEQ ID NO: 65779 - DNA, 689 bp, Oryza sativa
  Clone ID: PAT_MRT4530_66794C.1
gaccgatttcccaaaaaaaaaaaacaaaaaggaaatcagcctgaacgccggcggcgctcccgccgcgctcgagctctgctcctccgatggtgaccagatggagcgagaagggccccggcctcaagatcctgtggatctggaccctgggaaccgctggaattatgattaccaatgtcgtccggacgcgcgtcaatgatatgcagaagatcctccaggaggaagacgaagcagcagcagccgccgcccccatggcctccggcgagcgtgtcctgaaagacgatgagtagaacagaacgtctctacttatcaaaattccctgaaccccgctgttgtgccaagctgagttaggtattgtttatctggttcgtcttagtggattttactggtaaaacagctacttgcttgagcggaagtatggaattacttgattcaaaatactgggtcgtctaccatctcatttagaactttttagatcttcatacagtgaattttctgttggctagaaagaaggtgatcgaacatcttcaggcatagctataactgagaatcctgagggtgcagcaatgagaacatgcagtgttcctcaaacatccagctggtaaaataacctactgctgcttctgtgtccattactccctccgcccccttaaaaattaaaccttcgtaccggtggtgcaacatcctggact

SEQ ID NO: 65780 - DNA, 363 bp, Oryza sativa
  unsure (1)..(363): unsure at all n locations
  Clone ID: PAT_MRT4530_66795C.1
ttatgaagctcggggatggatcaaagttagatgtatgggaaaactatgcgacgtcataccaaggtgtatagaaatggcatattgaattttattaacgccgcggaggaggataggaaaagaagaaacaacgattgcatgtgttgtccatgtgcagattgcaaaaatgagaatatgttttacagcagagtggacgtacacgctaatctgatacaaagagatttcatgaagggctacacatgttgggtgaagcatggagatcaaggatcaagaagtggtgcacaaaatctagaacatgaagatcatgagcatgaatcaggaagtggtgcacaaaattaggaagagacagccagnnntcaatgacgt

SEQ ID NO: 65781 - DNA, 316 bp, Oryza sativa
  Clone ID: PAT_MRT4530_66796C.1
tttaatttattaatcaaaagaaacaaatggacaacagtggtagctaatacaatgaggcagtagacatggataataataagagaacgcagtggcacggcaacaacacgagaacaaacacacacacaccttatttcatgtcatttttatttaattaacctggtgatcgatcgatcgattgacaaaacgctagtgcgcatttttttattttgcgggcaaatttttcttattccgccaaagaaacaaagcgaatcatcattgccggcgccgggaccggcaagtaaccgcagctgatgcttcctgttgatgaagaggggct

SEQ ID NO: 65782 - DNA, 414 bp, Oryza sativa
  Clone ID: PAT_MRT4530_66797C.1
cttatgctcacaggtcagtcctaccacgtccaacaggagaagtgatagagggagaagacgacactggaagaggaggagctgactagccgccatggcaggcgtctccttgctgccgggacatgctcctgcttggggcgtaggcggtggcgagcgcctacattgatgaagcgtccgctgctgggcgggcactcgcacatggcgcccgcttcatgagcaagcatggccgggtgacatacgagacgctgacggagccggagccgaagccaacgccagcgcctcatccttaacccacgcctaatcctgagcctacgccagagccgtagccaaacccagcacctgagcctgcgtctaagccgtaaccaaagccagaaccaagacctgagcctaaggctgaacctaaaccatacccagagc

SEQ ID NO: 65783 - DNA, 562 bp, Oryza sativa
  Clone ID: PAT_MRT4530_66798C.1
atagacgtgatactatacgcgtttagaaatggccggtggacctcttttttccccttgcgattttgcatgacttctcttaatccaaggaactagataagcttgtaggacatgttggaatttatgctgaagattataatgtcggtgatcttttgtgttactaggtcaacttaaagacttcatcagccatgttaggagaagttcagaatttcttggatgtacagattttccaaaggttgttgaaataatggttaaatccggaatgcacagatcgtagcgattggtttatcgactcactgagctaacatcgatactgccggtggcataacggcttcagttgagagagtcttttcagccacgtcgcttataaagatggatttgcatatcaaattgggggatgaatggctcaatgatttgatgatatgcgacattgagaaggagatattcatgagcattgataatgaaaaaacaatcataaaacaatttgaagagataaaaaaaacatagtatatgttagtgccctcaaaacaatttactggtatattctctatcctattgtaatgct

SEQ ID NO: 65784 - DNA, 432 bp, Oryza sativa
  Clone ID: PAT_MRT4530_66799C.1
aatgttattgtggctcctgttcagtgataggctcaataccagggacatgttggatagaagacattgtgcaaaggaagatgatgatctaacatgtgttgtgtgtaatggtgagtgtagagaaactcggcttcatctcttttctgcctaccctagcattagatgtaggcaacacctgggaattgaatggaaacataacctggaatttttcccaacggttgttctcgtgagattgaggtttggtcggagaggttttctggaaatattttttatagcctcatgtatatttggaaacagagaaagaggcttatcttccaaaatatcctgcctatgttccagtcttggaggttgctttttgtgaatgaagttcttctacatatgtgtagaatgaaggatcctctaaaacaatctgtttttgattggttacaaacctta

SEQ ID NO: 65785 - DNA, 3307 bp, Oryza sativa
  Clone ID: PAT_MRT4530_6679C.1
atgctgcggcaacctgcaagcacctctggagatgttgatagaattgcaaacaggaagcatcgtcacatagtgcctaggcgttcaacagaaaagaagaaccctcataacatccagtttgaacgtcaagtagctgcgcttgaatacaggcaggaagaacagaggaagagagccaatggtggtcgtttattcttcacattgtctttatcatcccatctcgtggaaaatggagatgaacttgagacatccgcatcaccatcattgttactttttcacttcaatgatccagaggatttggcaagatgtttaacttcatcaagggcgttgctagaggactcccaacaatcagacaaagcccctgataatgatttctcagtcaacaccttcagcaacgcgagtgtggacgtgaaacaaacttcacgaaagaaaagcaaaaagaaaaacaagaggcacaaaagagtgcatggcaaaaaagtatctgaggcatctgacacacagtctatgcagagcaagggtgcttctcattgcatcgatgttgctggtggtgaatccttgacactttcatccaaccatgtggctcatgctggatctgaaatgcggtgtagaaaggagacttttccttctatggctgatggaggtgaaactttgacactgcctccaaaccatgtggctgacaaattgtttggggatttgtcttctgattcttcagtgagagaagtttctgcggagagacctgatagtgaaactggtaacgatggttctttcataactctgatatcaagtacatcttgtagtgatgagatagaattgtctaggcatgcttcttattttgaatgctgtgagcaatctaacagcaataactccagatgtttggacagtgcctccacttccactcttactgattcctctttggatggccattacacagatagcagttggaacttcagtgatgataccgagaacttgttgattgacaaaaatgagtgccctccgtgtgttcagtcaaaagtgacagatatcaggggttctaaatgtggtggcagtgaaggttggctaaacaaagcaaatcatgataaattctcctgtttcagaaacagtgctgatgcttgcagtggtacacaagaaatgcaatcatgcagtaatgctagtagcgatggtgatttcctcccagtaatttctagaaaaagagcccggaaaaatagaaaggtccaacctttggggggttgtaatgtggaacatatttgtggtgttgagcatggtcaaagtggaaaacaatccaaaatttcttctagaccaagtaattcttgcacacaagttgcatcaaaagattccactaaggatttcattcacccaattaaagttcgcacatggactccacatgaagttacactaaatgattacatgataggagcaaatatgaatcacctccaggatccaaaacaaaaccgtagggggaaaccacataagtactctcgtttgagtgaagcggcaaacggtggttttattgaagagaagagtgcctgtacagcgaaaatgcttcctggaattacacactcaacagaaacaggtgttggtcagatagcatcgagttcagcttctgatgtgacggtccgagagatatctgaggaaatttgtacgccaataggtcctgtgcagaaaggagggctgcagattttgtttcgagaagaaaatgttgttggcacaggttctcttgatgttttgaatcatgtttcttctgttgattccgaagaacagaagaaagtagataatgctgtaatgagcagatctcattgcatggaaggtcaccatctacaatcccaagattcaggttctcagttccctggatgcaccacagattactggaaaacttccaggcctactgaaagtggtttggaggttggctatcatggtgtatcagcttttgaagggcgctgtaacacgaaccagcaaagatctgttagttctaaattgcaattaggtgagatgatcaaggctgcaaatgatgcctgcaaagtgcaaggacccgcaagctggcagctcaccatatcaatatcagatatcggatgtctccttgagaaatgtgtgggaatgtgcaagaataacttggaccataagtttgacagtgatgatgatttcttattatcccaaccaaatggtgtgtatttaccaaaaccatctttatctgtacaaggccatggcgaacccctgtttgaatattttgaatcagagcatccttcttcacgtcctccactttttgagaagatcaaacagcttaccagtggtgaaaatctctctacttgccaaatatttggggatcccaagatgttggaaaatcttaaattgcacgatcttcatcctgcttcctggttttgtgttgcgtggtatcctatttgccgaattcctcaaggaaactgccgtgctgcattcctgacttaccactccctgggcaaagtagttccccaaattcactctccagacaaggctgatgaacctactcatttggtttgtccagttgttggtttctggagttacaatgacaagggagagcaatggtttcaactgagaaacccagagatcaagccaatgtcattagacgttggccccaaaactgatcgtgctgaagtcctgaaacagaggctgaagactttaagacatggtgcatcagttatgtcaagcatggtgatacccaaggccaacggggagaagtctatcaaccgtcatccagactatgaattcttcctatctcggtctaactgaatggttgcatgatctccacggcatcgaaatacatcatgttctctccattacctgtactgtatgggtcctagaaccagaagcacctccatagtcccaacattcagagtttcagactatgctctagcgcggtaccatcataccaaggctggaagttgatgagctttagctctttctagtagtagactggtagcagaacacccgaagggtttttttttttggttttttgaaagagcgactcggcccgtgggttttcgacttcagatgcttgcccctttaagtaaatcctttaagacttagagcgttgcttctgggtacctgcagatgggttcaaggcctgtagtgtatgctgttgcttgcttgaaatgggaatttttgtccatgcagatcgatcctccaggcggtttttatatgccagatagtagaagagttctgtagctaggatgggctcgtttgaatgttctcaatgttattttcgcgaggcaattttttttgccaccaggaggaatgtcggaatgtaggacagttgaatatatcccatatgtagaacaagaga

SEQ ID NO: 65786 - DNA, 945 bp, Oryza sativa
  Clone ID: PAT_MRT4530_667C.1
ttttttttttttttttttttcaggtccatagtcctctatgaatatatatgaacttattgtatgtttgatcaaagttgtcattacaatacgcagacaaaatcaattcatattcagaatacagatacattgcgtaacaaaatcacttgatcgaaaaatttctcagctttggtgaagcattatctaaaaaagtgttgttcagggaagagaggttgactgtcaacgcaaagcagaaaccaatcagctcaattatatcctcgccaatgctgcaggactgattggaatgatgccagaggatgagaccagagcatcaataggaacatctgttgagttgactgggatgatgccttcctccaaaatttgcaccgagtatgaaagcgcgactagaagaggctgatcccaccctttctctttagcaagttcttgatatctcatcaagaatgtgtcatagtaccctccaccacgtcctaatcttcgtccagtcctatcaaaagcttgtccaggcaatagaaaaagatcaacaggggaagaggttgacaacacttcttcacgagcattcccactagcatcaagtggtgatggttctagaatgttcattgaatttttaactaaatcatccatggtagtgattttgagcatccgcatattgcgattcttatcttccactcgaggaacataaagatcctttgcatgtccatgttcagaatttggggataaaacttctgacagtacttttgatgtatcaacttcccgcaattgtgcacagcttatataagcacataaccgcttgctttctttgaaccaagaagagttcaaaattgcattttgaatagcctggtcttcgctggcgcgctgctcgggggtgagggccctgagcgccctccgcacctcggaccgcagcgcgcgcttctggtcggcgacctcctgcgccgccgcggcactcgacat

SEQ ID NO: 65787 - DNA, 312 bp, Oryza sativa
  Clone ID: PAT_MRT4530_66800C.1
tcgagttttttttttttttttttagctaattaatggcatactatatatcaatatatgagcaagaataatttatacaagcatacaatattacaatctcatcagaaaataacttatccctcgatttaacatattgtgcaagatatttcacaggccaagcaggggcagatttacccattaggtaggctcggtcgatcgacaaaggtcaggccataaagttccaatcgaatcgcatgagactttgtttgtgacttgtttttttcactttcttcattcattcctcgcatgcatggtctctgaagaggagcttttaac

SEQ ID NO: 65788 - DNA, 629 bp, Oryza sativa
  Clone ID: PAT_MRT4530_66801C.1
tttttttttttttttttttttttgggcagcaaaattttgttttttttttgggcaaaaaaaaaaagtttatatacagcaaaatttacaaggatcgattctgttccaatgtacagaaatacacacacacacacgtacacacgctgaagaattgtgcatttgcagtttttgcagagaatatttacagactgcaatgcccggtactagcaggagccgaggtccaataatccaaaagcaagtgggacaaattaacaatggaatagcaattcatctctacatgttatcataggttagcacattatcaagaagggaataggtttcctctatgacgcgcgcgattcgtgttgatcagcattatgccttgctttgcaaaggtacaatagccttgaaacctcaggaaggacatacccacattcagcgctgcttcaaaatcccactgctactctctctcttttttttgttgctgttttctttttatacatctttttttgggtttccatgtcttccttcatcgatatagttctgcgtcttcaaaaaacgtcgtagaacaaacgggacatactaatattatacagcgtagctaggagatctgagttctgacgagaagaaacctgcagcccggggatccacta

SEQ ID NO: 65789 - DNA, 1274 bp, Oryza sativa
  Clone ID: PAT_MRT4530_66802C.1
ccacaaaatggtctaaataaaataatttcatgatccaatctgacatctgacatataaacactggtcatttactcgggaataaaacatgtcaaggtgactctgactcctgagtcgtcactgactctctctggtgagtgaatttataacgaatgacataatgccatatgcataatttacatggacaaactccaactagtgctgaactgctgatcagagaacgagggagaggaagatcggcgacgccagcagcagcgcgcagagcgcccggcgagcgccggacatgacgctgtcggcggcgtcgaagggggtcagcgcgccgccggggctccccgtccccgggaacgtcggcgacgacccgttgccgaaccccggcgtgaacgggccgacggcggacggcgcgttcgccgccggcgtggtgcctccggccatggagcttcctgagaagacgcattgccctgaactggggtcggtggcggtggtggtggcggtgccgttgaagctgcaggtggcgccggcgccggagttgcgctggtagtagtcgttgtaggcgtaggaggccaacgccggcaggttgttcgccttgtagcacgggccccccggctggatcgccgcgcagttggcgtggccctggccgcaggcccagttcagcccttcctgcagcgccgtcgggtccgcgttcggcagcgccacgcagaacatccccgtcgccagcgaccgcctcttgccctcgccctctgtcgccggggagatctgtggaccgatcgcctcggcctggccgccgctgctctcaagaagactcccggatgcgtctgcgaggagaaaggcgaacagaagaatgctgcatcttttcaatcttttggccaacattgtactgctccaagaaccctccaagagcaccttggccaccaactcgccaagttcttagcttcttccaactgccaagaacaatctcttgttcctttcttgtggacagagctcgaacttatgaagtctgaaccctcaatttgcgggatatgagcagagcctagcaaggaaacctggatatgtggtctttcctaccttctattggcactaagtatatacgaagaggagcgatttggctgtaattttgctttggaaacagattagaagaggtgcaattcggcactaatactaatactgccaagagattatatgagagagagagagaaaggagatagtgtaatggttcagacttcagaggaacgcagagtagttggtaggcagaaaaaaaaacccagcagattttcattttc

SEQ ID NO: 65790 - DNA, 386 bp, Oryza sativa
  unsure (1)..(386): unsure at all n locations
  Clone ID: PAT_MRT4530_66803C.1
ggaaggacacacgaagcatcctaagaanctccacttgatgtggctctcccatctggatgtttcggtgtgtttcttgtgttgacagatgctggagcttgaagtaaatgcctctgcatatgcttctatcctacactgaaccactgctgctgtacgtacccaatcatctgaaaccagttcagtactatggtctccacaagaggaccccaatgcaccaactgttgcctccattgtagccaacattgcactaccagattcatgaccctgctgctcgcaccaactagtgtcattgatgagtgcgtgcatgtcatggaccaatttgttgctcatctattcaaagcactaatggatatcctctggaaagtgaaaagttgaaaaaaaaaaaaaaa

SEQ ID NO: 65791 - DNA, 557 bp, Oryza sativa
  Clone ID: PAT_MRT4530_66804C.1
tcccctgatggaagacatcttgctatgatgccacacccagagcgttgcttcatgatgtggcaatatccatggtatcccagggaatggcagcttgagaagtgtggtcccagtccctggctgcgcatgttccagaatgccagagaatggtgtttgtagtgcaggtacctaattgatggccatatgatgaatataaaagcttggagctgtggactcatttggataccgaaacgtggtgatatcagatgctggtgcgatgcgctcagcagtcagcattgttgttactgaggatcgaataaatgggttcagcgaaataattaaaagcagattttatgattctttcttgcagctctgaatcttgctgctggtttgaaactaggaatcctgtaaggctagtagtgttttattaggcagaggtgaggaggcctcaggcctgcaatgctgttaatgagaataatcctgttggccctgcagtgctgctttgagaatactatagcagaacaggacacatgcccataatgtgttgttcgattgtcccatgatactgtcatctttcttct

SEQ ID NO: 65792 - DNA, 736 bp, Oryza sativa
  unsure (1)..(736): unsure at all n locations
  Clone ID: PAT_MRT4530_66805C.1
ccggccgggacacaccacaaaaaaaccaacccaaccgccgccgcatcgccctcgttagaacgatggccgcgtcggcgctgcaccagaccaccagcttcctcggcaccgcccctcgccgggatgagctcgtccgccgcgtcggcgactccggtggccgcatcaccatgcgccgcaccgtcaagagcgcgccccagagcatctggtatggacctgaccgtcccaagtacctgggcccgttctcggagcagacgccatcgtacctgaccggagatcctgtccaagaacggggtgaagttcggggaggcggtgtggttcaaggccggcgcgcagatcttctccgagggggggctcgactacctggggaaccccaacctggtgcacgcgcagagcatcctcgccatctgggcggtccaggtggtgctcatgggattcgtcgagggctaccgcgtcggcggcggcccgnctcggcgagggcctcgacaaggtgtacccaggcggcgccttcgacccgctcggnctcgccgacgaccctgacaccttcgccgagctcaaggtgaaggagctcaagaacggccgcctcgccatgttctccatgttcggcttcttcgtccaggncatcgtcaccggcaagggccccatcgagaaactcttcgaccacgtcgccgaccccgtcgccaacaacgcctggggatacgccaccaactcgtccccgggaagtgagcacacgacccgatcg

SEQ ID NO: 65793 - DNA, 1134 bp, Oryza sativa
  Clone ID: PAT_MRT4530_66806C.1
ggcacgagaaccaacccaaccgccgccgcatcgccctcgttagaacgatggccgcgtcggcgctgcaccaaaccaccagcttcctcggcaccgcccctcgccgggatgagctcgtccgccgcgtcggcaactccggtggccgcatcaccatgcgccgcaccgtcaagagcgcgccccaaaacatctggtatggacctgaccgtcccaagtacctgggcccgttctcggaacaaacgccatcgtacctgaccggaaagttcccgggagactacgggtgggacacggcggggctatcggccgacccggagacgttcgcgaggaacagggagctggaggtgatccactcccggtgggcaatgctgggggcgctgggctgcttcttccccgagatcctgtccaagaacggggttaatttcggggaggcggtgtggttcaaggccggcgcgcagatcttctccgagggggggctcgactacctggggaaccccgccctggtgcgcccccagagcatcctcgccatctgggcggtccaggtggtgctcatgggattcgtcgagggctaccgcgtcggcggcggcccgctcggcgagggcctcgacaaggtgtacccaggcggcgccttcgaccatctcggcttggcggaggaccctgacactttcgcggagttcaaggtgaaggagttcaataacggccgcctcgccatgttctccatgttgggtttcttcgtccaggccatcgtcaccggcaagggccccatcgagaactttttcgaccacgtcgccgaccccgtcgccaacaacgcctgggcatacgccaccaattttgtccccggcaagtgagcacaacgacacgatcgagatggtgccaaccaacgtaccatgtgtacacttgtagtagccacgcaccgaccctgcagttgcagttgcagcagtgcatgtatgtatgtacctcaattgtgtgtgtgtgtgtgtgatcgatcgaggagatttctagcttaattaatttctgtctgtcatcatctttgcttctttggatcgagatttaatgtaagccgcaggccgcatccaagggatgatcgaattaaaaaaaaaaaaaaaagggcggcctgcgcggacgcgtgggcggacgcgtggg

SEQ ID NO: 65794 - DNA, 589 bp, Oryza sativa
  Clone ID: PAT_MRT4530_66807C.1
tgatcaggtaggttggataaaagttctgctttgcttctagctatgtccgctagcatattcactgttgcaaaataaacgtaatggagccagttttcaggttacaacttccaatctacataatttaatattaagtgttttataacatttgctctattttctacattatcaacaagaaccagaatgagaagactttaccaagctagaaataatttcaaacttgcagttgcaggctatggctcaaagtcccgcatattcatctttaagatgttaatttggaagtttcctccacagcgaatttttattcttgaatagctttttccatgaatcaataacgctatactagacatgtaggatgaacagccaaatttgggcattttcttcctaaatttttttttctaacatgacaaagggattcggaattgtcgttttcttctgcctgtatttgttaatgtacccttagcataaggatgtattagtgcatgtcatcggtctatattaatttggctctgacatctaatggttgtgtatggattgtgtatatcattttttttccacagcaacatgtacacacaataaaatcaattactta

SEQ ID NO: 65795 - DNA, 724 bp, Oryza sativa
  Clone ID: PAT_MRT4530_66808C.1
gactccttctagatgtctcccttgttcatctccgttgacctacttcccccaatcgtctccaactctccatcgcccatagctttctctcatcttcggccctgcaggctgcggcctcatcgctcgtccctgcagcctcccgctgtcctgccagattatctgcctttgtttgtttgatggcctcacctgcatcaccgagagagttcactcaggaagctgcccgtcagtctctgattgcgatctcccggtctgttccagcggcaggagaagccgtcaacatcaagtcaccgagcggcgccatggtgaatggccaccaccacgacgatgacggggcagagaagtacagatcaaagctcatctccatctccaacctgtcgcctgatgcccagcctacgccgtgctctcccaaggacaccgctgctgcttaggcttaattaaccgtgtgaccatgttactgcttacacttccaagtgtggatatcgtgtcccagcgtgtgtcgctaaatgctgagactgtgatcaggacccttggccttaataactgccatgactgtatatggtcttgtgatgaactgcccagtgggatactgcccttcttatgtgtgaaagatgcatcatggcctgaaatcttctcgcgtgtaaaatcagtacagcagttacctgaaaactgttttgcaaatgcagtggatcactatcttgttcttctttaaaaaaaaaaaaaaaaaaaa

SEQ ID NO: 65796 - DNA, 1446 bp, Oryza sativa
  Clone ID: PAT_MRT4530_66809C.1
gcacgaggcctcgtgccgaattcggcacgagggagagagaggaacaagtctcgcgccgttccaacgaatgccgacacggcgaggctagcagcagtacacatcatctcagaccacacaccacaaaaaaccaacccaaccgccgccgcatcgccctcgttagaacgatggccgcgtcggcgctgcaccagaccaccagcttcctcggcaccgcccctcgccgggatgagctcgtccgccgcgtcggcgactccggtggccgcatcaccatgcgccgcaccgtcaagagcgcgccccagagcatctggtatggacctgaccgtcccaagtacctgggcccgttctcggagcagacgccatcgtacctgaccggagagttcccgggagactacgggtgggacacggcggggctatcggccgacccggagacgttcgcgaggaacagggagctggaggtgatccactcgcggtgggcgatgctgggggcgctgggctgcgtcttcccggagatcctgtccaagaacggggtgaagttcggggaggcggtgtggttcaaggccggcgcgcagatcttctccgagggggggctcgactacctggggaaccccaacctggtgcacgcgcagagcatcctcgccatctgggcggtccaggtggtgctcatgggattcgtcgagggctaccgcgtcggcggcggcccgctcggcgagggcctcgacaaggtgtacccaggcggcgccttcgacccgctcggcctcgccgacgaccctgacaccttcgccgagctcaaggtgaaggagctcaagaacggccgcctcgccatgttctccatgttcggcttcttcgtccaggccatcgtcaccggcaagggccccatcgagaacctcttcgaccacgtcgccgaccccgtcgccaacaacgcctgggcatacgccaccaacttcgtccccggcaagtgaagtgagcacaacgacacgatcgagatggtgccaaccaacgtaccatgtgtacacttgtagtagccacgcaccgaccctgcagttgcagttgcagcagtgcatgtatgtatgtaccttaattgtgtgtgtgtgtgtgaatcgatcgaggagatttctagcttaattaatttctgtctgtcatcatctttgcttctttggatcgagatttaatgtaagccgcaggccgcatccaagggatgatcgaattaatgatgtatcgttattataggatctacaacgaagccagctaaaacgatgccaatttgtgcgtcgacccaataaatcggtgcgggacccagttcacgcgagcacgccagcgttgcgggcttgcgtctcgcgctcccgcgccccagctggaccctgcgagcggctaaggaaaatgttcactcggggtccctcgtcttatggaaaagtgttgagttttagaatcatcgctaaaaaaaaaaaaaaa

SEQ ID NO: 65797 - DNA, 353 bp, Oryza sativa
  Clone ID: PAT_MRT4530_6680C.1
gggcaaaacgccgaccaagaaaatcaccgggggcaccccaacgtcaggggccagggtttttttacaaaaaaaaccctcccggccgtagccgaggagactctgcaaaaaaagacccacaggcaagcaatccccccctttttggaaaaccgagggccctaccggaaaaaggggggaaagccctgttgaacgcccgtgaagctccagaagggcttttgtccctgcctgggcagatgggactcgaaagaaccaggtcagacgcttaaggggccctgccccgggcttctttttggactgttgaaaaacgggctaaagagctcctctccgaacggggaatgccggctggggaaccggac

SEQ ID NO: 65798 - DNA, 945 bp, Oryza sativa
  Clone ID: PAT_MRT4530_66810C.1
atgtggtcccacatgtcagcctccatcttctctctatcccccctctctctcccccctacactgccaggagagaagggtgagcggcagcggcgagggggcgacgggcggagcggtgtggcggctggtggtggacggagtgacggtgggcggctggcggcgggaggaagcggagccgagcggcagcgggcggtgggcggagcgacaagggcagagaggccggtgagccgccgctcctcttccacccttccgtcagccgccctctccaccgccggtcgccgacccaagcgcaccgccattcctctccctccctcccgccggccggcgcacgccgccgctcctctcgcgttggaggtgcacgcggcgtccttggtgaggtcgccgccgctccgtccgcctctccgctctgcccgcggcatgtcgctgccgccgcgaggacgagggagagccgagaggaagaagaggaagagccaagagtggagagggagaggggaggggagccggggagctcagcttaggggggcggcgggagcggcatcatcggcgtcgctccgcccaccgcccgccgccgctgcgcccttgtcgctccgcccaccgcccgctgccgctccatttcgcctcgcttcctcccgccgctggcaagtgcagaagaacatacaaatggcgattccgtggtcactagtgttcctgttcaagcacgccaactcgagggaattccagctgagccctggagggaacaaagacaagggcgccattgccgagcagcgggtgtcgctgctgcgatcgtggctgccgctgctctgccgcggcagcaacggcacgaatgcgccggtgctgagcagcatggagaggacgttgctccatccaccgcccgccgccgcgctgctttgctccgtcgccgctctgcccgtcaccccctcgacgccgccgctcgccgttctctcctag

SEQ ID NO: 65799 - DNA, 447 bp, Oryza sativa
  Clone ID: PAT_MRT4530_66811C.1
tcaatcaggccttggaagaagaagcctagccgaaagtctgtttctcctccctgtcgctacagtggcatcttcaacctccagccagccgtccagagcccctgttcttcccgatccggcgccgttttctcctccaaatccggcctcttctttcgatactgtgggttgttgccttggttcgatatccagccgtgccgttcgtcgtcgtccgtcgtcgccttcggtcgccgtagccttcatcggattcgcagctgtaaggagaacatcgtccaccacctcttcttcgccaaagatcgccagaaagccgttgccgtcgttgatcagtaccccgtcgccactcctgatctcgtcgctggccatctccttcgttgttcatcgctgcagccgccggcgttgatcctgcgtggttgccatgtcatcgccttgtcagctgccgtccctgccatctaa

SEQ ID NO: 65800 - DNA, 286 bp, Oryza sativa
  Clone ID: PAT_MRT4530_66812C.1
cctggctgagctcattcgaccaagattgtttttaatgccacaaggtagaactgcacatattcgttggaataatgtgtgcacactgtcacaagagattgataactggctgtgtgtgtgtgtcgatgtccacttgttttctatgctagatctttactgtggagaggtcccttaatagcacactggattgatcccttgggctgttttgcgatggctatgacccttttaagctattgaagttgttgaaaaagaaatttccttgcccgaggaaaaaaaaaaaaaaaaaaaa

SEQ ID NO: 65801 - DNA, 387 bp, Oryza sativa
  Clone ID: PAT_MRT4530_66813C.1
agaaagaactatttccacacaattctagaactccagcatcttcaattctgggctcatttcaaatgatttagcactaaacaagacaatatttgtggtccaactaatgaaggaaaaaaagtttccaacaacatttataggggaatcatttacctgcttaaatcaaataaggagttgacaatccaaagaagaattgagctcccccctgagattaaatacgagcaatggggggggcagtgactgcaatacttgattgtataaacgatggcgcttgcactaaatgggtctttcctgaatattggagtgctatttaaaacttgttgatcaaatggactcctcaaaggcggggaacgccctctttggcaagcttacaccaccgcgacacatttt

SEQ ID NO: 65802 - DNA, 217 bp, Oryza sativa
  Clone ID: PAT_MRT4530_66814C.1
ttcgaattgctcccctcctaccaaattacgtacgcatcatgcgtatgaaaagttcaaaagtagtcgacataataacatgcgaaacacaaccacatagcgagaacaataaagagataaagagatacatcatgacagctcatacttggtcgttttttataccatactactaattatatcaactagatctttacgtgacatgcacacccttttttttttt

SEQ ID NO: 65803 - DNA, 581 bp, Oryza sativa
  Clone ID: PAT_MRT4530_66815C.1
aactcccactccagatttaacttcggtcttgatgtggcagaggcattggaatatcttcaccatcatattatgctgtctatagttcactgtgatattaaaccaagcaacattcttctagacgatgacatggtgacgcaagctacagactttggtctagcaaagataatgaatattgctgaaccgtgcaaagaaagcagctcatttgtaactaaaggaacaattagatatgtcgcaacagaatatggctcagggtctccggtctctatggatggggacatatatagctacagggtgttgttgttggaaatgtttactagaagaagactaactaacatttttataaatggtatgacaagtcttgtcgacattgtcaaaacggcctatcctaacaatctactagaaatattggattggatgctaatgcaatctacaacggaaatacccaagatatgacacaactagttatttatcctgtattcgacttggtctaacatgctgcaaggaatcaccaagggaaagaatgaagatgaataatgtagtcaaggaattgattgatacaaagaaggcattctcagcacata

SEQ ID NO: 65804 - DNA, 1521 bp, Oryza sativa
  Clone ID: PAT_MRT4530_66816C.1
atggcacgccgcgtcgctgcccgcgcccgcgcccgcgccggcggcgtcccgcgctcggagggtacgatccaagaccgagcacgcgttgggagcggtggcgccgaggacgcactcgacgtgttcgacgaattgctccggcgaggcatcggcgctccgatccgcagcttgaacggcgctctcgccgacgtcgcgcgcgacaaccccgcggccgctgtgtcccgcttcaaccgcatggcacgagctggtgccagcatggtaactcccaccgtgcacacctatggcatcctcatcggctgctgctgcagtgcgggccgcttagacctcggtttcgcggccttgggccatgtcgttaagaagggattcagagtggaacccatcatctttaatcctctgctcaagggcctctgtgcagacaagaggacggacgacgcaatggacatagtgctccgtggaatgaccgagctcagctgcgtgccaaatgtcttctcccacaccattattctcaagggactctgtcatgagaacagaagccaagaagctctcgagctgctccacatgatggctgatgatggaggaggctgcttacctaatgttgtgtcatacagcaccgtcatcgatggcctcttgaaaggaggggatccggacaaagcctacgctacataccgtgaaatgcttgaccggaggattttgccaaatgttgtgatttacagctccattattgctgccctatgcaagggtcaagcaatggacaaggccatggaggtacacgataggatggttaagaatggagttacacccaattgcttcacgtatactagtcttgtgcatggattttgctcttcagggcagttgacagaggctattaaatttctagaaaagatgtgcagcaatggtgttgaaccaaatgttgttacttatagctcgtttatggactatctctgcaagaacggaagatgcacagaagctagaaagatttttgattctatggtcaagaggggcctaaagcctgatattactacctacagtagcttacttcatgggtatgctatcgaaggagctcttgttgagatgcatggtctctttgatttgatggtacaaagtgatatgcaacccgatcattatgtcttcaacacactaatatatgcatccgccaagcaaggaaaagtagatgaggccatgcttgtatttagcaaaatgaggcagcaaggattgaaacctaattgtgttacgtatagcactttgattaatggctactgtaaaattactaggatggagaatgctttagcacttttccaagagatggtgagcaatggtgttagtcctaattttatcacatataacataatgctgcaaggtttatttcgtacaggaagaactgctactgcaaaagaattctatgtacagattatcaaaagtggcaaaaaagatcttatagaacaggggttgctagaagaattggatgatctatttctttcaatggaggacaatgactgtagtactgtgtcgactcctgcatgctaa

SEQ ID NO: 65805 - DNA, 5091 bp, Oryza sativa
  Clone ID: PAT_MRT4530_66817C.1
atggccgaacgggcagtggcgcacaacctctctccgagcgctagcggtgacgacggggagcagaacccgcgccgtcgagctcgtactccaccgcccccctctcgccgaagtcttaggcgggaggaggtgctcgagggggtcgaaagatccgcgacttcgccgcccacgagcgatggagaaggacggcgagacggggagcgtcgcctcctcgtctacggcgatggcagcacgccccagggcgcgctccaagctgcgggcgcgctcttgcgtcacccgcccgtcgtccccgatccagagactccagcccgacgttggctggatgacgtggccgacttggtcatgacggcgcagcagcgcctaggcgccggtgggcggtcctccgccaccaaggcctctggcgctgctaccgccggctccgtgtcgtcgaggcggagggcgcggcgagcggcggccgttacccgccgttcgtctgccatttcctcgtcaacgcctccgacccaagaagatgtgcgtagggggccggatgcccgcctcagtatcgagcgccggcgcaatggtcgtcgtgctgcccacgcaacggaaggcgcttcctcgtccggagcgccacttcggtttgggcgcgggggccagccccccgtgcccccggttggtggtgtcggctgtcgagcctttgtggcgagccttcggaacgtccgttggcccccaaggttccggcccactatcaccgaaaaatatgacggaagtgtcaaccccgccgagtttctccaggtctacacgaccgggatcgaggccgccgggggtgacgacagggtcatggcgaatttcttccccatggacctgaagggacaggcgcggggttggctaatgaacttgccgcccgcgacggtccactcttgggaggatttgtgccagcagttcaccatgaacttccaaggcacatatccacgcccaggtgaagaagcggacttgcatgcggtacagcgaagggacgatgagtctcttcgctcgtacattcagcggttctgtcaagtccgcaacaccataccatgcatccctgcacacgcggtaatctacgcgttcaggcggggcgtgcggcacaaccgcatgctcgaaaagatcgcctccaaggagccccagaccaccgcggagctttttcagctcgcggaccgtgtggctcgcaaggaggaggcctggacctggaactccaccggttccggtgtggcagcttcggccgcccccggatccgctgctcggtcagagcggcgggacaggaggaggaaaaagaggtcggcccattccgacgacgagggtcacgtcctcgccgtcgagggcgcttcgcgggccacccgaaaggggaggcctgcgagcaacaaaaagaaggaggctggcgctcccagcagggagcgcccgaccggcaagtggtgcaccgtgcacaacacctccctccacgacctcgcggactgccgcgcggtcaaaagtttggctgagcggacgaggaagtgggaggaggagaggaggcaggagcgccgtgagggcaaggccccggcggctccctccggcaaccggcgaagtgaggccaagcaaaaggcccccgctgaggacatcgacgatggcgacgatgacctagggttccaggagcctggggccaccatcgccaccgtcgatgggggagcgtgcgctcacgcttctcgtcggagcctcaaggccatgaagcgagagcttctggccgcggcccctacccatgaggcgacgcggtggtcggaggttgccctcaccttcgaccagaccgaccacccgccgtgcgttgcccggggaggacagatcgcgatggtggtttcccccaccgtttgcaacgtaaagttggggcgtgtcctcatagacgggggtgcagccctcaacatcctttcccccgcagcctttgacaccatcaaggccccggggatggtgcttcggccgtcccagccgattatcggtgtgacgccggggcacacttggccgctaggtcatatcgacctcccggtcaccttcggtggatccgccaacttccgcacggagcgggtgaacttcgatgtggcggacctcagtctgccctacaacgcggtcctggggaggcccgcgttggtgaagttcatggcggcggtccactacgcctacctccagatgaagatgccgggccccggtggccccatctctgtccatggcgacctcaaagtcgcgcttgcttgtatggagcagcgcgcggaccacctcgccgccgcgtccaagcccgagggtggcaacgagaggctcagcacctccatcccagccgccccgaggcagcggatgatcacgtgcgacgaggtcccggtcaagaaggaagacgcgctcgtctccttcctgcgggcaaacgccgacgtcttcgcctggagaccggcggacatgcccggggtccccagggaggtgattgagcaccgtctcgccgtgcggccgggcgcaaggccggtccggcagaaagtgcggcggcaggccccggaacgtcaagccttcatccgcgaggaggtggcgcgacttctggaggccggattcatccgagaggttatccatccggagtggctggtgaacccggtcgtcgttcccaaggcgaacggcaagcttcggatgtgcatcgactacaccgaccttaacaaggcatgtcctaaggacccttaccccctgccacgcatagatcagattgtcgactccaccgcggggcatcgaggccaaccccgagaagatacgagctatagagcggatgcgccccccagcaagcttagggatgtgcaatgcgtcaccggctgcatggccgccctaagtcggttcatatcgaggctgggagagaaggcgctacccctatttaagctcctcaaacgctccgggccgtttatctggacggaggaggctgagcgggccttcactcagttgaaggcgtacctcagttctcccccagtcctggtcgccccggagccagatgagccgctgctactttacctagcggcaaccccgcaggtggtcagcgcggcgttggtcttggagcgcgacgaggacaaccctcactccgcgcatccccaccctgtgtcgactcgacccgggagagagcagggaggagaggcccccgagtcgaacggcggcccgaggcccccgacggccggagttggccctccgcccgcttgtccgacggtgccaggcacccccgacccccaggatggccccggggccactgcgggaaggccgcgcctgtcgccctccgaccccgaggtcgtcggcacagaagccgagtgcgccccgcgcggcctctcggacgaagagcgccctggagatgtggcccctagcgaagaagatcggccccgccgaaaggtgcagcggcccgtctgcttcgttagcgaggccctccgggacgctaagacccgataccctcaggcccagaagatgctttacgctattctgatggcttcgaggaagttgcgccattattttcaggcgcatcgggtcacggtggttacgtcttaccccttcggccaaatcttgcataaccgagagggtactggatgggtgatggacgcttacgtgcgccaagtgcggcgtatggagcgccattttgatgggatagagcttcggcacgtgcctagacgggataacgcggtcgccgacgaactctcgaggctcgcttcctcgcaagcccagaccccaccgggcgcctttgaagaaaggcttgcccagccgtcggcgcggcccgaccccctaggggagacggacgcgcctgaacggcccctgaggcccgtcggagtccaggcctcgggacccgaggggagcgctcccagctcccttagattggttgcttggatcgctgagatccaggcatacctcacagataagactctacccgaggaccgcgaagggagtgaacgcgtccagcgcatctccaagcgctacgtgctggtggaagggaccctctatcggtgcacggctaacagagtcctcctgaagtgcattcctcggaaacaaggcgtcgagcttcttgccgatatccatgaaggcgagtgcggagcccactccgcctcacgcaccttggttggcaaggcctttcgccagggtttctattggccgacggctctcaacgatgcggttgacctggtccggcggtgcagggcgtgccagttccacgccaagcaaacccatcagccggcccaggccctgcagaccatacctctttcatggccgtttgctgtctgggggctcgatatcctgggtccgtttaggcgggccccgggcgggttcgagtatctgtatgtcgctgtcgacaagttcattaagtggcccgaggcttacccagtcatcaagatcgataagcactccgcgcttaaattcatcaggggcatcactgctcggtttggggtgcctaatcgtatcattacggataacggcacccagttcactagtgaactcttcggtgactactgcgaagatatgggcatcaagctctgcttcgcctctcccgcccaccccagaagcaatggccaagtggagcgcgccaacgcagaaatcctcaagggcctcaaaaccaaaaccttcaacatcctcaagaagcacggcgactcgtggatcgaggagttgccagcggtgctctgggcaaaccgaaccacgccaagccgagcaaccggggaaacgcctttcttcctcgtctacggcgcggaggcggttctcccatccgagctcaccctgaggtcccctcgggccaccatgtactgcgaggctgatcaagatcagcttcgcagagatgacctcgactacttggaagagcgaaggcggcgcgcggccctccgagccgcgcgctaccagcagagcctgcggcgctaccatcagcgccacgtccgggcccgatcactctgcgtcgacgacctcgtcctacgccgtgtccaaacgcgtgctggactgagcaagctctcaccaatatgggagggtccgtatcgagtgatcggcgtcccccggccgggctccgttcggctggccacgggcgacggcacagagctgcctaatccgtggaacatcgaacaccttcgtcgcttctacccctag

SEQ ID NO: 65806 - DNA, 128 bp, Oryza sativa
  Clone ID: PAT_MRT4530_66818C.1
atagggtattccgctctgactgcgatacgaacgaagtatacaagcaaggggccaaggagcatgaggagaaagcatttgtcttgcaattttcagctatagcaatatataatgaagttgtaagggatgtg

SEQ ID NO: 65807 - DNA, 658 bp, Oryza sativa
  Clone ID: PAT_MRT4530_66819C.1
aactagtggatccccgggctgcaggctcagtccccatcctcgctcgcgccggctcaccacggttgttgctctgattgcccatcatcatgaggtcattccctagccactaatctcaaggtaagccatgccgttcccctcttccaattttgcctctccggccggcgatgtccctgatctgattagggtttggtggctcactgctcggagatggcggcaagctgcaatccggcaatgactggagcctggagctcaccggcttgccgcccatagtactgtcctcaaatccacacctagtttgcatgaccgcaagtgggttctctcaaaatcacaaccggcaaccaacccaaaaattgagctctttctgccaactctcttgattaatttgagttttgtaccaacataaatcttgaaaagataatttggtcttaatttttgtttcttgaataggttgctatggagaaatatcttaaaaaaacatcggattataccaacaatttatagagttcatccatttgactaaatgatgctaattgggatgagatggtcgaatatgatccatgcctacgaaagatcacttgtgtcatagattgatttgctacgtagagaaataagaaatgaagaaagtcactgatgaaaggatggttgattggttcatggt

SEQ ID NO: 65808 - DNA, 770 bp, Oryza sativa
  Clone ID: PAT_MRT4530_6681C.1
cagaaaggagggctgcagattttgcttcgagagaaaatgttgttggcacaggttctcttgatgttttgaatcatgtttcttctgttgattccgaagaacagaagaaagtagataatgctgtaatgagcagatctcatggcatggaaggtcaccatctacaatcccaagattcaggttctcagttccctggatgcaccacagattactggaaaacttccaggcctactgaaagtggtttggaggttggctatcatggtgtatcagcttttgaagggcgctgtaacacgaaccagcaaagatctgttagttctaaattgcaattaggtgagatgatcaaggctgcaaatgatgcctgcaaagtgcaaggtgcatcagatgttcatctgatttctggtcacccccttgctgattttgagacttttatatattctgcaagtccagtcattgctaagacatcttgcatgaggaatggcaactgtttgcaggacccgcaagctggcagctcaccatatcaatatcagatatcggatgtctccttgagaaatgtgtgggaatggtatgaggaacctggatcctatggattggaagtagaaatccatagaagtctcaactctacgagatcagcttgtggtgtctcagagttctgtgcttactttttaccttctctatctgctattcaattgtttgaacagtgcaagaataacttggaccataagtttgacagtgatgatgatttcttattatcccaaccaaatgggtgtgtatttacc

SEQ ID NO: 65809 - DNA, 5364 bp, Oryza sativa
  Clone ID: PAT_MRT4530_66820C.1
atggccgaacgggcagtggcgcacaacctctctccgagcgctagcggtgacgacggggagcagaacccgtgccgacgagctcgtactccaccgcccccctctcgccgaagtcttaggcgggaggaggcgctcgagggggtcgaaagatccgcgacttcgccgcccacgagcgatggagaacgacggcgagacggggagcgttgcctcctcgtctacggcgatggcagcacgccccagggcgtgctccaagctgcgggcgcgctcctgcgtcacccgcccgtcgtccccgatccagagactccagcccgacgttggctggatgacgtggccgacttggtcatgacggcgcagcagcgcctaggcgccggtgggcggtcctccgccaccaaggcctctggcgctgctaccgccggctccgtgtcgtcaaggcggagggcgcggcgagcggcggccgttacccgccgttcgtctgccattccctcgtcaacgcctccgacccaagaagatgtgcgtagggggccggatgcccgcctcagtgtcaagcgccggcgcaatggtcgtcgtgctgcccacgcaacggaaggcgcttcctcgtccggagcgccacttcggttcgggcgcgggggccagccccccgtgcccccggttggtggtgtcggctgtcgagcctttgtggcgagccttcggaacgtccgttggcccccaaggttccggcccaccatcaccgaaaaatatgacggaagcgtcaaccccgccgagtttctccaggtctacacgaccgggatcgaggccgccgggggtgacgacagggtcatggtgaatttcttccccatggccctgaagggacaggcgcggggttggctaatgaacttgccgcccgcgtcggtccactcttgggaggatttgtgccagcagttcaccatgaacttccaaggcacatatccgcgcccaggtgaagaagcggacttgcatgcggtacagcgaagggacgatgagtctcttcgctcgtacattcagcggttctgtcaagtccgcaacaccataccatgcatccctgcacacgcggtaatctacgcgttcagggggggcgtgcggcacaaccgcatgctcgaaaagatcgcctccaaggagccccagaccaccgcggagctttttcagctcgcggatcgtgtggctcgcaaggaggaggcctggacctggaactccaccggttccgggcgcttcgcgggccacccgaaaggggaggcctgcgagcgagccggcgctcccagcagggagcgcccgaccggcaagtggtgcaccgtgcacaacacctccctccacgacctcgcggactgccgcgcggtcaaaagtttggctgagcggacgaggaagtgggaggaggagaggaggcaggagcgccgtgagggcaaggccccggcggctccctccggcaaccggcgaagtgaggccaagcagaaggcccccgccgaggacatcgacgatggcgacgatgacttagggttccaggagcctggggccaccatcgccaccgtcgatgggggagcgtgcgctcacgcttctcgtcggagcctcaaggccatgaagcgagagcttctggccgcgggccctacccatgaggcgacgcggcgggcgcggtggtcggaggttgccctcaccttcgaccagaccgaccacccgccgtgcgttgcccggggaggacagatcgcgatggtggtttcccccaccgtttgcaacgtgaagttggggcgtgtcctcatagacgggggtgcagccctcaacatcctttcccccgcagcctttgacgccatcaaggccccggggatggtgcttcggccgtcccagccgattatcggtgtgacgccggggcacacttggccgctaggtcatatcgacctcccggtcaccttcggtggatccgccaacttccgcacggagcgggtgaacttcgatgtggcggacctcagtctgccctacaacgcggtcctggggaggcccgcgttggtgaagttcatggcggcggtccactacgcctacctccagatgaagatgccgggccccggtggccccatctctgtccatggcgacctcaaagtcgcgcttgcttgtatggagcagcgcgcggaccacctcgccgccgcgtccaagcccgagggtggcaatgagaggctcagcacctccgtcccagccgccccgaggcagtggatgatcacgtgcgacgaggtcccggaagacgcgctcgtctccttcctgcgggcaaacgccgacgtcttcgcctggagaccggcggacatgcccggggtccccagggaggtgattgagcaccgtctcgccgtgcggccgggcgcaaggccggtccagcagaaagtgcggcggcaggccccggaacgtcaagccttcatccgcgaggaggtggcgcaacttctggaggctggattcatccgagaggttatccatccggagtggctggcgaacccggtcgtcgttcccaaggtgaacggcaagcttcggatgtgcatcgactacaccgaccttaacaaggcatgtcctaaggacccttaccccctgccacgcatagatcagattgtcgactccaccgcggggtgcgaccttttgtgttttctagatgcatactctggttatcatcagattcgcatggctagggaggatgaggaaaaaactactttcattacccccataggaacttattgttatacgacaatgcctttcgggttaaagaatgcaggtcctacttttcagcgtactactcgaatttctttgggtagccaaataggacgtaatgttgaggcctatgttgatgacttggttgtgaagacgcgcaaccaagagaccttactctcggatctagcggaaactttcgaaagtctccgctccgcccgcataaaactgaaccccgacaagtgcgtgttcggtgtgcctgcgggcaagcttctcgggttcttggtctctgcccgaggcatcgaggccaaccccgagaagatacgagctatagagcggatgcgcccccccagcaagcttagggatgtgcaatgcgtcaccggctgcatggccgccctaagtcggttcatatcgaggctgggagagaaggcgctacccttatttaagctcctcaaacgctccgggccgtttatctggacggaggaggctgagcgggccttcactcagttgaaggcgtacctcagttctcccccagtcctggtcgccccggagccagatgagccgctgctactttacctggcggcaaccccgcaggtggtcagcgcggcgttggtcttggagcgcgacgaggacaaccctcactccgcgcatccccaccctgtgtcgactcgacccgggagagagcagggaggagaggcccccgagtcgaacggcggcccgaggcacccgacggccggagttggccctccgcccgcttgtccgacggtgccaggcacccccgacccccaggatggccccggggccactgcgggaaggccgcgcctgtcgccctccgaccccgaggtcgtcggcacagaagccgagtgcgccccgcgcggcctctcggacgaagagcgccctggagatgcggcccctagcgaagaggatcggccccgccgaaagggcgccggtgcgggggtcacgttgacctcgccaaacggagacgtcctcagatacctagttcgcctcgactttcgggcgaccaataatatggcggagtacgagggactccttgcgggactcagggtggcagctggactggggatccgccgcctcctggtgttaggcgactcccagctggtcgttaaccaggtctgtaaggagtaccggtgctctgacccgcagatggacgcctacgtgcgccaagtgcggcgtatggagcgccattttgacgggatagagcttcggcacgtgccaagacgggataacgcagtcgccgacgaactctcgaggctcgcttcctcgcgagcccagaccccaccgggcgcctttgaagaaaggcttgcccagccgtcggcgcggcccgaccccctaggggagacggacgcgcctgaacggcccccgaggcccgtcggagtccaggcctcgggacccgaggggagcgctcccagctcccttagattggttgcttggatcgctgagatccaggcatacctcacagataagactctacccgaggaccgcgaagggagtgaacacgtccaacgcatctccaagcgctacgtgctggtggaagggaccctctatcggcgcgcggctaacggagtcctcctgaagtgcattcctcgggaacaaggcgtcgagcttcttgccgatatccatgaaggcgagtgcggagcccactccgcctcacgcaccttggttggcaaggcctttcgccagggtttctattggccgacggctctcaacgatgcggttgacctggtccggcggtgcagggtgtgccagttccacgccaagcaaacctatcagccggcccaggccctgcagaccatacctctttcatggccgtttgctgtctgggggctcgatatcctgggtccatttaggcgggccctgggcgggttcgagtatctgtatgtcgctgtcgacaagttcactaagtggcccgaggcttacccggtcatcaatatcgataagcactccgcgcttaaattcatcaggggcatcactgctcggtttggggtgcctaatcgtatcattacggataacggcacccagttcactagtgaactcttcggtgactactgcgaagatatgggcatcaagctctgcttcgcctctcccgcccaccccggaagcaatggccaagtggagcgcgccaacgcagaaatcctcaagggcctcaaaaccaaaaccttcaacatcctcaagaagcacggcgactcgtggatcgaggagttgccagcggtgctctgggcgaaccgaaccacgccaagccgagcaaccggggaaacgcctttcttcctcgtctacggcgcggaggcggttctcccatccgagctcaccctgaggtcccctcgggccaccatgtactgcgaggctgatcaagatcagcatcgtagagatgacctcgactacttggaagagcgaaggcggcgcgcggccctccgagtcgcgcgctaccagcagagcctgcggcgctaccatcagcgccacgtccgggcccgatcactctgcgtcgacgacctcgtcctacgccgcgtccaaacgcgtgctggactgagcaagctctcaccaatgtgggagggtccgtatcgagtgatcggcgtcccccggccgggctccgttcggctggccacgggcgacggcacagagctgcctaattcgtggaacatcgaacaccttcgtcgcttctacccctag

SEQ ID NO: 65810 - DNA, 5532 bp, Oryza sativa
  Clone ID: PAT_MRT4530_66821C.1
atggccgaacgggcagtggcgcacaacctctctccgagcgctagcggtgacgacggggagcagaacccgcgccgtcgagctcgtactccaccgcccccctctcgccgaagtcttaggcgggaggaggtgctcgagggggtcgaaagatccgcgacttcgccgcccacgagcgatggagaaggacggcgagacggggagcgtcgcctcctcgtctacggcgatggcagcacgccccagggcgcgctccaagctgcgggcgcgctcttgcgtcacccgcccgtcgtccccgatccagagactccagcccgacgttggctggatgacgtggccgacttggtcatgacggcgcagcagcgcctaggcgccggtgggcggtcctccgccaccaaggcctctggcgctgctaccgccggctccgtgtcgtcgaggcggagggcgcggcgagcggcggccgttacccgccgttcgtctgccatttcctcgtcaacgcctccgacccaagaagatgtgcgtagggggccggatgcccgcctcagtatcgagcgccggcgcaatggtcgtcgtgctgcccacgcaacggaaggcgcttcctcgtccggagcgccacttcggtttgggcgcgggggccagccccccgtgcccccggttggtggtgtcggctgtcgagcctttgtggcgagccttcggaacgtccgttggcccccaaggttccggcccactatcaccgaaaaatatgacggaagtgtcaaccccgccgagtttctccaggtctacacgaccgggatcgaggccgccgggggtgacgacagggtcatggcgaatttcttccccatggacctgaagggacaggcgcggggttggctaatgaacttgccgcccgcgacggtccactcttgggaggatttgtgccagcagttcaccatgaacttccaaggcacatatccacgcccaggtgaagaagcggacttgcatgcggtacagcgaagggacgatgagtctcttcgctcgtacattcagcggttctgtcaagtccgcaacaccataccatgcatccctgcacacgcggtaatctacgcgttcaggcggggcgtgcggcacaaccgcatgctcgaaaagatcgcctccaaggagccccagaccaccgcggagctttttcagctcgcggaccgtgtggctcgcaaggaggaggcctggacctggaactccaccggttccggtgtggcagcttcggccgcccccggatccgctgctcggtcagagcggcgggacaggaggaggaaaaagaggtcggcccattccgacgacgagggtcacgtcctcgccgtcgagggcgcttcgcgggccacccgaaaggggaggcctgcgagcaacaaaaagaaggaggctggcgctcccagcagggagcgcccgaccggcaagtggtgcaccgtgcacaacacctccctccacgacctcgcggactgccgcgcggtcaaaagtttggctgagcggacgaggaagtgggaggaggagaggaggcaggagcgccgtgagggcaaggccccggcggctccctccggcaaccggcgaagtgaggccaagcaaaaggcccccgctgaggacatcgacgatggcgacgatgacctagggttccaggagcctggggccaccatcgccaccgtcgatgggggagcgtgcgctcacgcttctcgtcggagcctcaaggccatgaagcgagagcttctggccgcggcccctacccatgaggcgacgcggtggtcggaggttgccctcaccttcgaccagaccgaccacccgccgtgcgttgcccggggaggacagatcgcgatggtggtttcccccaccgtttgcaacgtaaagttggggcgtgtcctcatagacgggggtgcagccctcaacatcctttcccccgcagcctttgacaccatcaaggccccggggatggtgcttcggccgtcccagccgattatcggtgtgacgccggggcacacttggccgctaggtcatatcgacctcccggtcaccttcggtggatccgccaacttccgcacggagcgggtgaacttcgatgtggcggacctcagtctgccctacaacgcggtcctggggaggcccgcgttggtgaagttcatggcggcggtccactacgcctacctccagatgaagatgccgggccccggtggccccatctctgtccatggcgacctcaaagtcgcgcttgcttgtatggagcagcgcgcggaccacctcgccgccgcgtccaagcccgagggtggcaacgagaggctcagcacctccatcccagccgccccgaggcagcggatgatcacgtgcgacgaggtcccggtcaagaaggaagacgcgctcgtctccttcctgcgggcaaacgccgacgtcttcgcctggagaccggcggacatgcccggggtccccagggaggtgattgagcaccgtctcgccgtgcggccgggcgcaaggccggtccggcagaaagtgcggcggcaggccccggaacgtcaagccttcatccgcgaggaggtggcgcgacttctggaggccggattcatccgagaggttatccatccggagtggctggtgaacccggtcgtcgttcccaaggcgaacggcaagcttcggatgtgcatcgactacaccgaccttaacaaggcatgtcctaaggacccttaccccctgccacgcatagatcagattgtcgactccaccgcggggtgcgaccttttgtgttttctagatgcatactctggttatcatcagattcgcatcgctagggaggatgaggaaaaaactgctttcattacccccataggaacttattgttatacgacaatgcctttcgggttaaagaatgcagacgcgcaaccaagagaccttactctcggatctagcggaaactttcgaaagtctccgctccgcccgcataaaactgaaccccgacaagtgcgtgttcggtgtgcctgcgggcaagcttctcgggttcttggtctctgcccgaggcatcgaggccaaccccgagaagatacgagctatagagcggatgcgccccccagcaagcttagggatgtgcaatgcgtcaccggctgcatggccgccctaagtcggttcatatcgaggctgggagagaaggcgctacccctatttaagctcctcaaacgctccgggccgtttatctggacggaggaggctgagcgggccttcactcagttgaaggcgtacctcagttctcccccagtcctggtcgccccggagccagatgagccgctgctactttacctagcggcaaccccgcaggtggtcagcgcggcgttggtcttggagcgcgacgaggacaaccctcactccgcgcatccccaccctgtgtcgactcgacccgggagagagcagggaggagaggcccccgagtcgaacggcggcccgaggcccccgacggccggagttggccctccgcccgcttgtccgacggtgccaggcacccccgacccccaggatggccccggggccactgcgggaaggccgcgcctgtcgccctccgaccccgaggtcgtcggcacagaagccgagtgcgccccgcgcggcctctcggacgaagagcgccctggagatgtggcccctagcgaagaagatcggccccgccgaaaggtgcagcggcccgtctgcttcgttagcgaggccctccgggacgctaagacccgataccctcaggcccagaagatgctttacgctattctgatggcttcgaggaagttgcgccattattttcaggcgcatcgggtcacggtggttacgtcttaccccttcggccaaatcttgcataaccgagagggtactggatgggtgggcgccggtgcgggggtcacgttgacctcgccaaacggagacgtcctcagatatctggttcgcctcgactttcgggcgatcaataatatggcggagtacgagggactccttgcgggactcagggtggcagctggactggggatccgccgcctcctgatggacgcttacgtgcgccaagtgcggcgtatggagcgccattttgatgggatagagcttcggcacgtgcctagacgggataacgcggtcgccgacgaactctcgaggctcgcttcctcgcaagcccagaccccaccgggcgcctttgaagaaaggcttgcccagccgtcggcgcggcccgaccccctaggggagacggacgcgcctgaacggcccctgaggcccgtcggagtccaggcctcgggacccgaggggagcgctcccagctcccttagattggttgcttggatcgctgagatccaggcatacctcacagataagactctacccgaggaccgcgaagggagtgaacgcgtccagcgcatctccaagcgctacgtgctggtggaagggaccctctatcggtgcacggctaacagagtcctcctgaagtgcattcctcggaaacaaggcgtcgagcttcttgccgatatccatgaaggcgagtgcggagcccactccgcctcacgcaccttggttggcaaggcctttcgccagggtttctattggccgacggctctcaacgatgcggttgacctggtccggcggtgcagggcgtgccagttccacgccaagcaaacccatcagccggcccaggccctgcagaccatacctctttcatggccgtttgctgtctgggggctcgatatcctgggtccgtttaggcgggccccgggcgggttcgagtatctgtatgtcgctgtcgacaagttcattaagtggcccgaggcttacccagtcatcaagatcgataagcactccgcgcttaaattcatcaggggcatcactgctcggtttggggtgcctaatcgtatcattacggataacggcacccagttcactagtgaactcttcggtgactactgcgaagatatgggcatcaagctctgcttcgcctctcccgcccaccccagaagcaatggccaagtggagcgcgccaacgcagaaatcctcaagggcctcaaaaccaaaaccttcaacatcctcaagaagcacggcgactcgtggatcgaggagttgccagcggtgctctgggcaaaccgaaccacgccaagccgagcaaccggggaaacgcctttcttcctcgtctacggcgcggaggcggttctcccatccgagctcaccctgaggtcccctcgggccaccatgtactgcgaggctgatcaagatcagcttcgcagagatgacctcgactacttggaagagcgaaggcggcgcgcggccctccgagccgcgcgctaccagcagagcctgcggcgctaccatcagcgccacgtccgggcccgatcactctgcgtcgacgacctcgtcctacgccgtgtccaaacgcgtgctggactgagcaagctctcaccaatatgggagggtccgtatcgagtgatcggcgtcccccggccgggctccgttcggctggccacgggcgacggcacagagctgcctaatccgtggaacatcgaacaccttcgtcgcttctacccctag

SEQ ID NO: 65811 - DNA, 754 bp, Oryza sativa
  Clone ID: PAT_MRT4530_66822C.1
atgacgttcctcgtctcactgacacgccgggcccaccccgcggcgggcgaggacggccacggccagcgtacgaaccacgcagccgtctctgcgggctgtgctgggtacagtgcgcactcgcgcatgcaggcgcgcagaggcatatgcatgcggacgggcggcaggcaggcaaaggcagcgagccgtatacggcatggggaaattatggcacacggccggccgctgcctgccgggcgggtccgggggggtcgcggcgcgtggcagtgcacggcgcgggcagcggcaagcgggcaggggtactggtactactggcgcgagatagctactgctgcccgcggcgctgcgaatctactccggacgaggagtaatttggagcgtgacaagcggctggctacccacccaccgaacggcgtgcgcgcggacaacgccgtgccggataggccacccacccaccggggcgcgccgcggcgactgctactgttgagcggcgccgcgccgcacgcgtcggcaaaccgcggtgctgcctgcctgcctgccccccgcgccacgacacggctcctggacctcctcgcccacgtgaacccgaccccgggggccgaatcgtgccacggcacgtcgccccccctacgccgaaacgccaaccccacacgttacctccgccgcggttgctttccttcttcccttccttccatccgcctgctgccgctggcacgtcgggacgggagaggtatggaggaggtggagggcccgtgcg

SEQ ID NO: 65812 - DNA, 5418 bp, Oryza sativa
  Clone ID: PAT_MRT4530_66823C.1
atggccgaacgggcagtggcgcacaacctctctccgagcgctagcggtgacgacggggagcagaacccgtgccgacgagctcgtactccaccgcccccctctcgccgaagtcttaggcgggaggaggcgctcgagggggtcgaaagatccgcgacttcgccgcccacgagcgatggagaacgacggcgagacggggagcgttgcctcctcgtctacggcgatggcagcacgccccagggcgtgctccaagctgcgggcgcgctcctgcgtcacccgcccgtcgtccccgatccagagactccagcccgacgttggctggatgacgtggccgacttggtcatgacggcgcagcagcgcctaggcgccggtgggcggtcctccgccaccaaggcctctggcgctgctaccgccggctccgtgtcgtcaaggcggagggcgcggcgagcggcggccgttacccgccgttcgtctgccattccctcgtcaacgcctccgacccaagaagatgtgcgtagggggccggatgcccgcctcagtgtcaagcgccggcgcaatggtcgtcgtgctgcccacgcaacggaaggcgcttcctcgtccggagcgccacttcggttcgggcgcgggggccagccccccgtgcccccggttggtggtgtcggctgtcgagcctttgtggcgagccttcggaacgtccgttggcccccaaggttccggcccaccatcaccgaaaaatatgacggaagcgtcaaccccgccgagtttctccaggtctacacgaccgggatcgaggccgccgggggtgacgacagggtcatggtgaatttcttccccatggccctgaagggacaggcgcggggttggctaatgaacttgccgcccgcgtcggtccactcttgggaggatttgtgccagcagttcaccatgaacttccaaggcacatatccgcgcccaggtgaagaagcggacttgcatgcggtacagcgaagggacgatgagtctcttcgctcgtacattcagcggttctgtcaagtccgcaacaccataccatgcatccctgcacacgcggtaatctacgcgttcagggggggcgtgcggcacaaccgcatgctcgaaaagatcgcctccaaggagccccagaccaccgcggagctttttcagctcgcggatcgtgtggctcgcaaggaggaggcctggacctggaactccaccggttccgggcgcttcgcgggccacccgaaaggggaggcctgcgagcgagccggcgctcccagcagggagcgcccgaccggcaagtggtgcaccgtgcacaacacctccctccacgacctcgcggactgccgcgcggtcaaaagtttggctgagcggacgaggaagtgggaggaggagaggaggcaggagcgccgtgagggcaaggccccggcggctccctccggcaaccggcgaagtgaggccaagcagaaggcccccgccgaggacatcgacgatggcgacgatgacttagggttccaggagcctggggccaccatcgccaccgtcgatgggggagcgtgcgctcacgcttctcgtcggagcctcaaggccatgaagcgagagcttctggccgcgggccctacccatgaggcgacgcggcgggcgcggtggtcggaggttgccctcaccttcgaccagaccgaccacccgccgtgcgttgcccggggaggacagatcgcgatggtggtttcccccaccgtttgcaacgtgaagttggggcgtgtcctcatagacgggggtgcagccctcaacatcctttcccccgcagcctttgacgccatcaaggccccggggatggtgcttcggccgtcccagccgattatcggtgtgacgccggggcacacttggccgctaggtcatatcgacctcccggtcaccttcggtggatccgccaacttccgcacggagcgggtgaacttcgatgtggcggacctcagtctgccctacaacgcggtcctggggaggcccgcgttggtgaagttcatggcggcggtccactacgcctacctccagatgaagatgccgggccccggtggccccatctctgtccatggcgacctcaaagtcgcgcttgcttgtatggagcagcgcgcggaccacctcgccgccgcgtccaagcccgagggtggcaatgagaggctcagcacctccgtcccagccgccccgaggcagtggatgatcacgtgcgacgaggtcccggaagacgcgctcgtctccttcctgcgggcaaacgccgacgtcttcgcctggagaccggcggacatgcccggggtccccagggaggtgattgagcaccgtctcgccgtgcggccgggcgcaaggccggtccagcagaaagtgcggcggcaggccccggaacgtcaagccttcatccgcgaggaggtggcgcaacttctggaggctggattcatccgagaggttatccatccggagtggctggcgaacccggtcgtcgttcccaaggtgaacggcaagcttcggatgtgcatcgactacaccgaccttaacaaggcatgtcctaaggacccttaccccctgccacgcatagatcagattgtcgactccaccgcggggtgcgaccttttgtgttttctagatgcatactctggttatcatcagattcgcatggctagggaggatgaggaaaaaactactttcattacccccataggaacttattgttatacgacaatgcctttcgggttaaagaatgcaggtcctacttttcagcgtactactcgaatttctttgggtagccaaataggacgtaatgttgaggcctatgttgatgacttggttgtgaagacgcgcaaccaagagaccttactctcggatctagcggaaactttcgaaagtctccgctccgcccgcataaaactgaaccccgacaagtgcgtgttcggtgtgcctgcgggcaagcttctcgggttcttggtctctgcccgaggcatcgaggccaaccccgagaagatacgagctatagagcggatgcgcccccccagcaagcttagggatgtgcaatgcgtcaccggctgcatggccgccctaagtcggttcatatcgaggctgggagagaaggcgctacccttatttaagctcctcaaacgctccgggccgtttatctggacggaggaggctgagcgggccttcactcagttgaaggcgtacctcagttctcccccagtcctggtcgccccggagccagatgagccgctgctactttacctggcggcaaccccgcaggtggtcagcgcggcgttggtcttggagcgcgacgaggacaaccctcactccgcgcatccccaccctgtgtcgactcgacccgggagagagcagggaggagaggcccccgagtcgaacggcggcccgaggcacccgacggccggagttggccctccgcccgcttgtccgacggtgccaggcacccccgacccccaggatggccccggggccactgcgggaaggccgcgcctgtcgccctccgaccccgaggtcgtcggcacagaagccgagtgcgccccgcgcggcctctcggacgaagagcgccctggagatgcggcccctagcgaagaggatcggccccgccgaaagctgcctcacaccgcctactgggtgatgcagttcgacggctccctatctcttcagggcgccggtgcgggggtcacgttgacctcgccaaacggagacgtcctcagatacctagttcgcctcgactttcgggcgaccaataatatggcggagtacgagggactccttgcgggactcagggtggcagctggactggggatccgccgcctcctggtgttaggcgactcccagctggtcgttaaccaggtctgtaaggagtaccggtgctctgacccgcagatggacgcctacgtgcgccaagtgcggcgtatggagcgccattttgacgggatagagcttcggcacgtgccaagacgggataacgcagtcgccgacgaactctcgaggctcgcttcctcgcgagcccagaccccaccgggcgcctttgaagaaaggcttgcccagccgtcggcgcggcccgaccccctaggggagacggacgcgcctgaacggcccccgaggcccgtcggagtccaggcctcgggacccgaggggagcgctcccagctcccttagattggttgcttggatcgctgagatccaggcatacctcacagataagactctacccgaggaccgcgaagggagtgaacacgtccaacgcatctccaagcgctacgtgctggtggaagggaccctctatcggcgcgcggctaacggagtcctcctgaagtgcattcctcgggaacaaggcgtcgagcttcttgccgatatccatgaaggcgagtgcggagcccactccgcctcacgcaccttggttggcaaggcctttcgccagggtttctattggccgacggctctcaacgatgcggttgacctggtccggcggtgcagggtgtgccagttccacgccaagcaaacctatcagccggcccaggccctgcagaccatacctctttcatggccgtttgctgtctgggggctcgatatcctgggtccatttaggcgggccctgggcgggttcgagtatctgtatgtcgctgtcgacaagttcactaagtggcccgaggcttacccggtcatcaatatcgataagcactccgcgcttaaattcatcaggggcatcactgctcggtttggggtgcctaatcgtatcattacggataacggcacccagttcactagtgaactcttcggtgactactgcgaagatatgggcatcaagctctgcttcgcctctcccgcccaccccggaagcaatggccaagtggagcgcgccaacgcagaaatcctcaagggcctcaaaaccaaaaccttcaacatcctcaagaagcacggcgactcgtggatcgaggagttgccagcggtgctctgggcgaaccgaaccacgccaagccgagcaaccggggaaacgcctttcttcctcgtctacggcgcggaggcggttctcccatccgagctcaccctgaggtcccctcgggccaccatgtactgcgaggctgatcaagatcagcatcgtagagatgacctcgactacttggaagagcgaaggcggcgcgcggccctccgagtcgcgcgctaccagcagagcctgcggcgctaccatcagcgccacgtccgggcccgatcactctgcgtcgacgacctcgtcctacgccgcgtccaaacgcgtgctggactgagcaagctctcaccaatgtgggagggtccgtatcgagtgatcggcgtcccccggccgggctccgttcggctggccacgggcgacggcacagagctgcctaattcgtggaacatcgaacaccttcgtcgcttctacccctag

SEQ ID NO: 65813 - DNA, 1641 bp, Oryza sativa
  Clone ID: PAT_MRT4530_66824C.1
gcgcatcgggtcacggtggttacgtcttaccccctcggccaaatcttgcataaccgagagggtactggacgggtggtaaaatgggcaatcgaactctctgagttcgatttgcactttgaaccacgccacgcgatcaagagccaggccctcgccgactttgtggcagagtggaccccagctcccgagcccgtctccgtccccgaggccagctcgggcccctcgcagctgcctcacaccgcctactgggcgtacatcgcagataagactctacccgaggaccgcgaagggagtgaacgcgtccagcgcatctccaagcgctacgtgctggtggaagggaccctctatcggcgcgcggctaatggagtcctcctgaagtgcattcctcgggaacaaggcgtcgagcttcttgccgatatccatgaaggcgagtgcggagcccactccgcctcacgcaccttggttggcaaagcctttcgccagggtttctattggccgacggctctcaacgatgcggttgacctggtccggcggtgcagggcgtgccagttccacgccaagcaaacccatcagccggcccaggccctgcagaccatacctctttcatggccgtttgctgtctgggggctcgatatcctgggtccgtttaggcgggccccgggcgggttcgagtatctgtatgtcgctgtcgacaagttcactaagtggcccgaggcttacccggtcatcaagatcgataagcactccgcgcttaaattcatcaggggcatcactgctcagtttggggtgcctaatcgtatcattacggataacggcacccagttcactagtgaactcttcggtgactactgcgaagatatgggcatcaagctctgcttcgcctctcccgcccaccccagaagcaatggccaagtggagcgcgccaacgcagaaatcctcaagggcctcaaaaccaaaaccttcaacatcctcaataagcacggcgactcgtggatcgaggagttgccagcggtgctctgggcgaactgaaccacgccaagtcgagcaaccggggaaacgcctttcttcctcgtctgcggcgcggaggcggttctcccatccgagctcaccctgaggtcccctcgggccgccatgtactgcgaggctgatcaagatcagcttcgcagagatgacctcgactacttggaagagcgaaggcggcgcgcggccctccgagccgcgcgctaccagcagagcctgcggcgctaccatcagcgccacgtccgggcccgatcactctgcgtcgacgacctcgtcctacgctgcgtccaaacgcgtgctggactgagcaagctctcaccaatgtgggagggtccgtatcgagtgatcggcgtcccccggccgggctccgttcggctggccatgggcgacggcacagagctgcctaacccgtggaacatcgaacaccttcgtcgcttctacccctagcccctcggtggcctgggccggctaaaatcgccaaaaggggcccagaaccgagccgtgccccggggcgtggtgaactccggggggtaatcggcaaaggcccacaatcgggtcatccataaccctcggtcaccacgttcccggcctggccagtctcgacacgtggatctccccaggcac

SEQ ID NO: 65814 - DNA, 216 bp, Oryza sativa
  Clone ID: PAT_MRT4530_66825C.1
atgctcgcggagtccgcagagggacaagaaggcaaggcccctgcctcacatcctcgaagccccacctggagtcctggaaaattggttcacatattcatgtcaaaacgtgtgcttgaccacgccgccgcttgctgcatagcctgctgcccttgcccttgtgccgtcactcgcagcgcggcctgcccgtccccgtgcagtcgctggctcgcgagctaa

SEQ ID NO: 65815 - DNA, 207 bp, Oryza sativa
  Clone ID: PAT_MRT4530_66826C.1
atggcgaggggagggcggcgaggggcggagacgaggtcgtcgatgctcttctcctccctcggcatctccttcgactccacctccgacttctacaacagcaccggcggcagcggcggcgacgcgaaggtggcgcctaagccgcacgaagacaacaagggtggcgcgaagaacgctgacaacaagcacagtggctgtgacggcggttag

SEQ ID NO: 65816 - DNA, 426 bp, Oryza sativa
  Clone ID: PAT_MRT4530_66827C.1
atgggcggtgggcgagagtggcggcgctcgtcatgctccagttcttcaccgccggcggcgtcatcgtgctgctcgacctcctccacgagcgcggtagcgcggagcagcagtgggcagacggcggcgagcgagtgcggcggagcgaggggcctggtcggcgagggccgggtgagctcgaacgggctcgccagccgcctccctctccctcccaaaccgctccgcccagcacccgccgaccgctgccgctctcgcatgccgccgtcgctccgctcccggcgcctgtcgccgggcttgcccaccgtcgctccgctcgccacccgccacctgctgcctgccgccggcctcccctcaccgaagaagataagagagaagagattaaagagaagagaagcagaggaaaagagcagagggcggctgacattttag

SEQ ID NO: 65817 - DNA, 352 bp, Oryza sativa
  Clone ID: PAT_MRT4530_66828C.1
gccacttggcgatagcgggcaaggcactacgttcagcggcattagcggaagcagggaagggatgacgttcggtggcatcagcggcggctacaagcgcggctcgggatgcaacagcgacatcgacggcgatgatggcgaccccaccattgacgacgactacgtacgagctcgggggaggcggatccactcagtggccagcttgggagaggggtgtatgactatagcaaggttggaagaggcagatccatcgccgacggccttggatccgccattgccgagctatgtagtgtcggacccaccgttgccgagctcgggagggggtggatccaccaccagcagctcgggagttggg

SEQ ID NO: 65818 - DNA, 1181 bp, Oryza sativa
  Clone ID: PAT_MRT4530_66829C.1
gataataccgacggcggaaatattgcatatcaggaatagaagcaaaagatatggaggagcaaagattgtcagcaaggagacaactggaagctgctgccgccaaggcttcgggagatgacatggttttgctccaataggtaatatatatttctcgccctaaatttctaagatagtggtagtgtccctaagttgttcttttagccatgtaagattaagaacaaaaatgtctgtggcacggaggcccttatgatggtgctgattcagctccgtcatgaagagcacagcagacaactggtttgtgatgcgacgtgtaaaccctgattgcctctccggttgacatcgtccacaatctcgccgtagtgtcagaggaagcctttcaattgtcgtactaaagttttttccaatttgaagccatcaacattccaaatcttcacagtgtggtcagatgaggctgttgcaaggtacctgttggggtcacagaactctggggaaagcaggcacttcagaatgtaaccatcatgtgcttgcaatttatggaggggttcaaagcaggtaattgtctgagtacccttaagcaagcgccagacgtaacatgtcccacggttatttgcagcaaccaccatactcccatcccacatgactgtcagggatcttacagcagtatcaacctctggcaccagctcacagctgcacgagttagcagccaaatcccacacacgtatgtttccgttctgatcaccagatattagctctttctgatttgggtgcagaaccacagtgttcacagcagcacgactttcatattctcgttgacaagtggcagtgcgcaaatcccagattctcacagtaccatcctcagaacctgaatacatccagttgccatcacaatggaatcccacagccatcacattactagtatgtgagtcataactaattaccggatggttactgtttgagttaatgtcaaaaagacggatatgaggattgccagcagcagctaagaaacgcttgtctggggttatctcaaggcggttaatatgcatgaagacaaatagagagagcataacaacatcattacttaagtagtgcaaaatgatgcatgagtaggtccatttatccaagaaaaacaaataaggagaaggaagcatggccgtagacaaagaatgggcatcccattgcat

SEQ ID NO: 65819 - DNA, 415 bp, Oryza sativa
  Clone ID: PAT_MRT4530_6682C.1
ttcgatgataagctgtcaaacatgagaattggtcgacggcccgggcggccgcaaggggttcgcgttggccgattcattaatgcagctggcacgacaggtttcccgactggaaagcgggcacttgatgccttcatggagaagcggcggaggaagaacgcctccaaagatcatcgctacatgccatatcgaaggaatggagatgagctgaagaagcatgttgctttgcgcatgaacctcaacagttacaggctgatgaactgcagcaacatatcagacaactgtcttttgatacactaccagaagaacaacattggtgcacagggtgtcaaggatcatgagccacaaaagctatctttcattagagctcttcacgacgaaatcgccgacgtggtgattgatccagaccccaggatca

SEQ ID NO: 65820 - DNA, 418 bp, Oryza sativa
  Clone ID: PAT_MRT4530_66830C.1
tgagttatttgaggagtgccagcagcagtacatagagaagcaagcaagagcaaaagatatggaggagcaaagattgtcagcatggagacaactggaagctgctgccgccaaggcttcgggagatgacatgatgattggtgctcactttatctcacaagcactcgcgcgcaccagtcgacttggtatcgatgttgcttgtggtgtgctcatctcaatctttgatggcatggggattgcaaggtcagtgctccttggatccactgatgttctgtcgctcgaagtcgacgtgcccgtgggggcccacatgtgctacagcaacatgaagccagctgctttggcctcaagctccgtcatgaagagcacagcagacaactggtttgtgatgcgacgtgtaaaccctgattgcctctccggttga

SEQ ID NO: 65821 - DNA, 2230 bp, Oryza sativa
  Clone ID: PAT_MRT4530_66831C.1
atgttcaacaagatcatcaagcgcggcggccgcaagggccagcgcgccgccgacgggggcgacgcggcgcacggccgccccgccgcggccgcgccgtcgtcgtcgtcgggcggcgcgcagccccccgtcaccgtcaaccacgcctcccgcgccgcggcgccctcctcgcccccctcgccgcacgcggccgcggcggcctcggcgccctccgccggcgcggcggcgagcaaccaggcgtcgtcccaccaccaccagcagcagcagcccgcggcggcgccgcagccgccgctcctcgagccgctcccgctcctccgcgacgtggcggccgcggaccgcccggggctcctcgtccgcaagctccgcctcgtcgccgcgctcttcgacttcaccgactccctcaagcacccgcgggagaaggaggccaagcgccaggcgctgctcgagctcgtcgactacgtgcaggcgccctcccccgcggccaacgccaacgcgcccgcccgcctcccggagaacgtccaggaggccctcgtcgccgccatctccgtcaacgtcttccgcccgctgccccccgcgctgcacgagtcggccgccgcgatcgatcctggcgccgcccccgacgacgaggaggagccctacctcgacccggcctggcctcacctccagcttgtctacgagctcctgctccggtatgtcgtctcgccggacacagacaccaaggtcgccaagcgatacgtggaccacgcctttgttctccgcctcctggacctctttgactccgaggatccacgcgagcgcgaatatctcaagacggtgctccatcgcatctatggcaaattcatggtccaccgcccgttcatccgaaaggctatcaataatgtgttctaccggttcatctttgagaccgagcgccacaacggtatcggcgagctcctcgagattctgggaagcatcattaatggctttgcgctgccaatgaaggaggaacacaagctgttcctctcccgtgcactcatcccattgcacaagcccaagtccgttgcaatctaccaccagcagctctcctattgcattgttcagttcgtcgagaaggactacaaacttgcggataccgtaatcaggggacttctcaagtactggcctgtcataaattgccaaaaggaggtactgtttctcggggagcttgaggaagtacttgaggcgactcagcctgccgagttccagcggtgcatggtgccactatttaagcagattgggcgctgccttaacagttcccatttccaggttgctgagcgggctttgttcttgtggaacaatgatcacattgtaagcttaattgcccaaaaccgtagcgttatatttccaatcatatttgaagcactcgagaggaacataacgagccactggaatcaagctgttcatggtctgactgcaaatgtgcgcaagatgtttttggacatggacagtgagttatttgaggagtgccagcagcagtacatagagaagcaagcaagagcaaaagatatggaggagcaaagattgtcagcatggagacaactggaagctgctgccgccaaggcttcgggagatgacatggttttggtcaactagcatccataaatatgcaagcgacgcttcaaagatcatgcttgctcagatgattggtgctcactttatctcacaagcactcgcgcgcaccagtcgacttggtatcgatgttgcttgtggtgtgctcatctcaatctttgatggcatggggattgcaaggtcagtgctccttggatccactgatggtttctcaaagttcagacacgatgatgcttgccaaagaccctttcttccagagttaacatgccctttgcccactgacgtcctgctacggtactgagaaactcttcttttcttcaatcctcctccctcttttttttttttgatctacgtatgaataatcgaaccctttgtattaatccttcattatttgtcctagttcgctacccacaatttggggaaatgcaagtagaaaacgagtgagctagatgtaagctcttcctctttctttttcttttctttttattcttttggagtatttttaattcatcgtgttgtatggaagtaacataaccaatggagataagagcgctttaatttagtgtttggttgtactggagtgctaaaaaaaaaaaaaaaaaaaaaaaaaaaactagcctcgtgccgaattcctgcagcccgggga

SEQ ID NO: 65822 - DNA, 1307 bp, Oryza sativa
  Clone ID: PAT_MRT4530_66832C.1
gttaaaaaccgagacgcttaataaatcatatcaattgtccaccttgcgcatgcacattatttgtcaatcaggtgctacagcaacatgaagccagctgctttggcctcaaggtcctaagagtgctgaaatttttcagagcttcacatgttttcaaactggagtatgtacaaaatgcctgaggcacggggctgcttatgatggtgctgattcagctccgtcatgaagagcacagcagacaactggtttgtgatgcgacgtgtaaaccctgattgcctctccggttgacatcgtccacaatctcgccgtagtgtcagaggaagcagttatcaaataagcaccatctactgagaatacgcagtcccaaacccaacgctggtgacctactaaagttttttccaatttgaagccatcaacattccaaatcttcacagtgtggtcagatgaggctgttgcaaggtacctgttggggtcacagaactctggggaaagcaggcacttcagaatgtaaccatcatgtgcttgcaatttatggaggggttcaaagcaggtaattgtctgagtacccttaagcaagcgccagacgtaacatgtcccacggttatttgcagcaaccaccatactcccatcccacatgactgtcagggatcttacagcagtatcaacctctggcaccagctcacagctgcacgagttagcagccaaatcccacacacgtatgtttccgttctgatcaccagatattagctctttctgatttgggtgcagaaccacagtgttcacagcagcacgactttcatattctcgttgacaagtggcagtgcgcaaatcccagattctcacagtaccatcctcagaacctgaatacatccagttgccatcacaatggaatcccacagccatcacattactagtatgtgagtcataactaattaccggatggttactgtttgagttaatgtcaaaaagacggatatgaggattgccagcagcagctaagaaacgcttgtctggggttatctcaaggcggttaatatgcgattccgtatgttgaagagtgcggtaacagcgaccactcttagcttcccaaaattttattgagtgatcataacttgcagttgctaggataacagaaggttgagccattttaaacctccttccagggtggaagcggcaggacgaacgacggcggcgtggtcgctcgcgggatggatggggatcggcgggggcggtgcgcaaggccaaagtgacgaggagtcgaggaggaggcgccgccgtcactgcaaggccaccgccgcacagggtgctcg

SEQ ID NO: 65823 - DNA, 499 bp, Oryza sativa
  unsure (1)..(499): unsure at all n locations
  Clone ID: PAT_MRT4530_66833C.1
ccgcgccattgatgatcgnattcctgctcggtacccaatacaaaatggaagagggaattgctccttgaggggtgtttgtgaagtgaacaggaagcaacacgtggaggatcaggccgagtggtgccaaccagggttcagcaaccaggccaaccgtcatactccaccgacttttgtcggaggcatgtggctgaatcactggcggaagaccgtgtacatgcaccatccgaggttccttaggctgaatcatccgtaccgccaaaatacaagtgatttcgacgggatggtggaagagggagcacgtccaaagttcataatcggtagtgatatatgggatgagacgaaggacagtttgcaagcacgaagagaccttgaagacatgaatatcaggaaagagctgcatcctcaggacaaaggaaatgaccgctactacctccctccagcatgctatactcttagtgctgcagaaaaaatgagaaaagcaatcaaggcagggatttag

SEQ ID NO: 65824 - DNA, 375 bp, Oryza sativa
  Clone ID: PAT_MRT4530_66834C.1
atgcggcaccactcgctcgcgaagatgtcgatgaaggcctcggctggggtgggcggcgccgtagtcgccgacgcaaaccttgttgaagacgaaagggaggccaccccatccgtcgaactactttgggcttcaggaacatgcgggttggtgaagaacgacgcgcacatctcagctacaacggtttactggcacaggtggtggtggggggtgggcactagaaaggcggtggcggtgaccccttatctctccctctccttccttctccaagtggtgcggcgacgaggtgcggtcgcggagcatgatttcggcggtagagacggtgatggtgcggtagagatccggtccacggctctgcagcatgcgtcatggcgctga

SEQ ID NO: 65825 - DNA, 1548 bp, Oryza sativa
  Clone ID: PAT_MRT4530_66835C.1
tcacgcacccaatccggttctatcctccgcgcatctatcacccggcgccggaatttccgcccgcattccgcgtcgcaagcggaggaccctatgcgccgattccccaccatcatcgatctcctccgccctctcatccacacggcgccagggaagcgacgccccaaccgaaccggactgccgggacaccgacgcccatcccgttcactcgactgcccctctgcgccgagcatgcggatcaacgtcagacgcctgtcgctccactagtcctacactgataatttaatttccaattgatgagtaacgatgttgtaaattaaatccttcaacatagttggacggccctggattaaacaccggaaattatctgctttcatggccaaagacaatgctctcgaagaggcaaggaaattgaagcacaccttcttgagaccatggcattggtacttgtctgctagcatcagcatggtaaccactgaacttgtatcaatatagctgcacaacctatcttcgcacattatcttcagtcttgataggctatacttattggctgcaacgagtagttgaaccatagtcgtctcgtcttgacctatctctggccaagtgtccgtgtagataaaaacaagcagagctttaaacacttgtgcatccatgttgtcaatttttatgacatccgtggtgcctccctccattggtctgaatagctccgccttgaacaccggcgaccgtgccgctagcaccaacctgtgtgcggcaaatgtctcgccgccaaccacaaactcgacatcggtgccctctttgcttgatagaagatcaccataatccaggtgcatgttcgatgggggcaccgtgaaggatggtggttcctccgtgatgaccagacgaaccgcgatagcgaagcagtcgtcattgagatattccgatcgttgcaactcgtcccttctaatgaagttttcgaacccaagcgcgctactattagccaccgagaagttatacaatgtggtggtgacagtgtgtgaccgcaccggattcctgtgtcggtcgagcaagctgaatgtaacctgcgccatgacatcgtcattgaccgtgtcatcgtcaagatggatgaagaaagagatgcagtgcttgttggtttctcgccctccgtttgggtagtagctgatataccaggtgcgacctcccgcactgaacggagaggtacggagggcctggccacgaccggctttcaaggtgctggagtacccctcgatcttgagtatgtggtaggttcgtcccgcggtgatggtggtggtggacctcgacggcggaggaccggcaccgacgctggacgtgagcgccgtcgccgccgccgtcgtcgtcgtcgtcatacctgcgtctagcccgacgtccgacggagatgtaggagctgaggcctccacctcgacggacgcctgcccgtacacatcgagtccaccgcagctcccctgtcgacggcgaactgctttactcctggctggtctcctctgcgcctccaccagccccgcggtggccttcatagtaaaaggttatccc

SEQ ID NO: 65826 - DNA, 261 bp, Oryza sativa
  Clone ID: PAT_MRT4530_66836C.1
atgggggagctatgtttcttgcttgagcacttggatcaatgtcggggcttcgtcaacatgcttattactcttggtggttctctacctagccagataggcatcgtccgtagaattcaaatttgtgtggattgcccaggaaagtttgtaaggtttgcatcaccaccgccaggaaagagcttggagaggcaagggattgaaagcgatctggctcttaggagcttctcaacggagagtagggttgaaaaatctgaacttcggtga

SEQ ID NO: 65827 - DNA, 365 bp, Oryza sativa
  Clone ID: PAT_MRT4530_66837C.1
aaagggggaacaaccaaaaatttaacaaatcctggaaaaactttttggatgggattttaacattcaggcaactatttggagcagcatgggatcataaaagggggggcccagtaacaagggggcaaaagaaacataactttagctggaaaattgggatataagggaaaattaaaacaaatcattcgcacagccttcagacgcaccataaattccttcttgtcgggcttcttaaagcattaaacaaaagggtccagggtttttaccaaagaatgcctggcctttgggattgaacccttggggaaccaaagggggatgggatttttagtttggacattttggccaatcaggggtctgatgttttagga

SEQ ID NO: 65828 - DNA, 224 bp, Oryza sativa
  Clone ID: PAT_MRT4530_66838C.1
aaaactcatttttttatatatacggtgtttatttcaaatgtggactatcccctcttaacaaattattcattcacaattttttttaaaacactactaattaaacaatactttatttcctataaaatcaacatatctatgttttcccacatattctaacaataaacttcaaatgaacaaatctaaaaggtcaacaatgccatcgttgacatggtttgtttcctgat

SEQ ID NO: 65829 - DNA, 598 bp, Oryza sativa
  unsure (1)..(598): unsure at all n locations
  Clone ID: PAT_MRT4530_66839C.1
ccgggctgcaggaattcggcacgagggaaaaagaatcacatatggatttaagagacttccaaaactatctctctttttaatcacgcgaacttatattcctntgccttttataaatataccacacggtactacttctataactctagaattatatagtaaactcaaaattattaagcaaaaaaataaatctaaaacaatgaatttacattaattttccttctttagatatactacacatactcgatactactactataactctaaaatatacactaaacccaaaattattatagaaaaaaatcaaaacatttaaaaacattaaaaaaataatagttttttatgaaatatttagttatgacacaagatgcatccggaatgacatcgtgcacatattttacaacgcagaccattatcaacctatataccagaaaataaaatattaaaaaaatcattctaaacaaaattagatttattttttgagtaaaaaatacggatatatgataatatataatatattaaaaaaataaaactgcaagtctaaatggaaaaaacgttttaaattttatacggtttggggttacatgtaaagtttgtaaca

SEQ ID NO: 65830 - DNA, 530 bp, Oryza sativa
  Clone ID: PAT_MRT4530_6683C.1
gccgtgcacgtcgtcgtcgcagccaccccacgcggtcgtcgccgccgctgccccgcgcggtagccgccaccgctgcccccgcgggcctcccccctccctcctccggccagatctgggagggagggggaaggggagccgccgccgccgcctcgcgccgtactcgtcgccgctgtccacgccggcctccccctccctcctccggccagatctcgaagggaggggggaggggagccgccgccgccgccgccggccttccccctccctcctccggccagatcagggaggggagggagggaagggagccacgccgccccgccaccttccacgccgccccgtgccgtagccgccgtgggagaggccggccttggagaggtgaggtgaggagagggccggccgtgggtgagggaaggggtgaggttttgagacttagaaaaaatctagggctcctatccaagtctatttatattcaagtctattttcacaggcggaccactgaagtggcgcctgtgaaaatcacaggcgccgcttag

SEQ ID NO: 65831 - DNA, 162 bp, Oryza sativa
  Clone ID: PAT_MRT4530_66840C.1
atggaggccctcgtagctgcttctcgcttcgaccttgttatggcgctggatgtgtgggaggttgtgttcgggatgatgcctcgccttgctgcaactgaggtggcgggagagaggagactggggcatagccgttcgacctccgctacatcctcccacagatag

SEQ ID NO: 65832 - DNA, 884 bp, Oryza sativa
  Clone ID: PAT_MRT4530_66841C.1
gcccacccggccgggatccactcaagcagagcagagcagcggcaaagcaagtgatctctttagctcggatcatctctgcatttgcatttgcagctgctcgtcacggcaatggcatccaccaacagctggacccacgagatcgagtcgccggtggccgcgccgcgcctgttccgcgccgccgtcatggactggcacacccttgcccccaagatcgcctcccacatcgtcgccagcgcccaccccgtcgacggcgacggcagcgtcggcagcgtcaggcagttcaacttcacctcagccatgccattcagccacatgaaggagaggctggagttcctggacgtggacaagtgcgagtgcaagtcgacgctggtggagggcggcggcatcggcaaggcgatcgagacggcgacgtcgcacatcaaggtggagccggcggcgaacggcgggagcgtcgtgaaggtggagtccacgtacaagctcctccccggagtggaggtgaaggacgagatcaccaaggctaaggagtccctcaccggcatcttcaagaccgccgaggcctacctcatcgccaacccggacgcttacaactaaatcgtcatcatgcctatgcccccaaaatatgtttgataatatttgatctttgcgagtgtgtatgatcgaaataaagctgcttccaagcagtgattgagaagtgagcagcgagaagcttggtgtgtggtttggttgctgtcggagaatggttttgtttgacatgatgctgtcaacaccggctatgttatgtatctatctagcatctacctgttggttttgcgtgggaataaaaacatactataaaagataaaaaaaaaaaaaaaaaaaaaaaaaaaaaaaaaaaatcacttact

SEQ ID NO: 65833 - DNA, 479 bp, Oryza sativa
  Clone ID: PAT_MRT4530_66842C.1
gtcgacctacgcgttcggcacaattggtgacattgtagatgacttgcagggtcatgttggttagccatccaggccagtgaagccataagctatgcatgcataatgagcaacaagttgacactggacaactggtcattacatataggagcgacgataaacattgaatgacgatgatgacgaactacagaccagatattttactgtggaatttcacatgataatgtgatgactaacactattagagttctgaactctattgtgagtgatcaaacattataacgcgacactcccagtggattatctgttatttatgactactactacaactacataggatatcgcgcttgtatatgcagttgccgagtgatcttgtgacctagtggcatataatgccatgcaagccttatgatctactgtgctctgtagctagatggcagagcccatggagataactactatggtcacaattgtgccggacg

SEQ ID NO: 65834 - DNA, 201 bp, Oryza sativa
  Clone ID: PAT_MRT4530_66843C.1
tcaggccgcgcacgccattaatggagtacgagcgcatccacggccccccgctccaacgtcaggtggcctcctccccgcgattcccgtgtgaatttgctctttcttcccggatttttcgactttcttcttcttcttggtttgctcttcttctttcttggcggtctgcacccattcggagtccgagctcatctccgagtccat

SEQ ID NO: 65835 - DNA, 2032 bp, Oryza sativa
  Clone ID: PAT_MRT4530_66844C.1
ccgcagcacctaggcttgggcccgaccagaaaaagaaaaaaaaagagaaaaaaagagggaacttttcacggccgctgaagcctctgacactccacgtgtagtgtgtcagtactccggccacctctctcggccgttgctctcccatggcgatgatggcgatgggcgcggcgtcctgggccccgatcccggcgccggcgagggcggcggccgcattctatcccggccgcgatcttgcggcggcgaggcggcggcgtggggcggcggcgaggaggccgttcgtgttcacgccgcgtgccgtgtcggactcccggagctcgcagacgtgcctcgatccggacgccagcacgagtgttcttgggatcatccttggaggtggtgctgggacaaggctgtatccgctgacaaagaagagggcgaagccggcggtgccgttgggtgctaattacaggctcatagatatcccggtcagcaactgtctgaacagcaatgtgtcgaagatctatgtcctgacacagttcaactccgcgtcgctcaatcgtcacctctcgagggcctatggaaacaacattggtggttacaagaacgaggggtttgttgaagttcttgctgcgcagcagagcccagagaatcctaactggtttcagggtactgcagatgctgtgcgacaatacttatggctatttgaggaacacaatgttatggagtttctcattttggctggagatcacctgtaccgtatggactaccaaaagttcattcaggcccacagagaaacaaatgctgatataaccgttgctgcgctgcccatggatgaagaacgtgcaacagcatttggccttatgaagattgatgaggaagggaggataattgaatttgcagaaaagccaaaaggagagcaattgaaatcaatgatggttgacactaccatacttggccttgataatgtgagggcaaaggaattgccttacattgctagtatgggaatctatgtttttagcaaagatgtgatgcttaagcttctccgtcaaaatttccctgctgcaaatgactttggaagcgaggttattcctggagcaacagaaattggaatgagggtgcaagcttacttatatgatggttactgggaagatattggtactatagaggcattctacaatgccaacttggggataaccaagaaacctgtgccagattttagcttctatgaccgttctgccgcaatttatacgcaacctcgatacttgcctccatcaaaagttcttgatgctgatgtgacagacagtgttattggtgaaggttgtgttattagacattgcacaatcaaccattctgtggttggactccggtcctgtatatctgaaggcgcagtgatagaggactctctgctaatgggtgcagactattatgagacggagacggacaagaaagccctttctgagactggtggcattcccattggtattggaaagaatgcacacatcagaaaagcaataattgacaagaatgctcgtattggagaaaatgttaagataatcaatgtcgacaatatccaagaagcttcaagggagactgatggatacttcatcaaaagtggcattgtcactgtgatcaaggacgccttaatccctagcggaacagtcatataaaggcaaccaatcaccactgtacataaggttgggccttgcagcatatggtgatctgatctccagtgcacatcaagcaatcaacttttaacgctgtggtttattccatgctgccagttcaccaagctctgcatcaacttgcaaggatatcataaaaaaaataaaaaataaaaacaggtgccacttaaaggcaccattttactgttactagtatgagcaaccgctctagagcttagaggtgttgtaagtccgaaaaccgtgtctgaaatgtgggtattttgatgtgtataatctttgtccttttgcatgatcagatttaaatatcctgtgtttatttctacctcttctgcttaaaaaaaaaaaattttaaaaaaaaaaaaaatccataa

SEQ ID NO: 65836 - DNA, 402 bp, Oryza sativa
  Clone ID: PAT_MRT4530_66845C.1
atggggccacctcgaaaccctagccgccatcgtcgaccacggcgaagcgacctccgggatgtcgtcgtcgaccgcggcgaggtagtcggcggaggtggcaaggtcgagggaagagaatatgtcggaggactcgccggccacctcgttgtctgggctccccatatagcactgcttcagatgccatccatggaggagaggaggaagacggtgcagcggcgcgcaggggtcgatgcatccagaagggagggctcgaggggcaccgtcggcggcagcggcactgccatcttctacctcctctcctcttctcctagtagttgtcggcgccgtctccatggggagcttgagctcaacgaaatccagaagaaagagagagggcaggaggagggacggagggagggctag

SEQ ID NO: 65837 - DNA, 2250 bp, Oryza sativa
  Clone ID: PAT_MRT4530_66846C.1
caccgaatccccccgattggtcggcgatgtcggcggcgcccccgcctccccccccggagtccccggtcgccgccgccgccggcggaggcgacaaggtgctcgccgcggcgcagcacatcgtcaagtcgctggcgacatccaagaacgccgccgacgacatgatccgcatcctctcgggcttcgacaaccgcctctcccagatcacctccgacctcttcccctcccccgacctcgccgctgactccgacgaacgggggaaccccctgtgggggcagatctcggccgcggccttcgacgccgccgagcagctcatccaggtctgggacggcaccccggaggcgctcgtcttcgaggccaccgaggacgaggtcgccgagtacctctccgcggtcgacgtggccatcgagcacctcgcgcgcggcagcggcggcggcgccggcggcgcggggtcctcctcctcctccaccgcgggccgcgccggggtcgccgtgcagctcgccatggcgcgcctcgaggaggagctgcgccacctcatggtccgccacgccgtgccgctcgaccccacgggcctcttcttctccctgcgccgcctctcgctcggctccatggacgacctcgacacctcctccgagttcgacgccgccacgccgcacagcatcgacgtcgcgccggagaccgcgcgcggcgggcccctggtcaaccccttcgaggaccaggtgttcgaccccgtgcgccctgaggccgtcgacgacctccgcgccatcgccgaccggatggcgcgcgccgggtactcgcgcgagctcgccgacgcgtactgcggcatccgccgtgacctgctcgacgagtacctctccgcgctcggcgtcgagcgcctcagcattgacgaggtgcagcgcatcgagtggaagcacctgaatgacaagatgaagaagtgggtgcaggcggtcaagacggtcgtgcgtgtcctgctcgctggtgagcgacgcctctgcgatcaggtgctcagtgtgtccgatgagctcagggaggagtgcttcatcgaatcaaccaaaggttgtattatgcagattctcagctttggggatgctgtggctgtgtgtccccgctcgccagagaagctctcgcggattcttgacatgtatgaggcacttgcagaggtgatccctgagatgaaggatttgtgcttgggcagttctggggatggtgtgatcagcgatgttcaggcgaatcttgataggcttggggatgccattaggggtacacttttcgagtttgggaaggttttgcagctggagtcatcacggagggcaatgacagctggtgagatccaccccatgacacgctacgtcatgaactatttgaggcttctggttgtttacagcgacacacttgatgccctcttggatgacaatgccgatgaccaaattgatttggcaagagctgaggatcaggatcaggaacacttggagagcatgacccctcttggaaagcgccttttgaagctgatatcttatttggaggctaacttggaggaaaaatctaagctgtatgaagatagcgccctggagtgcatattttccatgaacaatttgctgtacattgttcaaaaggtgagggactctgagctcggcaagattttaggtgatcactgggtaaaaaggcgtaatggcaagatccggcagtattcaaagagctacctaaggatttcctggatgaaggttttatcttttctgaaggatgatggacatggaagtgggagcggcagcagcagcggcagtggcagtgggcattcaagttctcggatgtccatcaaggagaagttcaagaacttcaacctggcctttgaggaaatatacaggaaccaaacaacctggaaagttccagatcctcagctccgagaagagctgaaaatatccatatctgaaaatgttattccggcatatcgtgcttttttgggaagatatggtagccaagtggatgggggaagaaattcagggaaatatataaaatacaccccagaggacttggaaagtcagctttctgatttgtttgagggtgcaccggggccagccaaccactctagaagaagaacatagttcatatttggcaagccctgttaaaggtatgattttgtccaaggattgtaaattgctttacacttctttcatgtgtgttcttgctacctttagtagtcattgcaacaccataatacaatacaaggacctttcgttaaaaaaaaaaaaaaaaaaa

SEQ ID NO: 65838 - DNA, 336 bp, Oryza sativa
  Clone ID: PAT_MRT4530_66847C.1
atggggagcccagacaacgaggtggccggcgagtcctccgacatattctcttccctcgaccttgccacctccgccgactacctcgccgcggtcgacgacgacatcccggaggtcgcttcgccgtggcaggggcagctgccggtggttttgtcgctccacgcacccagataccctcgttggcagcgggcgtggactcatccgacggcgctgttggccatcccgccgtcgtcggcagcggtggtgggctcatccgatggcgctgccaaggctgccaccatggaaggggaaggatggagggcaatttcgtctcattatccactgaagaagcgaagatga

SEQ ID NO: 65839 - DNA, 810 bp, Oryza sativa
  Clone ID: PAT_MRT4530_66848C.1
tcatcttcgcttcttcagtggataatgagacgaaattgccctccatccttccccttccatggtggcagccttggcagcgccatcggatgagcccaccaccgctgccgacgacggcgggatggccaacagcgccgtcggatgagtccacgcccgctgccaacgagggtatctgggtgcgtggagcgacaaaaccaccggcagctgcccccgcctcgaaaccctagccgccatcgtcgaccacggcgaagcgacctccgggatgtcgtcgtcgaccgcggcgaggtagtcggcggaggtggcaaggtcgagggaagagaatatgtcggaggactcgccggccacctcgttgtctgggctccccatatagcactgcttcagatgccatccatggaggaggaggaggaagacggtgagctgctcatggtggacatggagatggccgacgaggacgagctcctctccctcaatgatggcggcaaaggacatgaaaggcaattttatctcatcatccggtggaggagcgaaattgatttcgaaaatgtacaaaagggccaaaattttgcaaagtggcggtgcagcggcgcgcaggggtcgatgcatccagaagggagggctcgaggggcaccgtcggcggcagcggcactgccatcttctacctcctctcctcttctcctagtagttgtcggcgccgtctccatggggagcttgagctcaacgaaatccagaagaaagagagagggcaggaggagggacggagggagggctaggggcatcgtcgtcgctgccatcttcttcctcctcttctcctag

SEQ ID NO: 65840 - DNA, 11996 bp, Oryza sativa
  Clone ID: PAT_MRT4530_66849C.1
atgagctgtgcctctttctggcagcactatgttcatacttatattttgttattatcattacttggatatccttctggcgaagttataaaaagaaactgcagtagggtacaaagcaccaggaaagtcagggaaactattagaaatcatttgaaaactgtcagtgaattagaggagaagatccctgtagaagctattgctagaggacgaagtgcagcacgttcaaaactaaccgtgtcacagcaacagagcgagcaagaattatcaaaagcacttttggtttcaaacacattgaaatttctctcacccttgttatatgtttggaagtttcttgtattcatatgctggtcactgtggagatttatgagctctagaagcagagggtgcaaatccagtgtgcaaaattttccttgtgcttctgatgattcagaaatcaaggtacagttcagcatctgccttggtgaactttctgtaacatttttacccctcagtgatcaccacttcactggtacaccaaagttaaataatgggaacaaggcttatcacattgacacaccttcagtacatcttgtaataaaatcatcatccatactttacacagatggtttcaccacacagtcattttttttcgtaattggtgaactgaaggcagacgtttctggtataccaaagttgttacaagcagccaatggcagcattactaggaggaattcatcttttggaacagaagagttttctgaagatattaattcaaagacaatactctggagtgactctgccagtatgcatccattttctggaaaacagcctgatgagtccttttcctacaatggtgattcatctattgcccttctacagagtgatatggaggaactgtggtccttctggacggtagtaagcactttctacaatgactcaggtgtgatgcatcatgaaaaaccttctgttatttttgaattcaaatcatttctcattgatccttacaaaagtacaagtggttttcagcaatgtagatttacagttgggagggtaaaccttgatgtggattatttatgtgcttcatcaacttatctcctctacaggcaatttgtgcactacaaagagctgaaagaactaactgaaaaatcagcagaattttcaaacagaagtgatagctgtgcgacacgtacaagtggaattgctgataaattgagatcattcaatcagagactgaagtttttgattgcagatgctattccaataaacacccttcagatttcagcactcattgcaggtccaagtatcaggttaatatttgataaaaacagcctgttgcaaaacagcaaaaataagcaagtccccctgttttctcagatgaataacacgtcatgcataactctcagccttgcgtatgttgaatgtgttatctggccagcatctctatcttctttaactcagaaagctgatttgcatgccaaagaatcacatgatacatttgatggagtggaggagcagctagagtctcatcgtttagcactggatagtgcaggacatgtttattcagggactgttgtgttggattcttgcttcaaatttgctgatttaactcttctagtggatcatatagaggcaaatcagcagtttcacatttttggaccaatgtcagccaatttccagctgtcaacaagcaggaagtatgccagttccttctttgtcaccagaaacattctctcaataaacttgggaggaaggattgttggttgtatggctttcttattcatggacgatctgtttcccattttccaggttatcaaaggcatgcaaatgttggcattgaattctgagttgggtgacattaagtattctcaatgttttattggaaggttagcatcgttttgcaacaggcatatggatggaagcacaatgggtactgctgttgagtatattatccatgaagaaacagttgactgttatacagaactcgtggctgagatgaaacttgatttggaaccaacacacatcatcgttagtgcttcacgcgatggacttatctttaatcctgctatgttctccaacagtgacataaactacatcagtagctcaactgtgtttgagggcgtagcagcactggaatctcttgacatattagctttaggtatttggttttccagcagaagctcttctctgaaacttctgcttgatggagaatgcacagacctccttgttaacttgtctggaattcagtctgtcgttttcgagaaccaacctcagatgagtatttgtgatgatatactacagtacagtaccgtgcttagcagctctccatatgacaagagtcagttcattttatcggattgtgtatttcatctgtgtgctggtcccaataaagacagcctgatgaatgataaaatgcaagttgaatctataagtggttgcagtaccgattcttcaggaatttattattttattgaacttgaatttactgaggtttatattggagactacaacatgcacaattttttaattgaagtcaataaaccaagcaaacagaaaattgctctgctcattcatgatgatcttcagattgtcaaatgcaaaatcaagggtggtttgatcttcctggaaacgttgtctctagctaagtttgttgtctgttgcaaaatttactttcggcttcttatggatctctcatcgtgggcagcttccaactcagtcaaagattcagttacttcagtatctgcaggaagtgagactactgtgaccaacagaccacatgtgtctagtggtgttcattcccaaagcgaggaatcacaattgggttccgtcaaatgtctagatgttgatttgtctcagttttctcttactcttgctattgcggatgaatctggtagataccagggattaacacttgaagttgatgcgattcttcaacaattgaatcttggcatgaagattttgtttgaagtgaagcgtatttcgatttccagtattagtatcatgcctaatactggccatgtcaaattgagagatgtgccagcaccccgttttcgatccagcaaatctcttgctcttccatcacagtcagaaatccaagaatatcttcccttcctagaagcagataatgtgcttacttatgatcatgatgctccttcaagctcaaattctacagtggaaagttcgacaggcaacccaccactagaactttcttcacacaagagttacatccttaggcatttcgctacttatctgaagcttgagaaaaaagaattgaatggcgactctaatctgatgcgctcaagtggcgattggtttggaaacggttctgtttctggtttggagatgatattgtctttattcgctccatttcatgagattctgaggtctggctcaactcagaaggaaatacagactggtgacactcctcaccaggaattgctggacaatagggattatactatacctgatggagcaattgtggccatacgggacctcgatcaacagatgtatgtatcaataaaaaacactggaaagaagtaccaagtggttggcacataccattattctctttctagtgaatgtgcattatttaaggtgaaacaccataagggatggagatcagatacaccatgcatttctcttttatctttatatgcaaaaactgatgaaggcaaagaactggctcttagtttctctcatggatcagatttggttgaagtttcttcatctgttgacaagccttcttcactttggaccacatctcctcttaggtttgatggatttgaggatgatggtgatgatggtaaatattgcaagattatttcaagaagttctaaccaccttgtcaacaagaaaagcaattatggcattgcatttaatgatggcttactggaatttgttagaaagccaggaaatccatttaaagtgaaggttttggatgaatcccttttttctgatgttgcaaggccctttgtacccaatgtgaacttggacaataacacttacttagatgttgaaaatgaattgccttttggcatgggggatagcttggaaactggtgtgagttcacaacatgtaatcatcagtatcgataagatcgtttttaccatcacccatgaggttcttgatactggtaatgtttttccacttgtccaaaattgcataaatgatactcggattatcacacaaatattcccatccaaaatcaggattctaagttcattcaaagtcataatacactacttcaatgcaaggaaatatctatgggaggaacttgtctcacctatcactgcatatatgttcttccgatatagatttttcaacctagttccagttactaggtgtagaaggatgccacttcggttttttgttcatttaaaacaggtggatatatttgtcaatgagctttcaattgacatccttctttatgtggctggcaagttaaatgttatgggcccatatgctgtcaaaagctcagctgtctttcctaattgctgcaagatagagaataactcaaggctgacacttgtatgtcattttcaaaataatgaggatgcaatagtttctggccaacagtcagcttcagttttcttgaggcacttgacatttgaggataatcatccacccgatcaaagcattgtttctatttctttattcaaggaagggttattttcaactgctccaatcaatgtttctctccaagattctggcgtatttgcatcgagaacccgcgtattgtctctcaaagattcaagaagcttctctggaccatttgttgtggtcaaggtctcccagaactctgaggaaggcttatccctttcagttcaacctttgttgaggatctataataagagtgacttcccccttgaacttcggtttcagaggccacagaaatcaagcgaggaagcggcatttgtcacagttagaagtggagacatggttgatgaatctactggagtatttgactctatggatttatctggaggatccaaaagagcattaatgtctctagctcttggcaaacctgagatttctgaacattctggaaattttggtccgacaactctagtgaaatggtcagaggacattactggtgaaaaagctgtccgcatatctggtgttatggaaaagcttaattataacataagaagagccttcagtattgattccatgaagtcttctttcagctctttgagttgcgatgtttctatcgatggccaacatgtgacagctcttcatttcttagttcatactctaagtagagaggtccctttgcatcctacaaatggaagtcctgtatttgacaggaacgcaacagttgcatttcagttacagagagaaatttttatttacccaactgttcaagtgtataatttcttgcagacagacatacatgtgattctgaccgactgtgaaccagaaaataccagagatgataactttgatattattggcaagcaggcaacaatcacaagtggttcaagtgcttatttatatgtgaatcctgccatgtttactttttcagtcaaactaatatcatacggttcaaagtccaaggcagttaatactagtgattgggttaagagaatgcaaaagcagataagtcgagctcaatttcttgatatggagctagaatttgttattgggactgggagattccattcttctttgagattattacgccaggagaaaggcttcttggaggttgcagtgttcacaagatacacactacataataccagtgactaccctttgttgtgcacagctccccacaaaaaatcactacctatgtatgtgaatctgaataattggtctggaactgtaaaggaaaccattaaccttcctcctcaggatggctgtattctggcctcaatgtcaatgagctcctggtttacaaggtcaagtaaactgcgaataggcctacaacatgagaaaggatcagaagcttttattgatttggaagcattgtctggcttcactgaattttctctggagatccatgataatatattgcctcgtagaatggcaacatttggcatgtatttacaacctgtcctgtatgacttgcctgtgccatcacaagttgtattaattgttccaagatatgttttttcaaatgagtctgctactgcagttgctgttcgccaatgtttcgttgagttttgtccaaaagaaactgggtattgttggtctggaccaatttgtgtttcatctattggccgattttttgttaagtttagaagatcacaaggcacggtgacagatgatatgaaaaggggtaccttacaagatgggaagtggaagcagtttgcttctgttgacgtcatacaagaaactgcttcttttgttctacacttcagtaagcccccaaaggctgcactaccatatcggatagagaattgtttgaatgaagcatctatcatgtatttccagaagactttcttgtctgcttggccatcaagtcaagatttagcccatgctacccattgtatacatacacctgcactgcgtgaaattaaaattgacaaaataagtccatggaagccattcttgaagatgagtcaaaatagcaggcttaatattgattcctcattcaataatggactaagttcaggaaaacaaagatttgatgaatcatttggactgagggtgtttaagattggctatgaagtgtatgctgatggtttaactagagttctacggatatgtgaacacaaagacaatcctaaagctgataacattgaacaccctatagcaaatgtacagttcagaatgacttatatgtgtattcatctccttgagaagggccagcagggtgaggaaaagggccaatcaccatctgcaatcttagcagcaagattccagcacatatctgctgactcagttatcacagatagatacaggcacatctctcttgcaattcactcagttaacttggatgaaaaatgggaaggagcttcatttgggtcaattcttagaaggaacaagcttcaggatgctactctcagtgaaaatattcttcgcataatcattaagctgaattcgaccaactcaagtgtcaaacaagtccaatattgttccataattctacagcctattgacctgaaggttgatgaggaaacactaatgaagattgtgccattttggagaacatcccttgctcctcctggaacgccaagcacacaattttactttaggcattttgaagtacatccaattaagattatcgcaagctttcgacctggaagtccatacacaacttatagttctgctcaagaggctctgagagcattattgcatagtgttataaaggtgcctgagattagcagttcagccgtggagctcaatggtgttctcctaaatcatgctttggttactttccgtgagctatttctgaaatgtgcccagcattattcatggtatgtcttgagggcaatctatgtaacaaagggaagctcattgcttcctccatcttttgcctcaattttcgatgactctgcttcttcagttattgatgttttctttgacccttctgatggctcactcaaccttcctgggcttaccataggcatgtttaagtttataagcaaaaatatgaaatcaggcggtttttcaggaacaaagcgataccttggtgatcttggaaaaactgttaaaactgcaagttcaaatgcactattcgctgctgtaacagaaatttcagatagcattgtgagaggcgcagaagccaatggttttaatggcatggttactggcttccaccaaggtattttaaggttggcaatggagccatcagtattaggacaggctatattggagggtggtcctgacagaaagatcaaacttgaccatagtcctggacttgatgagctatacatcgaaggatacctacaagccatgcttgatgtcatgtacaaacaagaatatcttcgcatcagggtgattgatgaccaggttattctaaagaatctgccaccaaatagtgctctcataaatgaaatcgtcgacaacgtaaaaagctttcttgtgagcaagggattattgaaaggagattcttccacaatccgacccttgcgacatctacgaaatgaacctgagtggaggattgcgccgacggtgctcaccctcgcagagcacctgttcgtgagcttcgccgtgcgcgtgctgcaccgggaggccaccaaggccatcgccggagtcgtctcaaaggcgaagagaccagccggaggcggcgaagacgacggcaagggcgagtcgccgtcgtcgtcgtccgtgggagtcctcgcgaggcggagcagggtgtggagcgtggggaggttcgccgtctccggcatggtcgcctacgtcgacggccggctctgccgccacatacccaaccccatcgccaggagaatcttagagaatcaaatcatgaagcataacgatgagcgtccaaattacgaaatatgcgagagttcggtgagatggcacaacaagaagcaaacaggacagcgactacacatggcagccacgccactgtcgacgcttgctacacttgtggccctaattgaaagccttcataggaggctaaccgcttcgcttggttataccaaaagcaaaagaggcaagatccagattaggcgtgcaagcatattggtttggtctaaagagatgaatggttcgatatttgaaggcaatcatgcttcagaaatttgtgtttcaaagctaagtggaaggacatcatttgcggttgggtccagtaaccagaaaaacctgaatgttgcctgctatgaagatctgactaaaatccttggtcttagtaggtttgactctgagaacctgtcagatgtctcaaatactggtttgccaatgagatgtgctttggatccaacaaatccggcgcgtatgaggtgcataccccctgagaatgggcttaaatcagccgatgtttcaagtgacaatctgcaagatatgtcttcttgctgtgatagtccacactcacagtctggaaaagccaagttcatgtgtagctttggtgggaaaatcatgcccaggccaagtgacgggaagctcagatatgttggtggagaaacacgtctaatctcaataccaagaaacttctcatggaatgaacttgtacagaaaactctgaaaatctacagtcagcctcacatcataaagtatcagcttcctgaagaggatcttgatgcattgatatctctttcatgtgatgaggatcttcagaatatgatggaagaatatagcagccttgaaaaggccaattcctcacctagacttcgaatatttcttgtctcgcaaactgaatgcgaggattcatcattagactcaagaagcttagagagtgaaccagaatatcagtttgtagttgctgtgaacaatctggcacaactgaagaggagcaccagcggcaacagtttgatgagccaatcgaaacatcacttggataattctccactccatttcagagacacacctgtgcgtcaaacagatagagatagtggagctaaatctttgggtggaaattccttaaatgaacctccatctcagttctttattgatccgttcacacaaccaatggtgtctgagtcatcagcaactccttccgcatgcttaactcggcagaggaccatgaaacaatcaaggatgcaatcatctgcagataaatcaatattgaaccaagaatatgagaacaaaagtgaagtttacaatggatcaaatctgaaaacgatgtttcctgaccatcaacataataaacaaaataatacagacacagttattggagttggaacttccccacgccattttcaaattcaaagccaggtaaaagacttggctgtgcctcgaaatgagagtggcttgagttcccacaccaactatgatatgcctattactgtggaaacacccttttattctgaaaagttatccgtgcacccagaaaatgcagtgttatctgcagaaggcatgactcatgctttttccgatcctttgctgaaagaccgcacacaagtacttgcagccaatttgtcattagctgctggctcccacatagcctcatcattttctcaggaaatatatcaaaccaaggagctagagagaaaattaagcgtgactaggccagattttgtttgtgttaagccaactgatgttgctcgaacagaagaaccaaggcaccttgtttctaatcatactgatcaaccgtataatcaaggcattgtcagcggaaccagtgtggagccaacaatatattaccaacaagacagtttgtctagtaatgtcagacaaggacatgatggtggttctactgttcaacagtgggataagccttatcatcaggaaaacagggcagggctcaagtcctactgtgcacgtggtgcgaggatgtcctcagatgagttagatgctctagaaagctcagtcccaacatcagtacccgctaatgatcattcctgctcatttcttaatgaatgttctattgggtccagaatagagaattcagatcttgggtctcaactagacaaactgaatttaggacgtgctgctgcagattatgaaactgctggctgcgtgtccgggaatgataaagttttcttgcccataaattcttttgatgcttttgcctcccaaatatctatggtaaatagagaatctagtgtgtatcaaaatggaaagttggaccagtcatcagtgcataactatggcttggctacctctccacttactggcatgagtgactctaatgtgagtgcgaatttgctgtcatctcagaatccatttcctgtgtgtgtttcgagcagagaggtccctcttgagtacaatattacccgcaattatgtagtgaatggatttgataatgaaagcatgaagctgaatgacagaatgcataacaatgttcaaatggacgcacctgttatagttgaggatgcgactgataatgcgcctttaggcattctgtcatccagaccacttgttcctcttgttgaagtggcagctgaagaacagcagcaagttattatttcatcactgaaggatgatgatgctaggagtgatgtgccagagttagccaatgaggatcatgatgatgaaccagctgcggatggatccataagtgatgctgcagttgctgaactggaggccagcatgtatggcttacagatcataagaaatgctgaccttgaggagttacgtgagttgggatccggcacatttggaacagtataccatgggaagtggcgaggaaccgatgttgctatcaaacgaattaagaaaagctgttttgctgggagatcatctgaacaagagaagcttaccaaagacttttggagggaagcacaaattctttcaaagttgcatcatccaaatgttgttgctttctatggggtggttcctgatggaactggaggaacattggcaactgtgacagagttcatggtaaatggatcactaaggaatgttcttttaaggaaggacagaatgctcgatcgtcggaaaaggctcattattgctatggatgcggcatttgggatggaatatttgcactccaaaagcatagtccattttgatttgaaatgcgacaatttacttgttaatttgagagatcctcagaggccaatctgcaaggttggagacttcggattatcaagaattaagcgcaacactttggtttctggtggtgtacggggcactcttccatggatggcaccagagcttttgaatggaagcagcagccgagtgtctgaaaaggtggatgtgttctcctttgggatagctttgtgggagatcttgactggtgaggaaccgtacgcaaatatgcactgtggcgctatcataggcggtatcgtcaacaacactcttcggcctccgatacccaaaaactgcgagcctgaatggcgacaactgatggagcaatgctggtcggccgatcctgacatccgcccctcattcacggaggtcaccgacaggctacgagccatgtcatcagctctaaaggggcattctcagggaaacaaatgaaggctatttcatca

SEQ ID NO: 65841 - DNA, 363 bp, Oryza sativa
  Clone ID: PAT_MRT4530_6684C.1
atgccggggatcgccggcggcggggtggctccgatccagatctaccaccggaggcgtgggagcgcagctggcgatggcaccaccagtgacgaggggccagaggcctcgcatgtgcacggaagtgacaatggcgccacattattagcatgggagcagcggcggcgatttcgtcgggacacgctgcaattggctctagtgacggcacccttgagaggacatggtagcggtggcggcctcaggagtggtggggcacggtggcagaactccggcggtggcaagccaccacacagcgacagatccaccaccaccgaccttgggagtagcggggcctcagcggtgacgacgatggtagatcgaagctag

SEQ ID NO: 65842 - DNA, 518 bp, Oryza sativa
  unsure (1)..(518): unsure at all n locations
  Clone ID: PAT_MRT4530_66850C.1
gcacgagctcgatctctcaatctctctctctcttcctacaatggctaaggttaaggtcggaatcaacggttttggaaggatcgggcgtttggtcgccagagtgatcctccagagggatgactgtgagctcgtcgctgtcaacgaccccttcatctccaccgattacatgacatacatgttcaagtacgacagtgtccacggtcagtgcaagagccatgagatcaagttgaaggacgagaagacccttctcttcggtgagaccccggtcgccgtcttcggatgcaggaacccagaggaaatcccatggggtcaggctggagccgacttcgttgtcgaatccaccggagtcttcaccgacaaggacaaggctgctgctcatttgaagggtggtgctaagaaaggtcgttatctcagctcctagcaaggatgctcctnatgttgttgttgggtgttaacgagcacgagtacaagtcagacctcaacatcgnttttaatgccgttgtaccacaactgtctgg

SEQ ID NO: 65843 - DNA, 508 bp, Oryza sativa
  unsure (1)..(508): unsure at all n locations
  Clone ID: PAT_MRT4530_66851C.1
ttgacaagcttcaaacgagctttgtggagaacataaccatggaggatttcactccctttgaagagatttatttccagaggtttgatccaaacacatgacggccacaattgactacgccgaatttgtagcccatgatgcaaggcagcaacgttggactagggtggcaaacaatggaaaaaccacgttttggaaatgtagccatttaaagaagaaccgccaccctccaaggtaaccatttggaatgccccggaaatgttattaagaattttggtttcttcatttcttccttgggcccattnccagttccttccacctaccccatttccgggnttctggacctggttattgaaagagtcaatccaattccatttatgggtatttattcccaaccaatttngattaataagtagcgtagtctttatgggaccaataccttgaccatttattgtggtatattggttgatgtatgcagcgcctacataaaaagacccaaagaggtcaaaaaaaa

SEQ ID NO: 65844 - DNA, 289 bp, Oryza sativa
  unsure (1)..(289): unsure at all n locations
  Clone ID: PAT_MRT4530_66852C.1
aaaaaccaacccaaccgccgccgcatcgccctcgttagaacgatgnccgcgtcggcgctgcaccagaccaccagcttcctcggcaccggccctcgccgggatgagctcgtccgncgcgtcgggactccggtggccgcatcancatgcgncggacnntcaagagcgcgccccagagcatctggtatggacctnancgttccaagtaccttgggccgttnttggagcanacggcatngtacctnaccggagagtttccgggagaatangggtgggacaaggtggggctatt

SEQ ID NO: 65845 - DNA, 442 bp, Oryza sativa
  unsure (1)..(442): unsure at all n locations
  Clone ID: PAT_MRT4530_66853C.1
gtttttcactgctcgtagctgttgagagcggatccatccgcccagcgtccgtccacaagcagcagacggccaccatggctcagcgtatcgctgcactgctttttctggtcagtttcgttgtcgttgctcttgctgacaagcctacagccgaggttgcgaagttcaaggattacaaggagcatgaccaccagcatcaggacaagcactaccaaaaggattacaagcccgagcactatacaaagcccgactacaagcccgactacaagcctgactacaagccaggctacaagcctgactaccatgacatgcccggctatgagcccggctatgagcatgactacaagcactcaccatacggtcatgaatacgaacaccctccttacgggtatcagcccccccacgcgtatgacacatacagtgctccgccttctncatatgatgg

SEQ ID NO: 65846 - DNA, 178 bp, Oryza sativa
  Clone ID: PAT_MRT4530_66854C.1
cgcgctcgtcgccttccccatcttctccatcgatcggagaggagtcgccgccgccaccacggccgccaccaacaccatgaacgtcgggctagggctggtggccgacgccaccaccctcgccgacgcatcgtggtggccgctactccggttgctcctcctccgcctccatctccggtag

SEQ ID NO: 65847 - DNA, 189 bp, Oryza sativa
  Clone ID: PAT_MRT4530_66855C.1
aaatatgaaagatagttttattgctatttgatatcaccgtgggtttgacgtgtggcatacgatgatacctgagcttatgttttcgcttgcgaactacggtgttggggaggttgggggcgggacgccggcgagggtgggtgtgctgtggggggcgctatggggaccgcgggtggatgccgtgtgggggtg

SEQ ID NO: 65848 - DNA, 1093 bp, Oryza sativa
  Clone ID: PAT_MRT4530_66856C.1
cggcctccggcaccccgccggcccccccctttccccctcgccggcggcggcaggccctcgctcgcttttctccaccatcgacgaccagtcccccttcccctccatcgccccgcggcggcaggtcctcgctcgattttccctgcccccgtccaccccccccgcgggccctccgctgctctccgccatccccccctcgcgacccgcccccgccgtcgctgcgatgcgtcggagcacgggggagactcaccggaggaccaccagtgccgcctccaggtgctcctccctgccccgtacctcctcggccgccaagctgcggcgcccgcccccgcaaagagcccgcgttcgtgcgaggatgccttggcggcctagacaggaggacttagctggcggtctcagcggcgcagtgaatcggtctggaatttgctcctgtttaatggcattcgcaacagcactgcatagccagtggttcttgcttacacccgcttgtgctttgacgccggtctgctggtctttggttagaacatgccagttggtaaattctttatgcatggtcaagcagctgatagcaatgaaagtaaaagcggccggaggtgcgcggccttcctctccggcggtgtgtgcttcgacatctaatctccaaaaaagtactaattatctactgattagtataatgttaaatggcaggtactcttattatctatcctactgttttttgggttgcacaattggaactgtcgatgattttttttgggttgcacaattggaactatcaaagatgggatgatgtgttggttgatgttctaatgctatctgatcatcttcttctccaatgagaaaaaaaaatgaagctggcactgcaactcctgcaatataaatctgggcaaccattcagccttcatatatcataatgtgttcccagatttcgaatgatatgttacacatgaactgattaggatggctaggagaaatttggttctttctccagatgatgcagtaacgatataatgacctgataagcatgtacttatacaacagctaagcagaaaattgtatttcattgttcataacaactgatttggcaagcattttgtgg

SEQ ID NO: 65849 - DNA, 756 bp, Oryza sativa
  Clone ID: PAT_MRT4530_66857C.1
atgtcattctcacccccacctcttctttctcccctctccccatcttcccatctcccctctctggccacggtgacggcggtcggtggcgccgaggacgacgacctcaagaagactccgcccgcgcgtccgcccaccgcagccccacttcgtcctgtcggcttctcgccgctgtccgcccgcccgccccccgctccgccccgccccgccggcttcgtgctgctgtgcgccggaagacgacgacgacgaggctggcgtcctccgcttggctccgctgcccgccgagtcgcagccgcacgtggacgggagctcgacaccgcacgccgccgccgccccgcggaggaggaggaggccacggtggccggctgtgccggcgggagagggggaagaggaggccggcgagccggttgccgccgagtcgcagctgccccaccacccttccccgctcaagctcgtcggaaccgtcgccacacggaggattccatgggaatcatcgtggaacatgccgatcaaaggcctgccaagatacaacaaaaagaaaaacgtacttgcgatcgcagcgccaccctcgccgcacttccttccctcaggagagaagattttcacgtcgttgctctgtccatggccgcatcgatgccagcggcgacaacgtcgtcgctacggattgtggtcgtcttctccaatgtcaccgtggacgaaaccatcttgggcgctgaaaggagagggaaccccgccgctgccgcggaggaggaggattag

SEQ ID NO: 65850 - DNA, 2290 bp, Oryza sativa
  Clone ID: PAT_MRT4530_66858C.1
tcaagtgagccttcgtttctctcttttgagattccaccccttgtttcgctttctgcttgagtttgttttgtacaaaactgcataaaaagaagcaaagtcagagggggtatacaaccaactcccaggtacaggaaaagaaggaaacaaagacaacttattcgattcagccttggatccattcagttgcgttgccctctcttgattttccttctgcgtcatttctgtgttgcagactccgattaagctgcgcttgtgatcgtcgtcttcaaaattgattgctcgccgaaggttgaagttggtgcagagatttaatgataactgtgatataggtggctttgttttgccgaaaccatccagcgcaaatatcctaaatggcggcttgttgtcgataaatgactcgacttgatgaaggacgccggctgcggtgtttaattctctccgcagcggcgccggtttgctatcaccggccggcttcaatctcctctcctgattttcgtaatctactgagaagaatgggatgaatgaaaatgggcagatgggtgtctcctgtggcgtcctcggcgtcccccgctctagatgggttctgcttcttatataggcagcggcgacggaagcggcctccgaatttccagcgccctgtgctaatcttcgtgataagccgacgcagagacgagccaatccgtcaacgtgtactgcagtctggaatctcttgcattacattcacttgtttcttttgcattacgctctcttgctttgccttctgcatcatttgactccgtagccgactttggatgggattctttctcagatacgaggtgaagtggctggggaagaagtattcgccgtgaaagactctcttataggccttgcaacgggagggtccttgtacctcttgcactttctttatttcatcatcatcttcttcttcttcttccacctggatgtagagggtgggcagtgaccgcagcaccttatttgtcatgtccaactcaacgatccaaaacaggaactcatcatcgatcttttccatgagcaggaaggaaacgacacctggatcaaccaagctcaggtgagaaaaagtcggcacagcacgcggaagagcacaggtgtgacctacggaattagcacaaagatcccagaactcggcggcttccattgtaaaatccagttcccaggtcttttggtcgatgctgaccagagtccatgccgtgatggtgaaagcaggagggtatacatccttgtctgcggtggcggcaatggtgacgcagaccagcttgatgaagaagccactgtcactactacctctaacacaaacacagcgaactgggtcggcgcagtaggactggctgaacaagcgggtgctgccatctctcaccggtttggggagcgggatgaagctgaattgatgtggctcgtccccagggttgaggacgtcgatgagcaggatgccctggtagtagtcgacccagcacaggaagcggtcgtggagggggagcacggcgtcggtcctccactcgccgaggttgaggccgagcatgctcatggcgcgacggacacgcaggggagtgatgctccactcctccgcttcccctgattgcacaacacagagctccacctccttgctcccactggatgtgaggtgcgccacagtgaagagcgaccggccgtcctcgccgtcgccgtcgccgtcgcggcacaggaggccgacgtctcggctgcacatgtagcgctgccgctgctggtggtacggctggtacaactcgtcctcctcctggtcggtgaagccgccgacgaagcaaggcggcagccgcgtgagcaacggctgcgaggagggggaggcggagtagatgaagtagtcgagggggtagtgcccatcgacgttgaacccgggttcctcgaaggggacggcggcgacgaagaggatgcagccgcggtgggcggcgatgacgtcggggtagcggacctcggggaggtcggccggccactggggagggcagtggaggtagaggcgggagacggcgggcgggtcggcgacgcggagggaggcgcggacggggaagccggtgcaggtccggccgaccttggacgccgtgatgtcctcctcctcgtacttgtgcctcctccgccagctgcagcggacgtacgggtcgaggacaatccagtccgccgcccccgccggctccggcgatccccggccttcttccatgtcgccgcgccgcagttcggtgttcggttcggatcggatctagctagggttttacctcccactcccagatgtctcgccgccggc

SEQ ID NO: 65851 - DNA, 407 bp, Oryza sativa
  Clone ID: PAT_MRT4530_66859C.1
tcgaagagatgcaggagaccagactttgcatggggtagcacacatcagttggtgcacgaatcgccaaaaatgccgactactgatggaactccacatggctgctaccatacgaatagctgttgcggcacgagttctgctactgctggggcgcctagtacaccaatggaatacagacatgccagtgcgttctctgggacgaagagagcatctaggctgcctcgactgcgcattacacccatgcatgcgagatatggacacgggacacgttcgactgcatgccaaccgccattgaaggtactcgtagcaggagagagctcagatggctctcattcagaggttcctctgacttggttgcatcctgagtgagcctccaagccagacgacgccccgatggaccgactcatata

SEQ ID NO: 65852 - DNA, 2871 bp, Oryza sativa
  Clone ID: PAT_MRT4530_6685C.1
atgccgcctaaaagtgatatagagttcagaatagatttggtcccaggaacaaccccgatccataagagaccttatcgaatggcagccaatgagttggcagaagtcaagaggcaagtagacgatttgcttcagaaaggatacatcagaccgagttcatctccgtggggagctccggttatttttgtgaaaaagaaagatcatacccagaggatgtgtgtggactatcgtgccttaaatgatgtgactatcaagaataagtatccgctacccagaattgatgatttgtttgatcagcttaaaggtgccaccgttttctccaagatagatcttcgatcagggtatcaccagttgagaatcaaagaggaggatatacctaagacagcttttaccactaggtatggattgttcgaatgtactgttatgtcttttggacttaccaatgcccccgctttcttcatgaacttgatgaataaggtgtttatggaatacctagacaagttcgtggtggtctttattgatgacattcttatctactcccgaaccaaagaagagcatgaagaacatcttcgccttgcactagagaagctacgagaacatcaactgtatgctaagtttagcaagtgtgaattttggttgtctgaagtgaagttccttggtcacgtcatctcagcaggaggagttgccgtcgatcctagtaatgtggaatccgtaaccaactggaaacaaccgaagaccgttttagagattcgcagtttcctaggcctcgcaggatattatcggaggtttatagaaaatttttccaagattgctaagcccatgacacgtctgcttcagaaacatgtgaagtacaagtggtcagaagaatgtgagcagagttttcaagagttgaagaatcgcttaataacagctcctattttgattttgcctgatctaaagaagggtttccaagtgtattgtgatgcatccaaacttgggttaggttgtgttctgatgcaagatgggaaggtggttgcctatgcatctcgtcagttacgtccgcatgaaaagaactaccctactcatgatcttgagttagctgcagtagttcatgcgttgaagatttggcgtcattatcttttcggtactcgtacagaggtgtataccgatcacaagagtttaaagtatatttttactcagccggatctgaacatgagacaacggagatggttggaattaattaaggattacgacatgggaattcattatcacccggggaaggctaatgttgtagcagacgctcttagcagaaaaggctattgcaatgctacggaaggacgacagttgccattggaattatgcaaggagtttgaaagattaaatttggaaattgttagtagaggtttcgttgcagccttagaagcgaagcccactctaattgatcaagttagagaagcccaaattaatgatcttgatattcaagaaatcaagaagaatatgagaagaggaaaggctatcggtttcttggaagatgagcaaggaactgtatggttgggcgagagaatctgtgtccccaacaacaaagatttaaaagatgcaattctgaaagaagctcatgatactttatattccattcaccctggtagtaccaagatgtaccaggatctcaaggaaagattttggtgggcaagtatgaagcgtgaaatcgcagaatacgtagcagtatgtgatgtttgtcagcgagtcaaggcagaacatcagaaacccgccggtttgctgcagcctttgaagattcctgaatggaaatgggaggaaatcggtatggatttcatcactggtctacccagaacgtcatcaggccatgactctatttgggtgatagtcgacagacttaccaaagtggctcatttcattccagtaaagacaacttattctggaagtcggttggcggaattgtatatggccaggattgtgtgtttgcatggcgtccctaagaaaatagtgtctgatcgaggtagtcagtttacttcaaatttttggaagaagcttcaggaagagatgggttctaagctgaactttagtactgcttatcatccgcaaacagacggacaaaccgaaagggtgaatcagattttggaagacatgttgagagcttgtgctttagatttcggtggaagttgggataagaatctaccttatgcagaattttcgtacaacaacagttatcaagctagtcttcagatggctccttacgaagcactgtatggtcggaagtgtcgcactccgcttttatgggatcaaacgggagaacgtcaggttttcgggacggatatcctgagggaagcagaagaaaaggtgaaaatcattcaagaaagattgcgtgtggcccaatctcatcataagagttatgccgacaatcgccgcagagatttgagttttgacgaaggagattatgtgtaccttcgtgtcacgcctcttcgaggagttcatcgttttcacaccaaaggaaaattggcaccgcgttttgtgggaccttataaggttgtcagtagaagaggagaggttgcttatcagttggagttacctcaatctttggcaggagtccataatgtgttccatgtgtcgcaattgaaaaagtgtttaagggtacctaccgaagaagctaatcttgaacagatagaagtccaagaggatctgacctatgttgagaaaccaatccgtatcttggaaacaaatgagagaagaaccagaaatcgagttatccgtttttgcaaagtccaatggagtaatcactcggaagaagaatcaacttgggaacgagaagatgaattgaagtcagctcatccgtatctgttcgccagttcttctgaatctcgaggacgagattctgtttaa

SEQ ID NO: 65853 - DNA, 243 bp, Oryza sativa
  Clone ID: PAT_MRT4530_66860C.1
gccgccgcagcctcctcaggtctgctgccgatcctctccttcgagttagcttcctccttattgggccgtgggtcgggagaagaccgcatcgcgttgcggtcgttggccacgtcgactccggggcgccccgcccgcgggccatccgatctacgagctggccggtctcgtcctgcctgtggtggggggggtcgagatcgacgccggtgtgtgaaccgagctcttcgcgacgcgtgggtgcttgtc

SEQ ID NO: 65854 - DNA, 528 bp, Oryza sativa
  Clone ID: PAT_MRT4530_66861C.1
ccagttcaagatccagcaaagatgactgaagtcattgtcaaagcacttgaaataactggacagagaggtatcatcaacaaaggttggggtgggcttggaacattggcagagccaaaagattttgtatatctacttgataactgcccccatgactggctcttcctgcagtgtaaagcagtggtgcatcggggcggtgctggaacaacagctgctggcctcaaagcagcgtgccctacaactattgtacctttctttggtgaccaaccattctggggagaccgagtgcatgctagaggggtagggcctctacctataccagttgatcaattcagcttgcaaaaattggttgatgctataaacttcatgatggagccaaaggtgaaagaaaaagccgtggagcttgccaaggccatggaatctgaagacggtgtgtcaggtgtagtcagggcattcctcagacatctacctttaagggcagaggaaacaacacctcagccgacatccagcttcctggaattcttaggtcca

SEQ ID NO: 65855 - DNA, 150 bp, Oryza sativa
  Clone ID: PAT_MRT4530_66862C.1
atggcgaacgcgagtgttcctaagccggcgaagcgcctgtcgcgcaagaggagcttcaggctcggcctgccgctgctctgcgggcagcccgcttcggtcggcatgcgcacgtgggcatcggcgctccgagtcctacgaggccggaggtag

SEQ ID NO: 65856 - DNA, 695 bp, Oryza sativa
  Clone ID: PAT_MRT4530_66863C.1
aagccccatctatcagccattgctattaattccattgaacaactgtgcaaaaaaaaaaagaggccatttttggttcacgaagatccaaataaatcaactaagtatttaggtataaaaagtatacggtacaactacaacagttacaacctatgctcaacatccaagttgttatttgcttgccatagtggtactgcaagccctgaaagccacaggatggtcaactcatgccaaaaacatgctgaaagcttgtggtggcataactttatattttgcatgtcccattagtatttcatcactggccaagtttactctcgcaaaatttactccaaggtttagtaatatgcagcctgttactacccaatagtaacttgcaaaagacataccaactattgggcattgagcacgaaagtaagaaagaaatataggaaccccattgcaacgaattcagatcctctgcaacaggcagtcttggatgatattgcacttctgtgcacgaaaggtcatgataggcatccatgcttaactatctgttctttatttgagaagttgtcaaccatctgtcctaaaagtgtggtggttggaaatgtatggatggcagcccatagtcaatgaacgatgtttttaatatcctccagtggttcactaagagaattcatcaggagcagctgacgagatcatgggacctgccctcgtgc

SEQ ID NO: 65857 - DNA, 540 bp, Oryza sativa
  unsure (1)..(540): unsure at all n locations
  Clone ID: PAT_MRT4530_66864C.1
cctagcgctcgagcgaaccgtgagcgaccctcgcccaccgcctccgttccccatgacgatatcgctgccggcgacggcggcggctctgtccgtcgtcctcgccgcgctctgcctccttgtggtcccggccgccggattctacctcccgggcgtcgcgcccaacgacttcgaaaagaaagaccatctccctgtgaaagtcaataaactgacttcaattaagacacaacttccctactccttctactctctcccattctgcaagccagatacgatcgttgacagtgctgaaaatctgggtgaagttctccgtggggatcgcattgagaactctccatatgtgtttgaaatgagggtacctcagatgtgtcaaatagtctgcaagatttcagttggggaaaaagaaggaaaggttctcaaggaaaagattgaagatgagtaccgcgtgaacatgattcttgacaacctacctctagttgttcctattcaaagagtggatcaagaaggtgcttatttctatcaacatggngtccatgttggagc

SEQ ID NO: 65858 - DNA, 456 bp, Oryza sativa
  Clone ID: PAT_MRT4530_66865C.1
atgtgggtggcgctcgagcttcgtcgccgcggtggaggtcaccggccgtggaaggaggcagtggagcagggaggcacaggcgccatagttgccgctcccaccggcctacgccgcccgtgccgctcgcgtcctcgaccaccgacgctgcctccatccccacgccactcgcgtcgtcctccgctcgcaggggagggaggtgcaggcaccatagttgtcgttcccactggcctatgccgcccgcgccgctcccacctccatccccatgccgctcacgtcatcctccgccgcccgtgccgctcctgccggcaccgcctccatccccgcaccgcactgaagtgggtgccgcactgcagagaagagaggagaagaattggagagaagtgggtgaagaaaaaggggagaaaagaggaggaagaaggggtattagaggctgacatacaggtcccactattatag

SEQ ID NO: 65859 - DNA, 2247 bp, Oryza sativa
  Clone ID: PAT_MRT4530_66866C.1
gggaacgaatgatgaagcctatacgattatattacaagcttaatcatcggccaaaatactactcacaggaggaagaacgatcgaatgaagtagctagcagaaagaggataatgaatatgaccaagaaaagctgcgacaggtgaatcgacctggctgctactgcgatcatgtgatcaagaatcgtggctttcatggggggtatcgccggcgacggcgacgtcggcgtcggcgtcgccgtctgtcggctcccacgacgaggcggtgagcagggacaggtccttccacccgagcttgaggcagccgtcctcttcgacgagagtgtagcccttccatgggtacatgccaagaagcagcctcgcctgcgcggcggggctgccggccagggtcaccggccggaaccccgctcgccgcagctcgtcgccccaccgctcgacgcgcacctcgccggtgcgcttggggcccccgacggcgacgatgttccgtatctccgcgccgaggagctgacgctccaccgcgtgccgctccgccgcctcctcctcggcggcccccgcgccgtcgcccagcgcgtcgaacagcgccgagtagtagtgcagcgcctccacgaagcggcccaggaagtcgccgctgtggccgaggtcctgctccacgatggtgatcagcttcggccggaggctcttgagcaggcgcaccgtgccggcgtcggagcccgtcacgtcgtagaggcagtggtgcatccagtgcacaacggtggcctccccgtggtggcgcgggccgaggagcgcggcggcgtcggcgacgtgcccgatcttcccctcgatgggccggaactcgaagggcaagccgagcgacgcggcgaagtcggcgaggcggcggccggtggcctcgaggacgtcgagcgacgcgccgaggccggtgatccggagcgagcgcggcttggtggggcgggaggcgaggatgtggaagaggcccggccactgcagcccctgcatgatgtcgaggtcgatcacgtggacgcggtcctcgccgtcgagcgcctggaagatggcctggttggccgtgaagtgcgagaacttgacgagcggcgacagcgcgttgtacgcctggaacgcgccggagatgcggcggctctgcgcggcggcgagcgggcggagcgccagcggcgagtaggcccccaggtaggagctcagcacgcgcgcgcacagcgcgtccccgaagtaggccgcgacgcgctcgggcgacgacccgaacggcgacgccagctcggcgatctccggcagcaggtcccgcgcctccggcagctggtccatcgccaccgcctccgcacacctcagcaacaaactaagcagccgcagcccacgcgtctccgccgccgcctcctcctcctcccccgtacgctggcgcgcgcgggagggggaggccgcctgtgcggtttgtcgggttgctggtagctgctctcgcgtcccgtagcgggcggcgcccaggcagagggaatcaaaggacgggaccggtttttttttctactacacaataacacccgatttttctcacgatcgcgcgatggcgagggacgctaggtcgggtcgggtcggcagcagcaggaggccgtgggggaaagctgcacgcacacgagacgacgggggtgagttgatggacagcatgtgatcatttgatggtggaagagacgagcagagcagcgggcgagcgagcgcgaacagtgcgggggacgaggggacggacaaaacctccccctcggataccagcgatcgatcggtggccgttgcggaccccgctgaggcaaactgccgacgccgacgccgtcagtggagctgtgggcggtcttctccttgtccggcgacggggtgtccggcaccgcgggtggaggcgatgaggcggggttcttggagcagcggaggaggcggtggttgccccagctgaggttggggaacgagaaacgatggagctgcgtgcgcgatggcggcggcgtcctcgctctccccgttccctccccgccaggcccccgcgacggcggtggcgtccttgctccctccgtcccctccccgcggctgcggcggcggctgctgctcggcctcgagcgggctttgcccgagcggttgctcgccgctctcgttggctcgggctgcgcagaacgacggggcgaggcggagcgagtggtggaacgggagcgggaggaggcgggtggaggtggtgaagaggatgaggcggtgggggggggggggggggagtaag

SEQ ID NO: 65860 - DNA, 1289 bp, Oryza sativa
  Clone ID: PAT_MRT4530_66867C.1
cccacgcgtccgcggacgcgtgggcaaaagtcctttggcattcctttaaatcaaattggcccgtatgtttgtgataaattatacaaaatacccatagttttatgaaatttactctaaaaaaaaactaagagtaccataaaaccattcatctgtctctagataccgttacaacccatgagctgatatagcatggcactagtatagtagaaaattagagcttccctttcaactgctacgagtcctttaaccatcactttacacttggcagttattgaacttacgcctggtataaacatggtggcgaagttcgcttgccactgaaacaatggcttgaattcaattgcctagccgtatgttcatctccccgatgtagaagcccctaaatgtctccaaagggtcaatccacagtatccattcaaagttcaccttcaaactttttcttaattttaagggcagccctgacgacgttccctcttgttatgatcccaaccaatttgcctgaactgtcaactacaggtaacctgcggtacttagtttcaaggagtaaccttgcagcatcttcaaggttagtagtttcacgcaccacaagaggtgcagacgtcataacatcaccaatgactttcccattggttttgctcaagagcttctgtatctcattgaacgtcttccaagtactatccacctcaggaaatatgtctacttccgcaagtccatttcctgatattgaatcgagtgctaagagatcataatctgacacaacgccaaccaaattccactcgtcatcaataacaggaaagccagttatcctatgctccaccagcatctcaagggcttcatcgactgaagttgttgacttcacaacatggagttcttcccttttagtcataaaatcaccaacagtgtaaattccactgttttgcccagcgacggaggcgtggtgcggcaggccgcgcgcggcgagcggggcggcggcagcggacgggcggacggaggctctcgacggcggcgcacgggacccagcagcgggagccgccaaccgtggctccgagggcagggaaggccgccggcggccgcctggcaacagccgagaagtcggcgcacaggagcacccccgcggcccccacgggggctccttcccccgacccccgtcacacacacacacagtctctctccctcacgcacgccacctcccgctcgctcgcgtcggggttcgtcgtggtgtggttggggagagtggcgagcgagaaggtgaggaggaggaacttgtggctccgcctgcgccctcgtgc

SEQ ID NO: 65861 - DNA, 208 bp, Oryza sativa
  Clone ID: PAT_MRT4530_66868C.1
cggacgcgtgggtccaggtggacgacgtgccggtgaggacgttcaagaaatacgacgacactgtcgtaccactaggaggaggctatgattctacacccgacacttgttgtactatacattactggaatacaagtcacagaaacgtatatacttattgacatactttttccgtgtttaagttaaccaacatacattagttctttaattt

SEQ ID NO: 65862 - DNA, 1964 bp, Oryza sativa
  unsure (1)..(1964): unsure at all n locations
  Clone ID: PAT_MRT4530_66869C.1
atggatgacccctacatcgacgaggacggcgagccgctcatggacccctacgacacgcgcgacccctcccccgagccccagcagcagccctacgacgacctcgaggacgacctcggcgacgactggaaccgcggccgctccccgacccccgtgcacggcgacgacggggccggctcctcctccaagcctcggaagcgcctcctgaagaagggcggcgggggaggtggaggcggcggcggccatgggatgcccagcgacgggctggatgactggggcgaggaggcggcggggttggcggatgacgatgtggaccccgaggcggatgccgcgaagaagaggaaggggtcgtcggcgctcagggacctcgcgaggggcggcgggaaggagaagaaggagaagaagaggaggaaggaggatgggagggagagggagggcggcaggggaatggggatggcaagggagaagagaggcggctctggtgggaagggctttggcggcggtgggtggcggcgggcatggggaccaggatgaagggagagggagatccaggagctatgggataccatcgccgggggtgactccgaggatgaccaagaaggtgtcagaaccttagatgatgataacttcattgatgatactgggggttgatccagctgaccgttatggcagcgataatgatggccactcacctcggcattaccctcaggcagaggaaggggaagaggatgatgaaattgagcggctctttaagggtgggaagaagaagaaaaagaacgatcgacctcgtgctgatattggtcttatagtggaacaattcattgctgagtttgaagtggcagctgaagaagatgccaacttaaataggcaatcaaaaccagctattaataaacttatgaagcttccactactcatagatgtactctcaaagaagaatctccagcaggaattccttgatcatggagttctcactcttctaaaaaattggcttgaacctttgcctgatggtagcttgccaaatatgaatattcgaacagctgttctgaaattattaactgattttccaattgatttggagcaatacgatagaagggagcagcttaaaaaaagtggtcttgggaaggtcattatgtttttgtcgaaatctgatgaggagactacttctgcaccaaagaagaaaaaccttcaggcgtcaaaactcagtgttgaagggcgtggaatgatcaagatccggcagccggcgccgtcgccgcccctcgccgccgccgccgccatgccgcggcggggcgagacgacggtggtccccattgaaatgggcggcggcggcggtggcggtggcggaggaggccaggagcggcctaaggccccgcgccgccacggcagccacggtccagggcactacggcaatcaccaccaccaccggagccggcccccgccgccgccgccgccgccgtcggagttccggccgttccggcgctggttcccgttcctcgtgccgttcttcgtcgtcgtcaacgtcgcgctcttcgtcgtcacaatgtacatcaacgactgccccgcgcatatgcaggccaccggcgacgcgatcggcggtgacgtcggggagggcgccgcgtcgcaggggtgctggctggagccggagctcgggaggttcgcgttccagtcgtacaaggagaatcccctcatcgggccctcctccgcaacgtaattgaaaatgggggcactagaaaccagtaaagttaccaatgaccatgaaggctggcgcctcattacatgcatttggttgcacgctggtgttgtccacatacttgctaatatgttgagtctcctattgattggaatcagacttgagaaggaatttggtttcatgaggattggcacactatatgtcatcttggngttggtggtagcttgctgtctgctctgttatggtgtcaaatatcttgatggtgcctcaggtgcactgt

SEQ ID NO: 65863 - DNA, 1137 bp, Oryza sativa
  Clone ID: PAT_MRT4530_6686C.1
aaaaggttttataaaaataaaaaccttaaaaatccctctttccctctcttgggccggctcggcccatctccctccccctctctcctctcccccgcggcccatccggcctctccccgcgcgcgcgccgctgacgggcgggcccgcccgccaccctcgctgacgggtggggcccacccgtcatccccttcctcccgccgctcccgccgcctctcccgcgcctagcgccgccgccgccgcgaatcccgccgcctcccgtcgtccccgcgtgaaattaataggggggaattactccccgtgatcccctctccctttccccccctttttccctctctctctcacattgaaatggccggatttgctcccgcaaatctcgccggcgccattgatggcggccggacctcccgcgcctattccttccccgccggccgccctctcccccttccaaccctatttaaaccctccccacacctccttcgcccgtttccaccctttgccgcgccttctcctcgccgcaatcgagctcgcgccgtcgccctctctctcctccatcaccgacgaccttcggctagccctctccgctcgccgggaccgcctcccgccctggcgccgcctcctccggcttcgccgcactgccgtcgaccccatccaccccctcgtcgagctcgccgaccgccggagcgccgccgtccccgtccacccgagccgcgccgccaccttcatccgctccgaccgcctttttcgtcgtcaccgtcgacctagggtgagccgtggaccgccgcctcatttccccctttccctcccctctcacggccgctgctccgccgtgcctatggccgccgccggcgaccataggggcgcgggcgcgccgcctcccgccggccgcgccgacgtggccgccttcgggcgcgctgagtggttgccgcgtggggcccggcagtcagccgcccgcgccctcgggtgcggctgacgcatggggcccacggtgccggccggtgtgagcccgggtgcacccggtccaccgtggaccgtgaggctgccgcgtgggcccgactcccgtggacccggtccgcgcgcccctccccccggccttgttcaccctagaataacaaaaccccaactagtgggtactctactcat

SEQ ID NO: 65864 - DNA, 408 bp, Oryza sativa
  Clone ID: PAT_MRT4530_66870C.1
atggtatatctgcgcgtgtacagacgttctctgtatacgctaaggaaattcatcacgaagtccatcgatggtcgtcactgtatcgtgcagggtccgatgtctccgagttctacttggaaaccgcctgacctgcgatataaaaatgaccccctgggaggacctaaaacatcaaatctcatagccaagataaccaccatagcctatgaagccggagcctacaggagccaagtcgtcgggtgatctagtcgaatcaactcgactatgatctcgtcgatcctcgtaccagcataccccaataccctctatatccggtctacaagtatcctccgtcgacattcttcatctggaatgatgacacaacgttggagcaggaaattggattgtgtagtgtttctctcttgatcctac

SEQ ID NO: 65865 - DNA, 1512 bp, Oryza sativa
  unsure (1)..(1512): unsure at all n locations
  Clone ID: PAT_MRT4530_66871C.1
atggagttgggtcgtagcagcgatcttaacatttccctgcagtcacggagacacagctacctgcaggagatccgaagcttggccgtcgactcggccggngggtggtcgccgtcgtcgtcgtctcggtcggcgagatccagtagttactacagcagcagtaagtcaagcagctctcgtcatcgctacgccccttactccatctcatcttcccggaggttggcaagacttgaagacaaaagccctcgcgacattgcgcggcggatggtccgcgacggcttcatgggcaagctgatcggggagttcggccgggcgcccagacctgctctggagaggtggttctccgagctcgacgtcggctgggtactccggtcggcgctggagaaggagaagagcgagctggccttggataagctgtacgatcttgccgtgcagaggtggacacgaggattcaccgtgatggccgaagcgctcagcgccacgcagcgccatctccaggaagagggccgttcgaccgcccaagtcgaccgggacgacgaccttcgactggtgcggttcgttgaggcgaccgtctgcaagatgcttgcctttgccaattccctagtcgccgtggccgataaaacctggaatccaatgaacaagctctcgggcctcatgaacgtgcgcagctgcatctcccacgcgtctgaaatcatcatgctctccttgaagaaggagaccctctggctaccagattcggacgaaatgctgcaaggcctgctcaacaagaccagcaatattttctcgactgcaaaagataatttgggtcaggccatacaaaggatggcaaacgatgctgaagctgttactcctgtcttgagtggcatgcattcctgggaaactttcccgcagagtgcagaaatccacaaggctactcacttaattatggactatgcaagactattttggggacacattgacgagctcaactccatactaggccaatgttggcctcatcgcatcctaaaatgcgacatcattgagcaaatgatcagcaacttaatagatcatctggagaagaaatcagagtcgttctcagaccctatcctgaggtacttgttcttgcttaacaattcctacttcatacaagatcagtatattgcaatcaccggttacagccttccatctgactcgaaaatagggataaaatattgcgactaccgaaattgctatctcaatgtctcctgggatacagtgctatcttgcctgcacattaagatgacaacgctctggttttctaaaccctcgcagctagcaagattcaaatcggaatttcagagaacatgcagacatcagaagctatggaaggttccgaaccctgagctcaggaggagcctgcgaaaagctatcattgacaaggttattactggtcctactggatacagaacatacctggaggcccatccagagcaggagaaatgtggcagtaatcaacaggacatggaagacatggtgaacgagcttttcgaaggatga

SEQ ID NO: 65866 - DNA, 632 bp, Oryza sativa
  unsure (1)..(632): unsure at all n locations
  Clone ID: PAT_MRT4530_66872C.1
ccggccgagacgcttgcttggcattgattgcgcgacctagccgaacctgcaactgggttgtgtctcaggatatctcttcactgttcgactcactgaggtttgatgaagatctgaacgcggatgtacgatgagttctggaccaatcttcgtcccctacccaactatccacttcatgcttctccgctacgctctagagattttgtgcgtacaacgtgtaccatgagcaactctctgttgccgacataaaaagcagtgtacttcaaggcatcctcacatgatgcgcaaatatgaccctcgacacggcaacgacatggcctgatggctcatggaccgcgaggatgatctgcccgaggacctaaacgccgacgaagttataatcaagaccaagcggaccatcgaactcgcgcactgtcgaccgaatgtactgaagtgtccgatcaaataccagccggccagtgtagtgcgcactggngacctcgtgaatgtggatagtgccgtgtgcatgattttcaactctgccatagtagtggatgtgtactcccgtatccaacacaagttcgacctcatgtactccaagcgcgccttcgtccactgatacgtgagagagggcatggaagaggttgagctctctg

SEQ ID NO: 65867 - DNA, 369 bp, Oryza sativa
  Clone ID: PAT_MRT4530_66873C.1
tattacctctcatcgagagggcctgaacctgtctaaatcctttgtctccacatccatccacttttaggtctcgtgctctacccccttttcatattgccgaaaatttgtttcgacagttgacgcgccaggtaggggttgcgtcgagttacctgtcgacaagtgcgatggaatcaacttcatgagtcaccgaattcatcttcgcttcgggagtttttttcgccgaccacttcaacatgctcttgctcttcgactcggatccaatctagccgggaagatcagtctcgacatgttcgatggattcaatttccgcctcgacatgttcgatggattcaatttccgccgccgtcaatacctccttggaggacctca

SEQ ID NO: 65868 - DNA, 255 bp, Oryza sativa
  unsure (1)..(255): unsure at all n locations
  Clone ID: PAT_MRT4530_66874C.1
ggttaccntcgtctgtgtggaggntgtcattcctcacatccacatagtgccctggatcatacaagtgcctccaaagagtgaagattgaggacaggatgcatgccttgagtttaaactggacttgttgtggtgattggagtgcctgagtttaccgtggtgatggtgtttgagtgcaagctgttgtgctatgattatgcagcaatcctatgctggtggtgatatgggtgtgtgcctgcgtgatcttgcttgctagtg

SEQ ID NO: 65869 - DNA, 291 bp, Oryza sativa
  Clone ID: PAT_MRT4530_66875C.1
ggggaaaaacgggcccaaataggggaatttaaacaaagggccaaacccccggagggcgggaacccccccgagaaaaagagaaaaacccgggccaaggttcccaacacccccaaaaaaaaattgccggaaaaggggaacccggaaaaaaatccccgggggccccgcgaaacggccccggggaaagtcctcccaaagggggggcagggccccttggacacgctggcggggcccagcgcggggaccatgccattgttggactggaggagctgcagcgagaaggagtccgggacg

SEQ ID NO: 65870 - DNA, 735 bp, Oryza sativa
  Clone ID: PAT_MRT4530_66876C.1
atgccgtccttcgtcgacggccccactctccggtcgctgctccggccgtccaccaatggccgccggacgaaggcctcggacggcggaggaggtggtggtggtggagggatctttaagatgttcaagctcatgcccatgctgacgtccgggtgcaagatggtggcgctgctcggccggcacaacagggcgctcctggccgaccacgcgacgacggtgacgctgttcgggcaccggcgcggccgcgtgagcctcgccatccacgaggacacgcgcgcgccgccggtgttcctcatcgagctccccatgctgaccagcgcgctgcacaaggagatctcctccggggtggtgaagctggcgctggagagcgacacccgcagcgcgcgccgccggctcgtggaggagtacgtctgggccgtctactgcaacggccgcaaggccggctactccatccgccggaaggaggcctccgacgacgagcgccacgtgctgcgcctcctgcgcggcgtctccatgggcgccggcgtgctgccggccgcgcccgagaaggagggcggcgtccccgcgggccccgacggcgagctcacctacgtccgcgcccgcgtcgagcgcgtcgtcgggtccaaggactccgaggcgttctacatgatcaaccccaacgagggcggcgtcggcggcgacagcgccggcgacggcagcgcgccggagctgagcattttcctagtgaggatgaaatga

SEQ ID NO: 65871 - DNA, 124 bp, Oryza sativa
  Clone ID: PAT_MRT4530_66877C.1
tcgttcttttttttttcgaacacctgcgctagcgatttttggcttcccaattaaccgacggcaaaagagctttggaaaaacccgcggaacgacccaccaggtaccacaaacggggcacccgggg

SEQ ID NO: 65872 - DNA, 293 bp, Oryza sativa
  Clone ID: PAT_MRT4530_66878C.1
atgcattctattatattagcatggagcgggccaatatatataatggggcggaaaaaaaaacagggcctcaccctgcaaaaggggtcctcccaaaaaggcggatccaagggagctggcaaccccaggttaagcaggggggtgcccggacaaggggggaaggggaaccgccaaccacaaaacattaaaagggggccacgggacctgcccccaaggggaggaaagccaaatcccccctccctatgctgaaaaaggagcggcccccccctgggggttcaaaacggcgacgggtcaca

SEQ ID NO: 65873 - DNA, 1212 bp, Oryza sativa
  Clone ID: PAT_MRT4530_66879C.1
tgcaccacacacagttcagctagcagatcacctagctagatagctgcctctatcacagtatatttgctccctgcaacttgctgctgctgcaatagctagcagctgcagctagtaagcaaaactatataccttcagggttttttgcaagatcgatggcctcctctctcgccaaacacgacgacgtcgcctcggtttagtcgtcgtcggccggcagccggatgacgggcagtagttgtccggccgattcttcccagctgctgtaccctcgccggggtgcccccaccaccaccaccacctcccgtcctcctctccatccgctcatcgctcatgcgccctacgacgtcgtcctccaccgatccgtcgtcctctccatcagctcagctcgtgatcaggctgagctcgcgagcttctggtgctatataaggctgggtggtggtgcaagtgcgaagcgagcggccggtgaggacgatcgatcgagatcgagcttgacggcggcgagaggaggaggaggggagacgatgagcgggaggggcagggacgggaccctcttgtggttgggagggttgtgggtgatgtgctggacccgttcgtccggagcacgaacctcagggtcacctatggctccaagaccgtgtccaatggctgcgagctcaagccgtccatggtcacccaccagcctagggtcgaggtcggcggcaatgacatgaggacattctacacccttgtgatggtagacccagatgcaccaagcccaagtgaccctaaccttagggagtatctacattggttggtcactgatattcctggtactactgcagcgtcatttgggcaagaggtgatgtgctacgagagcccaaggccaaccatggggatccaccggctggtgttcgtgctgttccagcagctggggcgtcagacagtgtacgcgcccgggtggcgtcagaacttcaacaccaaggacttcgccgagctctacaacctcggctcgccggtcgccgccgtctacttcaactgccagcgcgaggccggctccggcggcaggagggtctacccctagctaacgatgatcccgatcgatctgctgcatgctcactatcatcatccagcatgctatacattgcaggttcagacaattgaaatgattctcgacacacaacatatatatgatggtgtaattaattatgcaattaattagctgagcaaggctaaggt

SEQ ID NO: 65874 - DNA, 1144 bp, Oryza sativa
  unsure (1)..(1144): unsure at all n locations
  Clone ID: PAT_MRT4530_6687C.1
gttcaaaagtacaaaataaaagtggttagtgatgatcctgggaccagttcttctaaggatggagatgggaaacaagctcgagacggctcggctcaaccgagtgacaaaaggtgctaccgacggttctttaggaaatcaaggcgacaattgcccgccaccttggcataagggtggggtccatcagtcatcccttacctccaaccgctcctgccgcctcgtcagtgccctagcgcagcgtccgccgcgaatccagcggcctcaggccgtctctgcgcgcaataaagagggggaaagcactccccgtgattccctctccctttccccccacttttccctctctctctccccggaattagtacgaaaagtttccccctaacttcgacggcgcatcaatggcggccggatcttccgcaggcgattcccctcatccggctctcttctccccctccggaccctatataaacgctccccgtgcctcctnccaccatttccgccactcgccgctctctctcccgtcggaatagagctcgcgccgtcgcccctctctttccgcggtcgccgccgagctccggtccgccgccgtcgtcgccccggactttctcccgcttcggcgtcgctttcttcgggttcgccgcaacctcgccgacctcgtccacctctccgtttcggtcgccgaccgccggaacgccgccgtcctcttctacccgagccgcgccgccgccttcctccgctccggtcgccgtttccgccgtcgccgtcgaaccggggtgagccgtgaaccgcccatttcgtttccctctcccctcccctctctcggccgccgctccgccgtgcctatggccgccgccggcgaccataggggcgcgggcgcgccgcctcccgtcggctgtgccggcgaggccgccttcgggcgcgccccgcggctgccatgtggggcccggccgtcagccgcccgagccctcgggtgcggctgacgcgtgggacccacggcgccggccggtgtgagccgcgtgcacccggtccaccgtggaccgagaggctgctgcgtgggccccactcccgtggacccggtccgcgcgctcctcccctcggccttgttcacactagaataaacaaaaccccaactagtggacactctactcat

SEQ ID NO: 65875 - DNA, 317 bp, Oryza sativa
  Clone ID: PAT_MRT4530_66880C.1
gtcattcgcgaagaatcatcatcatcaagggggagttttgaaactaactatccttgcgccccggtcttggctagtaaataccggcgttttatgatctaagttcatgcaaaggggacgattgcagacgatgaatatgctattctggggtcagcaaacattaaccaaaggtctttggctggttccagagataccgcaattgccatggtcgcataccagtctcaccacacatggactacaaaggggggttatccttgccgtcagggatactggtatagaacttccctttgggcagagcatcttgggatggttgatgacct

SEQ ID NO: 65876 - DNA, 1251 bp, Oryza sativa
  Clone ID: PAT_MRT4530_66881C.1
atggctgtcctcgtcggcgttcttcttgatgtctcctttctgtcctttggatggtgggttcaccttcaaacccttcagttttcacacctgcgaccacgaggcggtggcggaggagacgaggcgcgccggggagatccgaggcactcgttgaccctgcgctccggcggccgattcgctgccggggacgccgtcttctccgtcaactccggcgaacggctgccgcgctccgatctgcacgtcgccgacgtcgatacacccccttcgacagtataaatctgttccttgataatcttgaccttggtgattgtacgataagaggaaaccttgaagccttctcatgcaagcacactggtaatgaccgtcgactttcaataagtctagaacatgagattcttgattgcctcagtaagtcttctgatagtgatcattcatcaccagtggagcatttgtcatgtcggtcaagtcggaaaacattgatctatctagttctcacccttagccacatgtatccagattatgatttcagtgctgttcgggcacacctgttcttcaaagaagaggagtgggaaagctttaaggagatgacagacacctacttatctgaggcttcaaagcaatgggcagcaacaaatgagggcacttctcttctagacagtatgactaatgtcattgatgaggttatcaaaatcggagagtctgacatctacagctataatccagaccaagatggagatccatttcttgaaaagggggtcatatggtcgatcaactttttcttctacaatcggaagctaaagcgagttgtgagctttcgttgcagttgtataagcaaaatatcaggagatgacttccttaccagtgcaccatccgatggtgaagaggaagatgcactgatagacatggacatataattgacacctttctggcaggaaaatgaccaaccagtgtggcatccagttgtgtagtaccagtatatatcatgtatggcagtttggcagttgccagtaggaactacaaccagaattttcttagcagacttcacctgtaccgaggcctgcataatattatgatttgacagcaggaaattctgcgtttctagcctgagacttgaattggcattttacttggtgacctaagctagtgtttgttgagatcgaaattctcgttctatgcagttgaataatgtatatttaacaatgttatgttatgcttgtaacttgatttgcaaatttgctaaaaaaaaaaaaaaaa

SEQ ID NO: 65877 - DNA, 367 bp, Oryza sativa
  unsure (1)..(367): unsure at all n locations
  Clone ID: PAT_MRT4530_66882C.1
ttttntttttttcttttttttttttttttttttttttggtttttttttttttttttttttgtttttttaagcatcacagcctgaaaggttattccaccattcttcacatgcccattcatttgacatagttgcagagggcttaaaagggcccgaaaaccccacccaacgataaactgggggcttggctgcaaactggaaaaagctccattgcagcccaaagcaaacatttgtccatttttgacacaggagacgacaacctttcttcacaaaccatacacgatttaacatagttaacggggagcaacaacaggcgtacttaattactaggagcatctaccttatatcacaatagtagaggtaagatagg

SEQ ID NO: 65878 - DNA, 523 bp, Oryza sativa
  Clone ID: PAT_MRT4530_66883C.1
catggaggtgatttctattgtgaattcaataaagtatttattatatttttatacaataaagcaaaagtaactagaacacaagctagctgttgtctgtaagtcacacttccacgacgctgaaaggttgagaaaaccagttggctatgtggacccaacaaaggtttaccatcggcaacatactgtgaagatgcatgaagattgtgaggagctcaaggacaaggaacctacggagaaggaggcgtatatcgagaaattgcacgatcacaagaagtttgaagtagcgacaactctttccgttttatgttttaggttatgagacgtcaaagtcaaactggtttaactctaatatagcgaccattacattttgctactaatttatccggtgaactacttggtcgtagtccttgacctgacaaactataatgcagatagctacataaaatttcttactatcatgaatttttatcattcatactacaaaaattaaagggggtgctccgggggtatctatgggtcttgtggg

SEQ ID NO: 65879 - DNA, 772 bp, Oryza sativa
  Clone ID: PAT_MRT4530_66884C.1
gcttccccttctccaaccaccctgctctctcctctcccccttcacagttcacacctgcgaccacgaggcggtggcggaggagacgaggcgcgccggggagatccgaggcactcgttgaccctgcgctccggcggccgattcgctgccggggacgccgtcttctccgtcaactccggcgaacggctgccgcgctccgatctgcacgtcgccgacgtcgctgagcttttgatctcgccttctcgagacacatctgatatcgctgttctttttatgagttcacaagacactcaacatgaagtttttagaatacacccccttcgacagtataaatctgttccttgataatcttgaccttggtgattgtacgataagaggaaaccttgaagccttctcatgcaagcacactggtaatgaccgtcgactttcaataagtctagaacatgagattcttgattgcctcagtaagtcttctgatagtgatcattcatcaccagtggagcatttgtcatgtcggtcaagtcggaaaacattgatctatctagttctcacccttagccacatgtatccagattatgatttcagtgctgttcgggcacacctgttcttcaaagaagaggagtgggaaagctttaaggagatgacagacacctacttatctgaggcttcaaagcaatgggcagcaacaaatgagggcacttctcttctagacagtatgactaatgtcattgatgaggttatcaaaatcggagagtctgacatctacagctataat

SEQ ID NO: 65880 - DNA, 105 bp, Oryza sativa
  Clone ID: PAT_MRT4530_66885C.1
atggacgtctccatggcactaggacaaaggatgaaagaagatacaatggcgctagggtggatgtgccatgatggatggagaggcatcgccatagataagatctaa

SEQ ID NO: 65881 - DNA, 441 bp, Oryza sativa
  Clone ID: PAT_MRT4530_66886C.1
gacgcgggcctcgtccctcccggatccggcggcggcgggcctcatcccgtccagatccgacggtgcgggccttgtcccgctcggatccgacgagaccgggggtggccggcggtgggatcggaagcggtatcagactgcgccgggaccggatcgatcgacggtgggagcggggtcagtggctcggcagcggcaggcgagctcgggcggcggcatcgccgcctgcgggctagcgtttgaggtggtcatgggactgccatgcctgcgcgcgccgagccaagctggccgtggcggggcgggggttgggctggctgctctcctccccttccgagcattgcattattgcagtggaggaggagacagcattggcaacgcagaaacagagaacgtcatcaacggaggcaacaacaataatacatcatcatcatgtcgagcgttttctgg

SEQ ID NO: 65882 - DNA, 776 bp, Oryza sativa
  Clone ID: PAT_MRT4530_66887C.1
cggacgcgtgggcacagaatcatcgggcttgactttccttactttcccaaccccgctactgtaaaaagaactcttttgttttgagactagctagtcgctatggtttgtgggaaaactcttctctctctggtctcacttcgaggaatttctctcgcgtccctgtagtgataagagcgcattctctaacagctttgaagccgaggcagccatcctcttgccaatcctaaacaaaagaaagaaaagccctacccgccttcattggttgagtaaggggcatttacctatcagtcctagtcctaaggcgcaatcggagcactaagcccaattactgctttactccgttaattagacttcattctcctagtcctattcctgattgttatttcggattctgtgcctgggtggtatcttcttactattgattcaacctcttcgggcaaacgttgtcacttcctttatttgaaaaaaaaggggtctagaactacagtgatctgataccttcttcccttggtctgggtaggtaggttatgtaggctacaactgttcataggttgttcgatcgcaaaaggccaaataatcgattactagtatgccggatattgcctggaggcccttctccctatgtttgactcatcctagatgggttcacacttgtcgattccggtcaaaaaaaaaagctttttcacggtcccatcacaccaatttacgccaaaataaggaatgctgggttgccaggaacaaaccctgtgattcaaggttttgcctagaattgcctt

SEQ ID NO: 65883 - DNA, 1236 bp, Oryza sativa
  Clone ID: PAT_MRT4530_66888C.1
atggcgaaaaggcatcacaactatgcaaggaggcaagagggccttgcctcgattcgacataaggtggtcactaatcttctcttcctctactatagcaagtacgatgatgaatatgatatgttaaacccatttgagcttttagtggctatggatagtattaagcaaaatgtaagggccaacttaaatatggattattctgtgtctctagagattcatttgcatacacaggaaaaagagctaaaaagtcctaatagtgtatcatccatgatagatgttacatctgatgaagttgcaatttgtaacaatgatggtgaaaatgctaagcttgctaatatctccacaacaaaggactcttcatcatcggctgctggaaatgattcaagtggcttcaaatggttaggtcctgaatcgcattccaaaaaaagggaagagctacaaatccttctggcgaaggggatttacattcatgtgatcaggaggcgcggagatcgcatcaaggtgaggtaccaacacctccaagatcctgaaacaccaagagcaaacctagaggaatggttgcttgtgacaagaaccgctaatcctgaccctctgtgcatacgcctctctggaagaacaagaattcgtccccacaatatgtcggagagggagaacccctctacgatcggtgttggcactgtcattgacggatggttgtatgatggttggtgggagggaattttgctgaagcttgttgccatgtcaacggagttctttccattgtctgaatttgcaggggagaagaagatggtgttattccatagggatcaactgaggcattcactcgagtggatcgatagcaaatggaaggcttttgctcaccgggaagatctcagaataagtcattactgcacaagaagttcctacaagagaagaagtaatgaggcaaatggaaggccttcaaacaaacaaagggttaaactctactacatgacgctcaggatgaacatcgactgcaacgggtgctaccacaagatcaggagggcgctgctccagatgcaagagctggagagccacctgatcgacaggaagcacggcagggtgagcgtgttcggggccttcagcccgcaggacgtggcgatcaagatcaggaagcggaccaaccgccgcgtcgagatcctcgaggtcagggaggccgcgccgccgccgccgttcgtcggttactatggcggcggcggcggcggcggccacgcggcttag

SEQ ID NO: 65884 - DNA, 963 bp, Oryza sativa
  Clone ID: PAT_MRT4530_66889C.1
atgaagaacagcagcaacaagaggtcactagttgctgatcaatggcatccttcttctgtttgctgcgaccaccgggcggcgttgagggagatagccaaggggcagtctctggtgacgcagctccgggccatcgtgttgccggcgcttcactccgacgagcgatgcgacctcgctgctcagatgttggagggcatcctcgactgctcgaggaaggccgtctctcagctgcagcttctgctctcttctccacatgatgatgatgatcatcatcatgttgatgacaaaaggagagttaggaagatcatttcctcttctgatgatgatgatcactgcagcagcaaggcagctgaggatgacaacgccaagcctcttcgccaacacaagagaaggaggtttggtgattcggtgtcgcttgaaactccagtgccacactacgatggccaccaatggaggaaatacgggcagaagcacatcaacaactccaaacacccaaggagctactacagatgcacctacaggcaggaagagaagtgcaaggcaacaaagacggtgcagcagcgagaagacctgcaccacgccaacagctacaatggcgatcaccccatcatgtacacggttgtctactacggccagcatacctgctgcaagggccctgcggcattagctgatgatcatgtcgtcgtcgaagcatcacagattagcaccgacagccattgccagagtccgagcagcagcagcgatctgcaggctgcggaagtacacgccggtaacagcagccagtgcagcaacatctccgtcacatgttcaccatcagtcgtcgttgaggattgcaataagcttcttgacatgatgccagctgctgatgaactgaccgctgatgtcttgttgttcgacatgactgcatatgcacctttagatttggatatcaactgggaaatggatacaaatgctctgtgggtttga

SEQ ID NO: 65885 - DNA, 189 bp, Oryza sativa
  Clone ID: PAT_MRT4530_6688C.1
aattccagtttcatgcactgcggaagtgggatacctaaccaccccacggacgaatcgacagaagcacatgtaaaaccacacggcagaccccacaaacaaaacgaaacaggcagagggacacagcaaaggccgataacaccacgaagataaaagatgactcaatgatgaaaccagtcccaccacaccagg

SEQ ID NO: 65886 - DNA, 540 bp, Oryza sativa
  Clone ID: PAT_MRT4530_66890C.1
atgaagtcgtcgacgacgggcagcgaatcttcgacgacgatttgtgagcgacgacggcgaatcgtgggcggcggcgcagaggagatcggtgaggcggcgcctatctggatgctggtgcgagcgcgggggttcgttcccatcgatccggcggcggcgcaggtggagctgctgcggggggtttgggattgggggtcggcgcgacgcggggagagcgagggtgcggcgatgatggcggatgcggtttccgtgggattgggatatgggagcggtgcggcgattccgtgggatgggagcgacgcgcggtgggaggtcagggagatcaatcaaacaatagacaaagaaaatcacgagacgaatcccctcccggcctccccgactcaagaaatccggagcaaaccaaaccaaaatcgagaaccaagagaagcggcggcggcggcggtgggagtcgcggaggagatcggcgcggtggagaggcgggggacggtggtcaatccgggcgacggtgaactggcggcgcggaatcgggtgacattgcggtga

SEQ ID NO: 65887 - DNA, 370 bp, Oryza sativa
  unsure (1)..(370): unsure at all n locations
  Clone ID: PAT_MRT4530_66891C.1
gctttgcatagcgcacctcgcncacggtccgagaggagaggtcacatcgcggcggcggcggcgnggatgttggcggtgtttgatccgacggtggcnctgtgcccggagggcctccggagcccgccggtggccggcggcgccgtggcggccggcggcgcgggcgcgctgntgaagggctacaaaaaaaaacaacaaccgtcgcttccgncngcctgggccccgccggcgccctcgcctactggggggncggccgngcccgctcggcccctggntgtttgtngctgtgtttggcgtgttctggctgtaacaaaacaaatagagaacgttgccgggctggggcggcgctgtgggcgtgggcggggcgggcgct

SEQ ID NO: 65888 - DNA, 364 bp, Oryza sativa
  Clone ID: PAT_MRT4530_66892C.1
gccatggattgtacctactttgtctaggtctagaaggacaacttacctgcgaatggagcggcctggtaagacaactgcttacaaaaccgtacaacaaagtggagagtcgtgatcccttaagcatggacatcgtcatgggtattcagagaattaccctcacaaagccctacttaatgaaaaacggctcgacgtaaatcatgttgaactattatctcagatgtcgttgacccagcgcttcatcagggtgaggcaacagcggagttttcactgcagtaggctttacttatcttcaacgtggagggcgtaaagcgggtcccaaagacttcatggcatatttgttagtgtgtgccacttcgttatgctt

SEQ ID NO: 65889 - DNA, 1908 bp, Oryza sativa
  Clone ID: PAT_MRT4530_66893C.1
cccacgcgtccgcccacgcgtccgtgccaagttcatccatcctccccttcccccctccgatcccctcccatcccctccccgccgcctcgtgcgatcgatcgatcgatcgatccgcaccacccacgcgcccgattcgccctcctacccaggccacctctaaccctagcgccggcggctcttctcccccgccgccaccgccgctccaaccctccccaacagtgggtttctctcccccccaatcccctcccctctaccgccgtcgatcgacgcgccaccaggaggggagcaggacgaatggcagtggcatcgctcgtagatgcatccgatggcagtggcattcgcgggtacctcatcgagcatcggtcggagtgcaaccggagtgccaagctctacatttccgtggatctgaaacttgagctgttcaccgtgttgaattacacggtagatgatgtagaacgggggattgctgagggtaagaacgatggggttaaggataaaatgagaggagtggcccagcaagtcatagccttaaaggtgtatttcatggattcttttcaacatggcatggatgctgataaacaccacatttttggggagcgtggcaatatgattcagttaaatatgtgtgcatctgatggtcgttctgttgttggacaacgatgccagagacttgggtgtaacaatgttgttgaaggccagacattgctctgtaaaagtcacagtatagggcaacgatgccaaatgcttggctgccctcatattgtaccagatggctcagtattatgtatgtcccatggtggaggtcgcccgcttggtgaacctggttccagtacagtagcttgctccaaatcagaaatttcaatcaagtacgaaggagagagtgggttcagagtaacccaaaatgctgggaatgatctgggtagtgcaggaatctataatcctgatggtgatgttgtgatgtgcaagtaccagggttgcagcaagcgagcccagggaaatgcaatgtactgtaagattcaccgcggcggttcaaagggctgcatggttcaaggttgtacaaagggtgcacatgggggcacacctttatgcattgctcatggcggaggcaagcgctgcgctgtcactggatgccccaatgcagcatgtggcagcagtcaaggcctcactgaccgctgtgtaaggcatggtggtggaaggaggtgcaggtttgatggttgtgtgaagggtgcccaagggaacacagacttttgcattggacatggtgggggaagacgctgcaagtttgaaggatgtggtaagagtgcacaagggcggagtgattactgcatcaaacatggtggcggcaggcgctgcaagtttcaaggatgtgccacgagtgcaaaatggggcatggatttctgctctttgcacagaaagagcttgatgagcggcagcaattcttcccatgaaatgctgccagcgccaccgcccaagcgccgggccaagaagaccaagaccgcggttggtccatctggtctctccagtgaccccaaatcagcagagagtgtgatgattaagcatgcttccaatgcgggtcaccaacaacagccgatccactctatgaaatcctcgccgtcttctgggttaactgcttcaactgagggtgatgtggcggcgaggagccatgcattatttggactgtagataccttgttgatgcataagagtggtttcgcatagacttgttaactagggggattagctgtgaactgaagtgaagataaggatcataggagatccactttttatattaacatgctttcactgtcagttgacttgagtagaactgtgcattgtgttatctgcaaggattatcaacaaatttaaatctgcatagtacctatgtatgtggttcaaaaaaaaaaaaaaa

SEQ ID NO: 65890 - DNA, 2378 bp, Oryza sativa
  unsure (1)..(2378): unsure at all n locations
  Clone ID: PAT_MRT4530_66894C.1
atggcgcaaccaggcttctaccgtgaccttatgtgcaattctcacaaggcagaagcatcatcatgggcattctgccacattcaccaaaagcttgtagatgtccacagcatgtgtgagtcctgccttctttcatttgccaccaacaagaagtcgaaccttgcgacataccggtccctggcggggaagctcggtgtcggcatcggcaatgaaggtttcaggcctagcttcagtttggacaattcatctgaagcatcagttatcaaggaagatattactaatattttgtgttcatgttgctcaagcccattgaaagtgaaatcatatccttctatggttcttcagaacatagctagtgccattgacactgaggtgaatactagacatgtctcaagagatcagcttattgaggagatcagtcttgtcaggtatagtgagctgaagacttctgactctgaatcagagccctggcaacatggtggtgttgctagcttgctggatgatgcagttgataatttgaaggaagattttactttgagccatccaaaaacaaaatttgcaggtgttattcctacagatgacattgcacaggatcaagtggctaagaactctgacttgatacaactccagaatggtggttctgacagtaagaattctcaagtttcagcagagttgtaccacttcagagctgatggcaatgcagatcttcagtcaactgacttttccagcaaaactgttcagcatcctaccgaagattcagacacaacagataaatctgaagatgatgtttggcacaatgctcttgattccatcagtgaattatcagtgactgataagcctgccgaaaccagtaccgcggagaatgaaccgaaagctgaatttaccgatagaactgcaatgaaggattctttcaaagctcatgaagatctgcagttactgttgtcacaagtttctccaaatgatgccatcaatatccctggtgtacaagagcaagccatactgaacaatatcactagagcactctctcttgacaggaattattcaggtagtatttctgagagcatggccattgatgaagctgaagaacattgtacagttgatcaactgaagaagcaaatcgaattggaccggaagtcgataagtcttctctggaaagagctagaagaagagaggaatgcttcagccattgccacaaaccaaaccatgtccatgatcaccaggctacaagaagagaaagcagcaatgcagatggaaaccttgcagtatcagaggatgatggaagagcaaagccagtacgaccgtgaggatcttcagaagatggctgccatggtgcaagagctcgaagccgagatcgaaggctacaagaccaagctgagagaccaatcgctcgttaacgagatacgcgacgcgatgcgcatttcacgttcagaggaatgtgagactagcatgtcaagaacagctcgatcgctctcattgttcgaagacgagaaggcgtatatatcaaaacacctgaagaaactaagacagaatctccaccaattctcaaacaacggcaagttcatcgacccgaaaaagattgacgacaaagaagacacatttgatgtcacaaacagtgaggatgtataccaagatgctgatgaagattcagaaatgaccaattcagagaattcagagatgaccaatgtgataagaaatggtcgcaacttcaggtacttatctaatggtacagagggattgacaaatggtaaagatgatcctgagggtcagtactatgcaatggtcagtgagaatgacttggttaattttgaagatgagatctctgaactcactgcaaagctgaaggcactggaagaagatcgtagcttcctagagcacagcataaactcgctgagaaatggccaagaaggcaaggagctgatccatggcatcgcttgcagcctcagagagctccggaagatggggatcacttggaaggattgtgattagctgaagcttcatcagaggatacacgtttgacagagttgaccacgtggctgcaggatgtaaactgtaaagagtgatggattaagctgctgactgtatatgtgctaatgtgcatgtgcacacggcggttgctgtcatgtcatgcggtggtggtaggttttgggccgttgcaagtgcgccgtgctcttcgcgtggagtgttccttgtacaaatncagtgtggattttttgagtgctcagaattgaccatatgcatacacaccttttctcagtgcttgcttaatttgcagttttgcacatctttcatgtatttctttttatacttttaagtgggattgtcagcttgtctgtatatattgctccnacaatccagcatttcatctaaaaaaaaaaaaaaaa

SEQ ID NO: 65891 - DNA, 629 bp, Oryza sativa
  Clone ID: PAT_MRT4530_66895C.1
gtggcacacagagctcggaggcgccggccatggaggcctcgcaggcggcgtcggcgtggagcagcgtcaacgccggcatcgtgctgagcctcgccgccgtgctgtggaccgtggtgtggaacagcctccagtcgctgcagctgcaccacctggtcggccgccacctcgcccgccacgcccgccgcctcgccgccgtcgtcgacccctacctcaccgtcaccgtcgccgagcacgacggcggccggatgaagcggagcgacgcctacagggaggtccaggcctacctccaccgcgccacctgcgacgcctccgccggcgtccgccacctccgggccgagccggccaagaaccccgacgcgttcgtcctctccatggccgaccgcgaggaggtcgccgacgtgttccgcggcggcgtcaccgtctggtggctagcctactcgacgccgccgcgggaggacgacgccggcggcgggttctactggggcggccgcgccgcccgccccgcccgccggcgcgtccgcctctctttcctggagcgcgaccgcgacgtcgtcctcggcgagtacctcccccacgtccgccgcgagggccgcgccgccatggtcaggaaccggcagcgcaagctcttc

SEQ ID NO: 65892 - DNA, 319 bp, Oryza sativa
  Clone ID: PAT_MRT4530_66896C.1
atggctagtgtgacatcaggagtgcagtgggaagacgggctgttcggcgcatcccacctttttgcttcctggaacggcctccttgtcctcaaccaccgtggttgcaaccagaacgggtcttcaggcggcgggcggacccgcctccgccggcctcatgacgggcggcgggcggcgcggtcgacggcgggtggcagacggctgcgatggagcatggcggcgcaggctcccctgcgcttcgaaggaggcgacggcggctccctcgcgtggatctgtcgggtggcggccggcaacaacgaagcattgcggcctggatccagcg

SEQ ID NO: 65893 - DNA, 318 bp, Oryza sativa
  Clone ID: PAT_MRT4530_66897C.1
atggtaggccgagcgggccgagtagcactgttcccccgtccaacgccataccagacggtctccagtgctcggagagagttggataggacacactgcattccagaccatcaggaattgggatatgaccgggacagtgaggacgccacggatatcccttacccaggagttgccagcgagggcgaaggccacattgcgcgatgccctgagacgtgggggcactacaaggagaaggtccggcgccataaaggccatagagcggccatgtatccactggtccgaccagaagagggccaacatggttttgagtttaaaaagtaa

SEQ ID NO: 65894 - DNA, 3020 bp, Oryza sativa
  Clone ID: PAT_MRT4530_66898C.1
ctccgctagtaaccattcaatattataggaaagaggaccaaaggtaataagatattaagatgcatattcaagtcgatgcagagtaaaactctgtataaatgatatacaagatttgcatctggttaaataccgggccgcaactttttgcagacgccacaaaacttttgatttcgttttcccttttccattttttttaacctgaccttttctcctttttccaattatgaagcaagacaaaaaagaacgaaaaccaagatcctatctttgtggttaaattctgattctcagaatcaccgttccaaattccagaactgaacaaattatttacgatggcacagagcacttcggtgttgcaccacatttcttcacttgggactaacacactattgctttctccagcagcgcctttgcacggcttcagagagagttttgtcacattttttttttcacaacaggatgcgtagaaccttcgtccatgcacatccatcctgcatgcagagactgcgaatacatctccacaaagcttcaacatgaaaaacttggcctctgtagtagtagagcttacatacttgtattttttgtttgacctgagactttttttttctcaggaagggatgtcagcagttttctggaacaactaaccgctgtaattgcttcagcggtgacaagagctgggagaacgatggtcgtttgcttggatcgttttcccagcacgaagatattatggtagccaccagtgggtcaatttctttgggaatttctagtcgcctgttctggaacccaactgctcctacaacttgcattggattcagtccactccatggtacacgcattgttgctagttcccataggattactccaaaactgtatacgtcacacttctcatttgatggctcattacgtagaacctctggtgccatccactccggtgttccagctgttgatttagaggacaggaaagtgtgatgtttcaaccttgacatgccaaaatctgacaccttaacaacccaatttttatccactaaaagatttggggatttcaagtcacgatgcacaatagtaggatggctagcatgcaagtagttcatcccttttgccacatccaatgccatttttagccttcgtgtttcatcaatttgactgtttggcctatgcaataggcggtaaaggctccctcttggaaggtattcagttaatatcgaaagatttggtggttgtgtcacatatcccaagaacagaactacatttggatgcctcagccttgacatgatcccaacttcacatttgaattgatctagtgcaacacccgataaatcctggtcaagaaatttcttcactgcaacttcagtgccattccaatctgcatgatatacttccccatatgaacctagaccaatgcgctctccaatatgaagatcttcccatggtatttcatagtcagcaacgtcatctataacagagctgattgttttcgtgctagaacagctcgacttgtccaagtttccattgctacttcctggcatcttcaccaaagagtcctcagaaaacctttggtcctcgttggcaatggcatgagctgtatgatcatgcaaatccaaatttctgccaattgcttctgtattccccacatcatgctgtgcatcttcatggaaacaattcactactgctagtgttttggtattgccatgttgcaatggagaatcttccgctacatgaccatttggcaaattttgacctgttttagcgattaccaaccatcctgcagttttgtcatcttcagaagcagtatgtttgcatatttcaggtttctcataggtgggtagcaatgcagtgccctccaggagcaagtcttgcaaattttgtgcaaactgtgggtccacttctgtgggcactaaatacatgggagcatcgttgactttcatcagatgcggaatttcccctccatcagatatggtactttgtttaagcgggttctctgtgtggaagatgtcttccagctgtgaacttgcaagtgctaaagcagatttttgttcagatgaacttccccccatgtcacttgtattcttacatccagcactaatctgctcaagggctatgcatagttctgcaacactctcctcgatggcatcattgctcagttgactattgttggagtcctgaaactgactgccagaaatatctgaagggattaatgtgcctggagctcccatcagatcaactatatattcaacactgtcaaaatcaattttaaccaagttaatagccccttcatctgtccccgtataatatattcctttgacaagcttgcatggtagattaactcgatcagctagtaccttaaatagcaaagatctgtggcgcgacaacccaatgcgaagcaaaccaagagggagaacaatactgttgcgctgaaggcatagcgcgcggctcttcactccccattccctgttcatttcatcagcatcatccaccggaccgcccatagcatcaaccacaaggtttgcaatcttctgcacgagctccggcgaagcgactccaccatgctccgccctatcctgcgcggcaattgccagagccctcccttcgagccgcttcagcgccggatcacgctcccgattgaccaaaactgccacgtacgcggcgtctccaccgacgggaaccgccctgagggtggtcagggaggggaatttggcctggaagtgcggatgcatcggcgcgccgcacacatcgtagaacccgtcggagagcctctcgtcgtagttgacgacgcagtggttccagtaccgcgcggagagggcctccatggggccccggtccccggcggcgccgccgaggctgatgcgctcggcggcccggatctggaccgagtcggcgtccacgagccccgcgtgatccgacgccgagatggccagcgcgagccgcacctggtactcctcctccagccgcgtcatcgtcgcgtccgcccccatccccctcggctccgccgccgccgccgccaccggagccgcaacaggagccat

SEQ ID NO: 65895 - DNA, 483 bp, Oryza sativa
  Clone ID: PAT_MRT4530_66899C.1
caggtgtgggggttcaccggtgagcgagcttggacgtggcggagggcggaattgtgggggttctttcagttctccgagcgattcggggaagggggagaggagaggtggtggatgtgagatccgatggctgctgcagcgacggcggcggcctcgccggttgaggggctcaccggcggcggcggcggtggtggtggaggagtggacgggctgttcgtggagctgtggcgcgcgtgcgcggggccgctggtgacggtgcccgccgtcggggagagggtcttctacctcccgcagggccacatcgagcaggtggaggcatcgacgaaccaggtcgccgagcagcagggggctccgctctacaatctgccatggaagatcccgtgcaaggtcatgaacgtcgagctcaaggctgagcctgatacggatgaggtgtatgcgcagctcaccctgcttccgggagagcagcaggatgggaatgggagtggt

SEQ ID NO: 65896 - DNA, 1193 bp, Oryza sativa
  Clone ID: PAT_MRT4530_6689C.1
aaataaccctccttcctcctttgggccaagtctggcccaaagtcctccctctctcccctcggcccgcggccgaagtctccctttcctccctctctttctctccctctccttctctccctcctcttgggcccccttcccctcggcccagcaccctcctccctctctctcccgggctgtctctcccccccctcccggcctgcctggcccaagccgcctccccctcctctcctcctgggccggccgcccggcccaacccgagcggcgccctcccgcccgtgccgcgcacgtgcgcgcgcgtgcgcgccgttgccgcgcggcgccaagtccggccgctttccatggccgtcggccgccattcccgccgccgttccgacctcccccgtggccggctccctcttctctcatataaaatgggatcctcatcccccgttctctcgttttagccccctcccgagcctccccgtggtccctagccatctccccgccgccctcctctctctcccacgccgccggccgcctccagccgcctgtgccgcctcgaccgtgcgccggccggccgcgccgtcgcctcctccagcgtcgccgccacctcctccaccccggcctgccctccgtttcgcgcggtgaccaccggaggcgcgttcccaccgtcgcccttctctttcctccgcgccggccgcctccagccgcctctccctcctcgccggagcaccgtccggccgcgccgtcttctccctcggcctcgcagccacctcctctccctcggtcagccctccgtttcgcggggaaagcaccggagacgcgttctcgccggcaaaacagtggcgttgccgccactgttccacctccggccgccactgtcgcgtttcccgtgcgccggccgacgtcgccaccacctccctcggctccgcgacgccgccctcatccccggcatcacctcctcctcgcccgaagctcgccggagtggcctcctcgtcggcgtccagtacctccccgcctccggccggctcctgtacgtcgccggtacgccgatcgacgtcgctgtgttgtcctctcctccagctgctcctcggtttcgccggaacgccgtcgccgcgccggcctctccatcctcttcgtcgccggcgtcctttcggccacccattcctcctcgtcggctcgtcgccccgctgcaccaccaccttctccaacat

SEQ ID NO: 65897 - DNA, 150 bp, Oryza sativa
  Clone ID: PAT_MRT4530_668C.1
atgatgataagggagaaggaaaacaacggtggtggtgacaacgagggcgctatctacaggaggcagtacgttacattgactgggcttggaccgcaagtggataagctgagggacgtggacagctcgaaaagaccacgtgatcctgagtaa

SEQ ID NO: 65898 - DNA, 474 bp, Oryza sativa
  Clone ID: PAT_MRT4530_66900C.1
ctcatagggaatcaccaatagaggaatccccgctgatgaaaattaaaaaaataaaggattgctcatcaattaacaaaaaggaaccatggactcaagaagactgtatgccactaaccataaggaccaatcctttgaataaataactgcggttactttggcacaggggctaccatgaacatgtgctcaaagtaccacaaggagatgattatgaagtgcgagctcgccaagctgacattctcctttatggacagcattgccaatggtgtcgattacgactaggaaccatttttcagtgagcacgcttaaggagctgttgctcaagtcaagctgagcacgcttgatcagcattctgttgagatcgttactgctaatgaaggcattaccgtgaacccctcggtgatggaaggaccatataagtactccactagtcgtaacacgtttggcattaacgaattcaactgccgatgtgcaaac

SEQ ID NO: 65899 - DNA, 765 bp, Oryza sativa
  Clone ID: PAT_MRT4530_66901C.1
atggcgatgcggtggcgcgcggtcgccggtgatggcagccggcggcgggaggcggcgacgggcggcgcaaaaggcagcggcgtcggccggaagagagagaagtgggaggaagaggaggttcctcaccgtggggtggccggtgcggaaggcgaaggcggcgacgatgactcggcgagcggaggggcggacgggcggcggcaacgccctaggggagagcggagaggggttagaggtagggaggaaacccgcggcgacaaaaatggccggccgaagatagggaggacagcgaggctcaccggcgtgcgaggagaaaagggctctggtggggttccagcgacgcgaggcggtggccgagatgaaccacgaggcggtgaagttaacggcggcggcggcgtgcggccggaggtggcggcaagcggcgtcgctagcagcgagcagtgcaagcgagatggagagcatgggagagggcggcgagcaagggaaacgagagatggggctcgtgggagtgtttttatgggcgaggaaggggaggacatggacgggaaccctctcgatttggccggcgacgtgggaaggtggggagggagagagagagggggattcaaattgaatcccgccccttgcaagcgcgcgcgcgtgcgggagaggagtgggaagtgggcgacgacgtgggcgcaagcgcaggagaggcgtgggatgggctcagacggagtggaggacgtggggcgccggcggatggagctcggttccaacggctggaggtag

SEQ ID NO: 65900 - DNA, 234 bp, Oryza sativa
  Clone ID: PAT_MRT4530_66902C.1
atggcggatgcggagaaggatgacggggcggcggtcttcttcaacccagcaatgggctctagacacttctctgggcaagatcatgcactacacgatgaacacaatatggaaaaactgaggacggttttccatgaagaacgggaagatgatgtgaccataactattatggatacaaccgttgctcacatcatggatcaacaagaagccatcacgatcaaatcctccaagtgttag

SEQ ID NO: 65901 - DNA, 3025 bp, Oryza sativa
  Clone ID: PAT_MRT4530_66903C.1
cccctttcccttctttgctcccaccagggggctgggcctggcacacccagcggcggcggcggcgcccgcggatttctcgctcgcgcctccgaaaccctagctctcgcccgtagtagccatggcgccgcccgagaaccccaacggcgcgggccccgcggcgccgtccgaccccgcgcagccgcagccgcagccgccggccaagtccaagtggaagaagaaggacgagaagaaggatgacgatctgtcggaggaggatttggcgctcaaggagcagctcgagctctacgtggttcgggcgcaggacgcggatcccggcgtgcagaagctcgcgcttgagagtatgaggcaggagattcgttccgccacaagctcaatgacatctgtaccaaagccactgaaattcctccggccacactatggaacactcaagtcttactttgaaaccatgccagaatcttctgatttgaagaggtacatggccgacattttatcagtgttagctttgacaatgtccgctgaaggagaaagagaaagccttaagtaccgtttgttgggctctgaaggtgatatcggttcatggggtcatgaatacgtaagaaatttggcaggcgaaattgcacaagaattccaaaagcgtcaggatgatgacatgccgattgacgctcttatggaactagtgcagcaaattgtttcattccatatgaagcataatgctgaacctgaagcagttgatcttctgatggaggtggaagatcttgatttgctagttgagcatgttgactctacgaactacaaaagaacttgcttgtaccttacaagttcatcgaaatacctccctgctcctgatgacatgttggcgcttgacattgcttataccatttacatgaagtttgaagaccttacaagtgctttgcggattgctctgctccttgacaacaagtcaatgcagtatgtgaagcaggtctacaccgcaactgaggatcttcagctcaaaaagcagttctcattcatcattgcacgccatggtttggccatggagattgacgacgagatagctgccgatggcaatgataaggagggtttgcaagaaatcgttaataatagtaagctgagtgaggggtacctcacccttgctcgagatatcgaagtgatggaagcaaaatctccagaggatatatataaggtccatttaattgatgggcgtggtgccagctccagtcttgattctgcaagacaaaatttagctgcaacatttgtaaatgcattcgtaaatgctggatttggtcaggataagttgatgactgctccatctgattcttccagtagcggagcttctggaaactggttattcaagaacaaggaacatgggaaagccagcgcagcagctagcctgggaatgattctcttgtgggatactgattctggacttgctcagcttgacaagtacttacatagtaatgatgctcatgttgttgctggagctttgctaggtattggtattgtcacatgtggtgtgaagaatgattgtgatccagcacttgctattctcatggagtacattaacaaggatgacacaaacattcggattggggcaatcttgggtcttggtattgcatatgcgggttctcagaaagaggagcttaaatcttatctatcaactgtgttgggggactctgagaaatcaactcttgaggtcctgatattctccgccatcgctctgggattggtgtttgttggttcttgcaatgaagagattgctcaatctatcatatttgccttgatggagcgcagtgaggctgagctggcagaacccattatacgcctgcttcctgttgcgcttggtcttctgtatcttggaaagcaggagagtgtagaggctacggcagaagtttctaaaacatttgatgagaagataagaaagtactgtgatgtaacacttatgtcactagcatatgctggaacaggaaatgtgctcaaggttcaaaagctccttgggatttgctcacagcatcttgagaaaggtgaaacccaccaggggccagctgtcctaggaattgcgcttattgcaatggctgaagaattaggagctgagatggctgtacggtcacttgagcgtcttttacagtatggcgagcagaatattagacgggcagttcctcttgctcttggcatactctgcatatctaatccgaaggtaaatgttatggacacgcttagcagactgagtcatgatgcggatgctgatgtgtcaatggctgcaatcatttcattgggtttcattggtgctggtacaaacaatgctagaatagctggtatgcttcgcaatctttcaagttactattacaaagaagctgcgcatctgttttgtgtaagaattgctcaaggacttgttcaccttgggaagggtttgttgactctctctccataccattctgaccggtttctactttccccaatggcccttggaggccttgttactgtattgcatgcttgcctcgatatgaaatccaccattctagggaaataccactacattctttacattatcgtcttggcgatgcagcctagaatgcttttaacggtggatgaggatctaaagcccctatctgttccagtacgggttgggcaagctgttgatgtggttggtcaggctggaaggcccaagacaattactggtttccaaacacattcgacacccgtattgcttgcagcaggggaacgggctgaattagcaaccgaaaaatacattccgctgacttcggtattggagggctttgtaattctgaagaagaacccggaatataacgaggagcgtggcatactagggaaccatgctgcaacatgggacaggatctttgcctattgggttccctcctcggcgcctcctggtgttaatcggataggtcttttatctcttctaccggagtctcgagtgttggagcagagctctttgaattctgaaatcctttttggttgtgcaatgactgacgtgacgtatcacttgtacccaaacatgggcatctag

SEQ ID NO: 65902 - DNA, 235 bp, Oryza sativa
  Clone ID: PAT_MRT4530_66904C.1
tatcaccttgccagatcccaacacggaagagctcgcttctgtcgctgccatggctcattacttcaagaacaccccataatcaatggctgacatgggaacggaccttttccaacagtgatagggactctatcagatcaatattgacgagtcataaatgccacccatcaagaagatacgcctcaaggtgagccactacaagatcttcaagggcgcaaggaaattggggtacctccac

SEQ ID NO: 65903 - DNA, 632 bp, Oryza sativa
  Clone ID: PAT_MRT4530_66905C.1
cggacgcgtgggcggacgcgtgggctagaatgcttttaacggtggatgaggatctaaagcccctatctgttccagtacgggttgggcaagctgttgatgtggttggtcaggctggaaggcccaagacaattactggtttccaaacacattcgacacccgtattgcttgcagcaggggaacgggctgaattagcaaccgaaaaatacattccgctgacttcggtattggagggctttgtaattctgaagaagaacccggaatataacgaggagtgagggacatttccaggcttgatacaatgctgatttctggggctcacaggcgtggcatactagggaaccatgctgcaacatgggacaggatctttgcctattgggttccctcctcggcgcctcctggtgttaatcggataggtcttttatctcttctaccggagtctcgagtgttggagcagagctctttgaattctgaaatcctttttggttgtgcaatgactgacgtgacgtatcacttgtacccaaacatgggcatctaggagttgaactgtttccttttacctccagtttatttatctgtatgtagcaaagtatgtactggaaatttgaggtcgaagtattattcttgatttccac

SEQ ID NO: 65904 - DNA, 349 bp, Oryza sativa
  Clone ID: PAT_MRT4530_66906C.1
acaccgccaaaaatcgacatcagagattagcatagacataccccatccagtacctacggaggccggcaagagggatttagtgccatctctgatctcgttgagtacggattcaaggaggaagactaccctgtcgtcgactacgacctgatgaataaagagcaacaccggcttcggccaacaggatgtagggctattacctgttagataaggggcccgaacttgtataaaaatctctatctccatctcttttacctcaatctcgcatataccctagtatcaaaaatccccatactatgcaaaataccgtagtcgtgatctcagacgtcgacatctccaacaacaagctact

SEQ ID NO: 65905 - DNA, 282 bp, Oryza sativa
  Clone ID: PAT_MRT4530_66907C.1
atgcccaacgtgcaaccagctaatctgacagttgcctttctgccgcgtgccagtgaatacgacacgagcgtttccagccaaaatcctgtgctgcagctaggggatgtagaaacctcgaaccacctcgcgaattgtcagtgtaggagaagtggtcgtagcagtgagtacaccggcttgatcctgaagaggtcgccggcgatcacctacggggtggcggcggccttccggtcgccacctactctgtcccggaacagcaatacgaatcccttccagcgcaactga

SEQ ID NO: 65906 - DNA, 1065 bp, Oryza sativa
  Clone ID: PAT_MRT4530_66908C.1
acagccgcgatgccgaagaagatgggcgtcaactccaaggcggaggcggcccgcgagcgccgctccgtcgcggaggccgaccgccgggaccgcgtcgagcgcgccaaggaggaggagtactggcgcgaggccgagggccccaagtcccgcgccgcgcgccgccgggaggaggacgccgagaagcgcgccgaggccgccgcccgcaaggccgagaaccgccgcctcgcggaggccgaggccgcctccgcctccgcctccgcgccgtccaagacggccgcccgcaaggcctcccgcgtcggcgccccggcgcccaaggtcaccgaggccgagctcgcgcgccgccgcgaggacgagcggctccgcctggagcgcgaggccgaggccgccaagaagcgcgccgcgcgcaccgccgaggaggaggagtacgagcgcgtcgtcttggtcgccaacaccaacagggacgactccatcatcgaggcgaggtcggtcgacgaggccatcgcgcggatgtcgctggttgactcagagggagccttgcccgccgacaagcaccctgagcgtcgcctgaaggcatcattcaaggcatttgaagaagcagaactccctaagttgaaggaagaaaagccaggcctaacactgaatcagtacaaagacatgatatggaagctatggaagaagtctccagacaaccctcttaaccagggttacgattgtcaattgtggtggtctactcgaatgtacgaagaatggatgcaatatgggtatcgcattaaagttaagaacatgggcaggcaacaaccaaggaaagagggacctagggcaggcatgtgtggtgaaggcaaagtgttggtgagcagcatgtccatgcatgaggagaagaagagcggctccggggtgaattgtcatggatggctgcagagtgatgatgcattcctgctgaattgtagaatttccaagacttccaaatgggtcagaacttcatcagatgctcatggactgaatgtgtgggagatgatcagcttctcggctaataatttacaaagtgatgcagtatatatcatgtga

SEQ ID NO: 65907 - DNA, 1697 bp, Oryza sativa
  Clone ID: PAT_MRT4530_66909C.1
cgcacgaggccccctccgcctcggtcacggcccacgggccgcctcgccgctcgcccgcctgccgtcgcccccctccttttattccccaccgccgcaccggctcaccgctcacgcccgtcgatccggctaaccccacctgcccccgtccgtccgcccgcccgcccgcatcggcgacttcacgcgtacaagggggatttgttttctctagggtttcgttcgcgaggaggagagatctggttggggagatggacgggaagccgccgccgccgaacccgaacctgccctaccgggaggactgctggagcgacggcgagacggcggcgctcgtcgacgcctgggggaggcgctacgtcgacctcaaccgcgggagcctccgccagccgcagtggcgggaggtggccgaggccgtcaacgcgcggccgggggcgtccgcgcgccgccggccgccgcgcaccgacatccagtgcaagaaccgcgtcgacaccctcaagaagaagtacaaggcggagcgcgcgcgggggacgccctcgtcctggtacttctacagggacctcgacatgctcgtcggccctaccctctccgccgccgccgccgccggcggtggcggtagcgccaagaagccgtccccgccccgcgggctccccatgatgcggaggcgcctggaatcgccctcccgctccccctcgccgccgtcaccgacgccggccgtggccctccccttgccaaactaccgccaggcgtcgaacctcccgtccgcgggcctcctcttcaataagatggctgcagcggccgcggcggaatctgattcagaggacggctacaacaacccgaacaacaactatgaggacgatgaagacgacggctcgcagcagtcggcgtcgcggtccgtgtcgtctcgttccggtggcgttgcagctgcaggtgcaggtggtggtggcgtcagcagcagcaagaggaagaggggaggcggcggcggcggagggttcggggagctagcgagggcagtcgaaacatttgccgagatgtacgagcgcatggaattcgctaagcagaggcacgcggaggagatggagaggcagaggatcaagttcctcaaggatctggagctgaagcggatgcaggctttcgtggacgtgcagcttcagcttgcaaaggcaaagcacgggaagcatcctgatggtgccacggagatgctcatgtctctcgccgcgctcccgttcctcagcacccctgcttacctatgataatttaagaacaagagtttagattattcctaggattatcgttgtttctgttcttctgttcttccagattactcctaggattataggagagcagattactcctaggattatcattagtttctgttcttccagattattcctaggattataggagaggagtcaccactcaccagattaggattataggagagtaggagtcaagctcatggagctgacggtgcgagctgctctttggtggagagaatcagctagagtagttcgcatcacaaaagatgctgtgtaactagtgttgcgtgttcccggcaagagcactttttcttgcactttggtgttaagtgttgaccgctattttacctacactgtttttttggacagtcaagctctcatgagcttctgtttaattctagaggatgtaaaaaagtttaaggacatacgtactgctttgaaggctgt

SEQ ID NO: 65908 - DNA, 1491 bp, Oryza sativa
  Clone ID: PAT_MRT4530_6690C.1
atcctggatggtcgcggcaaggaggagaagaagaagcgcgtgggattcatcctcctcctgtccgacggagtggatcagttccaatactcgaggatcaattgggagaaggtggcgaagagcaccgacgtcgaccactccgaagttggcgccatgctccgcaagtacgcggtgcacacgttcggcttcagcgcgtcccacgaccccgtgccactgagacagatctccgcgctctcctacggcctctactccttcgtctgcaagaacctcgacaacatcacagaggccttcgcccgctgcctaggaggcctccgcacggtcgtcgccgccgaaatccgcgtcgatctcaagcccaaaagcagtgataagcagcagcagcagcagccggtgctcatcaagagcatcgattctgggggctatgagagtcaagtcatcggcggcggaacctccggcaagatcctcatcccggtactctacgtcgacgaggtgaagaagttcatcgtccacctgaaggtgcccaaggtgtcggccaccaccgtcaataaccagcaggagattctcacagccgacggcgacgccaactcggtggacgggaagacagtccgcattaaggaacacaaactggccatccggaggccgccagaggtcgtcgaccaggccgacctccggccagcaccacaggtcgtggagcaggtggtggtgttcaagctgctggacatggtacccaagacgttccagcagcgtagagaagatgatcacaagggcgtgaagaataccaaggtggccgtgcagctgctgcagcggaacatggacgagataaggcgctccgatgcctggacagacctggatgtgggcacgaggcgacgcatcgacgaacaggtgaaagagattgcggaccacgttgagaaaggagaagggccagcctatgtcaactcgtgggtgtcgagccaggagatgcagcgcgccaacaccatgggctcgcccaacaaggtggtggccggccgagttcgcgacgccggcgatgaagacaatagtggaggagctgatccagcccctgctccggctcatccggctcccactcctatcaaacaatattctccacgtcctgatgaaaaaccagctgattatccgaaatctggtcagaatccacgtccggtggtcctgccttctgaagatctagctccgattcagcctccggtactttcttctaaacaagtcgtaccagctcatgtggtcgtccctccaagctgttcagaggaaattagcttgaggtgcccgcagtgcgtggagttggactttgtcgacgagcacctcgcttactggtccaacgtgaaacgcgacctgctgcgcgtgctagacgacgcggaagccgccgcagggctccgccacggcgtggcatgcttccatgacctgtcgctcggagccatcaaccaagccatgtatcagagcgtgtgccaggccgtcgagcaagcccggagcctgagcaagtactag

SEQ ID NO: 65909 - DNA, 1217 bp, Oryza sativa
  Clone ID: PAT_MRT4530_66910C.1
ccggccgggttggtgagtgacgcaagagaagaattcaagctcaagcgcttaatacgaatctggctgccatggagctctccggcgatgccgccgtcgtctccggctccggcaaccgcaagcgcaagcgccatgtgcagcagcactccctcgagtacccctgcgtgtcgcggctccgccaccgtcgcctcctcgccttcctcagccgccacgactacgactccaccttcgacgcgctggtgcaggagacgtccgtgctcttccgcgtggggcacatccaggcgctggtgaggcagggccggtgggcggacgccgccagctacgtcaaccgcttcgtgccgccgtctcgcgtgctcaccgatgccggcctggtcttccacgagttcctctacatccaccacgtcctcgactgcatcgtcgccggcgaccacttgcggggcgctcaggtggccgccagctaccagcgccacgtcagggacaaccccaacccctcccatggcgccatcaagctcatacgcatcctcctcaccattctccactgccatccaatcagggcgttcctcaactggcatctggtgaggtacaaggcggccgagatcatcaaggacttgatccctcagatccccgagttcaacgacctgctaaagctaccgaaaggtggccccatcaagccacacaacatcctccccattgggtccagttctcatcggaggcgccacgtgaagaatgaagaccggattccacctgatattgcccgcttctatcttcagaagaagagagggattttcgacattgacacacatgacacatgtgcattgctttgtgcaggctgccctcttctactatctgtcaggagagatattacacaggattatcacgtaatgcagcaaactggcttgcagatatcatcggtaatacttgtttgccttgtgtctcctgcctttgttgacttcccattgtcacttgacttccgaaccttttcagacaaatctttgcaagctggtgtgctgcgtgatggatatccatttaaacactcctgtaacgaagcaattcagatttcaaaacgcattgagcttagtagtcttgctacacttggtgggtacctgctgtcatttctaattcctgaaaacattgcaggtgttactggtgctccaattggtttggatagtcctgctaacagttatgggatctcaacacaaactattgcaggagaatattaa

SEQ ID NO: 65910 - DNA, 265 bp, Oryza sativa
  Clone ID: PAT_MRT4530_66911C.1
atccataaccaatgaagtcgactttctgctattcgctgcatacaagctatactcttacttcatccagttacataaacaaaggccatttctgagtacagatccttgtcctactttaagtcaaattttgacagacgaagcctagtaagcacttagtattgaagacttggcgtcgccttgtcgtcccatgatggggagggctcgatgaaaataacagcgcgaatcatcggaggacaagtgcccctgaatgcgactagagacactgctg

SEQ ID NO: 65911 - DNA, 1587 bp, Oryza sativa
  Clone ID: PAT_MRT4530_66912C.1
atggcgatcctagcggggcttcagctccactccacaggcaaaactcaactgggggttgctgacgtcatcaagggggagagcggcgccggcaagcgggccccaccagtcagcggcacaagggcgccggtccaccgtggaccgggaccaccgaggcggtccaccgccggtccacgggaaccgacggcccggattggcccaagccgatcggacggccacggggcggcgcggctggggcacggtcacggctcaaagccggccagccgagtgatggcgcgcggcagcgcggccaccggcgacgacggccgacgacggcgcggggagcggcagcgcatgcgggcggtggcggcgcacgctagggagcggcggcgcggcgcggtaaggcacgggaggtggccgacgaaggggaggaaggggagagggaagggagtgctcaccgagcggcacgacggcaaacgggcggccgacggcaaggaacggcggcggcggggctcctcgggaagacggcgcgacggagctccggcgacgggcgtcgctcgggaaggggcggacgggctcggcctcgtggccgaggatctccccgtacctgcggagccgcgggaggcgacgacgcgggtcggcgaggaccgaagcggcgttgcgacgcggctggaggtggccatggtgagggagagaggtggtgcgcgtggcggcggcgttccggaggcggaatgggaaaatggagtagggaccggggtggagctcggcggggcgatgccggcggtggtggcgcaacggcgcggtggtggctggagcggcgaggagcggcggctggagctcgtcggtgagtggtggagagagggagcgcggtggggaggggattccggcgatggaatggggaaaacggagcgggggccgaggtgcggcaaggcacggcgaagccggtggtggcggcggaacagcacggcgacggctgtagcggtggtggcgagcggatggagagtcgccggtgagcggcggcgatgggagcagcgaggggagagcagtacggggcgcgagaagctcggaaaaatgggggaaatggaaaggggaggccgggtatgctttttatgggcttggggcgacgggatcgtgctcgagagaggtggcaaccggccggcgaggtgggcggggcatcgtgggggtggtggagaggttaaccggcggcgattttcgtggggagagtgggggaaagggtggaggacgtggggcgacggggtcccacgaccggcgggctcgcgcgcggggtggaggtcggaaacggcggcgtcgtggggtggctcgggcggccctggcggcggttggagccggaggaaggggatgacagatgatttccgcaagcgggccacgggcccgactgcgaaaatggtctattttcgcaatgacgtccactgctccgccggcgcagcacaaatgctcgccgtttccaatgccgtggtcatcatcgcaaagcattcatcaagctgccgcagtcaccgtctaatccagacagagcaagctgtgagttatggcagctggttgctgcagtgctgcgccatggcggcgcaagggaacggcaaagaagggaggtag

SEQ ID NO: 65912 - DNA, 759 bp, Oryza sativa
  Clone ID: PAT_MRT4530_66913C.1
tgctttaaacctcggatcgatgcttagtttcacccccgtccccagcgggcaacgggcagtcctctctcgtgcctaggtgaatccggaagccgcataggccgtcgcagggcccatccaaactccatcacgcccacccttgcctggatgcgtcgactagaggaaagctacactacaagcccagccattgcccacgctggcttgtggtaagtacgataagttcttccagggcatcccgcgaaccggtccttaattgccatgggtgcgactagcaaaaccatgcacccacagcccaccattcagtcgcatttggaaaagagggttgctgacgtcatcaaaggggaggggcggcgccggcaagcgggccccaccggtcagtggcacaagggagccggtccaccgtggacgggaccaccgagccggtccaccgccggtccacgggaaccgacggcctggattggcctaagccgatcggacggccacggggcgcgcggctggggcacggtcacggctcaaagccggccagccgagtgatggcgcacggcagcgcggccaccggtgatgacggccgacgacgacgcggggagcggcagcgcatcggacggtgccggcgcacgctagggagcgccggcgcggcgcggtaaggtgaggcggcagccgactgcccggcacagccggcagcggcgcggagcgcggcggcggcgacccggtcggacggccaccggcgacggcggcgcgttgtgagcaggcacaggaggtggc

SEQ ID NO: 65913 - DNA, 250 bp, Oryza sativa
  Clone ID: PAT_MRT4530_66914C.1
aaaagatacagtaaatcatctcccaattagtgaacaaggtaacctttggagctgcagaatcacgggcctcaccctaaagagattggatttggagagttggtgtcgcgaccgagaaaaatacattttcccgaacgctagtgtattaatccccgtcccaggaaaagccggggtacaccacacaaacatggtacaaaaggcacatctttattatatcgataatatttacattattacaaaggcacttaaggcc

SEQ ID NO: 65914 - DNA, 1621 bp, Oryza sativa
  Clone ID: PAT_MRT4530_66915C.1
atggccaaggtgcctgatctcggctccgacttcactcagaagctgctgctcgacctccggcgccgccacgaggggctcggattcaactcgccggtgccgccgcagcgcacatcatcgtccaatgccgtggctcttcctcgagggcaggacggcgaccgaactaggggcggcgtcggtgccgtcggagaagggcagggcggcgtctggggcggcgccgagcggagccggccgggcggcggccagcctgccggaggggaggcggcggcgttaacccttccttctgctcccgagtctggcagtggtgtgataaaggaaaagagggttgctgacgtcatcaaaggggaggggcggcgccggcaagcgggccccaccggtcactggcacaagggcgccggtccaccgtggaccgggaccaccgaggcggtccaccgccggtccacgggaaccgacggcccggattggcccaagccgatcggacggccacggggcgcgcggctggggcacggtcacggctcaaagccggccagccgagtgatggcgcacggcagcgcggccaccggtgacgacggccgacgacggcgcggggagcggcagcgcatgcgggcggtggcggcgcacgctagggagaggcagcgcggcgcggtaaggcacaggaggtggccgacgaaggggaggaaggggagagggaggggagtgctcaccgagcggcacgacggcaaacgggcggccgacggcaaggaacggcggcggcggggctcctcgggaagacggcgtgacggagctccggcgacgggcgtcgctcaggaaggggcggacgggctcggcctcgtggccgaggatctccccgtccctgcggagccgagggaggcgacgacgcgggtcggcgaggaccgaagcggcgttgcgacgcggctggaggtggccatgggaccggggtggagctcggcggggcgatgccggcggtggcggcggcacggcgcggtggtggctggagcagcgaggagcggcggctggagctcgttggtgagtggtggagagagggagcacggtggggagggggttccgacgatggaatggggaaaacggagcggggccgaggtgcggcaaggcacggcgaagccgcaggtggcggcggaacagcacggcgacggctgtagcagcggtggcgagcggatggagagtcgccggtgagcggcggcgatgggagcagcgaggggagagcagtacagggcgcgagaagctcgggaaaattgggggaaatggaaaggggaggccggggatgctttttatgggcttggagcgatgggatcgtgctcgagagaggtggcaaccggccgacgagataggcggggcatcttgggggtggtggagaggttaaccggcggcgattttcgtggggagagtggggaaaagggtggaggacgtggggcgacggggtcccacgaccggcgggctcgcgcgcggggtggaggaggtcggaaacggcggcgtcgtggggtggctcgggcggccctggcggttgcagccggccagccagaggtaggaggaggagctgacaggtggggcctcgggtcccacctgtcggggagagagagtggggaaaacgggcgagggaggtaaa

SEQ ID NO: 65915 - DNA, 261 bp, Oryza sativa
  unsure (1)..(261): unsure at all n locations
  Clone ID: PAT_MRT4530_66916C.1
cccacgcgtccgcccacgcgtccgtccttcttcttcttctccttcctcactgcaacactcttcggggtgcaggcagccagagccatggcaaccatcctcgncgtggccgccatggcaccttccaggnttccgacgaccntcccggggccctggtcctacgctaccggttcgccggaacgtcgtgtcgttcgcggcgcggaggggcgcgcgtgggaagctggcggtggtggtcgcggcggntcgcgacgcgcgaagtggcga

SEQ ID NO: 65916 - DNA, 1533 bp, Oryza sativa
  Clone ID: PAT_MRT4530_66917C.1
ttggtcttctaacttcgtcttcagctcagaagcactacacttctgaaaagggggaataatagcaagactgagtacaaccaccgtactcagtaagccacaccaacgatgcagacgtgcaaggggatacaaggaggggaaaagagggttgctgacgtcatcaaaggggaggggcggcgccggcaagcgggccccaccggtcagtggcacaagggagccggtccaccgtggaccgggaccaccgaggcggtccaccgccggtccacgggaaccgacggcctggattggcctaagccgatcggacggccacggggcgcgcggctggggcacggtcacggctcaaagccggccagccgacacgctagggagcggcggcgcggcgcggtaaggtgaggcggcagccgactgcccggcacagccggcagcggcgcggagcgcggcggcggcgacccggtcggacggccaccggcgacggcggcgcgttgtgagcaggcacaggaggtggccgacgaaggggaggaaggggagagggaggggagtgctcaccgagcggcacgacggcaaacgggcggccgacggcaaggaacggtggcagcggggctcctcgggaagacggcgcgacggagctccggcgacgggcgtcgctcaggaaggggcggacgggctcggcctcggtctgaggaaaatcaaggaggggctcgggcggatttccggcgaagagggccagtggccaaggatctccccgtccctgcggagccgaggaaggcgacgacgcgggtcggcaaggaccgaagcggcgttgcgacgcggctggagtcgtcggtgagtggtggagagagggagcgcggtggggagggggttccgacgatggaatggggaaaacggagcggggccgaggtgcggcaaggcacggcgaagccgcaggtggcggcggaacagcacggcgacggctgtagcagcggtggcgagcggatggagagtcgccggtgagcggcggcgatgggagcagcgaggggagagcagtacagggcgcgagaagctcgggaaaattgggggaaatggaaaggggaggccggggatgctttttatgggcttggagcgacgggatcgtgctcgagagaggtggcaaccggctggcgagatgggcggggcatcgtgggggtggtggagaggttaaccggcggcgattttcgtggggagagtggggaaaagggtagaggacgtggggcgacggggtcccacgaccggcgggctcgcgcgcggggtggaggaggtcggaaacggcggcgtcgtggggtggctcgggcggccctggcggttgcagccggccagccagaggtaggaggaggagctgacaggtggggcctcgggtcccacctgtcggggagagagagaggggaaaacgggcgagggaggtaaagcagacttgagggagagagagagccgagcgggccgagggagaaggccggcccgagagggagagaagggggggggaatgtggctaactattacagcagaagctatagagtgtctcaa

SEQ ID NO: 65917 - DNA, 1312 bp, Oryza sativa
  Clone ID: PAT_MRT4530_66918C.1
atctacatttccctattggactgggtaaatttacaaaggtttcagtttgggccttggttgataaagtggctgataatctcccggggtgggaagcctccctcatgaatatagctagtaggctgattatggtcaaggtggtcctcacggcggttcatatttatctcatgatggtaatggatcttccaaaatgggtgatcaaagctattgataaagagtaaaaggcgaaggtgtttcctttggaaaggacaggaaaatgctagactgctagtgatggtagctgcctagtctttgggatcatgtttaccgactactccaatatggtggtcttggacttcataactaagagaaactaggatgggctctaagaatgtgatggctatggctccaaaagaccgatcccacaaggccatgggctgggctgcccattcaagtgccgcaaagtgttcacgcacttttcaacgttgtggtggttactacagatggtaatgggaggagaccaagttttggactgactgctggctgaaagggaaaaaaattgtagaatgggctcctaacctctttcttatgatccctaaaaagataaaagaaagcagagaacaatagtgcaagctcttataaatagaagatgggtagatgatatactaggaagcctcactatgctggtcatttatgaatatttacaattatgtgacttggtggatgggttaattttgcaatgtgttggagcagtatgtttagaaaatctctgggtcgggatcttacacaagtaaatatgcttatgatactttgtgggatccatcagatttgcaccttggagcagaatatggaaaagttgggcccctaccatgcaaattcttcacttggttggcagtaaataaccgaggttgaacttccgaccgccttgccaagttcgggttgcaacaccgggaggcatgcacactttgtgatcaggaagaagaaaccatttaacatctcttcgtcaaatgtgttttctcccgacaactttggtttttgatccttgagaagattggaatggcagctgcagcacctcagtcctcttcaactcgtttctctaactagtggtttaaggccattcaaaaagtccctaagaaggaaaagaagggcttgaattccttagtcattcttggttcttggacgctttggatgcatcgaaaccattgtgttttttatgggactgctcctaaattggccgatgctcttttgcttgccaaggaggaagcacaactgtggtttttgccggcctcaggggctatcattattgactactcaagagccgggtggttagtctcac

SEQ ID NO: 65918 - DNA, 204 bp, Oryza sativa
  Clone ID: PAT_MRT4530_66919C.1
tcgtgatttttgacctgccggatcccaggttctgcccggagccgcgattcttgcctgtgacccagtataagggctgttaagtcatgcccataggctgtttaggcaacgggaattataggtagagcccgatgagatattctggggccaccattgaaacttccgagtatataatctgaagcaccccattacccccatgataagttt

SEQ ID NO: 65919 - DNA, 3363 bp, Oryza sativa
  Clone ID: PAT_MRT4530_6691C.1
atgtctttcctcataggatttgggactgcccctttgtatgcccagattcctcatgattgtgatgaagagaagtgccgtgtcaaagtcactttgaacagtaatcgtgaagatatcccttcggtgatgttcgaggctggagggggaagctacattcatgcttgtcaggaggtggcaaggatcgccataggagagctccacgaaagctacaacgatcggttggctgacaccgagtatcgctaccatcctcgtcaaccccagggaagtgaccgtggcagctaccttgaacctgcagagattgagaatgatgctaccacaaggcatttggttgagatgctgtgggccatggatgaaacccgtgctgagattgtgatagcagctcaagattgtgaagaccggaatcgcgggaagatttgcaagctggaggacaaggtggatcgtttggagaaggagctagcagcattgaagggagaagcaccaccgcagaaggccagggttcgtcttacagcaaggaagagagctctattcgtccctcgctaccagttggcgccaaaggttcgtgtggtggaaaaagaagctaccccagccccagtggatcctccggtcgtcaacgtgagtgatgatgatgaagaagaatccaagcgcacccattccaaggtcgagtggggagctactcaagatgatggggatatggtgcttactcgcagcaacgggaatggccccaaccccaacaaaaacaacaacaatgcagagaatcccacgcttgctcaagtcctggcccaacaggcacagcttaagaatctgatgatgcagcaactccagaaccagcagaaccagggaaacaaccatgcacctcccccgaataagctggtagaatttcttcgcgtgaggccgcctactttatctagcaccaccaatcctattgaagctggtgattggctgcacgccatagagaagaagttggacctacttcagtgcactgatcaagagaaagtctcttttgcttcacatcggcttcatggccctgcctctgaatggtgggatcacttccgtctcaacaggactacagctgaaccaatcacttggcttgagttcactgctgcttttcgtaagacgcatataccctcgggagtagtgtctctcaagaagaaggagttcagggcgctcactcagggatctcgctctgtcactaaatatctgcatgaatttaatcgtctggctcgttatgctccggaagatgtgcgcattgatgaagagcgccaagagaagttcttagaagggctgaatgatgagctttctaacccactcatgactggggattatcatgatttccagaagttggtggataaggctattcgccaggaggacaagtacaaccgcatggagcagaagaaacgccggattgctcacttcaaggctcagcaggggaatactccgacacagcatcagcctgccaagagggagcaaggcagtaagcccggggtgtgcttcaactgtggagacccaggacattatgctgacaagtgtccgaagccccaccgcgcgaaggttgtccctgctcagaacaacccctccgcaccagcgacaaaggctcgtgtcaaccatgttgctgccgcagaagcccaaggtgctccagatgtgattttgggtacgttccctgttaactcagttcctgcaacagtgcttttcgattctggtgctacgcattcctttttatctttgagttttgcgggaaatcatgagatggaagtagaagatcttagacgtcctttgatggttagtacaccgagtaaccaagcactctcatcacaacgtagcccctctgtcagaatagagattcaaggagtaccatttttggccaaccttattctgttagaatccaaagaccttgatgtcatcctagggatggactggttagccaaatataaaggtgtgatagactgtgccaatagaaaagtaactctcaccagcaatgatggtcaagttgtaactgttcatgcattgccttctgagcctttaaggtcaagtctgaaccaaataactttggaagagattcctatagtacaggagtacccggatgtgttcccggatgatttacctggtatgccgcccaagagagatatagaattcagaatagatctggtaccaggaacaactccgatccataagagaccttatagaatggcagccaatgaattagcagaagtcaagaggaaagtagatgatttgcttcagaaaggatatatcagaccgagttcgtctccgtggggagctccagtgatctttgtggaaaagaaagatcatacccagaggatgtgtgtggactatcgtgaactaaatgatgtgactatcaagaataagtacccgctgcccagaattgatgatttgtttgatcagcttaaaggtgccaccgttttctccaagatagatcttcgatcagggtatcatcagttgaggattaaagaggaagacatacctaagatagcttttaccactacgtatgggttgtttgaatgtactgttatgtcttttggacttaccaatgcccccgctttcttcatgaacttgatgaacaaggtgtttatggaatacctagacaagttcgtggtagtctttattgatgacattctcatttactcccgaaccaaagaagagcatgaagaacatcttcgtcttgcactagagaagctgcgagaacatcagttgtatgccaagtttagcaaatgtgaattctggttgtctgaagtgaagttccttgatcacgtcatctcagccgggggagttgccgttgatcctagttattactggaggttcatagagaatttttccaagattgccaagcccatgacacgactgcttcagaaagatgtgaagtacaagtggtcagaagagtgcgagcagtgttttcaagagttgaaaagtcgcctaatatcagcacccattttgattttgcctgatccaaagaagggtttccaagtgtattgcgatgcatccaagcttgggttaggttgtgttctgatgcaagatgggaaggtggttgcctatgcatctcgtcagttacgcccgcatgagaagaactaccctactcatgatcttgagttagccgcagtggttcatgcgttgaagatttggcgtcactatctttttggtactcgtacggaggtgtatacggatcacaaaagtttgaagtatattttcacccagccggatctgaacatgagacagcggagatggttggaattgattaaggattatgatatgggaattcattattgtaacatcctgaaaatgtgtcattttctaatcttgcatcatgctgattcttatgttcttaataaccttttaaacctaggaaaatatacttag

SEQ ID NO: 65920 - DNA, 1257 bp, Oryza sativa
  Clone ID: PAT_MRT4530_66920C.1
atggcctctgcaacttatttttggtccaatgcccttaatgctttcctgttcaaccaagggccgatgacccccactctgcttgacatcaccatgatcactggtttagatgtgacttcatcggctaaccccatgagtttgaataccaagaaccagtttgattttagggccaagagcataggtggctggtctggctatgttgctgcgtatatgggcaagggatctgtcaccccccgagagcatactgcctttcttttgatgtggcttgagaaatttctgttctgtggattaagctgcggtcctaccaccaacgggcaattcttagccgaggcccttgaaacaaagaagcaaatccctttaggcaaaatcctcctcggctatctgtatcagatgttgagcaatgcatcggctaagatagctacaggctcagtagtaggtgcaggtggaccatggtggttgctgcaaacatggctcaaccttgttgtcataaaggttgtgaattggccacctttgatagatgcagaattcccaaggctggagcccaccaccaatgatgatgggaaagaggtcacccaccaccgatgcatgttgtatggggaagctgcatcgacaccagccgattctagagcaaagctatcggctgaactgctcaaagattggttctgcagtttttatgagggcttccaaaaagatgctcgtgtctggtttccatatgaggattcggtgaatttcgatctcccagcagacttcagatttgaggacatcaactctaaaaaatttgacaaatccagagaagtcttctcggctgctatcagtccatgcattcttcctgttggcatccatcaagggagaaacatacaagtgtcttatgaattttactatccaatgagctcagccagacagtttgggatgggacagctgccgatcggcttgttctttgctgacaaaatccaatgcagaggagaaatctcatcaacactgatgatggatcggcttctcaacatcccaggaccgcctttgggcagcatcgaaaatatagaactagcaaggttcatgagcaggaactttgacagatggtggggtgaatggaagcaacacatattccatcaatcgacttccaagtacatgacagatctgttcccagacgttataccccagacaacatggatttggagagttggtcccccagagatttttctagaaatgacttaccataggccacgaagcagcggttgtttcggcgaaacatcgaatatctga

SEQ ID NO: 65921 - DNA, 255 bp, Oryza sativa
  Clone ID: PAT_MRT4530_66921C.1
atggaagacacccatgattatcaacatacacccaccagaagccacaacatacaagccaacatacgccaagacacgccgccggatatcgacttcacagataggcatggctattcccctacggtgtctccggataccgtcaggagatacgaaagcgctatctttgatctcgccgggtacggactcgaggaggaagactacccagttgtcgactacgagtcagaccttcagaccgacatgtcgacaacagttagatag

SEQ ID NO: 65922 - DNA, 973 bp, Oryza sativa
  Clone ID: PAT_MRT4530_66922C.1
gttggatactataaataatattaataagcttggcgaaggagggttcggtatcgtttacaagggagttcttcccgaaggtcgagaaatagctgtaaaaaggctctcacaaagctccagacaggggatagaagagctgaaaactgagctagttttagttgctaaacttcggcacaagaaccttgtgagccttgttggtgtttgcttggaagaaggcgagaaactactggtgtacgagtacctgccaaataagagcctcgacaccattcttttcgattatgagaaaagcaaagatcttgactgggggaagaggctcaatattgtaagcggagtcgctcgaggcttgcaatatctccacgaagactctcaactgagggtagttcatcgagacctcaaagcaagcaacgtgctgctggacttcgatcacaacccaaagatttcagactttgggttagcgaaactgtttgagtgggatcagacgcaagacgtcaccagtcacatcgctggaacatatggatacatggcaccggaatacgccatgcgtgggcagtattcagtcaagtcggacgcgttcagttttggtgttctgatcatagagattgtcacgggaaggagaaacagcagcttctccaactcggagcaatccattgacctcttgagtcttgtatgggagcactggacaacggggacgatcgaggagctgctggatccggcgataggcagccgtgcagtgaacgttctgctgaagctgatcaacatcgggctgctctgcgtccaggacaacccggcggacaggccggcgatgtcggcggtgaacgtgatgctcagcagcgacacggtctccctccaggccccgtcgaggccaacgttctccattcaggagatggacggcgccgcccccaccggcgacggcaacacgagagcagcggcggcggcgtcgccgaatgagttgtcgctctcggagctggaaccaaga

SEQ ID NO: 65923 - DNA, 353 bp, Oryza sativa
  Clone ID: PAT_MRT4530_66923C.1
cttacaatgagttgtcttttataacactgatccaactatttttcattcatcaatccttacaatcagcttatctctatggagataggaatccattaattcttacaatcagcttctctctatggagatattgatcagcttatctctatggagataggaaaacaatagttatgcgtcttttataagactgatccaactacttctcatccatcaatccttacaatcagcttatctctatggagataggaaaataatagttatgggaagttgatccttaggatcagcttatctctataggagctagtaaaacaataggtgagtcggacatgagtcatatacacagattgtacgtatag

SEQ ID NO: 65924 - DNA, 1123 bp, Oryza sativa
  Clone ID: PAT_MRT4530_66924C.1
ctccgccgagttcgccgcctccgcctccgcctcccgacggcggcaaggcaaccgctcgcgccgccgccgcctcggcccaaccagcgcctccgttcgcgcgtgtccggccctgccgcgacggcggtgagactgccatggcctcctccaagctctactccgatgacgtcagcctcgccgtcgtcgtcgtcgacaccaaccccttgttctgggccaccgccgccctccccttcgccgacttcttcgcccatctgatccactacgtgaactcgctcttgcttctgaaccacctcaaccatgtggtcgtcatcgccgcggggcttagctcttgcacctacatcttcgactcgagcgatgctagtgcctctggtgctgcagacgtcgcggccaccttcgcaaaggcgagccgcaagatggatgagttcattgcagaagacgcccgtgccactagcagcaatggatgcttagatatacagagggtttttcggtctggtactcgacatccacaacctcgggtcccaatcgattcatgcatagtaggaacccaagactctgctttcttgcaacaggcttcatatataacaggtggagtttatttgaaaccccaagaactaaatggtctatttcaataccttgctgctgtatttgcaactgatttacactcaagaacctttctgcgcctccccaagactctgggagtggatttccgtgcttcatgtttctgccataagaagactattgacatgggatatgtttgttcagtttgtttatcgatattctgcaagtatcataagaagtgttcgacctgtgggtcagaattcaaccgtgtcatgcccgacttaaattctgtacctgatcaaaggcagtagtctacactacagatggcgaaatatcagactgcagacttctctttatgttctccacaggttcaactgatacagaatgggcattgtgtgcatacttgaagcagcgtcagtttagcaaaaactaggcaactgggcgtagcaattttgtcaactgatgagggaactcacgcccgacttttggaattagtttgcctgcaatttgtaaagttggcacatgaacttgtgatgcaccatttgcaaatgctcttttttgcttaccg

SEQ ID NO: 65925 - DNA, 2269 bp, Oryza sativa
  Clone ID: PAT_MRT4530_66925C.1
atggcgacgacggtggcgacggccatgcgacgccgacgaaatctcactccctgcgacagccgcctcgccaccgcagtccccctgctcgtggcgttcctcctcctcctccacgcgccgccgctcgcggaagcgcagccgctgccgtggcagatgtgcgacaccgccggcggaaactacacggaggggagcacctaccaggccaacgtgcgcgccctcgccagcgctctcccggtgaacgcctcctcatcgcgcgccctcttcgccaagggcgccgccggcgcggcgccggacgtggtgtacgccatcgcgctctgccgcggcgacaccaacgcctcctcctgcgccgcctgcgtcgccaccgccttccaggacgcgcagcagctgtgcgcgttcaacaggcgcgccaccatgttcgacgacccctgtatcctccgctactccgaccaggacatcctcgccaacgccaccgacggccaggggaatttcatcgcctggaactacaacaacgtcagcgcggcgagggcggcggcgttcgacgccgcctccggccggctcgtcaacgccacggccggctacgcggcggcggacccggtcaggcggttcggcacgggggaggtcgggttcgacgacgcgacgtacccgaggatcttctcgctggcgcagtgcacgccggacttgtcggaggccgactgccggagctgcctcggccgcataatcaggtgggtgccccagtatttcgccgggaagcccggcggcagggtcttcggcgtgcggtgcaacttccggttcgagtcgtactcgttcttctccggccggccgctgctgcagttgccggggccgccgccggcgccggcgccgtcgccggccaacatggcgccaccatcaccaccggggaccatgggaggaagaacaagacatagaacaggacgtgtcttggccattactctgcctattgctggagcaatattagcactcattgtcctgacatgcttttgtttttggagaaggagaacacctgcaaggaaggcctcaccagtgccatactcaacaaacccagatgacattcagagcatcgactcgctccttctggacctatcaacgctacgggctgcaacagacaacttcgctgaaagaaataagcttggcgaaggagggttcggtatcgtttacaagggagttcttcccgaaggtcgagaaatagctgtaaaaaggctctcacaaagctccagacaggggatagaagagctgaaaactgagctagttttagttgctaaacttcggcacaagaaccttgtgagccttgttggtgtttgcttggaagaaggcgagaaactactggtgtacgagtacctgccaaataagagcctcgacaccattcttttcgattatgagaaaagcaaagatcttgactgggggaagaggctcaatattgtaagcggagtcgctcgaggcttgcaatatctccacgaagactctcaactgagggtagttcatcgagacctcaaagcaagcaacgtgctgctggacttcgatcacaacccaaagatttcagactttgggttagcgaaactgtttgagtgggatcagacgcaagacgtcaccagtcacatcgctggaacatatggatacatggcaccggaatacgccatgcgtgggcagtattcagtcaagtcggacgcgttcagttttggtgttctgatcatagagattgtcacgggaaggagaaacagcagcttctccaactcggagcaatccattgacctcttgagtcttgtatgggagcactggacaacggggacgatcgaggagctgctggatccggcgataggcagccgtgcagtgaacgttctgctgaagctgatcaacatcgggctgctctgcgtccaggacaacccggcggacaggccggcgatgtcggcggtgaacgtgatgctcagcagcgacacggtctccctccaggccccgtcgaggccaacgttctccattcaggagatggacggcgccgccgacacggatctctacgagtcgggagcgtacccccggagcgcgttccagcccaccggcgacggcaacacgagagcagcggcggcggcgtcgccgaatgagttgtcgctctcggagctggaaccaagatgagcgtttcgaatttggagcgatttgtgcggatgaccgcagggtttttcttcaataacgaaagaatcaacacgtgtggcctctgcacttgtttgtcgatcataataaataaatgccctcgttgatggttggttgg

SEQ ID NO: 65926 - DNA, 2364 bp, Oryza sativa
  Clone ID: PAT_MRT4530_66926C.1
atggcgacggcggtggcggcgacggccatgcgacgcgggcaacaccttcctctctctctttctctctgctacaacctcgccgcagtcgccctgctcgtggcggtgttcctccacgcgcctccgcgcgcgggagcgcagccgctgccgtggcaactgtgcaacgccaccgccggcaactacacggaggggagcacctaccaggccaacgtgcgcgcgctcgccagcgccctccccgggaacgcgtcgtcttccccggccctcttcgccgagggcgccgccggcacggcgccggacgtggtgtacgccatcgcgctctgccgcggcgacaccaacgcctcctcctgcgccgcctgcgtcgccaccgccttcgacaccgcgcagcagctctgcgcgttcaacaagcgcgccaccctgttcaacgacccctgcatcctccgctactccgacctggacatcctcgccaacgtcaccgacaacagcgggaggttcgtggcctggaactacaacaacgtcagcgcggcgaaggcggcggcgtacgacgccgcctccggccggctcgtcaacgccacggcggactacgcggcggcggacccggtgaggcggttcggcacgggggaggtcgggtccgacgacgcgacgtacccgaggatcttctcgctggcgcagtgcacgccggacatgtcggaggccgactgccggagctgcctcggggacataatcaggaaggcgacgcccaagtacttcgtcgggaagcccggcggcagggtgttcggcgtacggtgcaacttccggttcgaggcgtacgagttcttctccggccggccgctgctgcagctgtcggggccgccgccgccgccggctaacatgacaccaccggtgaccagtgaaggaagaacaagccatagaacaggacggatcttggccattactctgcctattgctggagcagcattagccttcattgccttgacatgcttttgtttccggagaaagagaacaccagcaaataaggcctcatcactgccattctcaactaatccggatgatattcaaagcatcgactcgctccttctggacctatcaacgctacgggctgcaacagacaacttcgctgacagaaataagcttggcgaaggagggtttggtgccgtttacaagggagttctttctgaaggtcaagaaatagcagtgaaaaggctctcacaaagttcaagacaagggatagaagaactgaaaactgagctagttttagtcgcaaaacttcggcacaagaaccttgtgagccttgttggtgtttgcttggaaggagatgagaaactacttgtgtacgaatacatgccgaataagagcctcgacaccattcttttcgattatgagaaaagcaaagatcttgattgggggaagaggctcaagattgtaagcggagtcgctcgaggcttgcaatatctccacgaagattctcaactgagggtagttcatcgggacctcaaagcaagcaacgtgctgctggacttcgatcacaacccaaagatctcggactttgggttagcgaaactgtttgagtgggatcaaacgcaagacgtcaccagtcacattgctggaacatacggatacatggcgccggagtacgccatgcgtgggcagtattcagtcaagtcggacgcgttcagtttcggagttatgatcctagagattgtcacgggaaggagaaacagcagcttctccaactcggagcaatccattgacctcttgagtcttgtctgggagcactggacaacggggacgatcgaggagctgctggatccggcgatgcgcggccgttcagctgacgatctgctgaagctgatcaacatcgggctgctctgcgtccaggacaacccggcggacaggccgacgatgtcggcggtgagcgtgatgctcagcagcgagacgttctccatccaggccccgtcgaggccaacgttctgcatccaggagacggacagcgccgccgacacggatctctactcgagcgcgcttcggtccaccggcgacagcaagacgagagcagtggcgtcgccgaatgaggtgtcgctcaccgagctggagccaagatgagtgtttgttggagcgatttgtgcagatgagtagatgactgcatgatcttcttctcaataactaaagaatcaactcatgggtcatggcctctgcactcgtttgtctataataaagaatagataaaaggaagtgtcatagtggttatgcagaatgtaactcagtttgatactggttgtaactctgcaaagattgttcccacctgtatattattatagttacacttgtccatgtcgattacagcaatcagaataattacacctgtatagg

SEQ ID NO: 65927 - DNA, 2355 bp, Oryza sativa
  Clone ID: PAT_MRT4530_66927C.1
atggccggtcatcgactacatcttactttttggtacaacctcgccgcagttgccctgctcctcgcgctcctccacgggccgctcgcggaagcgcagccgctgccgtggcagctgtgcaacgccaccgccggcaactacacggaggggagcgcctaccaggcgaacgtgcgtgcgctcgccagcgccctccccgcgaacgcgtcgtcttcccgggccctcttcgccgagggcgcagccggcacggcgccggacaaggtgtacgccatcgcgctctgccgcggcgacaccaacgcctcctcctgcgccgcctgcctcgccgccgccttcgacaccgcgcagcagctctgcgcgttcaacaggcgcgccaccctgttcaacgacccctgcatcctccgatactccgaccaggacatcctcgccaacgtcaccgataaccggggcatgttcgtcgcctggaactacaacaacctcgtcagcacctccggcgactatgcgtcggccgtgtacgacgccttttccggcatgctcgtcaacgccaccgccgactatgcggcgaaggactcagtaaggcggttcggcacgggggagatggggttcaacgtcttcgactcgccttaccacaatattttctcgctggctcagtgcacgccggacatgtcggaggccgactgccggagctgcctcggggacataatcaggaggatgatgcccaagtacttcgtcgggaagcccggcggcagggtcttcggcgttcggtgcaacttccggtttgaggcgtacgagttcttctccggccggccgctgttgcagttgtcggggctgccgccctcaccaccaccaccagggctgtccgcaccatcggggctgccgccctcaccgccggggctgcggccggcagcatcaggtaataggacccaaattctggtaattattttgccactagtggccatttcctccgttgccgcaatttccatctgtatgtggaatatacgtaagaaacgaagatggcgaagagcagagaattctgatacggctgaggacttcgaaagtatcaagtcaaccttgctgtctctgtcatcactacaagtggcaacggataactttgacgaaaacaaaaaacttggtgaggggggatttggtgcagtttataagggacttctttctggacaagaagtagccgtgaagaggttggcgaagggttcaagccaggggctagaagagctaaaaaacgagctagttctagtggccaaacttcatcacagaaaccttgttcgccttgtggggttttgcctggaagagggagagaggatgcttgtttatgaatacatgcccaataaaagcctcgacttctttctttttggtaccattaacaacctaactctgaatctagatatacacccttctcatgtgcatcgtggctacatgtctcccgaatacgtcatgcgtggacaatactcgacaaaatctgatgtgttcagctttggtgttctcatcatagagattgtgacaggccagaggaacaacagaccctatttgtttgaacaaaacgaagatataataagcacagtgagtatccctgctagctcatacagcactatgtggtactatttgcgtttgcaggtgtggaggcgctggtcagatggaacagttgcaaagatgatcgaccattcgttgggaaaaaattaccctgaagccgaggtgctgaaatgcatcaatatcggcctcctgtgcctccaggagaaccccgtgtcaaaaacgttcctacaaagctatgttaactcgcttgaacaagtgaagaataatccccaagcagatttggttacagggaagcaggctctgtatcatgaggagcgaaagatccaaaaacccaagcaaaaccctttgaataataattgtcgatgggtgaagctaaaacagggctggatgaaactgaatgtagatggttctattgatataaattctgaaaaatggggcatcggtgtcgttctaaggaacagtatggggatgtgtagcagcccgttggaagcagagcttcttgcctgcagggaaggtattagcttggctcttcagtggactctccttccattcatagtggagacagactgcttggtggtgaagaacctcatagagtcagctgtgcaagggcgctctgagcttacattcatcgtcaggggcattggtgaattgttatcaggaaacagggaagtgatcatcgtgaagattcagcggaatcagaataatgttagccatactctagctaatagagcccggtgtgaatctctgactgagttctgcccggatgataaatgtaatttcatcgcacattttgtttgtgaggactctttagctgagtaa

SEQ ID NO: 65928 - DNA, 165 bp, Oryza sativa
  Clone ID: PAT_MRT4530_66928C.1
atgattttgaaggagtcgtcgtcgtcttcttcctcgagctatgcagactttgctaaagaaagcagaggtgttgcatggttgctcacttttggcgccaacgaatgtgggcggtctgaccgcggcctgaactccggtctaaccgcagacgtggaggagaacctgtag

SEQ ID NO: 65929 - DNA, 357 bp, Oryza sativa
  Clone ID: PAT_MRT4530_66929C.1
atggcaaactctgggagcgaagacttcctagacaacgcttccaaggaggttgtgacgcctcgagaaaaggaaggcctcaccgccgtcatcctatccacagtgtttccatcgccatgcttgaatgtgaggtctccgtcggcggaggtcgtggacgaggacggcggcggttggcagagggaggcggcagtggtcgagggcgcggtggacgcggacgaggtcggcggcggtgacggacgagggcggtggcagcggttgaggacgacggcggacgcggacacggacgaaggcagcagcgtcggtcacggtgaacacagacgagggcggcaagccggcaacggcggcgatcgtggcatatga

SEQ ID NO: 65930 - DNA, 414 bp, Oryza sativa
  Clone ID: PAT_MRT4530_6692C.1
atggcgaccggagcggaggaaggcggcggcgctgctcgggtcgacggggacggcggcgttccggtggtcggcgggcgaaacggaggggtggacgaggtcggcgaggttgccgcgaaccggagaaggcgacgccgaagcgggagaaggtccggggcgacgacggcggcggaccggagctcggcggcgacggcggagagagagagcgacggcgcgagctcgattccgacggggagagagagcggcgagtggcggaacggtggagggaggcacggggagtgtttatatagggttgggagtgagagagggcggccggaggggaaggaaaccggcgcggcgatctcgggctccctcaatggcgccggcgaggcttttaggaaatatacaaaaatcctccaagccttattcgacttttaa

SEQ ID NO: 65931 - DNA, 270 bp, Oryza sativa
  Clone ID: PAT_MRT4530_66930C.1
atgtcttctcctccgcgtgcgccactgctgatgctgtgcctcctgttgttgctttgcttcgcctcagcgacgagctccggcgtggggcatggacagcggaggacgcggccaccggcgacgagcctggcatggagcgtggtggaggaggacgcggctgctggtgacgagctctggcgtggaatgtggatggcggaggatgtggctgcaccggtgatgatctcggtcatgggatgtagggccgccaccaccgagctccagcatgtggagtga

SEQ ID NO: 65932 - DNA, 995 bp, Oryza sativa
  Clone ID: PAT_MRT4530_66931C.1
tatcttattgtcttttttgctagtaagttttacgttgtgaaacgcacgaagcactacaatactagggtactgtattttttacacgtttttttttttttttttttttttttttttagaaacaatgtgccttatctcgcgaccgtaattccgtaccatatgttcattactaggccatacacacgcatacaccttttttttttctttcaagatgacagcacatttattcaaaaatgtttgccttcatccttatgatacatgctgcatagagtttgtgagcgttacacactatttcccgccagcaagaagcagagcagagacttcttcatgacaggttctttactacgagtacgcagggcactgcaacattcttcatgacagaacctctggcactcatgcttcggcagccttctcttcacccttttgtgctagcttcgccttctttgcttcatagtctttcacggcagctttaattgcatcctcagcaagcatgctacaatggagctttactggtggaagtgacaagtgcttggcaatctcagtgttttttatagtcactacttcctccatttgcttgccctttacccattcagtagcgacggaggaggacgcgatggcggatccgcacccaaaggtcttgaagcatgcgtcgacgatcttgccggagctctcgtcgacgcggatctgcagcttcatcacgtcgccgcaggccggcgcccccaccagccccgtcccgacgctggggtcgtcgttctcgaacgaccccacgttccgcgggttctcgtagtggtccaccacccgctcgtggtacgccttcgccccgcccacggccaccggagcggccgccccgccgccgaggacccgccggagcccgggggccaagagccgcctccctcccgcgcgcagcatcgtcgccaacaaggctgggagccccccgcttctctctccccctgatcgggatggaggggtaggcgcgcctcgggccgtctccctcgtgc

SEQ ID NO: 65933 - DNA, 433 bp, Oryza sativa
  Clone ID: PAT_MRT4530_66932C.1
ggtgccgccgccgctgccgaaccgcagccgcctcccgctggatccggcggaggtgatgcggacatcactacctcggatacacacaacaatcctccaacggtcattcaaggaccgataacaagagctcgtgcgcgacaattaaatttagaggtgagctcgttcctatgttcttctttgtatgaattcgagaatagattgctacctaatgattatattgtgattaggaacaatggaggggacaaggagacacttggagaaggacttacagccatagagtatcatcggggacgtccaagttaaggtggaggcccaaaccaagtcgacgtcaggtgcaattcggagtccaggaccagtctgcactaaaacgggcgtccaggtcgcatacgtgcttggattgggatgttctttatatcgatggaaagctaagaagata

SEQ ID NO: 65934 - DNA, 392 bp, Oryza sativa
  Clone ID: PAT_MRT4530_66933C.1
gctcctgcagaaaaccatcatagacgtgctggcttctaaaaacctcggggtgctctcaaagagctgaaactttcttcaaccacatctcatgtaaagtctttaacgagagctttttccaactattacactcatgagaggctattgtaacacaaaaaatcaagctctaacactctatctattccaatgatgatactcatctaaacaaatattgcaagttgaggatttcatgattttgcatattgattctacaaataactgataacataatgcctcccatcataagcttccatgaaatacaacttcagatttgtacttcactatctaagatttatctaaactggctgctaatatgatttcttactcaactttagtaaattaacataacccacttt

SEQ ID NO: 65935 - DNA, 534 bp, Oryza sativa
  Clone ID: PAT_MRT4530_66934C.1
gaagatctgacgttgagtgctttggaatggatattggtggataatgaagcccatactgatgatgaggacaacgaacgggatatgtatgattgacacttgcatgatgattctcacttgctgaatttcgttgttctgaaatgttaacgactcctggatgtcaccatatggttcaagttgttgcctccacaaggagaggtttcaactcatgaatattcataagagagtcttatctggctcatgaaggagaggtttcagaaggctatcactgtgagtagctagctccatcgaaattttgatgtacttgtatattagttgcttgagatgtagaaagctattcaggatgtttagtttctctggtcagtctgtggttgatggtgcaaaacatatacttatagccctctctaaatagcatgagaattatcataagtttgacacaattggcagataattgggtgattgcttttatgtatccagctattcaattttatgcccagtgccttactgagttaaatttaaaaaaaaaaaaaaaaaaaa

SEQ ID NO: 65936 - DNA, 2298 bp, Oryza sativa
  Clone ID: PAT_MRT4530_66935C.1
atgggggaggaggagcaggggccccggaggaagcaggcggggccggacgacgcggtgcagatcagcatgcagcgagtcaaagtgtaccgattgactgatgatgggaagtgggatgatcagggaacagggcatgttaccatcgactacattgagggatcaagagaaattgctctgactgttgtggatgaagaggatagtgacacgctactgcttcatcacattacatctgatgatatatacaggaaacaagaagggagagtgtgtgtaccatacaacgaaatttacaatttaatgtccttgatgcatttactttttctatatcctacagttcaagaagccgctccacccgcagcatttgaatctttagaagcctctagaaatccaccttttcatgatgagtccttaagttctaccagcagagaattaaagaaacttccccctcttgatttgtccagtctatcttccatcttaaagactatattggagtgcagcatgacagagcggatgcgtgtttctgttgcagagttaatattacaatatcatgatttcttcccccagctagtgaatctttttagaacgtgtgagagttcaggaaacatggatgcactccacatgatctttagattagtaaagggaatcatattgttgaacagttctgcgatatatgacaagattttctctgatgattttattcttgagataataggcgcacttgaatatgatccagaggctcgcactgtgcaaaatcatcgcactttcctgaaggagcatgtagttttcaaggaggctatacccattaaaaatgcttctgtggtttcaaagattcatcaaacatacagaataggctatataaaggatgttatattaccaagagtacttgatgattctaccatggcaagcattgctgcaatcattcatgcgaacaatgctgctgttgtttgtttactcaaggacgatgcttcttttgtaaaagaactgtttgctaagatgagatcttcgaatatttctgctgaatcaaaacgcgaactggtcctgtttttgcttgagttttgtactctcactaaaagtttgcaggctgttcagcaattacgtctatctagggatcttgctagtgaaggtgtgtttgacatcatgtctgatgtgttgcagagtcaggataaagtgctcgtctcagctgggacagacatccttgtatattttcttaatcaagatcctaacttactgagatcatatattgctcgtcaagaaaattctcaagaaggaaattcacttcttggtcttctggttcaaggcatggtaactgactttggtgagggaatgcactgtcaatttctggaaattttgaagattctgatggatggatttgctacaaatatgcctacaaactatgatgagcttcttcttagccatgttatcaagttcaactcattgaaaccaattatcgaggtatttgttgaaaatggggataggtacaacatgctacattctgttgtccttgaactgttggaatacatacgaaaggaaaatctcaattcacttgtgatacatgttaccaaatccttttgggaccaacttgtgaggttcgaaaaactagggagcattcaggcctttaaactcaagtatcaacagttaatggagagtggtgaaacaacacaaagtattagtctagttgacatgagaaagaagccagaagaaagaggtctcgacaaagaagaggaggactatttcaacaagggcagtgatgaggaagattctgataaacagacatcatatgcacagaaggaatctttggataagttacccaagggaagtgacatccgtcatatccctgcaaggtctaaatctggtgggcttgtggattatgacgacgatgatgagggttacaacccacctcccaaaagggctgttaaagctgatgaggatgatgaggccttagtcataaagcgtaatccagtggatgacaaacaagctgatgggaggtctcccaaaaaaccaaagatggaacccagatttatctgctcaaagattgtcgctgcggctagtgtggcaggcagacgctcgaatttggcagataaacagggtccccatccaccttcctcaagcacgaaaacttctgaaggcaatggtgatgtaggggaggaaggcccaggttctcagaatctacaacatgacccaggaagcttggattccactcatcaaaatggagatgactgtaccaaagatgcagggaactcgccttccgagatgactgtaaatacatcaaaagcaactgattcagagccttattcagtgagatga

SEQ ID NO: 65937 - DNA, 255 bp, Oryza sativa
  Clone ID: PAT_MRT4530_66936C.1
atgaccgtgaatcaaggccatgtcggtccgcggctggcccccctgctccggaggcctccggagatccgagagaatcggatctcattgagggcgagaggaacaagacctaagcaggcttcggatggcggccgaccggctccggaagagctccgggaggtcgcagcgccatgggctccggtgacacacctagtgaccgagctccgaagcccgaaagggtacccggagtccggaaggggagctccggaggctacctaa

SEQ ID NO: 65938 - DNA, 3042 bp, Oryza sativa
  Clone ID: PAT_MRT4530_66937C.1
atgggtgcggacgaggtggcggcggggaggactatcaccgggcagcgctatgagtggctggcgccgtcccccaacatggcggcgccagtcacactggcgccatgctcgtgccaccgtggcactagggcctacgtggccgtgctgactgggaggagggggggcgctagccacactggcgccgctccacacaccgcggcgccagcatggctggcgcaccccttcagtatggatagacttgttcgtgtttactacggtggtagagtggtggaaccctacgttggtgcacatgttgagtttgaggatatgtcattgaagaccattttgtttcccacccacccaactctagatgaactaaggtcacgagtgaaagaagttcttggatggaccgaggataatgtggagattcgtttttatgggagatacgatgttggtcaagggcataagtatatattaaatgtcataggggaggcaggaccatcaaagatacattgcggtagtgatgatatggacgtagcgagggagatgaaaagggagttagtacaagaggggcttgatctaagtgaacatttatcggagagtgtacattggtcatcgtacgaaggcaaccctgaatacccgacgcaagtagcaggccaatatgtgaatccagatgattactttgttgtcgaattgagtggtggtcacgattctgtctcagtagaagtcaatagagaggaggttgacgaggaagcaagtgttgagcaatatgatgttgaatttgctgaagactctgatgatgaccgtccattccctccactaactaacaatgacaagttagcattagaggaatgtcgtgcgtttgagaaggtgtttgggaggaagccagacattcctgagtttagggacctaacacatgcccatggtgcaatactagatggcggcatcaacctagatcagttgccagaacaattccaggtggatggtctcagaaagggtttagagttcccatccatggtcgtattgaagctatggctccaggagtacgccatcgtgcaccatcgtccataccgtgttgtcaattctgccgcaaataggagggtgaagtatgacaaggcttggagggcacgagaggaggctatgaagctcatttacggagaatggggtgaagcgtacgtccgtttgcccactttgctacaagccattaagcagagaaatcccagtatggtctaccacatcgatactcatcctgatagggttgtcaacgttgatggagtgaccaagaaaaattttatgcgtgcattctggtgctttggtccttccattgaggcttttaagcattgcaggccagtactagctatagatgcaaccttcctaactgggaaatacggtggtgccttgatgactgcattatcagctgatgcggaggaccaacttgtacctttagcttttgccttggtggagaaagagaattcacgagactggtgctggtttatcaatcttgtccgacgggttgtggttgggctgcacagggaggtttgtattatctcagatcgacttgctggtataatgaatgccatgaagactcctgttccaggattgccaccggttcatcaccgatggtgcatgaggcacttcagtgctaatttccacaaggccgaaggaaaccgccttcaggtgttcaacttgatgctgcaccggtgcaaagtagatgctcgttatgtcaccaggagggatggccgaggagagacaaccgccgacttacctagccttggaggagtactacgaggcccgtcatcgcggggctgcgatcgaggcggggaggtgtttgacgataggtacatcccggacctaagggcggccgggttgctcggggtggccttggtcgtgagcagaggaatgctagtgttcaacgctcctgcgttgacagcacttgtggacagatggaggcctgagacacgcagcttccacctccccagtggtgagatgaccatcactcttcaggatgtggctatgatcttagccctcccattacgggggcatgcggtgacgggcaggacagagaatcctggatggcgtgcacaagtggagcagctgtttggcattccactcaacattgagcaggggcaagggggcaagaagaagcagaatggaatacccctgtatgctgggggtgacattgcttctgtcgccaaccttggtgatctgggccgtttcagttggggctcaacaatgtggatgtggctaagactaccggttggtaggcctaagtggaggcaaagcttcactccttggccctacaatgagccagacatggagaagacagtggcctacctgtttgagagtactgccactgcatatgctcaccgggatgttgtatacaagtattatgtcaatgagatggactgcttacagcctcaacatattgagtggttaccataccacaccaatgaggcttcaattgagtaccaccttccacaccgtgtcatgcgacagttcgggaagaaacaagattggccggttgaggacatctcaactagagttgaattacacaagtacgacagggtgagaacaaagaaggtgaaggactgggggctagagcataacagatacattgatgaatggaggacagcgggaaggaacgacaggatagaagagcgtgaagaagttggtggttcgtcgtcgtcacgcattccacaagggaggggaaaggggaaggcgccggctccacctagcgacgacgatgatgacgatgacgaggaggatgagaactacgtcgcaccagacgctaaggagatagacatggaggcagagggtggcgccagccaccctggcgctgtggctggggagggcggcgccagccagtggcgcgaggcagaagggtttcggggggaggagggcggcgccagccgcggcccggaggcagaaggtctcgggggggaggggtgcggcgccaggatggctggtgccgcgaggaggggtgcgccagacatgctggcgccgtcgtatgcggggggcgccagtgtgactggcgccccgctctaccgagtcagcaacgccacatag

SEQ ID NO: 65939 - DNA, 4314 bp, Oryza sativa
  Clone ID: PAT_MRT4530_66938C.1
atgacggagatggatagacttgttcgtgtttactacggtggtagagtggtggaaccttatgttggtggacatgttgagtttgaggatatgtcattgaagaccattttgtttcccacccacccaactctagatgaactaaggtcacgagtgaaagaagttcttggatggaccgaggataatgtggagattcgtttttatgggagatacgatgttggtcaagggcataagtatatattaaatgtgataggtcagttggaatgggaagtttactttgatttggtaaaagagtctcagtttagatctctagaggtgtttgcatcaaagttagttcgtaccgtagaaaatttggatctaaacaaatctccttcttatcattacgttgagaagaattttgtgacatattattctcgtcgtggagggggtgcaagtaagagtgagttggtacgagaagacttggagggggaaggagagaagaagagacctttgcttggaaatgatttatgggaggcaggaccatcaaagagacattgcgtagaagtcaatagagatgatgttgacgaggaggcaagtgttgagcaatatgatgttgaatttgctgaagactctgatgatgaccgtccattccctccacttactaataatgacaagttagcattagaggaatgtcgtgcgtttgagaaggtgtttgggaggaagccggacattcctgagtttagggacctaacacatgcccatggtgcactactagatggcggcatcaacctagatcagttgccagaaccattccaggtggatggtctcagaaagggtttagagttcccatccatggtcgcattgaagctatggctccaggagtacgccatcgtgcaccatcgtccataccgtgttgtcaattctgccgcaaataggaggtacactgttaaatgtgaaaacccacggtgcaaatggaaggtccatgcaactaagaggtctagtggcacgtggaggatatcacgggtaggtaaggaacatagttgtgctactgccgaaggttcagggagccaccggcaactgacatcaaagttcatagcaaataggttatgcaataccataaaactgcaacctacactctctgcttctgcgttagctttgtatatatttgaggttttccagtatagggtgaagtatggcaaggcttggagggcacgagaggaggctatgaagctcatttacggtgaatggggtgaagcgtatgtccgtttgcccactttgctgcaagccattaagcagaggaatcccagtatggtctaccacatcgatactcatcctgatagggttgtcaacgttgatggagtgaccaagaaaatttttatgcgtgcattctggtgctttggtccttccattgaggcttttaagcattgtaggccagtactagctatagatgcaaccttcctaactgggaaatacggtggtgccttgatgactgcattatcagctgatgcggaggaccaacttgtacctttagcttttgccttggtggagaaagagaattcaggagactggtgctggtttatcgatcttgtccgacgggttgtggttgggccgcatagggaggtttgtattatctcagatcgacatgctggtataataaatgccatgatgactcctgttccaggattgccatcggttcaccaccggtggtgcatgaggcacttcagtgctaatttccacaaggccggtgcggacaagcatcagacaaaagagctcctaaggatatgtcagattgacgagaagtggatatttgagaaggatgttgaggcactaaggcagcgtattcccgaaggtcctcgtaaatggcttgaagatgagttgttggataaagataagtggcctcgtgcatacgatagaaatggccgccggtggggttacatgacaaccaacatggccgaacagttcaatagcgtgctagttggtgttcgtaagcttccagtgacggccatcgtatcatttacgttcatgaagtgcgatgactactttgtgaacagacatgatgaagctttgaagcgagtccagttagggcagcgttggtccaccaaggttgacattaagatgaaggtgcaagaaagtaaggcgaacaaacacactgcaaggtgtttcgataagcagaaaaagacatacgaggtcacagagaggggtggtataacgcgtggtggtgttagattcggcgcaagagccttcaaagttgaaggaatctcccaaccgaaagccgttgtgaacacatgggcaagtcgctttgagccatacctcgaccccacacagtggccatcgtacaatggtgaagaatttgttgctgacccaaatttgaagattaaaacaagagggaagaggagatcgaaacgattcaagaacgaaatggactcgggtctgggtggttctggaaggaaaccaccttcatgcgttcaacttgatgctgcgccggtgcaaaatagatgctcgttgtgtcaccaggagggtcacaagaaaactaagtgtcctaagcgtccaaaaaagaagaagtccaaaaaaaatttaagtgttagggaggtacttcaaccgctccgagtcagagctcatgcccccccagtgttcgacgataggtacatcccgtacctaagggctgccgggttgctcggggtagccttggtcgtgagcagaggaatgccagtgttcaacgctcctgcgttgacagcacttgtggacagatggaggcctgagacacacagcttccacctccccagtggtgagatgaccatcactctacaggatgtggctatgatcttggccctcccattacgggggcatgccgtgacgggcaggacagagactcctggatggcatgcacaagtgcagcagctgtttggcattccactgaacattgagcaggggcaaggggggaagaagaagcagaatggaatacccctgtcttggctgagtcagaacttctcacatcttgacgacgatgctgagccatggcgtgttgagtgttatgcccgtgcatacatcttgcacttgttgggaggggttctgtttcctgatgctgggggtgacattgcttcggcgatatggattcctttggtcgccaaccttggtgatctgggccgtttcagttgggggcctaagtggaggcaaagcttcactccttggccctacaatgagccagacatggagaagacagtggcctacctttttgagagtactgccactgcacatgctcaccgggatgtggcatacaagtattatgtcaatgagatggactgcttgcagcctcaacatattgagtggttaccataccacacaaatgaggcttcaagcctgaccctgaactcgatgtgcaatcgagactctgactatttcatgtaccagtgcccattgatttgtttctgggcagttgagtaccaccttccgcaccgtgtcatgcgacagttcgggaagaaacaagattggccggttgaggacatctcaactggagttgaattacacaagtatgacagggtgagaacaaagaaggtgaaagactgggggctagagcataatagatacattgatgaatggagaacagccggaaggaacgataggtacatcgagactatacaccaaaatcatcttttctcagagtaccttcgttggctgcataggacatatagactgttcctccgccctacttggacggaagccgacatagaggatgaccgcgactccgatgaggggcggaatccctatgatgtccggactacagttggatatcaaatggagcacgccccacttagagacagagtctcgagagagctcctcaggagtgtgaatgaaatggggcatgccctccaagctccgaggggtggtgaggacacggagaacacgctccgcaatgttttagagaaagttcgtcaaaggtgccggaaacttgcagcaagattaggttgcaggtcggttggattggacgacgtgtaccaaccggggagactaccaccaccactacctcaatccgcgcgtccaagtactgctcgacactccatcaggatagaagagcgtgaaggagttggtggctcgtcgtcgtcacgcattaagcaagggaggggaaaggggaaggcgccggctccacctagcgacgacgatgacgatgaggacgaggaggatgaggactacgtcgcaccagacgccgaggagatagacatgtcacagcttcccgacgcgcctcaggggacgcaacccacgcaatacaacttgcgatccactcgggcagcgaaaaagaggtacactccgggctcgcaagcaattcggcgccaacggaagaagtaa

SEQ ID NO: 65940 - DNA, 130 bp, Oryza sativa
  Clone ID: PAT_MRT4530_66939C.1
acttaaaaagacaatttcctttatatttccggaggcaatttacccaatcatgcctattctacactttcatagctattggttcctgacaaataaacaaaaccaagctttttgacaacctctattccacctt

SEQ ID NO: 65941 - DNA, 2789 bp, Oryza sativa
  Clone ID: PAT_MRT4530_6693C.1
atgttgtgtgaagaagggcaaacatgcacgttgctaggctgacgcgtggtggacaagaatgaccgatttgtgaccggtctgacactgctcatgtcgtcagcgcacagccacgttcccacgacgcgcctgcccccggcagaagtggaggtagaccgagagagcttgagatttcaccctaagcccccggccgaaccggcaaaggggggcctgtgcggtctcccggtgaggagccacgagctccgtcatctggcgcgccagtttttcttgttcagcctaatggccgagcaagcaaaggtgcacgacctctctccgagtgtgagcggcgacgacggggagccaaacccacgccgtcgagctcgtactcccccacctcctccacaccaaaatcctaagcagggggaggcgctcgagagtgtcgaaaaatccgcagcatcgccagtcgcgggtgatgcaggagaacggcgagatggggagcgtcgcctcctcgtctacggcgacggcagcacgcctcagggcgcgcttcaggctgttggcgcgctcctacgtcacccgcccgtcgtccctgacccggagtctccagcccagcgatggctggacgacgtggccaacttggtcatgacggcacagcagcgcctgggtgctggtggacggtccgccaccaccaagacctccggcgccgccactaccggctccgtgtcgtcaaggcggagggcgcggcgagcggcggctgttgcacgccattcggctgccactccctcgtcggcacctccgactcgggaggatcagcatggagagccggatgcccgcctcgacatcgagcgctggcgtaatagccggcgtactccccgcgcaacggagggcgcctcttcgtccagagtgtcacctcgacatggacgtgaggacctgccctccgtgcccccggctggtggtgtcggctgtagagcctttgtggcgagtcttcggaatgtccgttggcccccaaggttccggcccaccatcaccgagaagtatgatgggagtgtcaaccccaccgagtttctccaggtctatacgaccgggattgaggccgctgggggtgacgacagggtcatggcgaatttctttcccatggccctgaagggacaggcgcggggttggctaatgaacctgccacctgcgtcggtccactcttgggaggatttatgccaacagttcactatgaactttcaaggcacttatccgcgcccaggcgaagaagcggacttgcacgcggtacagcgaggggatgatgagtcacttcgctcgtacattcagcggttttgccaagtccgcaataccataccatgcatccctgcacacgcggtgatctacgcgttcagggggggtgtgcggcacaaccgcatgctcgaaaagatcgcttccaaagagccccagactactgcggagctttttcagctcgcagaccgagtggctcgtaaggaggaagcatggacctggaacccctccgattccggtgtggcagcttcggccgcccccggatctgctgctcaaacaaggcggcgagacaggaggaggaagaagaggtcggcctattccgacgatgagggtcatgtccacgtcgtcgagggcgtttcgctggccacccgaaaggggaggcctgcgagcgacaaaaagaaggaagccgacgctccctgacctcggctacttggaagagcgaaggcggcgcgcggcccttcgagccgcgcgctaccagcagagcctgcggcgctaccatcagcgccacgtccgggcccgatcactctacgtcgacgacctcgtcctacgccgcgtccaaacgcgtgctggattgagcaagctctcaccaatgtgggagggtccgtatcgagtgatcggcgtcccccggccgggctccgttcggctggccacgggtgacggcacagagctgcctaacccgtggaacatcgaacaccctcgtcgcttctacccctaccttgtcgtcgctgtcgtccgcaccaccgtcaccgccctcctcgtcggagtcgagggcgaacgcgagccgaggggccgtaccctcgaagctgtggacgatgtggtcggcggcgtcccggacctgcgcgcgtgcgccgtcctcggttccggaagggaactcttccagcgctgcccacggggagaagtcagggtccgagaggcccccaagccgaacggcggcccaaggcccccgacggccggagttggccctccacttgcttgtccgacggtgtcaggatagcctcggggccactgcgggaaggccgcgcctgtcgccctccgaccccgaggtcgtcggcgcagaagccgagggcgccccgcgctgcctctcggaggaagagcgccctggagatgcggcccctagcgaagaggatcggccccgccgaaaggtgcagcggcccgtctactttgttagcgaggccctccgggacgccaaaacccgataccctcaggcccagaagatgctatacgctattctgatggctccgagaaaagcaccatcaccatatctccaggcgaagcaaatcggctcgcccagattcgtgcgctgttcaggcttcatcctaaccattacaggcaagatgttgtgtgaagaagggcaaacatgcacgttgctaggctgacgcgtggtggacaagaatgaccgatttgtgaccggtctgacactgctcatgtcgtcagcgcacagccacgttcccacgacgcgcctgcccccggcagaagtggagatccaccaaaacacaggagtagggtattacgcttcccagcggcccgaacctgta

SEQ ID NO: 65942 - DNA, 397 bp, Oryza sativa
  Clone ID: PAT_MRT4530_66940C.1
ctgcgtcattcgagctcgttcgtcggagatgcgcgcgcgtgcggagccgtcgtccatgatggggttcgtccccgccggtgtccaggagcatcggacggcccagatgtgctccgcagctgaggggtggccggtgggaaggccgggacaccaggagcagtgcaagatcgaattcccaactagtccgatgtaatccgttcaaatttaattcgaatttatttaacccttgttacttgtgatgaggtgaaaaaaaagttcaaatttgtatgtgtttcaattgaaaaatcacagtcttcggactgttctcggatgaacacgttgtacgtacttgagtaaattgtgttgtgttgagaaggaaagatttgtctttgcttgtgagcaaaaaaaaaaaaaaaaaaaa

SEQ ID NO: 65943 - DNA, 2562 bp, Oryza sativa
  Clone ID: PAT_MRT4530_66941C.1
atggcggcgccagccacactggcgccgtgcccgtgccactgtggccctagggctggcgtagagatggatagaattgttcgtgtttactacggtggtaaagtggtggaaccttatgttggtgcacatgttgagtttgaggatatgtcattgaagaccattttgtttcccacccacccaactctagatgaactaaggtcacgagtgaaagaagctcttggatggaccgaggataatgtggagattcatttttatgggagatacgatgttggtcaagggcataagtatatattaaatgtgataggtcagttggaatgggaagtttactttgatttggtaaaagagtctcagtttagatctctagaggtgtttgcatcaaagttggtacggaccgtagaaaatttggatctaaacaaatctccttcttatcattacgttgagaagaattttgtgacatattcttctcgccgtggagggggtgcaagtaagactgagttggtacgagaagacttggagggggaaggagataagaagagacctttgcttggaaatgatttaggggaggcaggaccatcaaagagacattgcggtagtgatgatgtggatgcagcgagggagatgaaaagggagttagtacaagaggggcttgatctaagtgaacatttgtcggagagtgtgcattggtcgttgtacggaggcaaccctgaatacccgacggaagtagcaagccaatatgtgaatccagatgattactttgatgtcgaattgagtggtggtcacgattctgtctcagtagaagtcaatagagaggaggttgacgaggaggcaagtgttgagcaatatgatgttgaatttgctgaagactctgatgatgaccgtccattccctccactaactaacaatgacaagttagcattagaggaatgtcgtgcgtttgagaaggtgtttgggaggaagccagacattcctgagtttagggacctaacacatgcccatggtgcaatactagatggcggcatcaacctagatcagttgccagaacattctaggtggatggtctcagaaagggagtacgccatcgtgcaccatcgtccataccgtgttgtcaattctgccgcaaataggaggtacactgttaaatgtgaaaacccacggtgcaaatggaaggtccatgcaactaagaggtctagtggcacgtggaggatatcacgggttggtaaggaacatagttgtgctactgccgaaggttcagggagccaccggcagctgacatctaagttcatagcaaataggttatgcaatgccataaaactgcaacctacactctctgcttctgcgttagctttgtatatatttgaggttttccagtatagggtgaagtatggcaaggcttggagggcacaagaagaggctatgaagctcatttacggtgaatggggtgaagcggaggtttgtattatctcagatcgacatgctggtataatgaatgccatgaggactcctgttccaggattgccaccggttcaccaccgatggtgcatgaggcacttcagtgctaatttctacaaggccggtgcggacaagcatcagacaaaagagctcctaaggatatgtcagattaacgagaagtggatatttgagagggatgttgaggcactaaggcagcgtattcccgaaggtcctcgtaaatggcttgaagatgagttgttggataaagataagtggtctcgtgcatacgatagaaatggccgccggtggggttacatgacaaccaacatggccgaacagttcaatagcatgctagttggtgttcgtaagcttccagtgacggccatagtatcatttacatttatgaagtgcaatgattactttgtgaacagacatgaagcagtgaagcgagtacagttaggggagcgttggtccaccaaggttgctagtaagatgaagatgcaaaaaagtaaggcgaacaaacacacttcaaggtgtttcgataagcagaaaaagacatatgaggtcacagagaggggtggtataacgcgtggtggtgttagattcggcgcaagagccttcaaagttgaaggtgaggggaactcatgttcttgccaaaggccattgctctaccatatgccttgctcacatcttatccacgtttatctgattcatgcaattgatgaggaatctcccaaccgaatgccgtatcatttctcttcaagagccgttgtgaacacatgggcaagtcgctttgagccatacctcgaccccacacagtggccaccgatagaagagcgtgaagaagagcgtgaagaagttggtggctcgtcgtcgtcacgcattccgcaagggaggggaaaggggaaggcgtcggctccacctagcgacgatgacgacgacgaggaggaggatgaggactacgtcgcaccaaacgttgaggagatagacatgtcgcagcttcccgacgcgcctcaggggacgcaacccacacaatacaacttgcgatccacttgggcagcgaaaaagaggtacactccgggctcgcaagctattcggcgccaacggaagaagtga

SEQ ID NO: 65944 - DNA, 360 bp, Oryza sativa
  Clone ID: PAT_MRT4530_66942C.1
gagttgtttggctgctatattctccccttaagcattagccacataaagacttcaatttttttaaggaatggaggatttccaaagctcctgtattttaatgtctttaatccccccaaaaatcatctctctgtataaggatttagtggtaaagtgtcctaactgatttaatttccagatcataagatccttcttgtgtagctgaataggggccagtttctcctgtagctccatcctttcctccagctcattttgacccaaagcccttctcaactcaattttcaagtcccccttctacgtacattctcttaacagtattgtcaggatcagagcagattctatatatatatatataactgagtt

SEQ ID NO: 65945 - DNA, 1254 bp, Oryza sativa
  Clone ID: PAT_MRT4530_66943C.1
atggcggcgccagccatactggcgccgtgcccgtgccaccgtggcactagggctgtcgtggagatgtggatgtggttaagactaccggttggaaggcctaagtggaggcaaagcttcactccttggccctacaatgagccagacatggagaagacagtggtctacctttttgagagtactgccactgcacatgctcaccgggatgtggcatacaagcattatgtcaatgagatggactgcttacagcctcaacatattgagtggttaccataccacacaaatgaggcttcaagcctgaccctgaactcgatgtgcaatcgagactctgactatttcatgtaccagtgcccattgatttgtttctgggcagttgagtaccaccttccgcaccgtgtcatgcgacagttcgggaagaaacaagattggccggttgaggacatctcaactggagttgaattacacaagtatgacagggtgagaacaaagaaggtgaaagactgggggctagagcataatagatacattgatgaatggaggacagccggaaggaacgacaggacatatagactgttcctccgccctacttggacggaagccgacatagaggatgaccgcgactccgatgaggggcggaatccctatgatgtccggactagagttggatatcaaatggagcacgccccacttagagacagagtctcgagagagctcctcaggagtgtgaatgaaatggggcatgccctccaagctccgaggggtggtgaggacacggagaacacactccgcaatgttttagagaaagttcgtcaaaggtgccggaaacttgcagcaagattaggttgcaggtcggttggattggacgacgtgtaccaaccggggagactaccaccaccactacctcaatccgcgcgtccaagtatcgctcgacactccatcaggatagaagagcgtgaaggagttggtggctcgtcgtcgtcacgcattaagcaagggaggggaaaggggaaggcgccggctccacctagcgacgacgatgacgacgaggacgaggaggatgaggactacgtcgcaccagatgccgaggagatagacatgtcacagcttcccgacgcgcctcaggggacggaggcagagggcggcgccaaccaccctggtgccgcggttggggagggcggcgccagccagtgccgcgaggcagaagggttttgggctgggggagggcggcgccagctaccctggcgccgtgatccatga

SEQ ID NO: 65946 - DNA, 225 bp, Oryza sativa
  Clone ID: PAT_MRT4530_66944C.1
atgaggctaaccgacgcaaaccaggccgctgtcgccgtgcagacgagacgacggacgccctcggcgcagtcgcaccaaaagacattgtccggcggcgtggccacatgcccccacggagcgacgggccagaaccgagcgagctgctgctgctgtgctgcctatattcagcaatggagtacaatggtcgccactgtatgggtgccggcctgccggatgcagaggtga

SEQ ID NO: 65947 - DNA, 1842 bp, Oryza sativa
  Clone ID: PAT_MRT4530_66945C.1
atggatagacttgttcgtgtttactacggtggtagagtggtggaaccttatgttggtggacatgttgagtttgaggatatgtcattgaagaccattttgtttcccacccacccaactctagatgaactaaggtcacgagtgaaagaagttcttggatggaccgaggataatgtggagattcgtttttatgggagatacgatgttggtcaagggcataagtatatattaaatgtgatagcgagggtgatgaaaagggagttagtacaagaggggcttgatctaagtgaacatttgtcggcgagtgttcattggtcgtcgtacggagtcaaccctgaatacccgacagaagtagcaggccaatatgtgaatccagatgattactttgatgtcgaattgagtggtggtcacgattctgtctcagtagaagtcaatagagatgatgttgacgaggaggcaagtgttgagcaatatgatgttgaatttgctgaagactctgatgatgaccgtccattccctccacttagtaataatgacaagttagcattagaggaatgccgtgcgtttgagaaggtgtttgggaggaagccgggcattcctgagtttagggacctaacacatgcccatggtgcactactagatggcggcatcaacctagatcagttgccagaaccattccaggtggatggtctcagaaagggtttagagttcccatccatggtcgcattgaagctatggcttcaggagtacgccatcgtgcaccatcgtccataccgtgttgtcaattctgccgcaaatattaaatgtgaaaacccacggtgcaaatggaaggtccatgcaactaagaggtctagtggcacgtggaggatatcacggtatagagtgaagtatggcaaggcttggagggcacgagaggaggctatgaagctcatttacggtgaatgggatcgacatgctggtataataaatgccatgatgactcctgttccaggattgccatcggttcaccactggtggtgcatgaggcacttcagtgctaatttccacaaggccggtgcggacaagcatcagacaaaagagctcctaaggatatgtcagattgacgagaagtggatatttgagagggatgttgaggcactaaggcagcgtattcccgaaggtcctcgtaaatggcttgaagatgagttgttggataaagataagtggtctcgtgcatacgatagaaatggccgccagtggggttacatgacaaccaacatggccgaacagttcaatagcgtgctagttggtgttcgtaagcttccagtgacggccatcgtatcatttacgttcatgaagtgtaatgactactttgtgaacagacatgatgaagctttgaagcgagtccagttagggcagcgttggtccaccaaggttgacagtaagatgaaggtgcaagaaagtaaggcgaacaaacacactgcaaggatggccgaggagggacaaccgccgacttacccagccttagaggcgtactacgaggcccgtcatcacggggctgcgatcgaggcggggaggctccgccgctcctcggcgaactccagccgcgccgcgccgccgctctcgttcaccccgcactgcgccgtcgccctccccggcatcgcagccgccgtgcgcaccccgtccaccgctccatttcccctctccaccttcgaagcgccgcagccacgcgcaccacctctttccgccgccgccgccggctccagccgcctcttctcgcagcttcagccaccgccgtgccgtgccgtcgccaccgtcggcatcgccgcgccgagctccaccccgtcctacacctcttttccctaa

SEQ ID NO: 65948 - DNA, 3504 bp, Oryza sativa
  Clone ID: PAT_MRT4530_66946C.1
atggtcctttttggggcgctagagtggctggcgccgtaccccaacatggtggcgccagccatatttgcgccgtgcccgtgccaccatggcactagggctgttgtggagatggatagaattgttcgtgtttactatggtggtagagtggtggaaccttatgttggtgcacatgttgagtttgaggatatgtcattgaagaccattttgtttcccacccacccaactctagatgaactaaggtcacgagtgaaagaagttcttggatggactgaggataatgtggagattcgtttttatgggagatacgatgttggtcaagggcataagtatatattaaatgtgataggtcagttggaatgggaagtttactttgatttggtaaaagagtctcagtttagatctctagaggtgtttgcatcaaagttggtacgtaccgtagaaaatttggatctaaacaaatctccttcttatcattacattgagaagaattttgtgacatattcttctcgtcgtggaggggctgcaagtaagactgagttggtacgagaagacttggagggggaaggagataagaagagacctttgcttggaaatgatttaggggaggcaggaccatcaaagaaacattgcggtagtgatgatgtggatgcagcgaaggagatgaaaagggaaggcaaccctgaatacccgacagaagtagcaggccaatatgtggatccagatgattactttgatgtcgaattgagtggtggccacgattctatctcagtagaagtcaatagagaggaggttgacgaggaggcaagtgctgagcaatatgatgttgaatttgctgaagactctgatgatgaccgtccattccctccactaactaacaatgacaagttagcattagaggaatgtcgtgcgtttgagaaggtgtttgggaggaagccggacattcctgagtttagggacctaacacatgcccatggtgcaatactagatggcggcatcaacctagatctgttgccagaaccattccaggtggatggtctcagaaagggtttagagttcccatccatggtcgcattgaagctatggctccaggagtacgccatcgtgcaccatcgtccataccgtgttgtcaattttgccgcaaataggaggtacactgttaaatgtgaaaacccacggtgcaaatggaaggtccatgcaactaagaggtctagtggcacgtggaggatatcacggtatagggtgaagtatggcaaggcttggagggcacgagaggaggctatgaagctcatttacggtgaatggggtgaagcgtacgtccgtttgcccactttgctgcaagccattaagcagagaaatcctagtatggtctaccacatcgatactcatcctgatagggttgtcaacgttgatggagtgaccaagaaaatttttatgcgtgcattctggtgctttggtccttccattgaggcttttaagcattgcaggccattactagctatagatgcaaccttcctaactgggaaatatggtggtgccttgatgactgcattatcagctgatgcggaggaccaacttgtacctttagcttttgccttggtggagaaagagaattcacgagactggcgctggtttatcgatcttgttcgacgggttgtggttgggccgcatagggagctttgtattatctcagatcgacatgctggtataatgaataccatgaggactcctgttctaggattgccaccggttcaccaccgatggtgcatgaggcacttcagtgctaatttccacaaggccggtgcggacaagcatcagacaaaagtgctcctaaggatatgtcagattgacgagaagtggatatttgagagggatgttgaggcactactgcagcgtattcccgaaggtcctcgtaaatggcttgaagatgagttgttggataaagataaacatgatgaagcagtgaagcgagtccagttaggggagcgttggtccaccaaggttactagtaagatgaaggtgcaaaaaagtaaggcgaacaaacacactttaaggatggccaaggagggacaaccgccgacttacccagccttggaggcgtactacgaggcccgtcatcgcggggctgcgatcgaggcggggagggtacttcaaccgctccgagttagagctcatgctcccccagtgttcgacgataggtacatcccatacctaagggcggccgggttgctcggggtggccttggtcgtgagcagaggaatgccagtgttcaacgctcctgtgttgacagcacttgtggacagatggaggcctgagacacacagcttccacctccccagtggtgagatgaccatcactctacaggatgtggctatgatcttggccctcccattacgggggcatgccgtgacgggcagaacaaagaatcctggatggcgtgcacaaatgtggttaagactaccggttggaaggcctaagtggaggcaaagcttcacttcttggtcctacaatgagcccgacatggagaagacagtggcctacctttttgagagtactgccactgcacatgctcaccgggatgtggcatacaagcattatgtcaatgagatggactgcttacagcctcaacatattgagtggttaccataccacacaaatgaggcttcaagcctgaccctgaactcaatgtgcaatcgagactctgactacttcatgtaccagtgcccattgatttgtttctgggcagttgagtaccaccttccgcaccgtgtcatgcgacagttcgggaagaaacaagactggccggttgaggacatctcaactggagttgaattacacaagtatgacagggtgagaacaaagaaggtgaaagactgggggctagagcataacagatacattgatgaatggaggacagccggaaggaacgacaggacatatagactgttcctccgccctacttggacggaagccgacatagaggatgaccgcgattccgatgaggggcggaatccctatgatgtccggactagagttggatatcaaatggagcacgccccacttagagacagagtcaccctaacatatatcttctcacgctttccgtcgagagagctcctcaggagtgtgaatgaaatggggcatgccctccaagctccgaggggtggtgagaacacggagaacacactccgcaatgttttagagaaagttcgtcaaaggtgccggaaacttgcagcaagattaggttgcaggtcgattggattggacgacgtgtaccaaccgcggagattaccaccaccactacctcaatccacgcgtccaagtaccgctcgacactccatcaggatagaagagcgtgaagaagttggtggctcgtcgtcgtcacgcattccgcaagggagggcaaaggggaaggcgccggctccacctagcgacgacgatgacgacgatgacgaggaggatgaggactacgtcgcaccagacgctgaggagatagacatgtcgtag

SEQ ID NO: 65949 - DNA, 367 bp, Oryza sativa
  Clone ID: PAT_MRT4530_66947C.1
gaattggcaggttattcagatgcttatgcaacccagcatatgatgttgacgatgactttgaaccacgcaaatgagtggaaaagtagaagaggggttgccaactatttcagagatccctgaatctttccagattatatgattctgaacagttggggatcatgcatcaccataatttgtccgaagggtgtgcattgtagattctactgcagcactggtgatcaggccaatagctcaaaatcgttctttttctgtcccatgaacagtagattctttcttggtttttgatatagattttatcgaagtgtgtggtgtttatgtaattgtttggtttgtgagttgtcaaaagaaagaaagcaagaacaagtgt

SEQ ID NO: 65950 - DNA, 2196 bp, Oryza sativa
  Clone ID: PAT_MRT4530_66948C.1
atgcaagctttgaagcgagtccagttagggcagcgttggtccaccaaggttgatagtaagatgaaggtgcaaaaaagtaaggcgaacaaacacactgcaaggtgttttgataagcagaaaaagacatacgagttcacagagaggggtggtataacgcgtggtggtgttagattcggcgcaagagccttcaaagttgaaggatggccgaggagggacaaccgccgacttacccagccttggaggcgtactacgaggcccgtcatcgcggggctgcgatcgaggcggggagggtacttcaaccgctccgagtcagagctcatgcccctcccagtgttcgacgataggtacatcccgtacctaaaggctgccgggttactcggggtggccttggtcgtgagcagaggaatgccagtgttcaacgctcctgcgttgacagcacttgtggacagatggaggcctgagacacacagcttccacctccccagtggtgagatgaccatcactctacaggatgtggctatgatcttggccctcccattacgggggcatgccgtgacgggcaggacagagactcctggatggcatgcacaagtgcagcagctgtttggcattccactgaatattgagcaggggcaaggggggaagaagaagcagaatggaatacccctgtcttggctgagtcagaacttctcacatcttgacgacgatgctgagccatggcgtgttgagtgttatgcccgtgcatacatcttgcacttgttgggaggggttctgtttcctgatgctgggggtgacattgcttcggcgatatggattcctttggtcaccaaccttggtgatctgggccgtttcagttggggctcagcagtgttggcgtggacatatagacagctctgtgaggcctgttgtcgtcaggcaccatcatccaacatgagtggttgtgtgctattgattcagatgtggatgtggttaagactaccgattggaaggcctaagtggaggcaaagcttcactccttggccctacaatgagccagacatggagaagacagtggcctacctttttgagagtactgccactgcacatgctcaccgggatgtggcatacaagcattatgtcaatgagatggactgcttacagcctcaacatattgagtggttaccataccacacaaatgaggcttcaagcctgaccctgaactcgatgtgcaatcgagactctgactatttcatgtaccagtgcccattgatttgtttctgggcagttgagtaccaccttccgcaccgtgtcatgcgacagttcgggaagaaacaagattggccggttgaggacatctcaactggagttgaattacacaagtatgacagggtgagaacaaagaaggtgaaagactgggggctagagcataatagatacattgatgaatggaggacagccggaaggaacgacaggacatatagactgttcctccgccctacttggacggaagccgacatagaggatgaccgcgactctgatgaggggcggaatccctatgatgtccggactagagttggatatcaaatggagcacgccccacttagagacagagtctcgagagagctcctcaggagtgtgaatgaaatggggcatgccctccaagctccgaggggtggtgaggacacggagaacacactccgcaatgttttagagaaagttcgtcaaaggtgccggaaacttgcagcaagattaggttgcaggtcggttggattggacgacgtgtaccaactggggagattacgaccaccactacctcaatccgcgcgtccaagtatcgctcgacactccatcaggatagaagagcgtgaaggagttggtggctcgtcgtcgtcacgcattaagcaagagaggggaaaggggaaggcgccggctccacctagcgacgacgatgacgacgaagacgaggaggatgaggactacgtcgtaccagacgccgaggagatagacatgtcacagcttcccgacgcgcctcaggggacgcaacccacgcaatacaacttgcgatccactcgggcagcgaaaaagagggaggcagagggcggcgccaaccaccctggcgccgcggttggggagggcggcaccagccagtgccgcgaggcagaagggtttcgggctgggggagggcggcgccagctaccctggcgccgtggtccatga

SEQ ID NO: 65951 - DNA, 2498 bp, Oryza sativa
  Clone ID: PAT_MRT4530_66949C.1
atggatagacttgttcatgtttactacggtggtagagtggtggaaccttatgttggtgcacatgttgagtttgaggatatgtcattgaagaccattttgtttcccacccacccaactctagatgaactaaggtcacgagtgaaagaagttcttggatggaccgaggataatgtggagattcgtttttatgggagatacgatgttggtcaagggcataagtatatattaaatgtgataggtcagttggaatgggaagtttactttgatttggtaaaagagtctcagtttagatctctagaggtgtttgcatcaaagttagttcgtaccgtagaaaatttggatctaaacaaatctccttcttatcattacgttgagaagaattttgtgacatattattctcgtcgtggagggagtgcaagtaagactgagttggtacgggaagacttggagggggaaggagagaagaagagacctttgcttggaaatgatttatgggaggcaggaccatcaaagagacattgcggtagtgatgatgtggatgcagcgagggagatgaaaagggagttagtacaagaggggcttgatctaagtgaacatttgtcggcgagtgttcattggtcgtcgtacggagtcaaccctgaatacccgacagaagtagcaggccaatatgtgaatacagatgattactttgatgtcgaattgagtggtggtcacgattctgtctcagtagaagtcaatagagatgatgttgacgaggaggcaagtgttgagcaatatgatgttgaatttgctgaagactctgatgatgaccatccattccctccacttactaataatgacaagttagcattagaggaatgttgtgcgtttgagaaggtgtttgggaggaagccggacattcctgagtttagggacctaacacatgcccatggtgcactactagatggcagcatcaacctagatcagttgccagaaccattccaggtggatggtctcagaaagggtttagagttctcatccatggtcgcattgaagctatggctccaggagtacgccatcgtgcaccatcgtccataccgtgttgtcaattctgccgcaaataggaggtacactgttaaatgtgaaaacccacggtgcaaatggaaggtccatgcaactaagaggtctagtggcacgtggaggatatcacgggtaggtaaggaacatagttgtgctactgccgaaggttcacggagccaccggcagctgacatcaaagttcatagcaaataggttatgcaatgccataaaactgcaacctacactctctgcttctgcgttagctttgtatatatttgaggttttccagtatagggtgaagtatggcaaggcttggagggcacgagaggaggctatgaagctcatttacggtgaatggggtgaagcgtatgtccgtttgcccactttgctgcaagccattaagcagaggaatcccagtatggtctaccacatcgatactcatcctgatagggttgtcaatgagatggactgcttacagcctcaacatattgagtggttaccataccacacaaatgaggcttcaagcctgaccctgaactcgatgtgcaatcgagactctgactatttcatgtaccagtgcccattgatttgtttctgggtagttgagtaccaccttccgcaccgtgtcatgcgacagttcgagaagaaacaagattggccggttgaggacatctcaactggagttgaattacacaagtatgacagggtgagaacaaagaaggtgaaagactgggggctagagcataatagatacattgatgaatggaggacagccggaaggaacgacaggacatatagactgttcctccgccctacttggacggaagccgacatagaggatgaccgcgactccgatgaggggcggaatccctatgatgtccggactagagttggatatcaaatggagcacgccccacttagagacagagtctcgagagagctcctcaggagtgtgaatgaaatggggcatgccctccaagctccgaggggtggtgaggacacggagaacacactccgcaatgttttagagttatgcctaacaaacttctttttttttgaaatgcaaaaagttcgtcaaaggtgccggaaacttgcagcaagattaggttgcaggtcggttggattggacgacgtgtaccaaccggggagactaccaccaccactacctcaatccgcgcgtccaagtatcgctcgacactccatcaggatagaagagcgtgaaggagttggtggctcgtcgtcgtcacgcattaagcaagggaggggaaaggggaaggcgccggctccacctagcgacgacgatgacgacgaggacgaggaggatgaggactacgtcacaccagacgccgaggagatagacatgtcacagcttcccgacgcgcctcaggggacgcaacccacgcaatacaacttgcgatccactcgggcagcgaaaaagag

SEQ ID NO: 65952 - DNA, 1142 bp, Oryza sativa
  Clone ID: PAT_MRT4530_6694C.1
ttgcgaatttcttcatttaaattttaaataaaaatcggattattgcgtcagccgggagagagggcgcgcggaccgggtccacgggagtggggcccacgcgtcagcctctcggtccacggtggaccgggagcacgcggctggcggcggtcggcgccgtgggtcccacgcgtcagccgcacccgaggcacgggcggctgacggccgggccccacctggcagccgcggggcgcgcccgaaggcggcctcgccggcacggccgacgggaggcggcgcgcccgcgccccgatggtcaccgccggcgaccaccggcgcggcggagcggcgcccgagagagcggagaagagagggaagcgaaagggacggtccacggctcaccccggtcgacgacgacgacgggaacggcgaccgaagcggaggaaggcggcggcgcggttcgggacgacgagggcgacggagctccggcggtcggcgggcgaagcgaaggggcggacggggtcgacgacgacgtggcgaagccgaaggaggtgacgccgagtcgggaggaagtccggagcgacgacggcggcggaccggaggtcggcggcgacggcggagagagaggtggacgtcgcgagcacgaatccgacggcgagagcaagcggcgaacggcggaaacggaggagagaggcacggggagcaattatatagcgccgggagggagagagggtggccggagagggaggaaacggccgcggagatctcggccaccattgatgacgccggcgaggattacgggatgaatccggacgaatccgagggagagagagaggggaaagcgggggaaacgggagagggaatcacagggagtgatttccccctctttaatgcgcgcggggacggcgggatgcggcggaatccgcggcggcggcggcgctagggcacgggcgggcggcgggcgcggcgcgaggagggagatgacaggtgggtcccacccgtcagcgagagtggcgggcgggcccgcctgtcagcggcgcgcgcgcgcgggggaggccgatgggccgcgggggaagagagagagagggagggactgggccgagccagcccaagaagggagggggggaaaagaagacttctttgggatttttctttttataaaacctttt

SEQ ID NO: 65953 - DNA, 304 bp, Oryza sativa
  Clone ID: PAT_MRT4530_66950C.1
accaaaccggttaaaaaggggcaaatggatttttttaggggaaaggggggccttttttagaacacaaatggggggaatcgccgcctgaaacccccccttggaggggaggtgccgggcattgatctcgcctaccgaacgaccgggccccacggttggctttttaacccccccaggggtcatataaaccaaggggaaaattgggccatttttaattaggggacccccaaaacaaaacaggggtaaattggggggggaacccccaaagaaaggggcttttccttgggggtaggtgctaggggggggg

SEQ ID NO: 65954 - DNA, 408 bp, Oryza sativa
  Clone ID: PAT_MRT4530_66951C.1
atggaggtgaataggggggaggaggaagacgtgaacctggagctcaccctctgctacacctcggcctcctcgccggagcccatcggcttcttcctctgcatgtactgcgaccgcaagttctacagctcgcaggcgctcggcggccaccagaacgcgcacaagtacgagcgcagcctcgccaagcgccgccgcgagatcgccgccgcgctgcgcgcccacggcgcgccgccgccgccgcccgcgcccggtggcgccggcgcagctgcagctcagaaggcggtgggcgtggaggcgcagcagaagcaccagcacgctcccgtggtcggcggcttcgcgcgcggcggcggcaagagctcgccgccggccgccgagtacggcgacgggctggacttgtccctcaggctttga

SEQ ID NO: 65955 - DNA, 3612 bp, Oryza sativa
  Clone ID: PAT_MRT4530_66952C.1
atgacggagatggatagacttgttcgtgtttactacggtggtagagtggtggaaccttatgttggtgcacatgttgagtttgaggatatgtcattgaagaccattttgtttcccacccacccaactctagatgaactaaggtcacgagtgaaagaagttcttggatggaccgaggataatgtggagattcgtttttatgggagatacgatgttggtcaagggcataagtatatattaaatgtgataggtcagttggaatgggaagtttactttgatttggtaaaagagtctcagtttagatctctagaggtgtttgcatcaaagttagttcgtaccgtagaaaatttggatctaaacaaatctccttcttatcattacgttgagaagaattttgtgacatattattctcgtcgtggagggggtgcaagtaagactgagttggtacaagaagacttggagggggaaggagagaagaagagacctttgcttggaaatgatttatgggaggcaggaccatcaaagagacattgcggtactgatgatgtggatgcagcgagggtgatgaaaagggagttagtacaaaaggggcttgatctaagtgaacatttgtcggcgagtgttcattggtcgtcgtacggagtcaaccctaaatacccgacagaagtagcaggccaatatatgaatccagatgattactttgatgtcgaattgagtggtggtcacgattctgtcttagtagaagtcaatagagatgatgttgacaaggaggcaagtgttgagcaatatgatgttgaatttgctgaagactctgatgatgactatccattccctccacttactaataatgacaagttagcattagaggaatgtcgtgcgtttgagaaggtgtttgggaggaagccggacattcctgagtttagggacctaacacatgcccatggtgcactactagatggcggcatcaacctagatcagttgccagaaccattccaggtggatggtctcagaaagggtttagagttcccatccatggtcgcattgaagctatggctccaggagtacgccatcgtgcaccatcgtccataccgtgttgtcaattctgccgcaaataggaggtacactgttaaatgtgaaaacccacggtgcaaatggaaggtccatgcaactaagaggtctagtggcacgtggaggatatcatggagggcacgagaggaggctatgaagctcatttacggtgaatggggtgaagcgtatgtccgtttgcccactttgctgcaagccattaagcagaggaatcccagtatggtctaccacatcgatactcatcctgatagggttgtcaacgttgatggagtgaccaagaaaatttttatgcgtgcattctggtgctttggtccttccattgaggcttttaagcattgtaggccagtactagctatagatgcaaccttcctaactgggaaatacggtggtgccttgatgactgcattatcagctgatgcggaggaccaacttgtacctttagcttttgccttggtggagaaagagaattcacgagactggtgctggtttatcgatcttgtccgacgggttgtggttgggccgcatagggaggtttgtattatctcagatcgacatgctggtataatgaatgccatgacgactcctgttccaggattgccaccggttcaccaccggtggtgcatgaggcacttcagtgctaatttccacaaggccggtgcagacaagcatcagacaaaagagctcctaaggatatgtcagattgacgagaagtggatatttgagagggatgttgaggcactaaggcagcgtattcccgaaggtcctcgtaaatggcttgaagatgagttgttggataaagataagtggtctcgtgcatacgatagaaatggccgccggtggggttacatgacaaccaacatggccgaacagttcaataacgtgctagttggtgttcgtaagcttccagtgacggccatagtatcatttacgttcatgaagtgcaatgactactttgtgaacagacatgatgaagctttgaagcgagtccagttagggcagcgttggtccaccaaggttgatagtaagatgaaggtgcaaaaaagtaaggcgaacaaacacactgcaaggtgtttcgataagcagaaaaagacatacgaggtcacagaaaggatggccgaggagggacaaccaccgacttacccagccttggaggcgtactacgaggcccgtcatcgcggggctgcgatcgaggcggggagggtacttcaaccgctccgagtcagagctcatgcccctccagtgttcgacgataggtacatcccgtacctaagggctgccgggttgctcggggtggccttggtcgtgagcagaggaatgccagtgttcaacgctcctgcgttgacagcacttgtggacagatggaggcctgagacacacagcttccacctccctagtggtgagatgaccatcactctacaggatgtggctatgatcttggccctcccattacgggggcatgccgtgacgggcaggacagagactcctggatggcatgcacaaatgtggatgtggttaagactaccggttggaaggcctaagtggaggcaaagcttcactccttggccctacaatgagccagacatggagaagacagtggcctacctttttgagagtactgccactgcacatgctcaccgggatgtggcatacaagcattatgtcaatgagatggactgcttacagcctcaacatattgagtggttaccataccacacaaatgaggcttcaagcctgaccctgaactcgatgtgcaatcgagactctgactatttcatgtaccagtgcccattgatttgtttctgggcagttgagtaccaccttccgcaccgtgtcatgcgacagttcgggaagaaacaagattggccggttgaggacatctcaactggagttgaattacacaagtatgacagggtgagaacaaagaaggtgaaagactgggggctagagcataatagatacattgatgaatggaggacagccgaaaggaacgacagactgttcctccaccctacttggacggaagccgacatagaggatgaccgcgactccgatgaggggcggaatccctatgatgtccggactagagttggatatcaaatggagcacgccccacttagagacagagtctcgagagagctcctcaggagtgtgaatgaaatggggcatgccctccaagctccgaggggtggtgaggacacggagaacacactccgcaatgttttagagaaagttcgtcaaaggtgccggaaacttgcagcaagattaggttgcaggtcggttggattggacgacgtgtaccaaccggggagactaccaccaccactacctcaatccgcgcgtccaagtatcgctcgacactccatcaggatagaagagcgtgaaggagttggtggctcgtcgtcgtcacgcattaagcaagggaggggaaaggggaaggcgccggctccacctagcgacgacgatgacgtcgaggacgaggaggatgaggactacgtcgcaccagacgccgaggagatagacatgtcatag

SEQ ID NO: 65956 - DNA, 530 bp, Oryza sativa
  Clone ID: PAT_MRT4530_66953C.1
cgcgaacgcgcctctctcgcttatcctttctccttcgagagcttcgtctccgagggattgggtagcattgagcggcgcaggcaaagggaagtggcttctatcaccctacaaaattgcgttgtttgctgaaatggggggcatagtcgggcggggtgattctccaaggcacacttcaccagcatcaaagttagagagaaagatggttgaagccatgcagcagagagcacagaaaggaacttctgttaaatcattcaatagtgttattatgaagttcccaaaaattgacgagagtttgagaaactgcagaattatctttcagcaatttgatgaagattccaatggtgaaatagatcaacaagaacttaagcattgttttcaaaagttggatatcttattcacagatgaggagataaaagaccctatttcaggcatgtgacatttatgaaaacatgggcatgaaatctaatgagttcaatgtcttcctgtgccttggttatcttctgaagaaccgttggtgcagaagccagaaa

SEQ ID NO: 65957 - DNA, 372 bp, Oryza sativa
  Clone ID: PAT_MRT4530_66954C.1
atggacgaacggaacgccgccgccgctgccgggctcgttcgcgcgggtctcctcgttctcaccctcacctccggcgcagcgatctaccgggcagccggcgacgccggcgcgatcgctttcgtggcgaccagctacgccacgcttctcctcctcttccgttaccttcgcgcctacgagcttgcggccgccgcggagagagaggggctcaggcgcaaggtgtggtatatttgcaccgtcgttaccacgctgttcgcctggaaggttgccggcgtgatgcctccggccgccgccgccgccgtctggctcctcgccgtcgccacctccgccggttatgtacttatgggaagatcgttatatgtatatgtcttctga

SEQ ID NO: 65958 - DNA, 282 bp, Oryza sativa
  Clone ID: PAT_MRT4530_66955C.1
atggctgaggatgcgagcgagtggcagcggcgagcacgggcgaaggatgcgagcggacggcagcggtcgacggcgccgcgaacaaggggcaacgacgacagaggggcggcgccggcgcgagcaatctgggaggagggtgagggcgtggagagagaatatgggaggggagagggagaggggaaaaggcgtggggcccatgattggcaagtcaattttggctggccaaagttggccagcgggaggagtggtttggccagccggatggcttggagagggagatag

SEQ ID NO: 65959 - DNA, 1966 bp, Oryza sativa
  Clone ID: PAT_MRT4530_66956C.1
atggaatcgaggaagccgccgccctccgccctcgtcgacaaccacgtggtccccggggacgtcgtcctcgacctcgccgagatgaccaaccagaccatcaagctcggcgccggcctgcgacaggattgcgacaccatacaggctaccagtgctgggaggctacggctttcgaagcccagcaaatactgggtcgagagctcgcagaagaggtatataccttctgtagaagatacagttcttggtgttgtggttgacaccaaaccagataacttcttggtggatataaaaggtcctaatttggcctttttaccagttcttgcatttgaaggtggtaccaggagaaatattccaaagttcgagattggtacattaatatatgcacgagtggtgaaagcaaatagcatcatgaacccagagctctcgtgcatggatgctactgggaaagcagccgaatttggtcaactaaaagatggctatatgtttgacacgtctactggcctgtcgcggataatctttgagtggcatagggcaacgaagtatggtggaaagtctcttggagagactatcttgatgggagcggtagaagaatgtacacataagcagctcccatctttaagtgacctatgcgtgacgttgggagaatttagccacatatgcctcgcaagtcgcagactatcgccttctcaatccgggatgacaagtgcaacaggtgtagaaaaggtcgaagtctggtgccaagacctagccatgggtggcaggagagttgaaatcaatgcaaataaatgtgggacgcatccaacgccaagtaaaccatattatgtggataaaatcgataccaatgaacaaaaggttgtccactatcaagttaattgtagaccagcaagagatcgcaataccggttcctactctgtgaagcaccattacccatctcctattgtttcttggatagaagacctttcggagcttcggcaatgtttcttttatgccaggttcctgaacatgctgacgaggaatcaagatcttcagtgggtaagtgttcaagatctggcagttggggtgaaaaccagatatcagatatactgacagatgaattcaggtaactagcaaaccagattacaggttactgtatataaacgtgtggaatcctgggttcttcctatatagatgattcgtactttgtgacaaggttgatcatacaaaggcaagaagcaactgatcattctatccacgctgtctgagaggaggagatacaagctattttatgggagcaatcactgtaccttgtagggaagatacataatcacgtttaccaaacgagtgtcttatctttgattggtctgcacactcaatactgctaccatggatatgttaccagaggccgttgcgattgtgattgctcccactgatcctattaggcaagtattctatggacggaactgtggaatattcaggctgacagacccacggagggatgggtgtgcttagggagtgcagtgaaagtgggttccacgcccaccgggagacaacggacggcggcccaatctatgaaacctgctccaaggttatattcaacccaaatttgaggttcgagattgttgacctgcgttccgctccctgaacaatgtaattcagcctcaaactctccatgtactccctgcgtgctgccaaaatatgcaagtaaaaaaaaaacaaatgccataatcgtccaggcaatacggcaatatctgctcatcgtttggatgggttgggtgggtattactaatccatggtatcaactgagctttgatgatggtacagtaatatggtatttgtaagaatgaagtgtaactgggagagagaagaaaagcagtgatgaattgtcttaaaactaataacctagatacagacacttctctaaaagaattaaagaccagcactctatcaaaaaaaaaaaaaacagaaaaaaaaaaaaaaaaaaggggcggcc

SEQ ID NO: 65960 - DNA, 1060 bp, Oryza sativa
  Clone ID: PAT_MRT4530_66957C.1
tccggccaaggccgaactgagttttcacccgccactcaccacctgcaaatccacggctgatgcaccgatgctccaccaccacacaaactctgccaacatgtgggacccctgcaccggcgtccccggccggccagccttcgtgcgcctaagaccgcgctacacccaccggcagctcctcctcacacctaggtcgcctcctccaccggacgcgcctctcgcgccaatccagcctccctccatcagctgcgcctctcgcgccaagccagcctccatctccgccaatcgcgcctctcgcgccgagccggccttcgctgccatcggttgcgcctctctgcgccaagccgccacctcgccgtcgccatcctcacctcgcagccgactccttccccgcctccacttgccgccgccagcaaccctcatctgccaacgtcaccaccgcctccacagtcacggccgccgcaagtcagccgcagtcgccgctgccaccgacgccagccaccggcttcacgaatcgccgccgacactgccagcggccgtttcgctgtcgccctccgccacgctgccgccaagtcctccgccggcatcgtcagccgatgccgccgccgccgccaactgccgcgaccaccaccgccgccgccgtcgcccactgccgtcgccagccgtcgcgattcgaccgccgtcgccgaccaccaccactggccaccctccagatccggccgagaggagcggatctgggggacaccgccgccgtcgccgcacaaggaccaccgctgccaccttcgcgccctcggctgacgccatccctaccgccatcgccatccccgccgccttcaaccaccaccgcccggcgccgcacgcccctgcctttgccgccgccctccctgccgctagccgccaccccgccagatctggccggagcggcctggatctggcggtcaccgccgccccgtcgtggacgcttccttgctcgcccgaagcgaagcgaggggagggcgacgcgagcgtctgcgaattcaatggtaatttttatgctcgtgaatacagagatattaggatttag

SEQ ID NO: 65961 - DNA, 270 bp, Oryza sativa
  Clone ID: PAT_MRT4530_66958C.1
atgattgatgatcctttgatcggcaaccggtgccacagtggctggaatggtgttcagcacagtaggcgtctggggggacaacggtattgttgccaccatgggatgtacgccggcgttggggtaaaggagcccctgttggcgcctggttgtggtcataaggaagccgctgtggtggcgctgcaccaagcccaaggattgtctgtagatctgatagcgccctccgtgcctggtgtgcaggcattggcaccggcgccgctgccgaaaacctga

SEQ ID NO: 65962 - DNA, 468 bp, Oryza sativa
  Clone ID: PAT_MRT4530_66959C.1
atggagggcggtgactccgggtttttcaggttttcggcagcggcgccggtgccaatgcctgcacaccaggcacggagggcgctatcagatctacagacaatccttgggcttggtgcagcgccaccacagcggcttccacaaacatcaagtggccagcgtcgtgtcacgccaatggctccaccacaacagcgacagcaagtcaacggtggcactgcggtgcctatggcgtcgttgccggtgaaccaggcgccaacaggggctcctttaccccaacgccggcgtacatcccatggtggcaacaataccgttgtccccccagacgcctactgtgctgaacaccattccagccactgtggcaccggttgccgatcaaaggatcatcaatcatggcaccgtgcattttatgggggcaacaccggctacctaggggctctgggatgtcgtttcaccggtggctgtccatgctaa

SEQ ID NO: 65963 - DNA, 6280 bp, Oryza sativa
  Clone ID: PAT_MRT4530_6695C.1
attaaggaaacccctcacggagtttacaaatggaaagagtcctactcggacaagactgggtcatcaatgtatcgggtaaggtttgatgtttccgagttctacttggaaaccgcctaacctgtgatataaaagggaccccccgggaggacctaaggcattgaatctcagagccaacacaacccacacagcctacgaaatccttgtaccaacgtaccccaataccctctatatccggtttacgggtatcacccgtcgacagtggcatgccaggtaggggcacttggtactcaaggttctactactatgtcatccagcctcgtcaacaacagcgtcaacaccaacctcagccaagtattccctgcttcaacgatgctagtgtggactcaagtcggcgaaatcgtcttcccggtttacaccacaatgccgatctcaacctgtccactaatgactggaaacgagaacgcagtggctacaaaccgagacgactccatgtcgaaagatactcccaccgaggcgaagaacggaatatcgacgacatccgagctcgagaaggattctaatgcggccaaaccttgtcgttccgacatgaaccgcgagccgacgaagatgacttccgaagcaacaaggtcctggtgtcctatccacaaaaccagcaaacacactttgcaaacctgctgggttttcctcaacgtccgcgctgaaattcgtatctgcaaagagcgtggaattcagcgtatttctccaactcgtgatgtctattgtcctattcacaagacaaagaatcacgacctctcaagctgcaaggtccttctcagcgccatgaaagcgccacctcctaaggtccaacagtcacacatccccatcagggataaagacaaggaacgaggagcgacgccaacttcagatcgatttgttggggtaatcgatatcgatcctcacgaaccatcagtcttgcaccttctcgaagactatggatcatcgacaacgagcgcactgcgggaggtattggctatcgatgatgtcggcacatcagcgcgcaccaatgcagaagcagagaatcaattggccaccccggcccagcacatcagagccgtcaacgctatactgagggaaaccccctacgatcctgttctgaacgacgatctcgctcgttggacagcacgactacgggaatcagtgactaacctcagcaacacgttcgaagaggccgccgccgcagcgcacccggagcagccaccaactggcgatgccaatggtgaagagcctgaatggagggaatcgcctcattgagccacccctccaccttgcggcactagcgatctccgagatcacgtcaacggccgccgagaggcacgacgcacacgagacaatgaaaatcgttcccggcgtcatgtctcttcacggcgccataatgacggtgataaccgccacaaccgccacgatcacaacgatcgcgaacggcgggtgccagacgatactggttgaggacgtcgccataacgacgacgatgatggagactggcgccgggacaacagcgggagacgacgacaggattctcgagatccaggccgacatcctcgtgatcgtacgccggaaccaagcgacccatcgtcatcgtcatcatcctcggcttcctcatcatcagacagacatccacgaaggacacacaatcgccggcaacccaccgccccagcgctgggtgtagggctttcagtcgttccctgcgtgatgtctgatggcctgagagattccgacccggagcaatagaaaagtacgatgggagcaccgactcagaagagttccttcaagtctacttcacagtactctacgctgccggagcagacgacaacgcattggcgaattatttgccaactgcgttaaaaggctctgcacgttcatggctgatgcatcttctgccctactcaatctcttcgtgggcagacctgtggcaacagttcgtcgccaacttccaaggaacctacaagcgccacgcgatcgaagacgacctacacgcgttgacacagaactcgggtgaatccttgagggaatatgttcggcgcttcaacgagtgcagaaatacaatccccgaaatcaccgacgcttctgtaattcacgccttcaaatccggtgtcagagattgctatactacctaggagttggcgacaagacgcatcacaaccactcgatgattgttcgagattgttgagcgatgcgcccacgcagatgatgcgctaagatgcaagaatgataagccgaagaccgggggagagaagaaaccagccacggacgcacctgagtcaagcaagaagaaaaatcgcaaaactgggaaaaggaaatctcaagcggaagtcctcgcagcagaatacgcgaaccctcccaagcgcccagacccacaaagtggtgacacaaagaaagcatggtgccccatacacaagacggacagacactgtctggaagattgccttgttttcaaaaaaatcgctcgagaagcacattgcatctgaaaaaggcaaacgagtatgcgtggtcgaaaaggatgcggaggcggctccccaggaatcggatttagcatatccagactctgacctccacgttttacacatcttcggaggttccacaacgcaatttcccgcttcatactaatccaccaatatttctctttcaagtccaagtatatcttcgtgctgccaggatggatggaataggagctttcgtgagcttcctgaagtatcaactgtttaagttcccagtcgtctggaacgcataccctatttccgttccatagggttccgtgttcatcctctgtgaaaccagcgggaagttctgaactgccgacagaggttgggggtgcaaagaaaacagagcagatcacctttgatgtcgctgaattcgatacagcttacaacgccatcatcgggagaactgcacttgcgaagtttatggccgcatctcactacgcgtatcaagtgctcaagatgtcgggaccgaagggaacaatcactattcaagggaacacaaagctggcggtgcaatgcgacaaacggagcctcgacatggtcgagcaaacgcccagcccacccgacacgactgagccacccaagaaagtgagcaagacaaacaagacgctgaaaccggacggcgcaatcaagatcgttccgctctacagtgccaaccacgacaagaccgaactcgcgctcatcaccttccttcgcgataatgctgacgtgttcgcttggcagccgtccgacatgccaggggtccctagggaggtgattgagtaaaaactgatggtgcgacccgatgccaagccagtaaagcaaagactacggagatttgcaccagaccgaaaacaagccatacgagaagagcttgacaaacttctcaaagctagcttcatcagagaagtacttcatccagagtggctagccaatccagtcatggtgcggaaggccaacggaaaatggagaatgttcgtcgacttcaccgacctcaaacaaggcgtgccccaaggatcacttccctcttgctcgaatagatcaactagtggactcaacagccggctgtgagctgttgagctttctcgatgcttactctggctaccaccaaatcagcatggcaaaagaggacgaagagaagacaacatttatcacgccgtttggggtattttgctatgttaagatgccgttcgaactgataaccgcagggaataccttccagcgcacggtccagggcgcacttagcgatcagctcggcaacaatgtcgaggcatacgtcgacgacatcgttgtcaaaatcaagacatgcgactcattgattgacgatctgcgggaaacgttcgacaacctccgacgatatcaccttatgctcaatcgagagaagtgcacgttcgaagtaccgtcgggcaagctgctcggtttccttgtctctggcagaggaatagaagcaaatcccgagaagatcaaggcaatcgagaacatgaagtcacccacaagactcaaggaagtacagaagctaatcggatgcatggcagcattgagcagattcgtcgctaggatgggagaacgagggcaacctttcttagctctgctaaagaagcaagacaaatttgtatggacacaggaagccgaagaggcattcgttgcactcaagcgctacctatcaaacccccctgtacttgttgccccccaacctaatgaagaattattcctctatattgccgccacgccatattccgttagcaccatcatcgttgtcgagagagagaaagtacaacgaccagtctattacgtcagcgaagctctccatgacgcaaagacaagatatccacaaatccaaaagctgctttacgcggtcatcatgacatcaaggaagctacgccactactttcaagcccacagagtcacagttgtctcctccttccctctcggtgaagtcgtgagaaacaaagacgttgtcggccgcattgcgaaatggatagtcgagctgagccagtttgatgtccactttgcgccacgaacagccatcaaatcccaggtactcgccgacttcgtagctgattggactatgcctgataacaaatcagacaaccaactcgacaacgaaacgtggacaatggcgttcgatggtgcactcaacagctaaggagcaggggcaggatttatcttgacgtctccctccagagatcaattcaagcacgtaatccacctcaacttcagggtgaccaataacacagccgaatacgagggactactcgccaggataagagctgcagccacacttggggtcaagcgactaatcgtgaaaggggcctccgagctagtcgcgaaccaagtgcacaaagattataaatgctctaaccccgagttatccaagtatctcgtagaagtcaggaagctagagaaaaggttcgatgggatagaagtccgacacgtctaccgcaaagacaacatcgagctagatgacctagcacgacgtgcgtccagacaagaaccgctcgagcccggcacttttctggacatcctgacgaagccatcagtaaaagaggttagtggcgaagttagtccggtcaccctcgatattagctcgaaggccacaaaggcagaacgcgccgttgccgacatcgagaccacagacgactggcgcttcccactgatcaaattcatcaacagcgaggagttgcccgaggacgatacagaggccgagaaaataacccgtaaagcaaagatctactgtatggtcggcaacaatctatacaagaaagcgccaaacagggtacttctcaaaagcatctcgtccgacaacggcagacacctcctccttgatatacatgaaggcatttatgggtcacacgccgccggttggacattggtcgggaaagcttttcgacaagggtttttttggccaaccacccttaaatatgcatgcgacatgtaaacacacaaggctatccgcgcaagcgctccagactatccctcttacttggccgttctcgtgctgggggctagatatactcgggccattcccacgaggacagggcggctataggttccaattcgtggcgatcgacaaattcactaaatggatcgaagcagtacccatgggggaaatcaaggctgtcaacgccatcaaattcatcaaggggatattttgcagatacggactacctcaccgcatcataaccgacaacggctcccagttcatcagcgctgatttccaggattactgcatcgggctgggagtcaagatatgcttcgcctcggtctctcaccctcaaagtaacggacaagtcgagagggcaaacggcatagtactacaagggatcaaaaccctactatgggccgtacgcaccacaccgacaacgtgtaacaaggaaacaaccttcttcctcgtgtacggctccgaggccatgctccccagcgagctatgacatcagagtacacgagtacagaagcactccgacgaggaccaggaggagcagcgaaacgtcgatgtaaatctactcgaggaacatcgcgaacgagttgtcgttcgagcagccagctatcaacaggccctccgccgttaccacgagaagcgcatccgagtatgcatacattcgatcggcgactacgtcctccgacgggttcaaagccaagcagcgcgaaacaaactctcacccaaataggaaggaccttacacgatcacacaagtcttgcggccaggcgcattcaaaattgcagacggcgatggtcacgagttagcaaattcctggaacattaaccaactacgtaaattctatgta

SEQ ID NO: 65964 - DNA, 513 bp, Oryza sativa
  Clone ID: PAT_MRT4530_66960C.1
atgcagatgagatttgctcgatccaagaaaaaatatctcgttggatgtaacaatgcacatcggaaacgatttagtaccggccaccaaacgtccatccaaagcaagggtaaacggaagcttcgtttcgaaaaagtagagatcatcatccagatacatgatgaaaaagagaaatgtatgaagaagacgatgaaaaaggcgatgaaaaaggcggctagtgtcaccggcgtgcaatcggtgacgctgtgtggcggcaacaggaacctgctgatggtgatcggtgagggtgtggacaccaacaagctcctgaagaaactcagaaacaatgtaggcgccgctgatatcgtggagacgatgccggcggaggccgaagagttcgaggcagcagcagcagtctccggaagcaagaacttcatgaagatgatgccgcggtggccgaagagctggtcgtttgtgaaacaagaaagcttggtcgatcaacttaacttcccacgccacagtttaggcgtgtgctaa

SEQ ID NO: 65965 - DNA, 934 bp, Oryza sativa
  Clone ID: PAT_MRT4530_66961C.1
ggatctcctatggaccaatgtctgaaagagacatagctagacaatcgaaccttagattcatctatcacacagatgatactaattgcttgaatcagcttcgaatgaggagggcccccttttttcaactatgtaacttgttgcgagaaagagaacttttgcgggacatcatccatagctcagtggaagaacaagttgccatgttcctccttgttgtaggccacaaccatagatttagagctttgcaacccacctttaggaggtcaattgaaactattagtagatactttagagaggtattgtatgttgttggtgagctacgacacgagatgatcacaacaccttcatcccacactcatttgaaaattacatcaaatacaagattcaacccttattttaaggattgcattggtgcaatagatggaactcatgtcgatgcttgagttccatatgcaatatctgctgcatttaggggtaggaagggtgtcactacacagaatatgatggctgcggtggactttgatcttagatttacgtatgtacttgctgggtgggaaggatctgcgcacgacgccctcatacttgcagatgccctagaaagggatgatggtcttagtgtccccccaggcaaattctatcttgttgatgctggatatgctgctaggccagggttccttccaccataccgtgggtgttgataccacttgagggagtatggtagaagaaactaccctcgtgacaggagagagttgtttaacttaagacactcctctcttagagtcacaatcgagcgggcatttggtgctctcaagaaccgcttcaagatactgtacaacaagcctttccatccatacaagacccaagtcaagttagttctagcgtgttgcatacttcacaactggatacttcggtttgggcatgatggccatgttccact

SEQ ID NO: 65966 - DNA, 1564 bp, Oryza sativa
  Clone ID: PAT_MRT4530_66962C.1
gcacgagggagcagtagtagtagtacaacgccacccaccacacagtgtccgtgtgctgcgggtgtggacgcactggcctccacccatctctctcaccgcctctgcagcagcaaaaggcgagcgcgtggccccgtgccgcagccggcacccgccaccaccccgatttatagccagccacgccatccatggcgaggaagtgctcctactgtggcaactacggccacaactcaagaacctgcagcagcagcgccagcgctggacacagggataccaccatgctctgcgacggcggcgacggaggtggcggcagtgggctgaggctgttcggagtgcaggtccatgtcgctgccggcggcggcggtggaggtggaggtggaggtttgccgatgaagaagagctacagcatggactgcctgcagctggcggcggcgggggcggctccgggctcgctcgtgtcgccgtcgtcgtcgtcctcgtcgtcgatgctcctgtcgatcgacgaggggggcttggagagggcgtccaatgggtacctgtctgatggcccccatggcagaattgtccaggagaggaagaaaggagttccgtggagcgaggaggagcaccggctgttcctcgtcgggctcgagaagctgggcaagggcgactggcgaggcatctcccggagctacgtcacgacgaggaccccgacccaggtcgccagccacgcccagaagttcttcctcaggcagagcagcatcggcaagaagaagcgccgctccagcctcttcgacatggtgccgatttgcgagaacggtgcgcgcgtctcggagcagctgagcggcgaaggcgcggcggcggcggcggcggcgtcgacctcactgtcgctgatgaacacgcacgagacctcctcggacagagtggcggcaattgatctgaattccaccgaggaagatgacacggtgggcgcgtcagggaggccgtttttcccggtggttctgatggagcagcagcagcaggcttcccatggacatggtcaccaccaccactgcacgccgctcgacctggagctcggcatgtccgtctcgtcgacgccgtccatcggcacatgacccggccatgccatgcacaccgtcgtcgttaggagatgctccagtttcgtcggtgcaaggtctgcaggatatagtacacgctgtaaaactgtggctgatatatctgcagtctgatctgtctgccaagtggagtaaagggctggagtattttggcaaatgtttgtagtaattgtaaagctggtgcaagtggagagatcaacgagtagtaccaactgtggatacagtaatgtccgtactactttttaattaattaggttgtgtaatcagagacaccgattctctactgctcatgtcatgtgcgccttgtgttcaaaaaatattgcttaagttttgggaagattgcaactctgccattgctgatgtgtggaattggcaacctgacagtccaaatgcaagaaaggttttttttttctgaaaccagaatgaactaaatatgaaaatgatgcacttaatgcgatttccccattaattct

SEQ ID NO: 65967 - DNA, 241 bp, Oryza sativa
  Clone ID: PAT_MRT4530_66963C.1
gcagggcacaccaaagaagcatcggccatcacccgcatcaacttgttgagcctcgatgctggcatagcccaaagcggttactcccttctattgcaacgaatgaggatgcccatgctggcccttccgcttgcagcctgtccgactgcctccatactcaccggctgtcacaacgatccaccgaggttctatgatggttggctgtccctgccaccacaggttgccacgtgcgaaccttcccttg

SEQ ID NO: 65968 - DNA, 386 bp, Oryza sativa
  Clone ID: PAT_MRT4530_66964C.1
aatgaacaattgacggaacaaaaacccatttaaaatcccatgttcaaaaagggaaacacccatgggaaaccccatggggacatcgaatttaacattgccccttaaatctcccccaccagccaaggaaacaggccaggaaatttgttccaaaaacttggccaaaaacacttacataaggccccccatgaggcccccgattggagaaaaaattgtttaaaacaatggttccagattctttgccccaatgttttccccaaagacatcgcaggaaaccccccggggatacaaatgccaggcaaactgcctgaaaaacaggggggagtccaaacaaggattcttaatccggatggtcgcccccaaccccctgggcggacccggggatttcc

SEQ ID NO: 65969 - DNA, 618 bp, Oryza sativa
  Clone ID: PAT_MRT4530_66965C.1
atgcgggcgcggcggcgcgcggggaacaagcgggagaaggggagagaggcggcccggacggtgggagcggtgggtggggcggcgggcgacgcggaaagggagagagggagagaggcatccgggacggagcgggcgcggcggcgcgcggggaagaagcgggagaggggggagaggcggcccggatggtgggagcggcgggtggggcagcgggcgacgcggaaagggggagagggagagaggcggccgggacggcgggagctgcgggcgagagcggcggcgctcgtcatgctccacgtctcgtcttcgccgatgcacacctccaccagcacaccaagctacggcggggcgggcttgcgcgcaggccgggcgagctcggacgggctcgccggccgtctccccctccctcccaaaccgctccgcccggcacccgccgaccgctgccgctctcgcatgccgccgtcgctccgctcccgcgctctcgacgcccgtcgccgcgctcgaccaccgccgctccgctcccacgcttgcccaccgtcgctccacgcgctgcccgccgctccgctcccgatgtcacgtcagcgaaaccaccctcgtatactgccaagggacctccggtga

SEQ ID NO: 65970 - DNA, 357 bp, Oryza sativa
  Clone ID: PAT_MRT4530_66966C.1
tccacaggtcacagaggagaaaactatggcgaaaattgtacttgggagagatctggtgggatcatggatttattcttgttatccacctgcttataaagactattctaaggtctttttataggtgttctgcctcaacttcatgaagcgcttggtgcagctcaaggggcacatgaagaggcgcatgcttaaacatgctcttgaacatgaaatttacagaagtgtatccctgtctatgaccgtggctattggcgaggtgaacagcgtttatagccagaaccattggcatatcgtcagactatttgtcgaacactagacagttcacaacaaagttgattacgatgtggattacgtcctgtg

SEQ ID NO: 65971 - DNA, 160 bp, Oryza sativa
  Clone ID: PAT_MRT4530_66967C.1
actagtggatccccgggctgcaggcagctgatgtatgtaatacataacaaaatgcaattatgataaatttacttacatactttaagtctggaatggttgtggtgatcgcgtgaatgaaatcgttgctaacacaggctgactagtgttgctcagataaaca

SEQ ID NO: 65972 - DNA, 2378 bp, Oryza sativa
  Clone ID: PAT_MRT4530_66968C.1
ccggccgggaatcgcggccggcgcttcgtcgtccaccgtctccctcggtcaccgtcgccgcgcacgactcccatccatggcgatcgagctctgcccatttaagcccggggcgcctctcttcgaggacttgcaaacgcttgctgcaaggattggatcctctggcttctgttgatttggggagcttttcatcgtctcgaccgaacggccagccgccgagatcgaggaaggaggagatcgaagggcagagtgatttggcagcggtggacatggatgtgaggtttgggcccgaggagcagatcgtgtggccggcttctgttcttgctgggatcctcatgtgcgcagcggtatatgatataactcgtgaagttagctcccggtgctacaagggttataatggactgaatgaattgcacaaacttgagtggaacaacaggggattctctaccttccacgcattagttgctgctgtagtctctttttatctgctggtgatatctgacctcttcagtaaggacgtccatggtgccatcataattgatcgaaaatcatggatgtctgatgccatgtttggtgtatccctgggctacttcttgacagatttgttgatgatcctctggcatttcccttctctaggaggaaaggaatatctcttgcatcatggattgtccatgtatgcaatctctcttgctctgttgagtggcaaaggacacgtgtacatcctcatggtcctcatcactgaagcaaccacacccttcgtgaacctcagatggtaccttgatcttgcaggccggaaggactccaagctttacctgtacaacggggtggcactgtttgctggatggctggttgctcgcgtcatactgttcgtatacttcttcgctcatgtgtaccttcacttcgaccaggtgaggacggtgttcccgctagggttctacagtatgatggcggtgccgccggcgatgtcggcgatgaacctcctctggttccggaagatctgcaaggggatggtcaaggccatgtccagcgccaaccgaagtcaatgcgccaagacagatgagggttgcgccggcgaggacgactcgccggagttcgtcgagccgccggcggcggcggcggcggccgggacgttcgagcaacggccggagttaggagcgtgcaaggaggtgtactccgaggaaggcggcgcggcggaggagaggacgggcgtggcgatggcgggggccgacgtcgaacaggtggcggtggaggatgaggaggaggctcacggcgtgcggatgatcgcgctgctgatggagtgcgcggcggcgatgtcggtgggcaacctcgcgggcgccaacggggcgctgctcgagctgtcgcagatggcctcgccgtacgcggcgtcgtgcggcgagcggctcgtggcctacttcgccagggccatggcggcgcggctggtggggtcgtgggtcggcgtcgtggcgcccatggcgccgccgccgtcgtgcggggccatcaacgccgcgttccgggcgctgtacaacgtcgcgccgttcgcgcggctcgcctacctggcgtgcaaccaggccatcctcgaggcgttccacggcaagcgcctcgtccacattgtcgacctcgacgtcgtccccggcggcgcgctgcagtggctctcgctcctcccggcactggcggcgcggccgggaggcccgccggtgatccgcgtcaccggcttcggcatgtcggcgtcggtgctgcacgacaccggcaaccagctcgccgggctggcgaggaagctgtgcatgtttttcgagttctacgccgtcgcgaagcgaccgggagacgccgacgcggtcgccgacatgcccggaaggaggccgggggaggcggtggccgtgcactggctgcgccacgccatgtacgacgcggccggcgacgacggcgcctccatgcggctggtgcggtggctggagccggcgcggttcgtctccgcgctgcaccactactcggcggtgttcgacgccatgggcgcgtcgcggccggacggcgaggacgcgagcaggcatctggcggagcacggcgtgctcggcagggagatcgcgaacgtgctcgccgtcggcgggccggcgcggagcagcggccgggaggggcccgggagctggcgggaggtgctcgcccggcacgggttcgcgcacgccggcggcggcggcggcgggcgcgcgcagctggtggccgcggcgtgtccgggcgggctgggctacacggtggcgggagaccacgacggcacggtgcggctggggtggaagggcacgccgctctacgcgccccaagaaatgaagaacggcctgagttggatagttgcatcaaagacttcaggaaataagatgagctatggatcttga

SEQ ID NO: 65973 - DNA, 428 bp, Oryza sativa
  unsure (1)..(428): unsure at all n locations
  Clone ID: PAT_MRT4530_66969C.1
cggacgntnanccggcaccatcgcccgcctgaatccaccgcaagccgccgagctcgccgccggcctggaggcgtcgcaccggccgttcatctgggtgaccaaggacaccgacgccgacgccgccgccgccgccggcctcgacgcgcgggtggtggcggaccgtggactcgtcatccgcgggtgggcgccgcaggtgaccatcctgtcgcacccggcggtgggcggcttcctcacccactgcggctggaactcgacggtggagtcgctctcccatggcgtgccgctcctgacatggccgcactttggcgaccagttcctcaacgagtgcctcgcccgtcgacgtgctcggcgccggcgtccgcgccggcgtgaaaggtgcccgtcacgcacgtcgacgccgtgaactccccggggcaggggcggagcgg

SEQ ID NO: 65974 - DNA, 429 bp, Oryza sativa
  unsure (1)..(429): unsure at all n locations
  Clone ID: PAT_MRT4530_6696C.1
ccnggccggggattactccgaaagcagcacgagaatctgatgcaaagcgtgcatagaggagagagtagagggagatcggctatccttgtgtgaacaacagcgcgatcatggaagatgcttgttgaaactgggacgaccaaatgcaagcccttctttctaacgtacaccgagctcgacaacgtcttcacgggcgctacaaccctaccccttgatcatcaatcaccatgtccaggaacgaccagatcgaagtgcaccaccactccaccccccccacgaagaccactacgacgacgcaagtgaccccgtagacatcgtcacagactacttggacagactaccaggactgaggacacaaacgagagacatgtcgctgtcctcccagggaagacactcaccatcaagaggcttgaacccattctctctgaccac

SEQ ID NO: 65975 - DNA, 1482 bp, Oryza sativa
  Clone ID: PAT_MRT4530_66970C.1
atgcaagattctctaggcttgatgcagtttcttgatcatcaccagtatctatacagcagcagtagcagcaacctgccactgcagcagcctttgttgtcccatcaccaccgatttcttgaagccaatgagggttgcgccggcgaggacgactcgccggagttcgtcgagccgccggcggcggcggcggcggccgggacgttcgagcaacggccggagttaggagcgtgcaaggaggtgtactccgaggaaggcggcgcggcggaggagaggacgggcgtggcgatggcgggggccgacgtcgaacaggtggcggtggaggatgaggaggaggctcacggcgtgcggatgatcgcgctgctgatggagtgcgcggcggcgatgtcggtgggcaacctcgcgggcgccaacggggcgctgctcgagctgtcgcagatggcctcgccgtacgcggcgtcgtgcggcgagcggctcgtggcctacttcgccagggccatggcggcgcggctggtggggtcgtgggtcggcgtcgtggcgcccatggcgccgccgccgtcgtgcggggccatcaacgccgcgttccgggcgctgtacaacgtcgcgccgttcgcgcggctcgcctacctggcgtgcaaccaggccatcctcgaggcgttccacggcaagcgcctcgtccacattgtcgacctcgacgtcgtccccggcggcgcgctgcagtggctctcgctcctcccggcactggcggcgcggccgggaggcccgccggtgatccgcgtcaccggcttcggcatgtcggcgtcggtgctgcacgacaccggcaaccagctcgccgggctggcgaggaagctgtgcatgtttttcgagttctacgccgtcgcgaagcgaccgggagacgccgacgcggtcgccgacatgcccggaaggaggccgggggaggcggtggccgtgcactggctgcgccacgccatgtacgacgcggccggcgacgacggcgcctccatgcggctggtgcggtggctggagccggcggcggtgacgctcgtggagcaggagagagcacacggcggcggcggcggccacgggcgcttcctggacaggttcgtctccgcgctgcaccactactcggcggtgttcgacgccatgggcgcgtcgcggccggacggcgaggacgcgagcaggcatctggcggagcacggcgtgctcggcagggagatcgcgaacgtgctcgccgtcggcgggccggcgcggagcagcggccgggaggggcccgggagctggcgggaggtgctcgcccggcacgggttcgcgcacgccggcggcggcggcggcgggcgcgcgcagctggtggccgcggcgtgtccgggcgggctgggctacacggtggcgggagaccacgacggcacggtgcggctggggtggaagggcacgccgctctacgcggtgtccgcgtggacgtggtgctccccgcctcacgcgcgtgcttaa

SEQ ID NO: 65976 - DNA, 374 bp, Oryza sativa
  Clone ID: PAT_MRT4530_66971C.1
agctcctcgtagactcctcgtgctcgccggcctcctgggcacgttcggcggaagaacgagcgacgacggcagcgagcagccaggcggcagggggcggcaaggcggaagcgaggtcggttcgaggcgggagcgagcggcaaaggcggttcgtgggcgacgtggagacggcgacggcgtggatgcaagggacgatggaggcggtggatcggacggcgaaaaatcgggtcacgagcacgggtggggcaatatggctcggtcaaggtgggggcactggcgcggcgggacgtcgtcggtgtcctctgcctccgcgcgcaagaagacaaggacgggagagagagaggccgggcttagaagggaaaaagggagggacaacg

SEQ ID NO: 65977 - DNA, 358 bp, Oryza sativa
  Clone ID: PAT_MRT4530_66972C.1
ctatgtgaaggaggtcaaattctaaatatatttctagcctgcttcttgattgccaataagggtttcatcggggtttcagccgatgagttatttggatgttgcatcggcttacaaggactgcatccaattggtttctattggattatattattgttatattttattatcatcagccgattgtctttatatcattatctacattagatatatagccgattgctcaaaaccctatcaacatcggctggatcaaactgactggcacgcccgcacctcatcaagatttggacctgcactggagctaagcagatctcctaggccagtgtgtgtttttcgcatcaacacattttcggcacgcccg

SEQ ID NO: 65978 - DNA, 603 bp, Oryza sativa
  Clone ID: PAT_MRT4530_66973C.1
ggcgcgaatcgatggagaccagagcattgctgggaccctccggcgtccgacagcacgacggcgcgcggccaatccatggtccgctacggcgggagcagcggcgatgggaggggaggagtccgaggagctgacgtcggcgtacgccagcgagacgccagccactccatggtcagccgcgcttcgtaagtgaatccgtgaaggtgttggagacagacttggaatcggagaggcgtgcgcgtaattcttcgttagtgttcggaatcggagagttctccatctcacatattccccaacgaagccgccgtagcgcgcatttgtaagatctgcaagaagctctcgccgccttacaaggattagatggagcttcccaagcccgtcgattttgagaaagggggagaaacaaaaccaaccgaattcgtcgatcttgagaaaggccaggatattgatggatgcgagacgaagcagggggaaataacctttttctggttgatatttgtttttgcagaaaattagcatggtgataatattggcagtgtatattgttcttgtaatcatttgtttcaagggtatgtcgtcggtctgggcagctgttggaacaaccat

SEQ ID NO: 65979 - DNA, 738 bp, Oryza sativa
  Clone ID: PAT_MRT4530_66974C.1
atcaccgcgctaccaccggggaagcccaccgtgtccaccaccctgttccaaaccaccgggaacgcgcgccgccgcaccgggttcctcgccatcaccccgacggccaagggcggcgccgtcttcgcctccgccgcgcccggcgcgctggtgaacgccacgctcaagagggtggtcgccgccgtgccgtacaacatctccgtgctccagatcagcaacttcgtcgtgccgccgggcgtcctcacgaggccacggccggggccggggccgctgccgctgccgtccccgccgttgccgaggatgaagccgatggcgatcgcgccgaccccggcgccggtgccggccccgacaaagatggtgccgatcccgccgagtttgccgctgacggatccggccgatgaggacggcgacgaggcgccggccgccgcgccggcgccgtcgcatggcaacgcggtgaaggtgatgagttggtggtcaggccttggcgtgctcgtggggacgatggcatgcgtgttcggttatttgtaggttaactaattaatctgctctattttaccggttacgttatataattaatctacaggtgcatcctacgtttttagcgcatatgatcgtagtagttgaatttgaagaaacagttctctttttttttgtcccattttttgttgttgtggagtagagacttgtaatcgccggagaaaataattagcaaagcaagagttaaataaaaaaaaaaaaaaa

SEQ ID NO: 65980 - DNA, 381 bp, Oryza sativa
  Clone ID: PAT_MRT4530_66975C.1
atggagcttcccaagcccgtcgattttgagaaagggggagaaacaaaaccaaccgaattcgtcgatcttgagaaaggccaggatattgatggatgcgagacgaagcagggggaaactgacaccaagaatcaaatattggcgaacgtgctcagtaaaattagcatggtgataatattggcagtgtatattgttcttgtaatcatttgtttcaagggtatgtcgtcggtctgggcagctgttggaacaaccatctttatcacgccttcctacatactgatgctaaagacaataccatatttaagagacgtctccatggaaaggtttgcatcgcaccctgcagctggtagagatggcagcaatctacaatctggaaatgtgtaa

SEQ ID NO: 65981 - DNA, 646 bp, Oryza sativa
  Clone ID: PAT_MRT4530_66976C.1
tggagcctgagggccgcaaattttttttttttttttttgcttgtcatgatacacgaccgtattattccaaattccaaaatacagatgtactggagtatatgaaatacacacttgtccatgtatacatgttactcctttataatcgctatatatatactggagtattatactactacaccacaagccagagtaagagataagcagccatcacgtaataataataaccaacggccgcatgagcgagcagcaccggaggcgaggcagcggagttgttgtagtacgggacgtagccggcagggggcgcgtagtagtacggctgctgcggcgtgtactgcccgccgccgcagcagacgaccgccgccggcgggcacggtggcgtgtgcgacgacggtccggccggttgagacggcggcggaggcgaagggtagccgtagatcggcagcggctgccccggcggcggctggcaaccttcgccgctgcatatggtcggattgttattgttattattgttcccggtggcgccgtcgccgctgccgcccgtggccgtggcgttgtccgctgctaccgccgccgccgtggccgcacctgccaaaagcaagaggcgtagcaggagaagcggcgccatggctacacgacgttcggtagc

SEQ ID NO: 65982 - DNA, 480 bp, Oryza sativa
  Clone ID: PAT_MRT4530_66977C.1
ccaaaggcaaatcctctaagctatatgtacaactaaattcagatacagccctcatgccctccagtgagataccattctccgacaaatcaacaagatcaagctgagattcagtgaatggtccattgagcatggaccagagaaggggggatagagaagcaatcttgcacctattgcatgtcaccttcccatcccttatttggaaggtcactacaggggaaactttcgaagatgtgccgatatcacaagaaccaagtatctcaaagtctccctcgggcatctcggatgcgacatcaagtggcccaaactctttgcaacacttcctacatgacgcgaggacatcggatatgatatcctccccccgcttctcataccgcagccatgccccaaacacaatcttctcatgcacagtggtcgcgcagcgccacgcagaatgcaggctcctctggcgcaatttcgcctccccaagtccccgaaacacct

SEQ ID NO: 65983 - DNA, 483 bp, Oryza sativa
  Clone ID: PAT_MRT4530_66978C.1
gcggcgcgccgtgcccttgctccccaatgtcccatctccagcacctcgccgccggcgaactcgtcaccgcactccgcggagcctcctgcccttcatcagccctccgtctctactccctcatccgcatccacgcccgcccctccgatcccgcccttttcgcctggcgccccgccgtcctcgcgctcaagcccctctcggcagccgcctccctccctctcctctcccacttccacgcccacctcatcaggtccaacctcctcgcctaccctcacgtcgcctcctccctcctacgcggttactcactcctctcacccgaacacgcccaccacctgttcgatcaaataccaccctccacatgcaacctggtcgtcgtcaacgtcatgctcgggtccctctgccgatcctccgatctagcttccgcgcgagccttctttgatggcatccctgacaaggacgtggtttcttggtcaaccatgcttgcct

SEQ ID NO: 65984 - DNA, 649 bp, Oryza sativa
  Clone ID: PAT_MRT4530_66979C.1
ccggcccgggaaaaaaaaaaaaaaaaaaaaaaaaaaaaaaaaaaaaaaaaaaaaaaaaaaaaaaaaaaaaaaaaaaaaaaaaaaaaaaaaaaaaaaaaaaaaaaaaaaaaaaaaaaatgggaaaaaaattcttttttacaattaaaacttttcaggggggggttttaactttaattcccccccccatggaaaaccttttttttgtggggccccttttttttggggaaaggcggcccccccccccgtttgggctttttccctaaggttaccgggaattatgtgtgggctttttttttggggtgggagaaaagggtttttccccattgggggggtttttggggggtgaggggcaaaaagggggaacccctttttttcaaatccccggtttttaaattgaaaacccccaaatttttgcaaaaggggtgtgcccccagtttaagaaaaacccccaaaaattttttttgcaggccttttgaatgggtaaaggggttgggccaaagcttacggtcccaaagtttggggggcttttttttggtcagggttaaagccaaaccccaattttttgggcccttaagttgggggtatattgggggtttttcccaaagtaaaaaacttgtcccttgagcttttcccccgggggggggatttg

SEQ ID NO: 65985 - DNA, 1214 bp, Oryza sativa
  Clone ID: PAT_MRT4530_6697C.1
atgccaggtgtgcggcaaggcagatgcgacggcgtagatggcacattggcgaggctgtcggcgagagcacggccatccgagataagaaaaggcagacacggtaccaggaaacatgatgaacgcggatatatatatgatatgatcacttcacttgaaatcaaagttggtcatggccgtggtgtcgaagctttgctgcggtgtgagtatcctggggtgcggcagcagcgcggcggagacgtcgacgtcgccccaccactcagcgccgtgctcgacgtaccactccgccgtcttcttgatcccctcctcccatggcgtccgctccgaccaccccagcgccttgagcttctagtcgtcgacgaaatacttgtggtcgttgaacggccggtcgctcaccgtcgcgacggcctcgccggggtcgagcccgaacacgccgcagacatggcgggcgacgtcgatcaccctcggctacgccgacctcccccggtggagcacgacgtcgaacgcctcggctacgtcgtcgcagtagaggtagctccgggcgtggcgggagccgtacgtcgccgtggacggggagctcgcttgccgccgcgcatggcgaggaggatgagcttggggacgagcttctccgggaactggcgcgggccgtacacgttgttgccgcgcgtggtgatcgccgggaggccgtaggagctagcgcacgtacgccatgacgagcatctcggcggcggccttggacgcggagtacgggttggtgggccgcgcccgcgacgcctcgtggttgcccgccgtggcagcgtcgccgtagacctcgtcggtgctgacgtggacgaagcggcggatggcgccggcggcgccttccggcggcatggctcgaggaggacgtgggtgccgagcacgttgttcttggtgaactcgaaggagttgtcgtcgacgtgggtgtgggcggcgaagtgcatgacagtgttgatccgctcggcgaggaggaggtggaggacgaggtcggcggaggcgacgtcgccgcggacgaaggcgaagttgggcgacgccatcgccggagccaggttgttgagggtggcgcagtagtcgtcgagcttgtcgagcgccaccacccggtacgacgggtggtcgcgcaacagccggttcgccacgtgcgacgcgatgaaccccgccgcgccagtgatcaggatgttcctcggcgtcgtgtacgacgccgc

SEQ ID NO: 65986 - DNA, 239 bp, Oryza sativa
  unsure (1)..(239): unsure at all n locations
  Clone ID: PAT_MRT4530_66980C.1
aaaaaccaacccaaccgccgccgcatcgccctcgttagaacgatnnncnngtcggngctgcaccagaccaccagcttcctcggcaccgcccctcgncgggatgagctcgtacgacgcgtcgagacatncggtggccgcatcaccatgggccgtaccgtcaagagcgngccccagagcatctggtatggacctgaccgtcccaagtacctgggcccnttntcggagcagacgcaatngta

SEQ ID NO: 65987 - DNA, 498 bp, Oryza sativa
  Clone ID: PAT_MRT4530_66981C.1
atggcggcagcggcggcggtggcgccgtccaccaccacctcctcctccgcctccttcaagctgccattaaccgctgggaacgtcgagtctgttctagatcaagtgcgcccttacctgacggcagatggaggggatgttgcccttcatgaaattgccgggaatgtggtgaggctgaagcttcaaggagcttgtggatcgtgcccaagctcgctgatcacgatcaagaggggcatcgagcgccgcttgatggagaaaataccagatgttgctgctgttgaacctgttacagataaggagactgggcttgagctgaatgaagagaatgttgagaaggttctcaatgaaatcaggccataccttgctggcacgggaggtggtggcctccagtttctcatgatcaagggccccattgtgaaagttcggctcacaggccctgctgcagttgtgaggactgttcggattgccctctgccaaagagtgcaaattagaaaaacgtaa

SEQ ID NO: 65988 - DNA, 176 bp, Oryza sativa
  Clone ID: PAT_MRT4530_66982C.1
ggaaagtaacaaagagattgaatatacataatgtacattgaggatccaaaccaaagacaatagagagccaagcatatgcaggccaccatgatcgagtcttactaactggagtagaaaccaaaacgcaggcgaactgaaagtaaggcagatgagcagagaacgcccataatatgata

SEQ ID NO: 65989 - DNA, 195 bp, Oryza sativa
  Clone ID: PAT_MRT4530_66983C.1
atggcggacaggccgccggcgatggccgacaggacggcgacgttcgtggacctcgtcatcgccatcatcctgcctcccctcggcgtcttcctcaaggtcggctgcgagatcgagttctggatctgcctcttgctcacattcttgggctacttcccggggatcatctacgccgtctgggtaattgtcaatcactag

SEQ ID NO: 65990 - DNA, 1050 bp, Oryza sativa
  Clone ID: PAT_MRT4530_66984C.1
cgagcgggaccggaggagcctaccgcgcgtctcgccgtctcagctccgcaaggcttgcagccctgccggagatgcagacgacgaccgtgcccatggcggcagcggcggcggtggcgccgtccaccaccacctcctcctccgcctccttcaaggttgcggcctatgcttggtcgtcatgccggagcagctcctctccggcgacaagattggtcgccgcccccaatcaccagcgaccaccgctagttgttggagccattgccggcctggatccggttaccgcggtgcagctgccattaaccgctgggaacgtcgagtctgttctagatcaagtgcgcccttacctgacggcagatggaggggatgttgcccttcatgaaattgccgggaatgtggtgaggctgaagcttcaaggagcttgtggatcgtgcccaagctcgctgatcacgatcaagaggggcatcgagcgccgcttgatggagaaaataccagatgttgctgctgttgaacctgttacagataaggagactgggcttgagctgaatgaagagaatgttgagaaggttctcaatgaaatcaggccataccttgctggcacgggaggtggtggcctccagtttctcatgatcaagggccccattgtgaaagttcggctcacaggccctgctgcagttgtgaggactgttcggattgccgtgagtaaaaagctcccaaaaaagattccatccatccaaatcgtccaattattgtcatagtctgaagaatatctgtgtgccacccctctcaagcagcacatttgcaacactgtacagaaaattgatgtaaatttgtaaattggttgcatttcagaagcctcacgaagagttgcccatctttagtcagcattcagcacagggatcagatatatcatatactatctgtctagatctgtaatgaagttttgatctgttcctcttgaaagaaagatggaaaagtgtgtttcttggtggaattctggagttattttaacccatcgtaaacaacagcacacgttgacttaaaaaaaaaaaaaaa

SEQ ID NO: 65991 - DNA, 449 bp, Oryza sativa
  Clone ID: PAT_MRT4530_66985C.1
tggagctcctcccgtgctggacttcgagttcatgctcaccccgcgtctacgaggctctccgcgagcaccctcgagaaggaggcccggagggacggcggcgcggcgacatgctcgccggcgcgtcgccccccgccgccaagcggggagaatggcgccgtctcccgtccaagctgctggaacgcgcgcggtgaacggcgccgcgccagcacgacgacctggaggagcctgggtacggcggcggcggcggaggcggcgaacggcgtgcggcggcacaggttccgtcgtcgtcgtccggtattccttcgattgctagtatagccagcgttgccaaagagcgcgttctgtgtgtatatatcaggtctatcaacgagagttttttgagggctgtaaaaaaattaaagacggataatacctccaagtccatacaatgttccataaaaaaaaaaaaa

SEQ ID NO: 65992 - DNA, 411 bp, Oryza sativa
  Clone ID: PAT_MRT4530_66986C.1
atggatgagtcgagtgacctccagtggcggcagggatggctcgccgtcggcctgccgccggcgccggtggtggcggtctccgccatcgtggggttcttcctctacctgacgtggcagatggacgagtacgaggagcagctacggcggcgcacgcaggccgggctgtgggtgctgctggtgctcggggcggtggcactggtcctgctcgggagccacgcgctggtggacgccggagggagggtcgccgtgccggtgtcgtggcggtggggcggcggctacggtggtagtagcggggacgacggcggcggcgcgtcgccgtgggccgtcgcggcggtggtggcggtgctgctggtgttggcgtcgcacaagccgtcgttccagatgttccggccgccgtggcactacaagtag

SEQ ID NO: 65993 - DNA, 171 bp, Oryza sativa
  Clone ID: PAT_MRT4530_66987C.1
atgttatagaagggaagcacaacaggttacataatataccggtgtatcagcctgctcgagtgaagggcagaaatctaggcctcccacaagtcatgccactttcacgttagtagttacgtacgatctaatagtagaagaaggggatctagcaagtagtatagtaacaagtgt

SEQ ID NO: 65994 - DNA, 1344 bp, Oryza sativa
  Clone ID: PAT_MRT4530_66988C.1
atggaggtgcaggtgaagaggagttcggtcgtgccgccgccgccgacatgcgagacggaggaggtgccgcttaccgtgttcgacctcgtcgcgccgacgtaccacgtcaccgtcctcttcgccttctcgcctcccaacccgaccacccgcgccctccttgacgctctctccgccatgctcccgcacttcccgctcctcaccgcgcgcctcgagcgccgcggcgcccgtcgccgcccgttcttcgtcacgggcagaggtggcgccggcgcactcgtcgtggaggccgaggtgtcgtccgagctcgctgaccacctcccgctcgcgccgtcgccggagctcgcgcgcctccacccgccggtcaacacggacgcgccgacgccgcatgtgctgctggtgcagatcaaccggttcgcgtgcggcggcctcgtggtcgtctcgtcggctcaccaccaggccgccgacgggttctccatgagcaccttctttcacgcctggaccgacgccgtccgtcgcaacggagctccgctgcttgaccgacctgtaccgtacggccccggcgcgctctcgccgcgccggccgccgcggtgcgagttcgagcaccgcggcaaggagttcttgccgcacgacggcgtcacgagcaggcaaggacaaggcgccgacaccggcgccgtccgcatcgacccttccgaggtcgccaacgtgctgctgcactacccgagcgagttcgtcgccgagctcaagcggcgcgcgcagggcaagtacaccacgttcgagaccgtgtcggcgcacgtctggaagaagatcaccgccgtgcgcgggctcgacgccggcgcgcgcacgtcggtgaacgtctccgtgaacggccgcgcccggctcgggacaggaaccgtgccaaacggcttcttcggcaacctcatcatcaacgcgagctccggcccgacagcgagggagctgaccaccggtactctcgcggacgcggcggcgctgatccgcgcggggatccgcgccgtcgaccggcgctacttccagtcgttcatcgacttcggggcgctccacgtcgacggcggcagggacgaggaggagccgcttcagccggcgaacgtggacgagcccggcgtgctgtcgccggacgtggactcggacagctggctgcacctggagctgcaccggctggacatggggctcggcgggcggctcgccgggatcctgccggcgaaggtgccagaggacggggtggtggtggtgatgccgagcctgaggaaaagtggtggggtggaggtgttcgtggcgctgtgggagaagcacgcgaatgagctcaccagcatcgcttacaccatggattag

SEQ ID NO: 65995 - DNA, 2205 bp, Oryza sativa
  Clone ID: PAT_MRT4530_66989C.1
ttaatagggaatgacgtatggtaacgcaatgacatctgcctggtcaatcttcagaggctgagcccacacttgggaagctccatcggcctcagtctctgactcggttttctttggttgtgtgccatcatggtcaaacagccagtcctggtcatcgtgcccatgccattccatcatttgaggtgcttcaggaatgctgtatatctgactgagatacttgctgtctgggtgtggcaacttcttagtaggtgcaccattctcggatgcaactagaggatcatgaagccgtggctcaactgaagatcgttgaccttcctggttgccattgatcttctcttccttcttgtgttgccttatagccttttcaatatttatggcctccggcttcacagaagagagtggcgcggctacatgagatgctgtaccattctccacaggagtgttggagtgggctggtcttggcaactttgtaggccgcattgtatcatgatggttttgcaagtagccattcatctcgtggttctttcgcttcttcaggttttcatcagcttgggcagcttttgcatcatcagctggtggggctaaaggaggggttgaggacttcatgtgaagactattatctacctgataatttatactgttttctcttagcttatcatgctctttgttattattttgttcgtctttctccttctttgcctctttatcccttttcttctctttgtgtttatctttctctttctttttttttttctcgtgtcgatcactcttcttatcctcctttgcaacatcaggtgccccatctctgaccttctccatcctttcagttcttccatctgtaattttctccatagttggaggttttgaattaatctgttttggatcgataatattattctgcaatatccttccaccctgttccttttccttccccatagcaggggaagcacctcctgcatcaggtttcttagaagaaatggaaatgctctcaggtggtcgtacaagcccatttggccttcgtattgtaatacttgggcttgggatagatgacctaggcattcctctatctgtccctgctgttgcactagaagtcgatggactgtcaaacctctgtgttggaatctccattggccgaccaaccttaccatttcccttatgcatggtattagcagggcttggaagcagtggagaattggtgccagcttctttcttcgcagtctctttgtttggactatcagttctcttctgaaccagtatgctaatgttattgattcgctgtcccatcccatctttctttggtgcagaatcagtagagttagagagaggccttgcaactttaactctttctttttctgctgtaggtgctgcaatgaagacatcagaagttctttgagatgaactggtgatgttgtctccacgtcgaattgctgtcccatttttttgttggttgatgctgatgctcttctgtcccaagacctcagttttccttgaagcattaatagagtgactatgcattttattagctgcagttctttcattctccagtgcaggtgcagcactaaagccttcacgacctcgttgatttgaaacagaaaagttctgaacagattgattcgtcgtccctttctcattttgtgtcctcgtgaccaagtcctccctggatttaggatccttaatttcttcagacttcctgctgctctctccaactttttgcccatggagagcctcgctgtgtctttcagttccttcttctaattccctgcttttatctttgctcttgtcctttttcttgtctttgtgtttttctttccgatcctttttatctctgtgcttgtctttgctcctttctttatccttcttgtctttgccttcttttctttctttgtccttcttgtccttcttatgcttcttctccttgtgtttctccgatgctgcagtcactgagatgtaaatcattaacactacaagccaataagtagcatcataaatggcttccgctgtactatccttatcaagttgtatcggaaatggtatttttgaaccagtgaaatagtacacctcctccctcctccgcctcaggtcaccaccaccaccaccaccgcagacacctcctccgccgccgccgcgggcgcgggcgcgggcggtcctcctcccctcctcctggtggcgcagcaaccggggccgcctcactcgtgccacggcgaccat

SEQ ID NO: 65996 - DNA, 376 bp, Oryza sativa
  Clone ID: PAT_MRT4530_6698C.1
tttttgtaggcgccgacgacggggctggcgctgacgccttcctcggggatggcgccggcgccgccggcgccgccggggctggagttggagctggaattggagccgtcgtcaactgtgccgagttctctcaccggtgccgctgagggcgccgccggcgtggtacccaaggtgcatgtgtgagatcgatcgatcgatcgagcgcgccgtgggtttcatttccacgaattcatctcggccgcagttgggtccggcgatccatatttttacaaattctgaatgcgattgtttgtagttaatcaaagattggctaattcaatccggcgtgtgtttggatgtttatttaatatgcaaaacctggtgattagtgataaataat

SEQ ID NO: 65997 - DNA, 1539 bp, Oryza sativa
  Clone ID: PAT_MRT4530_66990C.1
atggtggcgaagaagccgagggttgtggtggtgggcgcggggatatcgggcctcgcggcggcgcaccggctgtgcggcgcgggcggggacaggttcgaggtggcggtggtggaggccggcgaccgagtcggcggccggatcctcacgtccgagttcgccggccaccgggtcgagatgggcgccacgtgggtgcagggcgtcgtcgggagccccgtgtacgctctggcgcgcgacgccggcgcgctcggggaggaggagggtcgtggtctcccgtacgagcgcatggacggcttccccgaccgcgtgctgaccgtcgcagagggcggcgaggtcgtcgacgcggacacggtggctggcccgatcgaggagctgtacaggggcatgatggaggccgcgcgcgccggcgaggctggtggtggaggcggcgtggaggagtacctgcgccgtggcctacgggcgtaccaggcggcgcggtctgccggcggcggcggcggcggcggcaaggagcttgaggaggtggacgaggcgctgctcgccatgcacatcaaccgggagcggaccgacacctccgccgacgacctcggcgacctcgacctcaccgccgagggcgagtaccgcgacttccccggcgaacacgtcacgattcccggcggctactcccgcgtggtcgagcgcctcgccgctgcgctcccgcccggcaccgtccgcctcggactccgtctccgccgtctcaagtggggcggaacccctgtccgcctccacttcgcggatggcgcgccgccgctcaccgccgaccacgtcatcctcacggtctcgctgggcgtcctcaaggccagcctcggcaacaaggacaccgccggcgttggcgcggccgccatcgccttcgacccgccgctcccgcctttcaagcgcgaggccgtcgcgcgcctcggcttcggcgtcgtgaacaagctgttcatggaggtggaggccgtggcgccatcggaaccggaggacgtcgccggcgtgcagccggcggcggcgggcttcccgttcctgcacatggcgttccggggacacgtgtccaagatcccgtggtggatgcgcggcacggagtcgatctgccccgtccacgcgggctccaccgtggcgctggcgtggttcgccggccgggaggcggcgcacctcgagtccctccccgacgacgacgtcatccgcggggcccacgccacgctggactccttcctcccggcggcgccacggtggagggtgaggaggatcaagcggagcgggtgggccacggacccgctcttcctcgggtcatacagctacgtggccgtcggatcgagcggcgacgacctcgatcgcatggccgaaccgctgccacgtgggccagacgccgccgccgacgagcggccgccgtcgccgcggctgctgttcgccggcgaggcgacgcaccgcacgcactactcaacgacgcacgccgcgtacctgagcggcgtgcgcgaggctaaccggctgctgcaacactaccgcggcggagcgaatcacaccacgtag

SEQ ID NO: 65998 - DNA, 144 bp, Oryza sativa
  Clone ID: PAT_MRT4530_66991C.1
ggtgtgtttagtgggccatccggaactgagttgaaccacgcggtgttggtggtgggttacgacgagacggaggacggcacaccctactggatagtcaagaactcgtggggcgcaggatggggcgagagcggctacatcgcatga

SEQ ID NO: 65999 - DNA, 357 bp, Oryza sativa
  Clone ID: PAT_MRT4530_66992C.1
atggacggcagctatggtgaaacggcccgcagcgcagcatatcctgcggcggcgccgtccgcgttgagtgtctggttcgcctacgccgacctcctgtcgctggggccagcgcttctggccgagccatgggccatggctagctgcctcctcgagctcacgctcagatggagcgctgctgaatcttcactcttcttgctagtgaatggcatttgcgatgagctgagcccctgcaagttgaacggcatggtgatcgtaaggagggccttgctgccgggatgggtgcttgttcacctccgttcgatgccgatcaagcggtgtagctgcagcatcggacgtccctctgaggctctgacgtag

SEQ ID NO: 66000 - DNA, 5595 bp, Oryza sativa
  Clone ID: PAT_MRT4530_66993C.1
atcgtaagctttttctttgtttgaacgaaaggacacaagctatgcctattgcaccaaagagtaataaagaggataaaatagaagtttacaagcagaagggaagaaggaagcaacacaaaaacgaaaaactcatgcaaactacgctagaaaatatcctccaggcaatgtcttgtgactaaaggcactggtctcgaaaagttagcctattcaatataccatttaacctataccgccagtgcttttgaatgcatgagcggcttttaggtgtaaatcacttctttacgtaagttaagagtttagacatatcttcatggaatatctttacaaaataaaacaccagcaacttaaatttgaggatacagggacagggagcttatctgacctgacatgaaaatctacgtactttcctctcgaaatctatttgaggatagggcacagggagcttatctgacctgacatgataatctacgtaccttcctctcggaatcttttccggaagccacacccaacaccagggctgttctggtttcgccagaccagcttgctctgtttttccttcccatatgtaacaaatgaaagtttctgtcttgctctcttgtcaataggagtccatgttggatcaatggacggttctatcctctttttgtgacttgttggttgtacattgaaatctttccttgctctgcgattctgtgctttagctccttccttgcctttcccataatgctgagtcccaattgaagggctctggtccctcgaaggagtgtctctatctcctcggtatctgaaggattctttaggtggaggatttagaatctttgagttgctatctctcattcttgggatcgacatacctggtgaattactacatctagatctctcctgacgtgcttttctctttgcactcatttgccttagataatcaatttcccagcatgacccctgtgaagttgcatggctaccaaaatctagtttctgaaaagcaagcgaacttgctggatgttgcataatttcatctcttggttcatgatatctgttgtccatatcatatctgtaagagtcgtctacagtacctccatgtgcaagccccttccatgtttgttttgtacctcctgaaatgttccactcaccaggatcatcgttgatctcaaatgcagttgaaaatactggattgctatgagttctgctgcaagatggtctgcttgtgtgaaaagtgcttttgcttggatgcgtaccaccaaattcaggttgccagggtaagtcgaatgtgtccaccatattgccagtccttctgttatatgcttgattatttggtgtcaatccattgctgaaatcatcattaatgacttgattaccaggtattgcatccacatcatgcttcttttgttgataagagaatccctcacttctcatattcaaactttcgtcgaatgtaaagacatctgggagctcgggaattgtattatccatgtcagagaacttcctcaacttagaaggtgagaatacctcagcatgttctgcatagtcaccaggtatttggtttagagaatcagaaaagaggagcttattagttggtactgcacaagcctgcaatgaacgctgtttccttttcctcggagactgcaggaatgcactactgatatctgaatcgactgaagagcattcagtcattacagaccttgattcacctaactcaccaaatttgcacaaagcattaaatagggaaatgatctttggagacaaaagatactttccaactgcttgaatacggcgctcatgtggccaactgaggaactccacaaggctgcctccagaagaaagtaacatatatgcagacacgggattgatggaagggaaacttgtgagaaatgattcagccaggctttctgattcaggtatatctggaagaggagctttataacagctagtcacatttgtaatgcaattgagaattatttcatctgttgacctgggtgtgtgtgagaagaacagctgcaagttcatgtccaaactagcagctgcagtatacaatgaatcagatgagtccattacagcagaaaggaagtcagcttctccctcaaagaccatgatgcagccagtgaaagagaaactaactgacatcagaatgttggtcgcaatattctctacattttcttttataccagatgtctctgctgatgttgttagttcattggcctcaaagagcgcagtctcataccatactaggcagacagcagcactgagtatcagatccacaggcagatcaatatctcgctccacgacctgcattcctcctttctccagagctagtatctgctgataagatgatcttcgcgaaacaagcatcgtctttccatgatttccagtatttacaactatcactacatctgggacggacagtcttcctggcatgatgcagtcatttttcacacaggaaggtaagtcagtagtggactgattctcttgagggtctttcagcacattggcagatacagaagaagtagagctactcttctcaactgtgggtacacattgtgaattgacaacaggtttattactcagtgtttgctgtatatgtagctgttcatcagcaagcacaacgttatgtgaatcaaaagtattcttcttgttaagattttgtaatctgtgtggttgatcatctggaagcagttcttttgtagcatcagcagcaaaatgtttgctccgtttttcttgaagaccttgcagttgatttgttgctggtatgaagtttaacgaatcaacaatacgcattttattcatcctctcctgcaaatccttctgaagtgtaagcaaaactttatccaatgtagatttcaaatcctggtctttatggttgtcctcgactagagcagctggaaagtccttgccatcaactttgacatagaggaaatgcagaggtggcaaaccatctaatttaggagcgagagataacaaggtagatgatttattcgggcctccatattccagtatgatgccaaacttgtcaaaagggaatgaagctggaatgttcttgttatctagcagaatgcaatctgatttcagtaattcttccagcacccaagctgtagagtttgtcttgttcaccagatccacaaaagttgttgcagggttttgtccaaactcaacaaatgtcatcctcatggatgctagcttttgacccagtggcagccagaaagctctatcagcaactataaggatcttttggtcgatttgtttattagatctcaggatagtctcaatgcatgacaatgacggatgagattcaaacagttgcctctcagatttcctctgtgcttcagaaatggaccatagaatatgttttaacctctcaggagtgttttccaagcttctagtcaggttgctaatgtacaaatgggccgcatgcagaccaaagaaacataagtaatatgcaacctgctttaatgcatacagtacaatgagttccatcttatctttgtgttcgcagtgattgtacgagccttctgaaccttctcccgttatcagttcaagaagtttctgctttgagattcctaaaccttgctcatctgagaaagaatgcctccaatatgtgctttcttgcagagcagatgtatagcttgcatggatttgttctataaggccttgaataagatttgaggggctgacaggatgaatttctatgagtttgtcaaccttagccctggttgaaagagataatgcttgctcttctgaatgcgggacatctaaagtagaagtattctcattattggttccactcttagtggcacttctgacgtttaagtaaaaatttaggtcaccagaatgtgatattaactcagggaaggaagatgacttttctggactcggtcttttcatggaactatggtttctagtaccaccttcttgttcgcatttttgagttgcttccaatttttgtggatcatgagacagtggggcaggaacataaatatcgctatgtttatcctcatcttgaagctttggacttctctgaaaatcctccagaaaatcgctaacaaatactgatgtactctgacaactcctttgcagctcagaacttaaatggcaagtttttgcctcctcaaccatgcttgcataagaacaacaaatctcccggttgcatggtccttccagtaagagatgccaatccaaataaattccatcagatgctgatagagggtgtggttttagggagcatagtatttcttgaatgggagggaccctagacctaactgctatatcatcatttaaaataggtgtaggcaatgacctaaatgtatcatcaaccagtgctaactcgcagctaaccattgattcatacaaacgtcttgctggatcaaaatcatctttgaatatttcatcagatatattcatcttatttgtctctgactgaacaagcattttgaatacattatctgaaggaaaatcaatgatctgtacctcctctaaaagaatggagcaaggcaagtctgaacaggtgccatcaggcttgagagggtagagtgctgaatttttctcaagcagaatattgccattgatcctcacaacatccatttctactgcagctttgatttctgctggtttatctacttgaatgtcatggcatggtgcatcttcacaaacaaaggtcagcatgtccatgtcagttgatctcaagaactcggttgatttaaacactgaatgctgaatctgtgcttcatccaagtgtctaacaacattatcaaaaacaccgtatctgtcagtctcagtcagacaatcgtcgagctcccaagaattcctacttacttccaatcgaggtattactgcaccatgatctagtgctgcaatctccaagcagcagtcttctctcagagaagaatggccattgccatcattgtcttttacagggaccttttctacttgatacactgactctggaagatcagattgatatcttatttttatgtcggtctcaatatcaatgaaatccaaatggattttcatatctggaacacgaagcaacaacgtgacaccaccaccagactcctcttcaccaaaggatgcaatgtcttcttgcaaagccattaggagatccacctctacaacctcaaatctaagctccttcaattgttcccacctcttcataactgaggagatctccagaccgtctgatctagagccctcccccttttcatccttctcgcggttgatcacgccatacccttcacttgccttagggattctgaatgcaccaaactcccatgagctgaaatcctcgccgtatccgcctctgtcgtacaggaagtcgtccaatacctcgtcggccgcgggcacagtcggcacaggcagggcctgcgggataaccgcggcgaggaaatcggagagcgcggaggcgatggggagagggccgagaccatcgtcggcgaccgtggcggctgggagttcgtcggcggaggtgaacgggaggaagtggggatcgggaggaagggcggggacggggagagaggggaagctgaagaactctagggctagcgctttgccggcggcggaggaggaggacggcgcgaagtagtcggtggcgaggaagcgggtcctcat

SEQ ID NO: 66001 - DNA, 365 bp, Oryza sativa
  Clone ID: PAT_MRT4530_66994C.1
cgagaaagatatcgtgcgatctgggttctatcgattctttcccgatcgagatgaatggctccatgcgtctacatacctagatgctggtcatggcataacgaagatgtgcaagagctctatttgcctgtgccattctatgagaggttttctttttgcgtatgggaccgccacccactttggcagcatctactaatcctacacttattttgaaagccatatttagagccggacgcttttgagatgcttgtaatgaccaacgaatgggacgtgctcttgcttgtttagatcctatatgaatcggaactttccgcggagatgctttgatattacgtcgggtggctactcctatattgagagtcactata

SEQ ID NO: 66002 - DNA, 360 bp, Oryza sativa
  Clone ID: PAT_MRT4530_66995C.1
tttggttttttttttttttttggttttttatttttttttttttttttttgttttttttttttttttttattaagtggaataaaaacaaaagtccggggttttgggcctaaaacagaaaaaagggggggccctttagggcaagacaaccaagcttgggggggaaaaaaaaagaaagcctgtgaagagcacctggggggggggttttatggtgacatggggaaaaaatggaatgaacccgggggggaattacaaaaaatgtctttaaaatccgcccccaaacccagggatcagggcttaaggaaataacaccccccaggggggaagtttcaaaatcaaaaacatgtacggacgtggagggct

SEQ ID NO: 66003 - DNA, 246 bp, Oryza sativa
  Clone ID: PAT_MRT4530_66996C.1
actccaccgcgccgccgcctttgcgccgccgcgccgctgcatttgagccgccgcgccgccgcccctcgcgtacttgtagagcccgagggagttgcggatctgagtgaaggccaagactcacaagactttgagcaaggcaagtcatcactattctttgaacatgttgatcccaattacgaaattgttttgtttacaaagaaaattgcatgcaatgatgaacatcctacttgtgattatgccatgcct

SEQ ID NO: 66004 - DNA, 655 bp, Oryza sativa
  Clone ID: PAT_MRT4530_66997C.1
ccacgcgtccggttctagatcgcgagcggcgcccttttttttttttttttttttttttttttttttttttttttttttttttttttttttttttttttttttttttttggggacagggccgggacaccgggaggggcagcacactcaccactaccagggcaagcccgggatggagagggacccattcatttcaaaaagggcccgaagaaaaaacaacccaacccatatggaaaaggtattaaaaaaaacaaaaaaaaccctccgggaagctaaaatttggaaaggacgggcgggtttattcccaaaccacctttaaattttttccgaaaacaaaaacctacaagcggacaaagcttttggtaactgccttcaaaggaaaaagggggggggggggaacaccggggggggtccaacaacataacctgggaaaaaaggggggggtttttttttttttaatttaaaaacgggaaaaaagggcccaacctttggaacggacgagggccaaaaaaaggggggggcttccgggctcggaaggggcccgggaacaactccgggaacttggggaggaaggggccccactcaaaaaaacccaggggggacaggttaaaaaaaatggggctgggagggaaaaactaattggcactcctggtaccaa

SEQ ID NO: 66005 - DNA, 716 bp, Oryza sativa
  Clone ID: PAT_MRT4530_66998C.1
ttaaaatccgatatcaacatttgctccaaatgttcaacattgtttttctgttagtgcacatggggattctgggattttgatttacagtctacatttgatcaacatccattcttttttcctttttttttttgcggggaagcctcatctccttaagctttctggtgtggttgctctgtgatttcttctctgctgcatatccttatcttcttggttgctgtatcagaaattctacttcattgtgttcatagggacaatttacaggcacttcccccaatagtgctgcaatttctgtgctatctgcttcactgaggcactgttgactttcagtttaacagaaaatagacttatgatcctgcaagttggaaaaacataatcacttcttgcagtttgctgcattgtttaagcaatttggagcccttttttttattgcatgcaactgtgcagtagatctggtctcctggtcctgtttacctcttgctgtaatcaacttgcccatgtatgtactttttttacagtatttttaagtagaataccattttataattgctaggaatcgccaacgctcgtttccagtagttctcttgttagtttgtgattatagctttcctaaacgtatttcagcaggattagctctctttcatccaaccatctctgtgaatgctcaaaattcaatatgaaaaaaaagcttgccttttatcttaaaaaaaaaaaaaaaa

SEQ ID NO: 66006 - DNA, 852 bp, Oryza sativa
  Clone ID: PAT_MRT4530_66999C.1
accggtaaaccctcctgtgaaagaaaggcattgtgagagcccaaatcctggctagtttcattggtccaagtgctgagctactgataccaacaaccgccatcggagagaatgggcgtggacgacatcatcgccgagctgcgcgtgctgccggccaagatccttctcaagaagaagcccaagcagttccagaaggtggaggtgaaggttcggatggactgcgaagggtgcgagaggaaggtccggaaagcagtggaggagatgaagggcgtgagcagcgtggaggtggacgcgaagcagaacaaggtgacggtgacgggttacgtggagcaggaggaggtggtggggcggctgcggcgtcgcgccgggaagaaggcggagccgtggccgtacgtgccgtacgacgtggtgccccacccctacgcccccggcgcgtacgacaagaaggctccccccggctacgtccgcaacgcgctcgccgacccggacgccgcgccgctcgcccgcgccaccgaggaagaggagaagcttgcctccgccttcagcgacgagaaccccaactcctgcgccgtcatgtagtatagccattatagttagctagtcatgcacccatgcggccatgccatgtcttattgtttttttttttaagtgtgctgctttgttttgagcttgtagtctcaagtgtgtctgtgtgcagtctgttcgttctacgctttgtacactgattattagttgggagttgtaggatgagtccctcgtggctgtcaaagttttgcctaaaatttttgtatgaaacgtgtttgagtacgatcgagatgagcaaatgtttctttggctcaaaaaaaaaaaaaaaaa

SEQ ID NO: 66007 - DNA, 1145 bp, Oryza sativa
  Clone ID: PAT_MRT4530_6699C.1
aaatgattttataaaaagaaaaaccctaaaaagtctttttttcccccccccctccccctcttgggccggctcggcccatctccctccctctctctcctctcccccgcggcccatcggccttcccccgcgcgcgtgccgctgacgggcgggcccgcccgccaccctcgctgacgggtggggcccacccgtcatcccctaccttccgccgctcccgccgcccgcccgtgccctagcgccgccgccgccgccgaatccgccgcatcccgccgtccccgcgcgccataaagagggggaaatcactccccgtgattccctccctctttcccccacttttccctctctctctctctcggattcgttcggatttactcccgcgaacttcgccggcgcatcaatggagcccgagatcgccgcgccgatttccttcccctccggccgccctctctcactcccaaccctatttaaacgctccccatgcctccctcctccgtttccgccactcgccgctttctctccccgtcggaatcgagcccgcgccgtcgtcctctctctccgccgtcgccgccgagctccggttcgccgccgtcgtcgccccggacctcctcccgcttcggcatcgcctccttcggcttcgccgcgttctcgtcgacctcgtccactcctccgtttcgcccgccgaccgccggagcaccgccgtcctcgtcgacctgagccgcgccgccgcctctctccgcttcggtcgccgttcccgtcgtcgccgtcgacccggggtgagccgaggaccgccatttcgtttcccccttccctcccctctctcggccgccgctccgccgtgcctatggccgccgccggcgaccataggggcgcgggcgcgccgcctcccgtcggccgtgccggcgaggccgccttcgggcgcgccccgcggctgccaggtggggcccggccgtcagccgcccgcgccctcgggtgcggctgacgcgtgggacccacggcgccggccggcgcaagccgcgtgcacccggtccaccgtggaccgtgaggctgccgcgtgggccccactcccgtggacccggtccgcgcgccctctctcccggcttgttcaccctagaataaacaaaaccccaactagtggacactctactcat

SEQ ID NO: 66008 - DNA, 4767 bp, Oryza sativa
  Clone ID: PAT_MRT4530_669C.1
atgaaggattacgataagtctacttcctttgaggtggacgactctaccattgatggtgatgtggagcttggtggagggctcactgtggtggggaatgagaggaatgatggaaggggtttcgttggtgagaatggagcctcgaacaagaggagtttgaggtataactcgatgctaatgcaggtgtgtgccgaaacagcggcttgtgtgtctctggatttttgcaatgatgagactttcgagaagtaacgttgtgataagttagcagagggtgatagggcagggttgcggacatctcttgcatacaatgctgagctcggtgcggcagaaaattgtgcgttagagtgcgatgctgggtttgatgcaacttgaaattccgcaaatcatgtgtaaggtttggatcttgctgaggttggaagtgttccattgaatgggatggacgcatatattaaggaatctgaaggttagatcggtaagttagatgactgactggttaccctttcagaggagccgaatgaatctgggggaggaacaagtgttgggggcatcaatgactcccaggaaaacaaggcggtgaatgggctttgccagggattggtcatagccccatttgatacagcaaacggtaatgcatggaccatcagaaaaaaaatctcagatagtggacgagaatctattgagcaagaggataccgtaatgtgctctaatgaagaacagaaagttgagaaccattgccagtttgacgataagcataaagaagctgaaatttctcagattgagctcgcagttgataaccacattatgctaactgattgcactaaccaaaagaaggggatcgacagtcctgtgaatgaaaccaagggggattcaactcctgacattgtttttataaggagaaaatcaataactagaaaaacatgtgaagcgaagcaggtgaaatctgaagatgaggttcgatttgagaagcgagttacaaggtctgctactgttagacagagagaggtttctgctagcatgtgcgtaggtgctacaaacgatgctaacttggaaagcaaagaaaggaaggaagatgttcatcattatacaaggaaagtgggcagcaccgtgcgctcaaaagttcatcacacaggggtggcagaatgcgacactgatacaaagaagaaactaaaaggaactgttaccactcgaagaaactcagatgccattgctaatgatgatcctccaagtatcacgcagaacaaggaatcaaaaactcagatgaagatcgatatcaagtctcaaccactcacaagaaggggcagcatagtaaataaaacagaagacgcagtttctgggttagaccagaatatctgtagttcagccatcactgataaaaatgatatagagctcacagattctgaaggagttaaatctgagaacaaggccgctgtgaggaagtcaatattatcagttggcgctaagattgttgccagtaagaagaggatattggaatcaggacttgataaagctagtggagagtcaccagttgcaataccatccctaaagaaggcaagagatacatcctcagacactgagctagagcaaccaaaaatgtcttctggaaagaaacttaccagaaataactgtggctcaagtaagaaaggtatgtcgacaagacggcaacatcagagtcaaacagctaagttgagtacatctgtgaattgctccaataaaaacgaatctaagctatcacagaatgaatccgatgatgatggaactggcagtgatacttccttgaagaacacttgtgtaagacgtactcgaagtggtggtgttgtccccaaaaaacaagaggattctagtgaatctgaggaaccgatcatactgagaaaaaatcatcaaagaggaaaatattctgggaaaagggctggatctacaccaaggaaagttaaagctcccaaaggcaatagaaaggaagtcaaggcttccagtttgaaatcttcgggtccaagtgagcagataaatacaggaagtcttcgtgaagaaaaacaaaaaataagtgatcatatcaagggcatgcttctagatgctggttggacgattgatctgagacccaggaatggcagaaattacttggattctgtgtatatacctcctagtggtaaaggatcttactggtctgtcacaaaagcttatgctgtgttccttgaaggtatggaatctgagaagaagggcagagctaaagatcagcgaccctcaaagaaatctgtaggtagccctgggaaaagtcatgtttcagaggaaatccttagcaaattaaaaagaatagtcgttaataaacgaagaaccaaagtagaacttcagaagttgaaaaagaggaaacatggtttactgaaaaagcagaaaacttccaagcgcaactcaaggggttccaaaaataaaatttcaaattctagaaagttgcatttaggcagcgaaagaaaaaagcgaggtggttgtgctctacttgctcgtggatcaaataaggatggtggaagcagcactaacggttttgttccatatgaatggaaacgtacagttttatcctggttgattgatcttgatattattgatatcaatgcaaaactgaaatgtgtggatgaaacccactcaaaagttttactggaaggtgtaaccactagggatggaattaactgcagatgctgcagcaaggtctttacagtacttgaatttgtggctcacgctggcgggccagtcagcaaaccttatagaaatgttcttgtagatgggctggacactgaccttttgcattgtctcattaatgcatgggataagcagtctgattctgaaaggcaggcctttttccctattagcactgagactgatgaccccaatgatgacacatgtggtatttgtggtgatggaggcaatttgatctgctgtgatggatgtccctcaacattccacatgagttgtctagaacttgaggaacattcaaggcaggatgctcaagacattgctgaggttgactcttcactctgtacttgttcccagtgcgaagaaaaatatcacccaggttgctctcctgagactactaacacatccaatgtctccagtcaggcatgcgatttattctgccaacaaagttgcagactgttttcaattagatttctgggcggcaatgatatctatggaactgtcaacagtgctctcatgcagtcattaagatatatctatagtttattttcctgtgatattcattataggggaaagctgtttgagggattgcgtaatcttcttgctgtgaagaaggatcttgaaccagaattttcatgcagaattattcagcgtattcatgaaaatgtaccagaaacagttgttgctttggatgagagggttgagtgtaactccaagattgcagttgctctttcgttaatggatgagtgctttcttccgattgttgaccaaagaactggcatcaacttgatacgtaatgttgtgtacaactgtgggtcaaattttgttcggatggacttccatgggttttatatctttgttttggaacgtggagatgaaataatagccgcagcatcggtcagaatacatggaaccaagttagcagagatgccattcattggtactcggaatatgtatcggcgtcaagggatgtgccgcagactgctagatggaattgaaatgatcctcagctccctcaatgttgagaagttgataattccagctatcgctgaacttgtggacacctggacatctaaatttggatttagttcacttgatgtttctgaaaagcaagaagtcaagtctaccagcatgttagtttttcctggaacaggtcttcttcaaaagccattgctaaagaaaacttcacctggggaaaattcaagctctcaagaagttgatggtgttttctctgagctcgagtctgggaaaacttccaatgtggccaatgaagactctctttgttctgcaaatgctgagactcaaggttcggctgccccatgttatggggacaacagcaaagatgctagtgcttgcaatgattgacatgcttcctttgcattattttgtccctgtcaaaaggtgcaccctggtagtttcaagcattgacagatactattgaggacatgaagcacaccgatccttcattgttactattattctcttttgactcggcatgcggttcgtcggttggcagaagtagcctggatagagagggcgagtttttgaagatcccttgcagagcagcagcacctcggttctgctcaatattgatgattcaattgactctttggtttcggtttgacttgaaaccagcctgtgcagggttggactccgatcacctaactttaagtggtttacctttacctgtaaagtcagcatgtagaactgagatgatagttttattccgtgttttttttttctggatggttaacttagtaccaaaggccaacgtgtgccgcaaaatcttcgtacatgtttctttacctgctatgtgacagtagctttgtttttgctagcccatttttttgcagccagatctcatctgtaagacactaatgcatgggcaagcagaaaaaaaatctcagatatgccacctgttctcatgttggaagtaaatctgataatgttatggcatctatcctcgtgttcatgcagatgcaaggtgcttttgttcgctgaatcgaactactgatcaggtgagatgtggtcaaagatcgcaaggttataatcactctggaaagcatttacttggaatcatattgtctatctgct

SEQ ID NO: 66009 - DNA, 372 bp, Oryza sativa
  Clone ID: PAT_MRT4530_66C.1
atggcagctgctgatcctctcaaacaagtcgtgtcgtcgtcgtcgctgtcgccacagagctatctgggagtggagaggaagagaaagagtagccattgctgtgaagctacaaagctctcattgagcgaagataccaccggcgaggtctatgacattgagtaccgctacagcgagaagagtgctgccaaggagaagggtggcagcggcaaggtctacatcattggcggcgatctcagcgaagatacagccagcgaggtccgcggcattaagtatttctgcagcgagaagagtgctgccgaggaatgtggtaagggcggcggcggtgacctaaaccctagcatactcgaggatagcagcaagcaaggagactga

SEQ ID NO: 66010 - DNA, 348 bp, Oryza sativa
  Clone ID: PAT_MRT4530_67000C.1
aaacatttcagctttttttaaaaaaggctttaaccaattgcagtaactgaaaaccaggcttacagataggaagatgttaaaatttatcacaataaaagcaaaggaaggcactaaacacattagagacctcagtgtccaagatttaattctaaaactgtattacggatattcgggggtttctcaacttgtggcaatattttgatggtgttcctggttttaactggatacatttatattctttaccacaatggtgtgcaattatgaattgtctataattttgtgtcacctaaatgtggtaaaacatgcaagaggacgacggaggaacttattttcatgagttttgtctta

SEQ ID NO: 66011 - DNA, 2221 bp, Oryza sativa
  Clone ID: PAT_MRT4530_67001C.1
ccagggataatcccactactggctactgcattcgcttatctcgctcgcgatgtcgctcgaaatccatgaagaggagggaggaggtacggcggcggcggcggcggtgaaggtgatgacggtgtcggggagcgggaagcgggggcggtacgtgcggcaggtgacggggcggcacaacgacaccgacctgcacgtggcggcccgcggaggggacgccggggcgctgcgccgcgcgctggacgaggcggcggcggccgtggccaccggggaggggagggaggcgctggaggaggtgcggcgggccgtggcggcggagcccaacgaggccggggagacgccgctcgtcgccgcggcggagagggggcacctggaggtggtaagggagctgctcaggcacctcgacgccgagggggtcgccgcgaagaacaggtcggggtacgacgcgctgcacgtcgcggcgagagaaggccgtcatgctgttgtgcaggaaatgttacttcacaataggttgcttgccaagacctttgggcctgcgaatactagtccacttatttcagcagctacgaggggtcacaccgaagttgtcaaattgttactagaactagatgattttggattggtggaaatggctaaagataatgggaaaaattccttgcattttgctgctcgacaagggcacgttgaaattgttaaagcattactcgagaaagatcctcagctagcaagaagaaatgacaagaaaggtcaaacagccttgcatatggctgtaaaaggaacaaactgtgatgtgcttagagcacttgtcgacgctgatccagcaattgtaatgctgccagacaaaaatggaaacaccgccttgcatgtagcaacaaggaaaaagcgagcagagatagttgctgttctcttgcgattaccagatacccatgtcaatgcactaaccagagaccacaagactgcgtatgatatagctgaagccttgccactctgtgaggagtcttctgaaataaaggatattttatctcagcatggcgcactcagatctagggagctgaatcagcctcgagatgagctccgaaaaacagtgacagagatcaagaaagatgtccacacacagctggaacagacaagaaaaacgaacaaaaatgtgcatgggattgctaaggaactcagaaagttgcacagagaaggcatcaataatgcaacgaactctgtaactgttgttgcagtactttttgccacggtagcctttgcagccatattcactgtgcctggtggaaatgccaacaatggagttgcggttgttgttcaggcagcctcctttagaattttcttcatcttcaatgctatagctctgtttacatcattggcggtggtcgtagttcagataacggttgtcaggggagaaactaagtctgagaggaaggttgttgaggtgatcaacaagcttatgtggctggcatcagtttgcactaccatttctttcattgcctcttgctatattgtgctaggccgccatttccaatgggcagcactactagttagtttgataggtggcatcacaatggctggtgttctgggtacaatgacatactatgtggtgaaatcaaagcgcatgaggaagataagaaaaaaagagaagatgtcaagaagaagtggatctagctcctggtatgataatactgagctctcagagactgagcttaaccaagtgtatgccttgtaagagaaaaggtctcctagattcagtctctgtctctgggattgatatgtacatgaaaattccagatatacacattaacagataacatagctcacagtatttcttgatttttacaattccttcctgtatcaaccaaccactcagaactaaatggaatacccattgtcccattgtgcaaggctccttcagctgcagaattttatggcaccaacgagctcaacctattgtacagtgagttgcatgtttttttgtttttgattttcattctattgccaactttcatgagaaaggatttttttttcttattctttctgtgcctacttatagtttgtgatgcgctcttcagttttcataatgtaacacagaacctgacacgttttagttccctttatgctattggtcatcttattcttacatgttgccctttgatgtaatttttacatactgattttatgttgtttcataaataaaattttactgtggatctaaaaaaaaaaaaaaaaa

SEQ ID NO: 66012 - DNA, 224 bp, Oryza sativa
  Clone ID: PAT_MRT4530_67002C.1
tggcgcccgtgcgtgcccctcccctgtttcccggtctccgccaccacgcgcgctttttcttctccaccgcatatacccccgcagagtggtgttgagttccacagagagtgagagagagcgcgcatggctctggctagggttagggttttctccttgccgcctccgcgtgtcgcgatgttcgccccgccatctttctccccgtagatcccgcctccggcgggggt

SEQ ID NO: 66013 - DNA, 470 bp, Oryza sativa
  Clone ID: PAT_MRT4530_67003C.1
gggccgtgcgggaagattggtacgagatgatgtgtgtgcgtgtgtgcctgcccatgccaaggaaaatgtaggtgttgctgtgctgatttgctgacgtgacacctaccatgtgtctgatggaagaccatgcaggaaatgcaaccatgtgtgaccccccatgtgtgatgatggatgttgaaagggatgaccaatggaaagcaggatgttgtggtgactgttgaaactgaggatgtgtgtgtggaccttgagcacgctgaaaggagggttgaggatgtgttgctgattgtgtgtgatgtgttgaatgttgagaaaaaggaagtgttagttaattcattaaggttatgcttataccatgtagaaggttccatcggaacaattattatttatttcaagctatttcggctctttcttaatcttcgaaaagcaaagaaatttcgtaatggaaaggtaggatgaaaaaaaaaaaaaaa

SEQ ID NO: 66014 - DNA, 177 bp, Oryza sativa
  Clone ID: PAT_MRT4530_67004C.1
atggcgctgcagatactcaacgccatcacgagggccaaggggaggagatgttcgcgcgggagaggatgtgtgatggaacggcagcggcggtgggtgcgcaagggccggagcggcggtggtggcggtggcaatcgggaggacgggagaccagatggctgggtgcagacacgctcctag

SEQ ID NO: 66015 - DNA, 733 bp, Oryza sativa
  unsure (1)..(733): unsure at all n locations
  Clone ID: PAT_MRT4530_67005C.1
cccgcgtccgacaggacagccaaacgaacagtaagtattatgcgacatgctcacctgcaattgcattaataataataatacagatggagaagggcacatgaccactgcagcagaccacaacgatccaccctgcttgttgcaaaatatcagctagcctttgtggtccgtgaatggtaataataccaacaagattgagacagtagatctggctcacgtgcctttgctgctaaattattcaccagggatcccagatgcgattcggatcactttttgattcgtagctcagcgtcagatcgaatatcatattacacatcacgtgatttgattcataacatatatatgctaattaagttgtaggttcatttgaataaggccgcccgggtagcataagcatctgctcagctttattgactgaataacgagaggctgaatgagttttgttttgcttgtcacctgtatataagctggctctcaacatatagatacgtactctatgatctgcttatatttttatatatgtttttgcaatttgtttgagcagatcaccgagaaattgtactggcagctggagacacgcaccaagaaactgcgctntacattaccatttacattgcttgccttccctgtctacctctggtacagaagtccgggcaagaccggatctcactttctgccgagcagcgatctgttcagccccagggaaagagtgacgtgattgtctccaccactgctg

SEQ ID NO: 66016 - DNA, 1341 bp, Oryza sativa
  Clone ID: PAT_MRT4530_67006C.1
atggcggcggtggaggcggagaaggtggtggcggagctgcgggagaggtgcgcgacgccggcgtcgctgctgcgggatgtggcggcggcgatggccggcgagatgggcgccggcctggagaaggagggtgggagcagggtcaagatgctgctctcctacgtcgacaagctccccactgggagagaggatggattgttctatggattggacctaggaggaacaaacttccgggtgctcaaggttcatcttggtggcagcaagaagcatgtcgtcaactctgaatccagggaagtcagcatcccaccacacctgatgtcagggacctcctcggaattgtttggtttcattgctggggaattaggcaagtttgttgctgaagaggaggagggtactgacatgccaaacggcaagaagaaagagctaggattcaccttctcttttcctgtgaggcaacgatctgtggcatcgggtacccttgtcaagtggacaaaggcgttttccattgatgatgcagtaggtgaagatgtggtggctgaactacaaacggctatggtgaaacaaggtctggacatgcatgtagctgcattggtgagtattgactggcttttacctttcataaacataatatatctacaatgtcagattaatgatgctgttggaacattggctggagcaagatactacgatgaagatgttgtcgcaggtgtgatatttggtactggcacaaatgctgcatatgttgagaaggcaaatgctataccaaaatgggaaggggagttgcccaattcaggggatatgatatatgagaagttaacatcaggaatgtatttaggtgaaatctctggaattttcggttctatagataactccaagctcaaaacttgtttccatctgcgattcaaggctgaccctaaaatatccgttaatgtggcgaacaggactccgcacatttctgcaatgcaccatgatgaaacacctgacctaaagatagtggctgaaaaattgcatcaaatcctagagattacacatacatccttagagataaggaaaatggttgtcgaaatatgcgatatcgtggcaaggagggcagctcggctggctgctgctggtgttgcagggatcctcatgaagcttggaagaaatggcggcatcaacaatcagcgctcggtcatcgccattgatggaggtttgttcgaacactacaccaaattcagggaatgtttggagagcacgttgggtgagttgctgggagaggaggcttccaagtcggtagccgtcaagcacgcgaacgacgggtcagggataggggctgcccttattgcagcctctcaatctcgatga

SEQ ID NO: 66017 - DNA, 638 bp, Oryza sativa
  Clone ID: PAT_MRT4530_67007C.1
cgatcatggctcggtttggggcggtaattcaccgcgtgtttctaccgctgttgctgctccttgtagttctcggtgcttgccatgtcacgccggcggcggcggcggcgggggcgcgcctctccgcgctcgcgaaggcgctcgtcgtcgaggcgtcgccccgtgccggccaagtcctgcacgccggcgaggacgccatcaccgtgacatggtcgctgaacgcgacggcggcggcggcggcggccggggcggatgccggctacaaggcggtgaaggtgaccctgtgctacgcgccggcgagccaggtgggccgcgggtggcgcaaggcccacgacgacctgagcaaggacaaggcgtgtcagttcaagatcgcccagcagccgtacgacggcgccggcaagttcgagtacacggtggcacgcgacgtcccgacggcgtcgtactacgtgcgcgcctacgcgctcgacgcgtcgggggcgcgggtggcctatggcgagacggcgccctcggccagcttcgccgtcgcgggcatcaccggcgtcaccgcgtccatcgaggtcgccgccggcgtgctctccgcgttctccgtcgccgcgctcgccgtcttcctcgtcctcgagaacaagaagaagaacaagtga

SEQ ID NO: 66018 - DNA, 325 bp, Oryza sativa
  unsure (1)..(325): unsure at all n locations
  Clone ID: PAT_MRT4530_67008C.1
ccttcaatacaacnacnacccnnnnncaccggcgcgccgccctcctcgccgccgccgtcgtcgtctctccggagggtgtgatcgatggcgccgtcgtcgacgtcgtcggagggtgcctccnactagtggttgccacccagccggctgccggagctggcgnacatggtccccctgacgcaagacgacaggccccacccgggggtggccatcgcctaccgggaccagttccccgaggccatggactactttcgagccctctacttagacggcgagctcaannttctctctcttcacctcaccgncgaggtcattgaccttaattccg

SEQ ID NO: 66019 - DNA, 477 bp, Oryza sativa
  unsure (1)..(477): unsure at all n locations
  Clone ID: PAT_MRT4530_67009C.1
atgctcaccaaggcggcgacggcgagacgacaacggggaagccagcgggacgggctcctcggggaggcaacggtgacggcggtccggcgacgggctcctcggggaggcaacggtgacggcgtggtatggttaggaggatgggagaaagcaggggcggcggccgaggacatcctcntcgttgcggagccgaaggaggcgacggcgcatgtcatcgtggacgggaccggcggcgaaaggcggccggaggcggcaaaagcagcggcgtcctcggtttgcattggaggtgggtgcgggagcggctcatgcggcgacggcgtgcggctggatgcggctggcggtgatgtagctcgggtcggcggtggcggtggggtttcggcaacggttaggggaagaaaggtgggggccggggtgcggtgtggagcggcgatgccggcggcgcaagcggcgcggagcggggacggcgggagcggcggctag

SEQ ID NO: 66020 - DNA, 982 bp, Oryza sativa
  unsure (1)..(982): unsure at all n locations
  Clone ID: PAT_MRT4530_6700C.1
acactagttatatatatattcactctcaactctcaagtaaagagttgttatacaaagggagttacaaaaggtgattgcaaagattacaaaagaactgtcactggagaggcagtaacaactaaactaagaggtgcttactactactactactactaatcatcatctttatattaattaaggccactacatactactagtaggggatattatataagattatacatacatatatagaacaaaagaaacaataggtcaatgacaagagcctcatcttccatcaactggcaagctcacttcttctgtacaccagacgcctctagctgcagtaaaaatcccctagggctctcacttcccactgacgagagggctccaccttgnctctctttttctttctttttttttcaactctcaaataattaaccttatttttttttatactctcccactctcactgctgtgtcctacaatatcactaacctagcaacgtagtatgatcacactctcctagcttaatttaatttaattctttcagaaagaaagaaagaaccaatcttaatcaacaacgaatttaaccaaggggattgatggatcgagtagcagtagcaacggtggccggcggcggcttagaagatgacggagatgcacctccggtggcacgccgtgctcttcttggttggcttcgtcgcctccttccacaccctggcaaggtccttggcggcgcgcatggcgtcggcggaggcgccggagaggccgcggcgggtgaagccgacggcgtacagccccgactcacccttccatccgttggggaacgccgtctttgggtacccgtccttgttgaagaagtcatttcactggagccattggggcacattgctgcggtagccggtggcgaggacgacggcgtcgagggcgatgacgcggccgtcggcgagctcggcgaagcccttgccgaagcgggcgacgccggggacgacggtgatct

SEQ ID NO: 66021 - DNA, 771 bp, Oryza sativa
  Clone ID: PAT_MRT4530_67010C.1
gcacgagggcgagccagagcaacgcatgcaagcaagcaagcagctagctcgcgcagcggcaatggcgatcgtgggcgaggagtactgctccgcggaggagcgggtgctcacggtgcgcaagacctcccacttctcccccggcgacggcttcgcggcctacgaccaccgcaccggcggcctcgccttccgcgccgacacctacggccgcggccacggagggggagccgcctccgccggcgagctcgcgctcctcggccccgccggagaggcgctcatcaccgtgcgccgccgccgcccgtccctgcaccaacgctgggagggctacctcggcgcccgcgccgacggccagaagcctctcttctctgctcgccgctcctccatcctcggcggcgccgcggccggcgctgtcgtcgagctcctcgccccgctccccgcctccttctcgtctacccacgctgctgccgccgagctcctccgcgtcgatggctccttcccgcggcggtgctgccgcgtggtggcgcccaaggccgagtcaggcggggaggcggcggtggtggcagagatcaggaggaaggtggacgagggggcgcgggtggtcatgggcagggacgtgttcgtcctgcgggtgggcgccgggttcgacgcggcgttcgccatggcgatcgtcctcgtgctcgatcagatcgccggcgacgaggccgacggcaacgccggagaggaaaccaaccgcgccatgatttggtgatggaacgaaccgtgcgcttcttggtc

SEQ ID NO: 66022 - DNA, 1429 bp, Oryza sativa
  unsure (1)..(1429): unsure at all n locations
  Clone ID: PAT_MRT4530_67011C.1
atgggtgaagggcaaaaggggctggcggtggtggaggccatcgacatcattgctggacagcagcccaccgatctgcgagatccccgacgggtgggcccggcgaccccacctgtcaggctcttcctctaccttcggcttcccaggcagaagccgccatggacggtcgttgccgcccacgtcgccgccaattccgggtcctcccgcctgcgccctcgcgcctgaaccgcatgaaatcggttccccaccacctcctccaccaaatcccccacttttccccaattttcggcgccaaatcgagtccccactccgcgcatgttgacctccacgtcgccggccgttaccgccccaaattcgccactccccggcctccccgttgnnnnnnnnnnnnnnnnnnnnnnnnnnnnnnnnnnnnnnnnnnnnnnnnacggcctccccgatgatccctggcgcgagataaagaaccaccgctgctccctaatgcatataaacaccaaggacgagatcaccgtgccccttcacggtatccacgggatgaatccctctgtccgccgaatacggagaagtcagtacagcttatagccgcggctcaggcagttcccgctccgagccgcatgcgcggccggcatagccgctccacaccgcacaccggcccccacctttcttcccctaaccgttgccgaaaccccaccgccaccgccgacccgagctacatcaccgccagccgcatccagccgcacgccgtcgccgcgtgagccgctcccgcaccctgccaccaccccaaccagctgcgctgccgcgagagcaagcctgtccgccactcttctccaccaaaacggcgcccaaacaccacctccactgcaaaccgaggacgccgctgcttttgccgcctccggccgcctttcgccgccggtcccgtccacgctgacctgcgccgtcgcctccttcggctccgcaacgacgaggatgtcctcggccgccgcccctcttcaccggaaatccaccggagttccactcccctcacgcgccgatgagctccccgccgtcaccgttgcctccccgaggagcccgtcgccggaccgccgtcaccgttgcctccccgaggagcccgtcccgctggcttccccgttgtcgtctcgccgtcgccgccttggtgagcatccctcctctcctccctgctcccttccgccgcttgccgtgccgccgctcaccgcgccgccgctcgccgtcagtggccgatggccgtgcgctgccgctgccggtggccgtccggccggttcgtcgccgctgcgctccgcgcccgcaccactgccggctgccgcctccctttggtcccagccgcagtcgatctgggccgtcggatcggcctcagtctccacccgggccgcccgtgtgtctgttttactgtttgctcaataaaatgttttacaac

SEQ ID NO: 66023 - DNA, 1368 bp, Oryza sativa
  Clone ID: PAT_MRT4530_67012C.1
atgcttcttccggccgccgccgccgctgccggcggcgtccaccgcctcaaatctctctgccccgtgcgccgcatctcctccctcaaggttccctggcgccgcgacgccgccctcgacgccgccatcctccgcgaccgacggtaccgcctcgcctcccgcctcgtccgcgaggtgctcctctccccgggccgccgcctcctcctccgcttcctcagcaagcggcagcaacgaatccaccacacggagctcctctggaccttcttccgccggtatccgttcctcctctccgtctcgcctcacccggggaccgtcgcctccccttccccgcacctcctctccttcctcgagttcgcctcacgccaccacgcgctccactcgccgctcctcgcctccaggctcgccaagctcctcatgatctcctccacccgcgccctccccgtccccaagattgccgccgccaagcgcgatttcggcctccccgacgatttcctgacctcgctggtcccgaggtaccctcacctcttccgccttgttggagatccggggcctgacgcgtccggcaacgcgtttcttgagctggtttcgtgggatgatcagctggcgaagtcggtgattgaattgagggctgacaaggaggccgatgtggttggcattcggccgaggccgaattttacggttaaattgccgaggggattctatctcaagaaggagatgagggagtgggtgagggattggcttgagttgccatatgtatcgccctacgccgatacgtctgggcttcacccggcgtcaccggaagcagagaagaggttgattggtgttttacatgaggttttatccttgtctgtagagcggaggatggctgtaccaattatagggaagttctgtgatgagtttaggctgtcaaatgcgtttgctaatgcgttcacgagacatccggggatattctatgtgtcgttgaagggtgggatcaagacggcggtgttgagggaagcatatgatgagaatggcgagcttgttgataaggatccaatgattgagctgaaggagaggtttgtggcaatcatggatgaggggcatagagagtatttggaggagttgaggaagaagagggaagagttggagaaacagagactgcaggaggcttataggggtgccaaagttggcacaggtattgaggatgagatggaggaggaaggcactgatgagtcagatgaagatgatgattcagaagaaggagaggcccttatgacctggggagcagtggccaagttgactcgatctggggttggaaatggaatcgcagcatttgttttggaacctctaaacagtctgtcaagacttgaggatattctttgtgattactag

SEQ ID NO: 66024 - DNA, 1036 bp, Oryza sativa
  Clone ID: PAT_MRT4530_67013C.1
aaccccaccctcccgggaccccacccgtcccctccccctccccttgcctacctctatttctgccctaatctcaatgctcctcaatagcattgcaatggtctcaacggcactacagcacctcgatctagagcttactataggtccatataaatgaattacaataaggattgcaaaaagatcttcaacttgaaacttctatttcttcttgtcagtagtaccagcagacctcatcttcctgatgacacccgccatctcctctctcttcttctttgctctcttgtgggtaccgagctttctcttagcgaccttcagtgcacgcttgtcctttccaaccttcaggatctcggtgattcgtttcttatattgtgctttttttattttttttttttttttttttttttaagcaaatttaaggtggcaaaccatgcattgaaaggatcaaaaacacaagacaggaggtttttaacacagaactaacaccatgatgtttagctggataatagagtgcaattctagtagtagggttctacaagagtaaactcaacaagacaatattgccatggacttcatgaacttggagatactctatttcttcttctcggtgtgagcgtgaccgccaccagacctcatcttcctgaggacaccagccatctcctctctcttcttcttggccctcttgtgggtgccaagctttctctttgccaccttcagtgcacgcttgtccttgccaactttgagaagctcagtgatacgcttctcatagggagcaaatccagcaacctccctgatcaagttcctgacaaaggtcaccctcttggtggatttccccttgcggtcggacgggcgaggcggcagctcgcgcttggtgacgacgtggcccttgttgatgcccacgaagagcccggacttcggctgcgacggcgccatcggggagccctttttccttacctgggagaaatgaagcggcggcggctaggccgcgccggcgtttcccggccggcctcgagggtcccaatcccctataggatctataccc

SEQ ID NO: 66025 - DNA, 176 bp, Oryza sativa
  Clone ID: PAT_MRT4530_67014C.1
tggagtgcctccgcctgtgctactgcccgccgcggcaacatcctgcctcccttgaccctccgctgccagtggccctctatcttggcgtcgctcacctcgctctcggcgttcctgccctccgcgtgtcgctcctcgcgcccctcgcctatgccctctcaatgctagagtctgttacc

SEQ ID NO: 66026 - DNA, 168 bp, Oryza sativa
  Clone ID: PAT_MRT4530_67015C.1
atggacccgcctctcctcaaccgcaggccacgctcaccagatgcaacgtcctcatcccgcatgcactgctggagggcaatatctagaggcgggcgtcaccaatctggagccacgctcaccagatgcaacgtcctcatcccgcatgcaatgctggagggcaatatctag

SEQ ID NO: 66027 - DNA, 414 bp, Oryza sativa
  Clone ID: PAT_MRT4530_67016C.1
ataggtggtttttcaactttttttttcttggtctatttgtaaattgtgactgtttcaactgttgtttatcctcgaagccacaacaaaaaaattaatgattaactttttaccaggacaggccggggaaactgcgacaaaacaaaagctttaaaaaaaaaatccctaaggccccaaaaaaagtacaaaagagagcccccagaataactcatcaggacttattaaaagcgggcgcagaaaaacccaagagaagaaaaaataaccccttaattacggagctacgcacttgatacctataattaaacagaaagggctatatctggtatttggtggcccaaaaaaaagatcgctgttgctgcagcaaaataaagtggggggccaaaacaagggtttaaaaccgctggagggacccagagg

SEQ ID NO: 66028 - DNA, 379 bp, Oryza sativa
  Clone ID: PAT_MRT4530_67018C.1
agaataaaaaaggggaaaagaggtataccctctatccttggatgtacgttgtatgccgatacggtataccctgcgcgtatacggatagttcctttatacgtaaggaaatctatcacgtgatagaaacagaatccacagatgggaggagtcctactcggataagactaggtctttaccatatcgtgaggggtccaatatctccgagtcctacttggagatcaactaacccgtggtataaaagggaccccctgagcaagacctaaggcatcgaatctcaccgccaacacatccaccacagcctacgaagccggagcctacaggagccaagtcatcgggtgatctagtcgaaccaactcgactatggtctccatcatataat

SEQ ID NO: 66029 - DNA, 382 bp, Oryza sativa
  Clone ID: PAT_MRT4530_67019C.1
gaccccaaaagtcctcattgattgatagcaatatcatagaagcagggacaggaattaagatttaagaccatccccaagaaggatcgcagatccaactacaccgaattgatccaagaactccgcctaatccacccaaaccatcgggcgatggttattttaccaccacgacacgaacttataaaaagactaacaccaccaccacctcctacttatttagggactagccgactcaggacgactgatactggctaaaggcgatggggaacagcacagatctaggagagccggtcgcaatcggccttgacgaccgagttggcggagctccccgcgtgggatcccaccttctcgacggacttgaggaactgcatgcactcgacgacgc

SEQ ID NO: 66030 - DNA, 2253 bp, Oryza sativa
  Clone ID: PAT_MRT4530_6701C.1
atgcttgaaccggtcaaggctgagattaaaagattatatgatgctggttttattcgtcctcgccgatatgctgagtgggtttctagtatagttcctgttatcaagaaaaacagcaaggtcagggtatgcattgatttccaaaatttgaataaggccaccccaaaagatgaatacccaataccagtagccgatcaactagttgatgctgcttcgggacataagattttgagttttatggacggaaacgcagaatacaatcaaatttttatggccgaagaagacattcataagataacttttaggtgtcctagtgcaatcggcttatttgaatgggttgtcatgactttcggcttgaagagtgctagagctacatatcaaagagccatgaattacatatatgacgatctaatcggctggttggttgaagtctacattgatgatgtggttgttaagtccaaagaaataaaggaccatatagcttatttgaggaaggttttcgagagaaccagaaaatatggtctgaggatgaatccgacaaaatgtgcttttggtgtatcggctggccagtttttgggatttcttgtccatgagagggggatcgaggtaactcaaaggagtgttaatgcgatcaagaagattcagcctccagagaataagacagaattacaagagatgatcggcaagattaattttgttagaaggtttatttctaatttgtctggaaggttgaggcattatctactgtccaacgagtgtactgttgtatgcaaggccgatgttgtcaagtacatgctatcggctccaatattgaaaggaagggttggaaagtggatatttttcttaaccgagtttgatcttcggtatgagtcgccgaaggcgattaagggacaagctatagctgattttattgtggaacatcgtgatgattcaatcggctctgttgaaatagtgccatggactttattctttgatggatcggtgtgttctcacggttgtggtatcggcctagttataatttcccctaggggggcatgtttcgagtttgcttatactattaaaccgtatgcgactaataatcaagctgagtatgaagcagtgctcaaagggttgcaattactcaaggaagttgaagccgataccattgaaatcatgggggattctttgctagtaatcagtcaattggcaggagagcatgaatgcaagaatgatacattaatggtttataatgagaagtgccaagaactaatgaaggagtttcggctggttactttaaagcaattctctcgagaacaaaatattgaagctaatgatttggcccaaggggcatcaggatataagccgatgatcaaagatgttaaggttgaaattgcagcaatgacagctgatgattggagatattatagggggtgtcaggattgtcagaagtttggggcaattcagcgagctccggcatcggctatgaatcctattattaagccatggccattccgaggttggggaattgatatgatcggtatgataaacccaccatcgagtaaaggacataagtttatattggtggcgactgattatttcaccaagtgggtggaggcgattcctttgaagaaagttgattctggggatgcaattcaattcgttcaagaacatataatctaccgttttggtattcctcaaactattacaactgatcaggggtcaatcttcgtgtctgacgagtttgttcagtttgccgatagcatgggtatcaaattattgaattcttcaccttattatgcacaagctaatgggcaagctgaggcgtctaataaaagtttgatcaaattaattaagcggaaaatttctgattatcctcggcagtggcatactcggttggccgaagcgttgtggtcttataggatggcttgtcatggatcgatccaagtccctccttgcaaatttgtttatgggcatgaggctgttttgcggtgggaggttaccaaggataaggaacgtattgctcggcattataataagaaagtggtacctaaggatttttcggaaggagaacttgtatggaaattgattgtgccgattggtactcgtgatagtaaattcggcaagtggtcgccgaattgggaaggaccgttccaaatttataaggttgtgtctaaggaagcatatatgttgcaagggcttgatggtgaagtctatgggcgagtgcccaatggcaaatatttgaagaaatattacccaagtgtttgggttaacgcatga

SEQ ID NO: 66031 - DNA, 166 bp, Oryza sativa
  Clone ID: PAT_MRT4530_67020C.1
tgacaccgccctgaggcgtgtctggaatgacacgacatgcctacatgtatggagctggtgacagcctgcaaaggttacccggtgcccgggatatatgcaccgggtgcagacaccaacgcgtgcccgatatgtgatgcccggtggtgtggccacccaatgatgtgtt

SEQ ID NO: 66032 - DNA, 399 bp, Oryza sativa
  Clone ID: PAT_MRT4530_67021C.1
tctcgcccatccaatcccgacagattgcgcagggcgtgcggctggcgtgctcgccgccagagcaggcgggggtcttgtgtgcgccggcgccggcccgcggcgacgtcgtgtcctgcgtgcctcgtgcgtcgatggagatgctgggggcgcccgcggccgggacgcagggtctgtaggtcgtgctgcggccactgcagggctgtccggcacgctggcgctggcccggcctgatccggcgtcatcgcgcgctagggcatggactcgcagtaagcaggtagcaggtacagcaactagcaagctcgcgcaggtacaggtagctgctacatctgtgcgccgctctgtgctgtcttcatgtctgtcgagttatgggcctatctgtttgttttaaacttctttttt

SEQ ID NO: 66033 - DNA, 144 bp, Oryza sativa
  Clone ID: PAT_MRT4530_67022C.1
atgggccttggcattgggccacaactactgttgtggctcgatgcccccctcaaaaagaacgacagctcaagaaaagcgaatccaacatgggctagtacaagagtggcggatctagtgccgacgggcttgagagttgcattgtga

SEQ ID NO: 66034 - DNA, 1162 bp, Oryza sativa
  Clone ID: PAT_MRT4530_67023C.1
tctcggcgggtacaccatctctccattccgtattccttgtcgagatccaccaaccgttctcgagtgatcgagaaggcacagaatatggtcttttgtttctacaggatccgacaaggccttatcggctctgggcgtccccagccgaagttcccttaggttcctcggaggccttgtcaagacggcgtaaagggacagtaggataggtttcaacgctaggtgttatcgtggcaagggatctctgggtaaaacccttggtgatattgtgtatctgatgtcaactttgttggagtagaggaccaggtggtagtcgcaactcgaccactagaagtagaaatagtgggagaatcgctacaccgctggtcgagaaccagatgtagtctaaactcgaccactagaagtagaaatagtgggagaatcgctacaccgctggtcgagaaccagatgtagtctaaactcgaccactagaagtaaatgtacgagagatcgctacgattgactggttgagaaccagtgagtaggtgtctgttttactagttcgagaactagcgagtgagtagaattatctctcgaacaccaatggaagttgcggtgcaagagattgctatgtactggttcgaggaccagcgagcgagtagaattatctctcgaacaccaatggaagttgcggtgtgagagattgctacgtactggttcgagaaccagcgagcgagtagaattatctctcgaacaccaatggaagttgcggtgtgagagattgctacgtactggttcgagagccagcgagcgagtagaattatctctcgaacaccaatggaagtttccggtgcgagagattgctacgtactggttcgagagccagtgagcgagtagaattatctctcgaacaccaatggaagtttcggtgctagagattgctacgtactggttcgagaactagtgagcgagtagaattatctctcgaacaccaatggaagtttcggtgcgagagattgctacgtactggttcgagaactagtgagcaagtagaattatctctcgaacaccaatggaaattgcggtgcgagagattgctacgtactggttcgagagccagcgagcgagtagaattatctctcgaacaccaattgaaagtttgctgtgccgagaggatgctacgtacttg

SEQ ID NO: 66035 - DNA, 261 bp, Oryza sativa
  Clone ID: PAT_MRT4530_67024C.1
ctgtcttcaggacccactggagccaccctcgtcgacgttggccacccggcgatgaggccgcttgtcccttgatatggggggatcgatcgaggatctgtgggctccgtgctgtactgacgacatgtccagggagcggccctccatccggttggttgattaattagggagttggttgacgttatatacgctagctgatcctggtctcgttggcctgcaccgagtgtcaggccttggcccttggcttgtgtgtcgctgtaagtc

SEQ ID NO: 66036 - DNA, 277 bp, Oryza sativa
  Clone ID: PAT_MRT4530_67025C.1
gaagctccggctccactcccacaggcagctcaactggggtataagccaaacgtcctctccttctggatcatttttcttcaactgaggttgattgattattgcaagatgagtacatggaatactgcgcaagccacacagcaaatatacaagtgcacaaggattccgaaggacggcatgatataagctcatttgcaaaagtagcatttagcaaacttttaggatgacgcactcacgaaccttcgcaacgacggaaacgacaagctaacacgcaaaacga

SEQ ID NO: 66037 - DNA, 1519 bp, Oryza sativa
  Clone ID: PAT_MRT4530_67026C.1
tctcggcgggtacaccatttgttcattccgtattccttgtcgagatcgatcaaccgttctcgagtgatcgagaaagtgcataatatggtctttcgtctctgaaggatccgacaaggccttatcggctctgggcgtccccagccgaagttcccttaggttcctcagaggccttattaatacggcgtaaagggacattaggataggtttcaacgctaggtgtcttttgtggtaagggatctctgggtaaaacacttggcgattttgtgtatctgatgtcaactttgttggagtagaggtaatggaagaatcgctacacctctggtcgaggactaggtggtagtcgcaagtcgaccactagaagtagaaatagtgggagaatcgctacaccgctggtcgagaaccagatgtagtataaactcgaccactagaggtaaaggtagtgggagaatcgctacaccgcagatcgagaaccaagtgtagtttaaactcgaccactagaagtcagggtagtgggagaatcgctacaccgctagtcgagaaccagatgtagtctaaactcgaccatggttcgaggaccagcgaacgtgtagagttatctctcgaacaccaatggaagttgcggtgtgagagattgctacgtactggttcgaggaccagcgagcgagtagaattatctctcgaacaccaatggaagttgcggtgcgagaaattgctacgtactggttcgaggaccagcgagcgagtagaattatctctcgaacaccaatggaagtttcggtgcgagagattactacgtactggttcgagaaccagcgagtgagtagaattatctctcgaacaccaatggaagttgcggtgcgagagattgctacgtactggttcgagaactagtgagcgagtagaattatctctcgaacaccaatggaagtttcggtgcgagagattgctacgtactggttcgagaactagtgagcaagtagaattatctctcgaacaccaatggaaattgcggtgcgagagattgctacgtactggttcgagagccagcgagcgagtagaattatctctcgaacaccaatggaagtttgcggtgcgagagattgctacgtactggttcgagaaccagtgagtgagtagaattatctctcgaacaccaatggaagtttcggtgcgagagattgctacgtattggttcgagaaccagggagcaagtagaattatctctcgaacaccaatgaaaattgtggtgcgagagattgctatgtactggttcgagagccagcgagtgagtagaattatctctcgaacaccaatgaaagtttgcggtgcgagagattgctacatactggttggagaaccagtgagcgagtagaattatctctcgaacaccaatggaagtttcggtgcgagagattgctacgtaatgattcgagaaccagggagcgatttccgtataagacgtggtatgtggtggcatcatgtgaaggagacttatctctaatgaccgatgattcttctc

SEQ ID NO: 66038 - DNA, 655 bp, Oryza sativa
  Clone ID: PAT_MRT4530_67027C.1
tgttcgatctatcccaatcacttggtttaaatatatttcgagaagaggattacatatcgttgatatctcgttttccttgtttttccttcttgttgattgcaggatcaaatcaactggcacgtctttgaacccaagagcaagatttaggactggttcgagaaccagcgagagtagaattatctctcgaacaccaatggaagttgcggtgcgagagattgctacatactggttcgagaaccaacgagcgagtagaattatctttcgaacaccaatgagagttgcggtgtgagagattgctacgtactggttcgagaaccagcgagcgagtagaattatctcgagaacaccaatgggagttgcggtgcgagagattgctacgtactggtttgagaaccagcgagcgagtagaattatctctcgaacaccaatggaagttgcggtgcgagagattgctacgtactggttcgagaaccagcgagcgagtagaattatctcgagaacaccaatgggagttgcggtgcgagagattgctacgtactggtttgagaaccagcgagcgagtagaattatctctcaaacaccaatggaggcgctagagttggtttattacatgtgcatctcatgtgtccgtataagacatagtatgtggtgggtc

SEQ ID NO: 66039 - DNA, 1056 bp, Oryza sativa
  Clone ID: PAT_MRT4530_67028C.1
atgactactccgggcttaccaaatttcactgttaacaacagctcccccacccagctggcaccgacgacaacgatgttgctaccgtggcctgaggacaacaacaatggcgacacgatgttcatctttcagggcaatccttggtggacgcggcagggcatcctgctagcatatgccgtgtcactgacggccactgaccaccacctaacacgggatgtcgtgcgagaggcggtagtcttcctcctcgagttcatgcccggcaagatcagagatagcgctttcgtctctcctgacagtatccggagacaccgtaggggactaaccgtgcttatccttgaagtcgatatccggcgtcttgtcttggctcaagaaatttatctcggcgggtacaccatctcttcattccgtattccttgtcgacatccaccaaccgttcttgaccttgtcgtcagagaatcgttctcggaggataaggctcttggacctttgacctgcctcggatccgacaaggccttatccgctctgggcgtccccagccgaagttcccttaggttcctcggaggccttgtcaagacggcaggtaatgggagaatcgctacacctctggtcaagaaccaggtgtctctcgatcatttgaagtcgtggtgcgaggaccgttgcgttgctgctgtagtcgtacctcaaccatctgaggttgcggtgcgagagattgctacgtactggttcgaggaccagcgaacgtgtagaatcatctctcgaacaccaatggaggttgcggtgcgagagattgctacgtactggttcgaggaccagcgaacgagtagaattatctctcgaacaccaatggaggttgcggtgcgagagattgctacgtactggttcgaggaccagcgaacgtgtagagttatctctcgaacaccaatggaggttgcggtgcgagagattgctacgtactggctcgagaaccagcgagcgagtagaatcatctctcgagcacctatggaagtttgcggtgcgggagattgctacgtactggttcgagaaccagcgagcgagtag

SEQ ID NO: 66040 - DNA, 232 bp, Oryza sativa
  Clone ID: PAT_MRT4530_67029C.1
ggggcaaacctcaaccgatcacatatttttcatccctaattacttcccgctccggtagcccaacaaactttacctatggacttgagatttcaatctcagattaatcattttaatatatacagccgacatgaaaaacaaatcctttaaaaattgcacacaacaaatgaaccgggaacaataattgataaaccatgacaccttaaatcaaacacttaccaacattaaattgttt

SEQ ID NO: 66041 - DNA, 404 bp, Oryza sativa
  Clone ID: PAT_MRT4530_6702C.1
gatcagatcatactttggaggggagtctgcggctgcagcattaaagtctcgatccagagaaccaacgaggatgacggacacaagtagataacctagagaactcctccatcgatcacacacacccacacagttcaggtgcatacatacatgcactgatgaaactgcacctggcgggtacgcgcgcgactactacaagggtgcacatggggcagaggatgcgcccaatctcatcgggtacgcgcgctcacttgccggggacgaacttggcggcgtatgcccaggcgttgtgggcgacggggtcggcgacgtggtcgaagaggttctcgatggggcccttgccggtgacgatggcctggacgaagaagccgaacatggagaacatggcgaggcggccgttcttgagc

SEQ ID NO: 66042 - DNA, 1345 bp, Oryza sativa
  Clone ID: PAT_MRT4530_67030C.1
ctccctctccattttcccctctctcccgagccttcccgtgcccgaaatcctccgcgccaccgcgctcccactccgctgcccgccggcgatcttcagccgccaaccgccgccgccctagccaccgccaagctgcgccgccgctgccgtcggcatcgccgtgatccaccctggcctccactcctttttccccttccacccccgcagcgccattcccaccgcgaggccgagccatcgtctcagttaccgcctccagccaccacttcccaccgctcccgtcgccgccgcactgtgcctccaccaccgctagcctcaccgcctcaagggcaagctcgacccccgctcggttgccgcctcccgcgcctcctcgattgacgccgacctgcgccgtcgctttccccggcactgcagccctcgtgggtagctcggccacccctctttcctccttgttccctaggtccttccgaccgccgtccgctggttcccgctcgtggaacaccgctggaccaccgttgccgtgccaccccgaggagcccgccaccagccgcctccttccgccgtaccgcccggtgagcccccatctcctctccctttttcccttgcaccggccacctcccgtgcccgccgccgtgctgcatcgtgtcgccggtggccgcgcccagccagtggcgaagcttgtctctactaacgcacaatgtggctgtgtgctggtcagatgatggagatggatgatgtcgttgttggcttgagaaagtgtggtatgacgcttgctcctggttagctggtagcctggcgaccggcttcctgcctttctggctcctgcgggctgcggctggagcaatgcaggtgctaagcaagcaggggcaacgccgacggcgagcgccagtctatggccggtctgaccgactctcctggcaggtctaaccgacggcttgtagccggtctgactgggcctagaggccgatctgacctgggggcattagagatgagtaggaaaattgagagcgacacagtaacttccacttcaaacaaaaatatcaagaatcattgcttagttcctggaaaacaacagcagccgaagtggataccttccagcttatctcgctctcaaaagaggaggctacaacgttttcgggccataggtcaaaaagaaaaggaggccgaaaacataagggaccaaacatgtaaagatttagagcctcgaacagtacataagcaagtgtggagacctaaggagtttattggaattcatgtgtgtgaggcttatgactttggtgattcattattgatcatacttcaagtggctaagtgttttgataccttgattattgtttcaaaagccacttga

SEQ ID NO: 66043 - DNA, 333 bp, Oryza sativa
  Clone ID: PAT_MRT4530_67031C.1
gcgcagcggaagaagacgctgaaaagtcgaaggaactctcgcgaagtagcacgcgtcgatgtaaaggaagtagtcgatcgcaccggctcgaccttctcctccttgtgcgtactcctcgccgtacttccacgccgatcagcaccgcaaaccaacggcgcctctaccggatccatcactcgggcctccaaggcccgtaggactcctattcggatctctatcttaagttcatatatactcggctgtaacccgaaaactccttttcggtccacgcgtcaacagcggcccctagtagaacgtattgacccaccgggcatacataaagatcatatcggc

SEQ ID NO: 66044 - DNA, 333 bp, Oryza sativa
  Clone ID: PAT_MRT4530_67032C.1
gcgcagcggaagaagacgttgagaagtcaaaggaactctcgcgaagtagcgcgcgtcgatgtagatgaagtagtcgatctcaccggctcaaccttctcctcctcgtgcgttctcctcgccgtactcccacgccgattagcaccgcaaaccagtggcgcctctaccggatccatcactcgggcctccaaggcccgtaggactcctatttggatccctatccgaagttcatatatactcagctgtaacccgaaaactccttttcggtccacgcatcaacagcggtccctagcagaacgtattgacccaccgggcatacataaagatcatatcggc

SEQ ID NO: 66045 - DNA, 203 bp, Oryza sativa
  unsure (1)..(203): unsure at all n locations
  Clone ID: PAT_MRT4530_67033C.1
ggacggactgccgttttggtcggggttttagcgagcgcgtgggaggcgcaggacgacgcgccggcgcgtcgagaagaggcgcgnagaccagaccagacccgtatatgcttctagcccttctcgatctggtggtagcgtgctcctcgtctgcgtcgtcgcgcgagcgtcctnctccccctcgtctgcgccgcgatctatgacca

SEQ ID NO: 66046 - DNA, 333 bp, Oryza sativa
  Clone ID: PAT_MRT4530_67034C.1
gcgcagcggaagaagacgctgcaaagtcgaaggaactctcgcgaagtagcgcgcgtcgatgtagaggaagtagtcgatcgcaccggctcgaccttctcctcctcgtgcgttctcctcaccgtactcccacaccgatcagcaccgcaaaccagtggcgcctctaccggatccatcactcgggcctccaaggcctgtaggactcctattcggatccctatccgaagttcatgtatactcggctgtaaaccaaaaactccttttcggtccacacatcaacagcggcccctagcagaacgtattgacccaccggacatacataatgatcatatcggc

SEQ ID NO: 66047 - DNA, 224 bp, Oryza sativa
  Clone ID: PAT_MRT4530_67036C.1
gtaaacgttccaaaatcaatatagcagccgcgtgtacagctactactactcttttcttctgctctcctcttgtcttctctactactgctctcctcttctcttccctcagcggacaaccggaggcagcggggtcacgggcgagggtttcgggcggcgaggcgcggcggctgtgtccctggcggaggagctacagccgcggaccgtggcggtgctgtcagaggagc

SEQ ID NO: 66048 - DNA, 333 bp, Oryza sativa
  Clone ID: PAT_MRT4530_67037C.1
gcgcagcggaagaagacgctgagaagtcgaaggaactctcgcgaagtagcgcgcgtcgatgtagaggaagtagtcgatcacaccggctcgaccttctcctcctcatgcgttcttctcgccgtactcctacgccgatcagcaccgcaaaccagcggcgcctctaccggatccatcactcgagcctccaaggcccgtaggactcctattcggatccctatccgaagttcatgtacactcggttgtaatctgaaaactccttttcggtccatgcatcaacagcggcccctagcagaatgtattgacccatcgggcatacataaagatcatatcggc

SEQ ID NO: 66049 - DNA, 345 bp, Oryza sativa
  Clone ID: PAT_MRT4530_67038C.1
gcatccaactgaaatgacactattgccaaactcctgaaacggggggactggaaaacccgtaagacctacattcttattgaatgctacaacaaatggaactacaagctatatatcgtacaatgtcatacattcggcagaaagcaccaccccttctgacggatgttttttatctaaaaaaacacaatggatattgtataattcagactaatcatatcaaattaactacatgcgtagaatcccgaactatacaagggagcaggaataaacattatcataacgaatgacaaacaccttcaatagcatgtagtcaaccaaattatgctaatacattctgcctatatgaat

SEQ ID NO: 66050 - DNA, 2532 bp, Oryza sativa
  Clone ID: PAT_MRT4530_67039C.1
atgcgcttcccactgcgccgcctcctcatccgccgcgtcgagctcacgccgccgccacggccatgctgccttcgcaccaccaccttctccaccacggccgccgccgcctcccccgaccgccgcctcctcgccgtgctccgcggctgcgtctccccgtcgcacctctcgctcggactgcaggtgcacgggcgcgccgtcaccgcggggctccacgccaccgacacggcgctccagacccgcctcgtcggcatgtacgtcctcgcgcgccgcttccgcgacgccgtcgcggtgttctcctcgctgccacggggcgccgccgcttgcgcgctcccgtggaactggctcatccgcgggctcaccatggcgggggactaccgctccgcgctcctcttctacctcaagatgtgggcgcacccctccgcgccgctcccggacagccacaccttcccctacgtcgtcaagtcctgcgccgcgcttggcgcgatcgctctcggccgcctcgtgcaccgcaccgcgcggacgctcgggctcgacggcgacatgttcgtcggcagcgcgctgatcaaaatgtacgccaatggcggcctcctctgggacgcgcggcaggtgttcgacggaatggcggagcgggattgtgtcctgtggaatgtgatgatggacgggtatgtgaaagctgggagcgtgtcgagcgcggtggagctattcggggacatgagagcgagcggttgcgaacccaatttcgcaaccttggcatgctttctatctgtttctgccacagagagtgacttgttctttggggtgcagctccacacgcttgctgtgaagtatgggttagaatctgaggtggcggtggcgaacacactggtgtctatgtatgccaaatgcaaatgcctggatgatggctggaagttgtttggcctgatgccgcgtgatgacttggtgacctggaacgggatgatatccggatgtgtgcaaaatggttttgttgatcaggcattgcttttgttttgtgatatgcagaagagtggtattcgaccggattcagttacactggtgagcttgctaccagctttgactgacttgaatggtttcaatcaggggaaggagcttcatggttatattgtcagaaactgtgtgcacatggatgtattcttggttagtgctttggtggatatctatttcaagtgcagagcagtgaggatggcacaaagtgtctatgattcttctaaagccattgatgtggttatcggcagcactatgatttctggttatgttctaaatgggatgagtcaagaggcagtgaaaatgttccgatatttgttggaacaaggcatcagaccaaatgctgtagcgattgctagtgtgttgccggcctgtgctagcatggcagctatgaagcttggtcaggaactccatagttatgctctgaaaaatgcatatgaaggaaggtgttatgtggagagtgcactaatggacatgtatgctaaatgtggcaggcttgacctgagccattatattttctctaagatatctgctaaggacgaagtgacatggaactcaatgatttcaagctttgcacaaaatggggaaccagaagaagcccttaaccttttccgtgaaatgtgtatggaaggagtaaagtacagtaatgtgaccatatcttctgtgctatcagcttgtgcaagcttaccagctatatattacggaaaggagattcatggtgtcgtcataaagggccccataagagcagacttgtttgctgagagtgctcttatagatatgtatggcaaatgtggtaacttagaatgggctcatcgtgtttttgagtccatgcctgagaaaaatgaagtctcatggaatagcataattgcttcctatggggcttatggccttgttaaggagtcagtaagtttattacgccatatgcaagaggagggattcaaggcagatcatgtaacgttcctcgctttggtttctgcttgtgctcatgctggacaagttcaggaaggattgcgacttttccgatgtatgaccgaggaatatcagattgcacctcgaatggagcattttgcttgcatggttgacctatatagtcgggcagggaagttggataaagctatggaattgattgttgatatgcctttcaagccagatgctggtatttggggtgctcttctccatgcttgccgtgtgcatcgcaatgtcgaacttgcagagattgcttcacaggaattatttaagttggatcctcataattctggttattatgtgctcatgtccaatatcaatgcagttgctggacgatgggatggtgtatcaaaagtgagaaggttaatgaaggatacgaaagtccaaaagatacctggttacagctgggtagatgtaaataacaccagccatttatttgttgcagcagataaaagccaccctgattctgaagatatttacatgtccttgaagagtattcttctagaattaagagaggaaggtcatggggatttgattgcgatgttgtccaacactgcaagctga

SEQ ID NO: 66051 - DNA, 693 bp, Oryza sativa
  Clone ID: PAT_MRT4530_6703C.1
atggcgagctcaccggcgcgcggtggaaagcggactcctacggcggaattggatggggaaggggtggacggcgtggcccgcgggcttgcgaacccgacgacggcgacggtgaggctcggcgacggctctagcggcgacgatcggcggccgaaggtggctaaagcggcggcggcgggtctggggaggtcggacgtggccgagagaggcagggagtggccggcgaagtgggggaggggagtgcagggcgagtgcggggagtgggtgacgtgcgcgggcggcgccggccgaaggttgggggcgggcccgacagcccaaactgttccctcattacgtcagcaatcacattggcccacggttgttgctgagctgccccttgtgactgctgttgcatgggctcgaactgaccgtattgagacgcaaactgaggttgagccaatgcccctagctgatattgggcttgcggggaaggaggctgatattgataattcaagttacccccttggtaattatgaagccgattcacaacctgcccgccatgctgtggctgctctctcattaacaaccgagggttcaccggctggcctggcgccatcgctgatgaagcagcccctgagcaccatcaccttgaactccatgcaccccgtcaccttgtactccatggactccttgagaattgtcgccttgatttcctag

SEQ ID NO: 66052 - DNA, 333 bp, Oryza sativa
  Clone ID: PAT_MRT4530_67040C.1
gcgcagcggaagaagacactgagaagtcgaagaaactctcgcgaagtagcacgcgtcgttgtagaggaagtagtcgatcgcaccggctcgaccttctcctcctcgtgcgttctccttgccgtactcctacgctgatcagcaccgcaaaccagcggcgcctctaccggatccatcactcgggcctccaaggcccgtaagactcctatttggatccctatacgaagttcatgtatactcggctgcaacccgaaaactccttttcggtccatgcgtcaacagcggctcctagtagaacgaattgacccaccgtgcatacataaagatcatatcggc

SEQ ID NO: 66053 - DNA, 333 bp, Oryza sativa
  Clone ID: PAT_MRT4530_67041C.1
gcgcagaggaaaaaggcgttaagaagtcgaaggaattctcgcgaagtagcgcgcgtcgatgtagaggaagtagtcgatcgcactagctcgaccttctcctccttgtgtgttctcctcgccgtactcccacgccgatcagcaccgcaaaccagcggcgcctctactagatccatcactcgggcctccaaggcacgtaggactcctattcggatcccaatccaaagttcatgtatactcggctgtaacttggaaactccttctcggtccacgcgccaatagcggcccctagcagaacgtattgacccaccgggcatacataaagatcatatcgac

SEQ ID NO: 66054 - DNA, 333 bp, Oryza sativa
  Clone ID: PAT_MRT4530_67042C.1
gcgcagcggaagaagatgctaagaaatcgaaggaactctcgcgaagtagcgtgcgtcgatatagaggaagtagtcgatcgcaccggctcgaccttctcctcctcgtgcgttctcctcgccgtactcccacgccgatcagcaccgcaaaccagcggcgcctctatcggatccatcactcgggcctccaaggcccgtaggactcctattcggatccctatatgaagttcatgtatactcggctgtaatccgaaaaccccttttcggtccacgcgtcaacagcggcccctaacagaacgtattgacccaccgggcatacataaagatcatatcggc

SEQ ID NO: 66055 - DNA, 1797 bp, Oryza sativa
  Clone ID: PAT_MRT4530_67043C.1
ttgtcgacgccccggcggccgcaaggggtcgcgttgcccgattcattaatgcagctggcacgacaggtttcccgactggaaagcgggcagtgagcgcaacgcctcgcaccgcggccgtcgcgcaactccggcggcccctcgccggtggttcgacgcaagtgatagctgcatcgactagactcagaacacgtctccaaagtaggattagaaaagaaaaggtatacattgatgttatgttaaatggattaattttacatcttctggtgaaccatggagtttagaagaggcagtaaatgataaacattggaaggaggccatggatgcagaatacatggcgctaatggagaacaaaacctagcatttggttcctcctcaaaaaagaaggaatgtcatagattgtaaatgggtgtacaaaatgaaaagaaaggcagacggcggtggcctagacaggtataaagctcgactggttgcaaagggcttcaaacaaaggtatgaaattgattatgaagacactttcaatccaattgttaaagctgccacaatcaggatagttttgtctcttgctgtttctaaaggttggagtcttagacagctagatgttaaaaatgttttccttcatggagttttagaagaggaagtttacatgaatcaaccaccagggtatgaaaagaaaagtttgtataattatgtctgtaaactggataaagatctttatggactgaaacatgcacctcgagcttggtattctaggttgagtgctaaataattgatctaggatctatgtcctcgaaggcaaacacgtcactgatcttttataagaaaggacatgtttctatattccttttgatatatgttgatgatattattgtagctagttctacactagatgcaacttcagcactcttgcaggaactaagtaaggattttgcattgaaagatcttggtgacctacattacttcttggatattgaggttcacaaagtaagaaatgccattctgttgagtcaagagaagtatgcatcagatctgctatggtgagttggtatgcatgaatgtaaaccagatagtactcctctatcaacttcagaaaaactttcagtaaatgaaggagcattacttgggcctcaggattcaactcaatataggagtgtagttgatgctttacaatacttaacactgaccagactagatactctttttcaataaataaggcatgtcaatttttacatgctccaacttcaactactgggcagttgttaagaggatattaagatatgttaagtatacggttaatatgggcctaaggtttagtagagcatcttctttacttgtcaatggtttttcagatgtatattgggcagggtctccagatgatagaagatccatatgaggttttgttgtattcttgggacctaatctagtgtcatggaatgccaaaaaaaacaagcaatagtatcaaggtcaagcactgaagctgaatataaagcgttagccaatgcaacggcagaaatcatgtggatatagatgctgctacaggaattgggagtggagtcacctcgagcagctaaattatggtgtgataatcttggagctaagtatctttctgctaatccaatctttcattcctgtacaaaacatatagaagttgattttcattttgtgagagaaagggtagctagaaagttacttgagattgcatatatatctactaaagatcaagttgcagatggctttacaaaggctatacctgtgaggcaattaaagatgttcaagaacaatcttaatctagaaagagtt

SEQ ID NO: 66056 - DNA, 332 bp, Oryza sativa
  Clone ID: PAT_MRT4530_67044C.1
gcgtagcggaagaagacgctgagaagttgaaggaactatcacgaagtagcgcgcgttgatgtagaggaagtagtcgatcgcaccggctcgaccttctcctcctcgtgcgttctccttgccgtactcccacgccgatcagcaccgcaaaccagcggcgcctctaccggatccattactcgggcctcaaagcccgtaggactcctattcggatccctgttcgaagttcatatatactcggctgtaacccgaaaactccttttcggtccacgcgccaacagtggcccctagcagaacgtattgacccaccgggcatacataaagatcatatcggc

SEQ ID NO: 66057 - DNA, 735 bp, Oryza sativa
  Clone ID: PAT_MRT4530_67045C.1
atggtggtcgtcggcgtcggcgtgccccgcgcccgctcctcccaatgggatcctctcctcctcgtcggcgtcgtcatccccctcgtccccgccggatcccgccgcggcgcggtggccggcgtcctccttctcctccgccgccgcatcgagggcgtgcccctcttctccctcccagccacctctgcccgggtcggcacgcacgcctccagcactttcaactccttctggccatcgtcgtcgatgtgtcaagaagaatggcctcccggccgtcaatatcaacaccaacacgagcttcgcgccggggacggcccggcggcgatgtacacggtggtgccggactcccagatacgcaacgccaccatcgagaggtttcttaaagagatcgccggcgagaagcccatccggttcacggcgcagcagttggccggattcacgaacaactacttggctcggctcggcgccggcggtttcggcaccgtgtacaagggcatgctcccgaacggtcacatggtcggccgctgcgcgctcggccgcctgccgccaccgccgctccgcgcctccgctccattccgcttcaccggccgccgcgcgctcgcacgccgcctccgccggccgccgctcagccccgctcgtcgcccggccgtctgctccctacctgtcggttggcctgcgatagaagagtggcagagagagagagaggggaggaagggaaagaagagaggaaagggaagttga

SEQ ID NO: 66058 - DNA, 333 bp, Oryza sativa
  Clone ID: PAT_MRT4530_67046C.1
gtgcagcggaagaagaccctgggaagtcgaaggaactctcgcgaagtagtgcacgtcgatgtagaggaagtagtcgatcgcaccgactcgaccttctcctcctcgtgcgttctcctcgccgtactcccacgccgatcatcaccgcaaaccagcggcgcctctaccggatctatcacttgggcctctaaggcccgtaggactcctattcggatccctatccgaagttcatatatactcggctgtaacccgaaaactccttttcagtccacgcgtcaacagcggcccctagcagaacgtattgacccaccgagcatacataaagatcatatcggc

SEQ ID NO: 66059 - DNA, 1351 bp, Oryza sativa
  Clone ID: PAT_MRT4530_67047C.1
aatcacccaagccgagaacgctgagcattacggggtttccatggaaatgtggaatctcacacccaacacaacgcatttaaaaagtccaatcctgttagttcttggaggtaatatgctcttcagttcagtcttgactaatccccctcttttcctcccaaattactgcacaaaatttggccatcaagcagccccacgaacagcccctaactaggttcggaatttgccaaagagggttgaaatgtaccatcaccgggggggggggggggttactgtactcatcaatgagttctgaaccaagcaaaaagtttagcccctaactaggttcggagttcctgttagttcagcattagcgcatacggcaagaggcaagaggcagatgtgtatttgacagtttgacacaagccatcaggagtgctttggccgccgggacaatcttctcaggttcaccctctcctgggttccatcatggtcgtattcgacaaggaagacacatctgcacccccttatatcatgttgtttccgctggatttccagaacatgcgcatcgaaatgcaatgcttcatcattgctctccttgaaacagaggacaaggtctccttccctgatgagtttgcattctgatgattccaacgggatggattgcaggcggatagccttccggacattgatccattcatcctcttcagccccaaatccttgaaatctcactcggacttcaaattcaccagaacttaacttcctgtatgctaagaaagtggcgatatcataccaaactagcataatcctttgaagacctagcctcgaactgcatgtcttcaatttcaggaagcttatctatgttgtctataggtaaatccggcgaaacctcgcctatatcatttgaaatgcttgtatcaacagctaaagcattttcttcagatgatggaggcttttcttcagaaaccggtgcacttgcttgggaggctaaagccttttcttcagagccagtaggcaaacaaggaggtataacagttgatgcagggaacttttgacggaaccattcttgaacctgcacagcctgtagtgctttacttccaactcggcctggagaacaattaaattcttctgcgagcttccggcagaaaatttcatccaagacttgttcctttttatgtgtaaccaacttctccatccttgcaatctcggatggcgcgaagcgaacgctcgatcgccgctccatttgtcgccgccggcgaggtctccgccgccggaagaacggggaagacgccctcctcccctcctgccgcgcccgccccccccgggaggatccaagcttacgacgcgtgcatgcgacgtcatagctcttctatag

SEQ ID NO: 66060 - DNA, 333 bp, Oryza sativa
  Clone ID: PAT_MRT4530_67048C.1
gcgcagcggaaaaagacgctgagaagtcaaaggaactctcgcgaagtagcgcgcgtcaatgtagacgaagtagtcgatcgcaccggctcgaccttctcctcctcgtgcgttctcctcgccgtactcccacgtcgatcagcaccgcaaaccagcgacacctctaccggatccatcactcgggcttccaaggcccgtagaactcttattcagatccctatccgaagttcatatatactcggctgtaacccaaaaactcattttcggtccacgcgtcaacagcggcccctagcagaacgtattgacccaccgggcatacataaagatcatatcggc

SEQ ID NO: 66061 - DNA, 379 bp, Oryza sativa
  Clone ID: PAT_MRT4530_67049C.1
aaattctggaactataagatcggagaatcctatgtctgttaacatggtaatcggcacaatgctcttctctgttctccaagtgctctggcaggctgtgttcttgatatggcacatatattgcatctgcttcaacatcaagacagatgagtgggtaatgtcaaacttcccatgctttggactcttccttcatcaattgcaggccatcttctcgtttgctgtttcttatagctaagagattctggagtaaagtttgtgaatccatatgacaaaggcgtgctctgtaacattatagaatttctgaagccgaaataacacgagctgatcctaagtacagacgttaaaaacatgggaaatcattgcatcaagtgatctggaattc

SEQ ID NO: 66062 - DNA, 3494 bp, Oryza sativa
  Clone ID: PAT_MRT4530_6704C.1
ttacaggatcaaatcaactggcacgctcatgcattcgaaggtgagctttggacctgcactggagttaagcagatctcccaggcctcgtgttttctatcaacacgcttttggcacgcctggtgggaccgattagaagtcagcaagcaattcttcctcatggccgagaagccaccgctgtcgccatcctcggctagcccaagcactgttaaagaaaagatccagaagttggggttgactgacgtcaatgaaggaaacatcgtgcccatcgatccagagaaattcacacctgagcagaagaagtattttgaagtaatgttgcagcaagcccgggatcagttcttgaactcattcatgcagacccgcaagggaacattggttcagaagtataaagtaaaggtagttgccgatgatcctgggaccagttcttccaaaggtgaagacgtgaaacaagctctagatggctcggctcaactgagtgacaaaggtgctaccgacggttctctaggaagtcaaggtgacaactctcaaggggtccatggagttcaaggcgatggagtgcatggagttcaagaccgggtcgactatgctgtgcaccatgctttgatcaatcagtctgaggtgttagtcaataccttatcaaacatgatgaagtcaatagccgatggatcaatagctgagcatcaggctgcaggcccagtttatttgcaaggaggtgtctttccaaattatcggcctttgatcactgatgcacagccatctattcaggcagtttcccccatcgcaccattagctcagccgacggcgccggcatcgactcccttacctgctccgtcagcattggcactaggccagctggtgaaccctcagttgttaatgagagagcagccacagcatagtgggcaggttgtgaatcggccgacgcaagatcaagttgctgccatgtttctgccgcctcaacctgctgttgatccaatacagcagcagccggttcaacagacacttccgatttagcaggttgtacaaccaatccagcaacaactggtggacagcctgtacaacaatttttaaatcaagtcgtcccagaacacttggttcaccacgtactgccggatggcatgatgtaatgagggaacagttcgggcttaaaccaaaagagactggaagcttgtatcggcagccttaccctgagtggtttgagagagttcctctccccaatcggttcaaagttccggacttctccaaattttcggggcaacatggtgtgtcaacttatgagcacattagccgatttttagctcagtgtggtgaagcatcggctgtggacactctgagggttaggttgttctggttatctttgtctggatcggcttttacttggttttcttctttgccgtatgggtcgatcaatagttgggtcgatttggagaagcaattcctcagctatttctacagtggggttcatgagatgaagttatctgacttgaccgcgattaagcaacggcatgatgaacctgtgcacgagtatattcagagattcagggagatgaggaacaagtgcttcagcttgagtttaactgacgctcagttagccgatctggcctttcagggtatgattgctccgattagggagaaattctcatctgaagactttgatagcttgtcacatatgatacaaaaggtaaccttgcacgagcataggtctatggaggctaggaaaagctctaagaaggttaatcatgtttgtccttacatgtatgggtcggatgacgatgaggatgactttgagatagctgcagccgaatgggtgaggagtaaaaaggtcataccgtgccaatgggtaaagagttctggaaaggaagagaagtatgattttgatattactaaagctgacaagatttttgatctgctactccgagagaagcaaattcaactccctgctggtcatacgattccgtcggctgaggaattaggcaaaaagagatattgcaaatggagctcaagacaattatggtgctcaaggactttggtggcaatccatcggaaaccaaaggtgttctaaatgtggagctgacagtcagcagtaagactattcctaccacgttttttgtcatcgatgggaagggttcttacagcttattgcttggaagggattggaaccgatggcgattggccaaggccgacatttattagttagaatttgtctccagaatttagaaccaagctgatagagctcttaaaagagtttagagattgcttcgcttgggagtattatgagatgcctggactcagccgatcaattgtagaacatcggctacctatcaaactaggggttaggccgcaccagcagcctccgaggagatgcaaagccgatatgcttgaacctgtcaaagctgagattaagcgtttatatgatgctggttttattcgtccttgccgatatgctgagtgggtttctagcatatttcctgtcatcaagaagaacgatctgaataaagctacaccgaaagatgaatatccaatgccagtagccgatcagctggttgatgctgcgtcagggaacaaaattttgagttttatggatggaatcgcggggtataatcaaatttttatggctgaagaagatatccataagacagcttgtagatgtcctagtgcaataggcttatttgaatgggttgttatgactttcggcttgaagagtgctagagctacatatcaacgggccatgaattatatttatcatgatctaatcggctggctggttgaggtctatattgatgatgtggttgttaaatctaaggaaataaaagaccacatagccgatttaagaaaagttttcgagaggaccaggaaatatggcttgaagatgaatccgacaaagtgtgcttttggtgtatcggctggccagttcttgggatttcttgtccatgagaggggaattgagataactcagagaagtataaatgcgatcaaaaagattaagcccccggaaaacaagaccgaattgcaggagatgatcggcaagattaattttgttcgaaggtttatttctaatttgtccagaaaattagaaccttttacaccattgttgagattgaaggccgatcagtagtttacttggggagcagagcagcaaaaggctttggataatattaaaggatacctgagttcccctcctgttttgattcctccacagaaagggataccttttagattgtatctgtcggccggtgagaagtcaatcggctcagtcctgattcaggagttggatggaaaagaacgagttgtattttatctcagtcgtcggctcttggatgcagagactagatattctcctgtggagaagttatgcttatatttatatttttcatgcacgaggttaaggcattatttactgtccaatgaatgtactattatatgcaagaccgacgttgttagatacatattatcggctccaatattgaaaggaagggttggaaagtggatattttcac

SEQ ID NO: 66063 - DNA, 625 bp, Oryza sativa
  Clone ID: PAT_MRT4530_67050C.1
cttgatatggcacatatattgcatctgcttcaacatcaagacagatggagtgagaaatggcaaacttcccatgctttggactcttccttcatcaattgcaggccatcttctcgtttgctgtttcttatagctaagaggtgagattttccagataaactggaagaaataccctgaattccagatgaaggaacagcctcaatcagattctggagtaaagtttgtgaatccatatgacaaaggcgtgctctgtaacattataaaatttctgaagccgaaataacacgagctgatcctaagtacagacgttaaaaacatgggaaatcattgcatcaagtgatctggaattctgaaaaattgttttgcttcttacagccaaattgatgggaatttgttgtgagcatcatttggcccctagtagctagttagatcaacacgcaattgaccccctctgaaaacttccttgttgagcgggaactgtattgcaatggatgctgcatcggacgtgatttgggcgttccccccaagtacatacatcttgtaactctaaaaaatgattcattgtgtggattgaaggaatacacatcgtattcctgcaagcaatatttttatgctttgaggtgcccgt

SEQ ID NO: 66064 - DNA, 1169 bp, Oryza sativa
  unsure (1)..(1169): unsure at all n locations
  Clone ID: PAT_MRT4530_67051C.1
acgaccagcccgcaccgcacacgcaaccaccgcccaacccgcgcgcacccaacgacggcgccgccgctccgcctctctcttccacgcagcaaccggccgccatggccgccgccgccgccgccgcgggctcctccgattcccgcaagccagccgctcacccgccgccccgcgacttcctcgtccacgtcgaggcctacctctcccgccgcgacggcgtcgacaagctcctcaagatctcccgctacgccgcccgcctcgccctcgccgcgggcccgctgccccccgccgcctccgcccgcctcaagtcgttcgagtccagcgtcggcctcagccgcaaggccttccgcctcggcaagttcgtccagaacgtcaacgccctccgcgcccatccccatccgcccccggccgtcgcgctcctcgcctacggcggggagggcgtctactacttcctcgaacagttcgtgtggctggccaaggccggcctcctgcccgcgcacctcctcccacgcctccagcgactcagcgcctgggccgagctgctgggatacgttggttccatcacgattaagctggaagagatcggcaaactggagtcttccgtcaagatgcggctgaaggaaggttgcagggaggagagcgatgtggtgaggacgctacgggtgaagctgctgctcaagcggatgtccgttgtgcaggacgttgcggacgccgtgatggcgctaggggacgtgaccgacgggaagggtttgctcggcagctcgacgctcatggcgtccgccggcttactgtccgcgttgatcagcgctcacaagaattggaattcgtgctgaagcccaaaggtatatatatatgttgtaaaacacgatgagatgaaataataaagctcaaactggagcaaaattaaaacaataaacaaaagttgtccctggattatggatgttggggggtataaatcaaaagcgtggctttatcaccatggttgttattcaatgttttatttgtgcttctccttaaaaagggtaatggttctcatcaaaaccgaaaaccgattaatatgtttccatatacctttctcctttatgtaatanagagtttgtgttctttcaactataggtttaggtttatgtaaaaggtacaaatttgtagttagaattaaaaaagagaanagc

SEQ ID NO: 66065 - DNA, 342 bp, Oryza sativa
  Clone ID: PAT_MRT4530_67052C.1
atggtgagggtggagcgcaaaatgcgccaagcccaactagccgaaatccaggcgcgcgaggaggtcctggactccctcatgcgggatacggaggaggagcggcaggcggcactgatcgcctcgagcgtcctggacgaggcgctgggcgacatctgcctccaatatgaggctcatgccgaggacctggagaggaggatccaggacgcgcgcggcatcctcgacgcagctgccgcccaagagcggcgggcgtcagaggctaacgcctctctgcaggctcggatgacggcgctcgaggctgagcgcaaagccttggtgcccttgccctcacccataactgtttag

SEQ ID NO: 66066 - DNA, 1249 bp, Oryza sativa
  Clone ID: PAT_MRT4530_67053C.1
gccaggcccaagcaagcaaagggagagcactattaagcagcaggagcagcaccagaaaagggatgtttgatcaattggcgtgctgaggctcacggaggcggtggcggcgacctaggtgaccgcatggagtcgatgggggagtattgcagcaacaccccatgcaagtggttgttggatttgggcaagggtggtgcccatgacacttacgcccacaacctattcgatggaatgcctagtcagcctgacatgtccaaggaagattagaggatatctgaactcgtccccatcaattccatcatgaacaaagagggaaatagctagacaaagctctagatctgatattgaagaagtttgaacaaatggaggccaagcgtacgtgtgaagagaagattgattgaattttggagaagttggacgagatataagctaataggaacaagttcttcaaggagatgagtgcctccatcaaggcgaccaccgctgacttcaattctgcatcattttcaacacccccgacctcgtctcctccagtgtcccccaagtgtttgacggaatgcttcaacaacaacatcacttgggtagtggcaaattcaagtcacattggtgaggtacttgctccaacagctgcctgagagctagaagacagagaggacaagcaccaagctacctacatttgtcaccatggacctccccaaggtcacgcccaccaactcttcgatgatatgttccagctacgatgccaagtccgatcacactgtggctatcgtggttacttgtgtcacctctaccgtgtcatcaatggagttgttatctactgatggcaccattggcggcaccaacatcaacatccttgatagtaccaaggcgatgctcaccaactgtttgacggttggccttgatgtcaaagggtggtgcagaccacgccagggttacgtgccagaccatgatgggtgtttctaagggtgttctagtacctgatgcatcatccgaagtctcctcgctatggttgattgctgaaatggaccttatcaagttgatgcccagtgagtgtttgatgaaatgcctcaaaggtaacaacaagttgctggtggggcatcccaagagaaacccttggccacctccctggttaggttgtgtggttagagaggggaggtatggcacattccatggtatgtactcgattctttttggacaagtgtaggtttgatgtcaccatggccaccaccgattcgacttgagcaatgcaagt

SEQ ID NO: 66067 - DNA, 407 bp, Oryza sativa
  Clone ID: PAT_MRT4530_67054C.1
atgggtggtggtggacaagggcgtcatgagtgcggtgccaccgacaactacgacgccggcttcctcgtcgctgtcgactgtcgagtggtggcgaggcgaacaatgcggccactttgctgccgcttcctcctccgccgccggagacttcccggcggcggtggcggctgcagcattttccagctggcccgtgcgccgctgctgcccggttgggttgagacttgagactcgcaaaccgaatccgttgccgccaatctgcccccatccgggtctctcgccgccgccacaatatgctcgcgttgccgttgcccctccaagccgctcgtctgctttgcgggctcatctaagatcggaagggcacggcttggcggcgacgagctcctcctcctcctctcctttcgactggacat

SEQ ID NO: 66068 - DNA, 1518 bp, Oryza sativa
  Clone ID: PAT_MRT4530_67055C.1
atggcctggctcggaatcggaatgggaaggcagattgttcctgttcttgttttcgttgctgtactctgcagcggtgttgatgcatcgttcaacaggtacagcttccccaaggatttcatcttcggcaccggctctgcagcgtatcagagatgtatccttgcattgcttaattacttgcagtatgagggagctgctaaggaaggaggaaaaatcttaaatggtgacaccggcgatgtggcagatgacttctatcatcgctacaaggaggatgtaaaccttctcaaagacatgaacatggacgccttccggttttccatttcttggagccggatcctgccaaatggaacattgagtggaggggtgaacaaggaaggagtagctttctataacaacctgatcaatgaaatcatagccaaagggatgaagccatttgtcacaatcttccactgggacacaccacaggcccttgagagcaaatacggaggattcctgagtgagaatatcatcaaggattatgtggacttcgccgaagtgtgcttccgggagttcggcgaccgtgtcaagttctgggccaccttcaacgagccatggacctactgctcccagggctacggcaccggcatccacgccttgggccggtgctccccctacgtctccacctcctgtgccggcggcgactccagccgcgagccttacctagcagcgcaccacgtcatcctcgcccatgccaccgccgtccacctctaccgcaccaagtaccaacccacgcagcacgggcagatcggcatcacggcggtgtcgcactggttcgtgccgtataatgacacggccgctgaccgccgcgttgtgcaacgcagcctcgacttcatgtacggatggttcctggaccccatcgtgcacggcgactacccaggcacgatgagggggtggctcggggcgcggctgccggcgttcacggcggagcaggcggcagcggtgaggggatcctatgacttcatcggcgtcaactactacaccacctactacgccaagagcgtgccgctgcccagctcaaacaggctctcctacgacaccgacatccgcgccaacaccactggcttccgcaacggcaaacccattggtccgcaggagttcaccccgatcttcttcaactaccctccgggtctccgcgagctactcctctacaccaagaggaggtacaacaacccgatcatctacgtcacagaaaatggaatcgccgaggggaacaacaagagcttgccaatcacggaggcgctcaaggacgggcataggatcgagttccactcgaaacacctgcagttcgtcaaccacgccatcaagaacggggtgaacgtgaagggctacttcacctggacgttcatggactgcttcgagtggggcgacggatacctcgaccgattcggcctcatctacatcgaccgcctcaacaatctcaagcgctaccacaagcagtccagctactggatcgccaacttcctcaagcggaagaagtactga

SEQ ID NO: 66069 - DNA, 1557 bp, Oryza sativa
  Clone ID: PAT_MRT4530_67056C.1
atggtggtggttcccctcgaggcgcttcccgacgacggccttcctgcggcggcggcggcggaggaggaggacgtcatggtggtggaccgcgtcgaggcgcttcccgacgacggccttcctgcggcggtggccccggtggaggcagcggccccggtgggggaggaccccatggtggtgattcccgacgacgcggttctgcgcatcatcagcttcctcccgctcgagtccgccatccgcacgacggtgctctccaaggagtggctaaggctgtggaaggaggattggggccagaaatccaggcgctacgagatccgcgcccgctgcgcaccttccgtggaggacctcctcaagatcctggaggaggagcgccgcctcgagcgcctctccgtcgtcgtccacaccatcatgaagagctctcacctgagagaaatcatcgagagatccgccgaccgccgcgtcgagcagctccacgtcgagctgaccaacccgaatgttgtagacaaggtcaggttccacttgccgatcttgagccgcgtgatcgcgctccagcacctctcgctccgccaaatcgtcgtctccaagatgcgcttcaagccgcagcagcgcttcaacgagctctcagaaatctgcttccacttcgtctccatcgagagctacatgctgagaaatgtgatcacgcgctgccccaatctccgggttctggaccttcgcagctgctttgacctcgacgccgtcgccatctcgccgggcgggccgaagctgagcagtctcaccatcgccgggtgcaagcatctcaataaggtgaacgtcgtcggtgtaaccagcctccgctccgtcttctacagcggccgcttcctctcgtccttctacctgccgcgcacaagtcgccgctcctccttcaccgacctgtacatctgctacgatggcccgataatccccatggtgttcggtaaatgggcacaggatgcactttccaaactctccaatctctccaacctcaccatctgcagcaattccctcacggcctgtttgattgtgcctagtttgcctgatgaagaacgaactacccagttgaaatggcttggcggctttcggcgtttgaaagagttgcagttgctcatgtttgacataaagaccatcaacgtgtttgatatctatgcgttcctccagagcttccacttcccaaatctgaccaaactcttcctgcagctcccaagaatcagggaagatgtgcaggaggcggtgagagaagatgtgctgcagtcgatgagcgaaggtgtgccagagtatgccttagataaccttaaggtggtaagaatgatgaacttcaacaggaccagaattgagatgcatcttgtgaggtttttcttgaggaaagcaagaaacatcaattcactgcaacttgtttctctttttcacaatgcgattccgttgggtttggctgttcaacaaggagacatcatccaaggagctttggcgagtggcgttatacaagagagcaactctggcgctggtacaacccagccgtgtcattctgaggtcttcatcgatttttag

SEQ ID NO: 66070 - DNA, 3046 bp, Oryza sativa
  unsure (1)..(3046): unsure at all n locations
  Clone ID: PAT_MRT4530_67057C.1
gcaccacaaaaacacacttgaagctggtagttcattcaatgaagatcattgtggggggggggggggggggtngnggggtggngggggctccattnataaaggaaagaggcttatataggaaaccgacctaaaggtcatgaggacctgatgatctgggcatcggcaataccgctatgccctcattttcttattgctcagttgcttgtagcagcgagcgattagcaaaattaacatagcagtggcgcttaagcgattgggcactgggcaggagaaccatatgtatgctgaatactgatacaactcgttcagaatggtgcatcgttggatattgataggctcgctccatcaagaccagtatttaaactttgaccagacaagaggttttcaccaaatatcatagttcctgcagccagtgctcctgctccaagccccattccaaaattcggtgtgctgttttgacctcccattcttggtggcacatttatgtaggtctgtggcactggcccccttgttggatactgtggtgtaaagaaactggggtttgaagttggatgtggcaggattggtggaaccattgtgggttggtaactgtagttgcttcctggtggtgattgtcctgggcgagtggcagcggtcactggcatggagttgctgtaatgatcaacatcttgggtgtaccccttaaaatgactggaaggcattggtggataattgtaaactggaccatcttctatagctaatgtgatgccaacctgatctgggtacttcaatccttcctgtgatcctgagaacgtagcacgattgttttcttccttgcagatacggatggagatatcaacaaatccatggggtttgtctgacttcttcctcctaagctgaaaacttgaagtctcctcagttactcccgaaggatccttgccctgtgaaaatttatcaaagtactccttcatctggatgactgcagttccctggagatgctcccttagaaatacgggctctctcctgtaaacttcaactgttagttccatctgctgcatgctcatatcatgttcatcaacagaaagagagaacttagttccccaattcacatcagagttccctgatgcgtcaatcttggtgcagtacttgactccctcagctatagctccaatctgattcgtatctcctatctcctccccatctcgctcccttccggccgcggccacagcccgtggcagctgcccgtcacgcgtgcctcccatcttccccgacgccttttgtcgcgccatcatcgtctgctgccggaattgtcccgcgtaggaggcaggcgtcattgcgacacccggcttactcccccattgctgcctgccgcccacctcgtcgccggaattgtcccgctggccgtcggtcgcttcgccgtgcacaccctgcttaggaaccgctggcatgagcttgcaggcaaatattttgattttggcattcatgtatgtgcgtgggtggatgtcgggcacccatccttcaggctgtcgccatggtttactggctaatgtacatgtcatggtactatctttttctggtatatctggtgatattttgatcttatggacgttcctgtgcagtatagcatctgacagcacagatgtgggcatagaatgctgcagtagcaagacaaacttgaacattttgtcatctttaggaatgaaaccaagtttatcaaccaacacaatgatgccaaccccagcaagaggaaccaagatgagccgtgcaaaaataatagcaacggttgtccgcacaccaagcctgttacttccttcaccaggaccatcgacaagattgccccccactgcaagcaaaatgcaagggatcattgcttcccctagaatgagacagctgtctgtgaagaagaacagaggtgcatcatcagtgaggacaaaattcttcaagactggaacaacaccaatggcaattgcaaaaacagaggcaataattggtggctgaagaagctgcttgtcttttaggaacttaaccatgcttctaacaatgcccattatcttcgatcctagagaagtagaaacatttttatcaccttcagaagataacaaaggctcattttcagccacagtactagtgcgagtgcttgttggatatttccctttttcaggcaccacattatctccagatgccttaattggaagaatatcttcttcagcgctatcaaaggattcaccaggtggtggagcaagcatcttgaacacatatgtgtaaacaataattgcaccaacccattgaccaaatgagatatacgcattcccatcttcattacatttatcagagtcaccaaaaggattggtgggatctcgacataatgctgcaatgagaaccagaggtatatttccaatattccctattccaatgtgaatcacagtgaacttgaagtatggataaggtggtcggatgatagaagccaccacaaagccaatcaaagagcctgacactgcacctacaacaatatttactggaatataccaccattgcagcatcttttcgattgtgattgctctacccagttgggaaaatataaggcaaggaagtagaagcgagaacacaagcccattgagaagcttgcggccgttcggctggaggatattgacatacttagaggccatgaggaaccccatgaaacagacggtaaacaccttggcaatgggcagcacggcgtacttgagcatgtcgaaaaccgacgtccccacggtgcctccctgcgccgccgtagccagcgcctctatcagcgacctctccatcatggcttgccccaggcttcactagttcacttcttcttcttcttcttcacttcctgacttccacaaccaggacccacgcaattccgcgtggccgaggacgaggcggcggcggcggcgactccgcgcgcgcgaggagggagacaatgccctcgtcgtccccttcacgagagatcgaactcgaagcgctcgagattaagctatcggattaggagtgtgatcaaggaggcttggttaaagtggcggcgattcgtggacggcccggccgg

SEQ ID NO: 66071 - DNA, 3987 bp, Oryza sativa
  Clone ID: PAT_MRT4530_67058C.1
atggccagcaagactgttcgcgagttcgctgctccctatgctgacaatgtggccattgggccgcaggtcaacataggggacgtggatttcgacttaaagtccagccttatcacaatggcgcaggctagcccgttctgtggcaagcctaatgaggatgccaatgctcatctgcaacagttcctggagatctatagtacgtacaccatcaagggcgttagtcccaacgccgtcaggctgcggctgtttccgttctcacttttggagagagcgaagcagtggttttatgccaaccgtgctgctgtcatgatgaggacatcaacaccatcgatacatccacgtccacccatatacagcatgatggtcctattacccgcgctcgtgcacgacgagtgccctcgtggccgggttgacgcgcaccacaagttcgcggcgaccattggagacgttgtaactcctttcattggaaaatttgtggtggtctactttgatgatatcttgatttacagcaagtctatgggtgaacattttaatcatttacgtgctgtttttaatgctcttcgtgatgcacgtttatttggtaaccttgagaagtgcaccttttgcacagatcgagtttcttttcttggctatgttgtaactccgcaggggattgaggttgatcaagccaaggttgaggcaattcagagttggccgactcctaaaacggtctcacaagtgcggagctttctaggactcgcggggttctatcgccgctttgtgcaggatttcagcaccattgctgcaccattgaatgcgcttacaaagaagggagtgcctttcacttggggcacatcacaagggaacgccttccacatgttgaaagataagttgacccatgcacctctcctccaacttcccgattttaataagacttttgaacttgaatgtgatgctagtgggattggattgggtggtgttttgctacaagaaggaaaacctgttgcatattttagtgaaaagttgagtgggcctgttctgaattattctacttatgataaggaattgtatgctcttgtgcgaactttagaaacatggcagcattttttgtggcccaaggaatttgtcatacattctgatcatgagtctttgaagcatattcgtagtcaagggaagctgaaccgtagacatgctaaatgggttgaatttattgaatcttttccttatgttatcaaacacaagaaagggaaggagaacatcattgctgatgctttgtctaggagatacactttgttgacacaacttgactacaagatttttggcctggaaacaatcaaagaccaatatgcgcatgatgctgattttaatgatgaagcgcatggaggcggtttgatgggacattttggtgccaagaagacacatgacatccttgctagtcatttcttttggccacatatgcgaagagatgttggcaggcctgttttgaagaaaaatatcaagatgtgggaagaatgcttgcctcatattgaatttgcttataatcgttccttgcattctactacaaaaatgtgcccatttcagattgtgtatggtttgttgcctcgtgctccaattgatttgatgcctttaccatcttctgaaaaactgaattttgatgctaagcaacgtgctgagttgatgttaaaactgcatgagacaactaaagaaaacatagagcgcatgaatgctaagtataagtttgctagtgacaaaggtagaagggaattgaattttgaacctggagatttggtttggttgcatttgcgaaaagaacgatttcctgatttgagaaagtctaaattgatgcctagagctgatggaccatttaaagtgttagcaaagattaatgagaatgcatataagattgatttgcctgcagatttcggggttagtcccacatttaacgttgcagatttgcagccgtatttgggagaagaagatgagcttgagtcgaggacgactcaaatgcaagaaggggaggatgatgaggacatcaacaccatcgatacatccacgtccccccatatacagcatgatggtcctattacccgcgctcgtgcacgtcaactaaattatcaggatgagtgccctcatggccgggttgacgcgtaccacaagttcgcggcgaccattggagacgatcgggccacaaaccctagcgggttcgcatcatgtcaacacctgggacaaatgctctacggcattcctctcgaaattcttcctgatgggcaaaaccaatgcccttcgtggaaggatttccagttgccagcagacaagggacgagtccattctagaagcatgggaatgactacaggaaagatggtttccaatatgggttggagagagaaacgactccagacccgacagcgaggcatgcacaccatcaaggagacggaattacttgctgccaagctggacctcctcatgaaacgcttggacgaccacaagaaaaggtcacaaggcaccgtcaaggccttggactctcatgtcacgtgtgaggtctgcagcaacacggatcattctgggaatgactgccagaaaacccgtgaggaggcgatgtacatgggcaacaacaacgggtactgtccacaaggaggtcaggggtggaaccaaccacgcccatattatcaaggaggtaacaataactgtaacttttctaaccagccctccttgaaggatctcgtttttgcgcaagctaaaactactgatgcattaagcaaaaagcttgctgctaatgaaaaggtcctagaaaacatcaatgtcaaactagatggctttgcttctgcttttcaaaatcagctgagctttaataaaatgatagagacccagttagctcaggttgcatccttagtccctgcaaatgaaactaggaggatcccggggcaacccgacccctcaggtgaaaatgttaaggtgatcacgacgaggggaggaaccaatgggatgtcaaaagaagcgtcatctaatgactcggctgacaaagaggttcagccagaaaagactctgccgcaggagtactacgacacacggttgctgccgtttcctcaacggcttaggaaaccgtcagtagacgagcaattcgctcgttttgttgaagtaatccagaagatccacatcaacgtgccgttgttggaggccatgcaagtgccaacatacgcccgttatctcaaggacatactcaacaacaagagaccgctcccaacaatggaggtggtcaagctgacggagcactgcagtaacctgatactccacaagctcccgaaaaagaagaaagatccggggtgtcctacgatcacctactcaatcgtggcacaacaattcgaccaggccttgtgcgacctgggagccagtgtcagcatcatgccaaaagatgtcttcgacaggctcaacttcacggtgttggcaccaacaccgatgtgcctccaactggctgattcatcagtccgttacccggcggggatagcggaggatgtgccagtcaagatacgggatttcttcaccccagttgacttcgtggtgctggatatggacacgggaaaagagacgccgctcatcctggggcgtccgttccttagcaccgcgagagccaacattgatgtgggaactgggagtatccgtttccacatcaacgggaaggaggaaaagtttgagtttcaaccgaggacggaacagtgctctatggtcagaatgaagtacgggccgaacccacagaatattcaaatggtcgaggtggagccacccaagacggacagcctggtgaagttcatgcagaatttcctagagaaggaaacaacgattcccaggaaccgttattggaagacgccggtaaaatgcccaataccggccaaaaagctagagcagccgactcagaaaaagccgccgtccgcaccaaaaccaaagaaagtgtggagggagaagcaaaagacgctcactccatcacctccggagatgggtagaaaatccgtgaactaa

SEQ ID NO: 66072 - DNA, 908 bp, Oryza sativa
  Clone ID: PAT_MRT4530_67059C.1
ggccgcaaattttttttttttttttttggtccaaattgtagtttactcttactctttcaaaataactgcaccacaaaaacacacttgaagctagtagttcattcaatgaagatcattgtggtgggggggggggggtgctacattaataaaggaaagaggcttatataggaaaccgacctaaaggtcatgaggacctgacgatctgggcatcggcaataccgctatgccctcattttctcattgctcaattgctctgagcagcgagcgattagcaaaattaacatagcaactggcgcttaagcgattgggcactgggcaggagaaccatatctatactgaatactgatacaactcgtaccttcaggctgtcgccatggtttactggctaatgtacatgtcatggcactatctttttctggtatatctggtgatattttgatcttatggacgttcctgtgcagtatagcatcagggtatgacgtacttagaagagtaagctcaaatacaaaataatccatcctgccatggagaacacagcaaagatgtgcacccagaacaagatagcagcagattcttttccacagcccctcaggtttgcaacagcacctgacagcacagatgtgggcatagaatgctgcagtagcaagacaaacttgaacattttgtcatctttaggaatgaaaccaagtttatcaaccaacacaatgatgccaaccccagcaagaggaaccaagatgagccgtgcaaaaataatagcaacggttgtccgcacaccaagcctgttacttccttcaccaggaccatcgacaagattgccccccactgcaagcaaaatgcaagggatcattgcttcccctagaatgagacaactgtctgtgaagaagaacagaggtgcatcatcagataaa

SEQ ID NO: 66073 - DNA, 2775 bp, Oryza sativa
  Clone ID: PAT_MRT4530_6705C.1
atggccgaaaaacaaccacaaccaccatccaccccaggctctgttaagaaaaagatgttgaagttaggattgactgacgtcaatgaagaaaacgtcatgccaatcgaccccgagaaattcacgcccgagcagaagaaaaaatttgaagcaatgttgcagcaagcacgggatctgttcttaaactcatttatacagacccgcaaggagacacttgttcagaaatacaaaataaaggtgattgctgatgatcctaggaccagctctctttgggatggagatgggaaacaagctccaggcggctcggctcagccgagtactaaaggtgctaccgacggctccccaagcgatcaaggcgacaattctcaaggagttcatggcgtccaaggtgatggtgctcaggagccacaaggaggaaatcttaaccagaatagtgaactagcacaagattttttcaataacttccaagatcgggttgattacgctgtgcatcatgctttgatcaatcagtccggggtattagtcaatacattgtccaccatgatgaagacaatagccgatggttcgatagttgagcatcaggctgcaggcccaatttacttgcaaggaggtgtcttcccaaattatctatctttgatcaccgatgctcagccatctgttcaagcagttccctctgttgcacccacgactcagccgacggcgccagcgtcgactcctttgcctgctacactagctatgtcaccaggacaaccgtacagcagcagccgattcagcaggcacccccaatccagccgtttatacaaccaacccaacagcaggaagttgggtaggagcgccgaggatctcatcaagacaaatatggtgctcaaagactttggtggtaatccatcggaaaccaaaggtgttctaaatgtggagctgacagtcggcagcgacaagatagagatcgtgccagctgacagccaatcgaggatggagaaaccaagctgttactttgagggcgtcgtggagggttcaaatgtctacgccaaggatacggatgacaagcaaggtcaaggtttcatgtcggccgatgagttggaagaaatagacgtaggtccagctgagatcaaacggttgtatgatgccggttttattcgtccctgccaatatgctgaatgggtttctagcatagttccagttattaaaaagaatggcaaggtcagggtgtgcattgattttcgagatctgaataaagctataccaaaggacgaatatccaatgccagtgaccgatcagctggttgatgccgcgtcagggaacaaaattttgagttttatggatgggaacgcaggatataatcagatctttatggctgaggaagatatccataagacggcttttagatgccctggtgcaatcggcttatgtgaatgggtcgtcatgacttttggcttgaagagtgccggagcaacatatcaaagggccatgaattatatatatcatgatttaatcggctggctggttgaagtttatattgatgatgtggttgtcaaatctaaagaagtggaggatcacatatccgatttaaggaaagttttcgagagaaccaggaaatatggcttgaagatgaatccaacaaaatgtgcttttggtgtgtcggccggccagttttttggatttcttgttcatgaaagggggatcgaggtaacccaaaggagcgttaatgcgatcaagaagattcagcctccggaaaataagatagagctacaagagatgatcggcaagataaattttgttagaaggtttatttctaatttgtctggaaggttggaaccttttacacccttattgaggttgaaagccgatcagcaatttacttggggggcagagcagcaaaaggctttggataatattaaagagtatctcagctctcgtcctgttttgattcctccacagaaaggaataccgtttaggttatatttatcggctgggtacttttggccgacaatgctggaggattgtttaagatattataagggatgtcaagattgtcagaagtttggagcaattcagcaagtgccggcgtcggctatgaatcctattattaagctttggtcattcagaggttgtggaattgatatgatcggtatgataaacccaccatcgagtaaaggacataaatttatattggtggcaactgattacttcaccaagtgggtagaggcgattcctttaaagaaagttgattctgaggatgctattcaatttgttcaagagcatataatctaccgatttggtcttcctcaaactattactaccgatcagggttcaatcttcgtgtccgatgagtttgttcagtttgctgatagcgtgggtatcaaattgttgaattcttcaccttattatgcacaagctaatgggcaagccgaggcgtctaataaaagtttgataaaattgattaagctgaaaatttctgattatcctcggcaatggcatactcggttggccgaagcgttgtggtcttataggatggcttgttatggatcaattcatgttcctccttacaaacttgtttatgggcatgaggctgttttgccatgggaggttagaatcggctctcgacggacggagttacaaaatgatttaatagccgatgagtattacaaccttatggccgatgagagggaggatctggctcagtcgcgattacgagtctttgcaaaggttatgtgttcatggtgtaatcggttgtggtttgccgatgtacaatggccgatattgttatatcgcccttag

SEQ ID NO: 66074 - DNA, 1581 bp, Oryza sativa
  Clone ID: PAT_MRT4530_67060C.1
atggcgcccccaatcgtcgggaacggacacgtctttcccggccgccttccatggccgccggccgtgtttcccgtcgccgttccgccctctcccatgcccgacttgcttccctccgctataaaatggaaccccctccgtgcgttctctcgttttagccccttcccgagctcccccgtggccgcaccacctctccccgccttctccttctctctctccgccgcctctccctcctcgcccgagcgccgcccggccgtgccgtcgccttcctcggcgtcgcagccgcctcctcttcgccggcgctgcctccgattcgtggggaaatcgccggagacgcgccccgccggcgtccagtggcgtcgccaccactacaccgtctccggcccgctgctgttcgtcgccggtaagccgatcgacgtcgccgtctcctccgtcgacgtcgcagcatcgtcctctcctccggctgctcctcggtttcgccggaacaccgccgtcacgcgcgccgcctctccctcggtctcgtcggcacccactccggcagcccctttcgccgtgccagtgcgccggccgacgtcgccgtctccacctccggcgtcgcagcggcaagatcgcccttggcctcgcctcccccttcgaccgaacccctccgcggtccatcgtcgtcgtctccgttcgttctcgtcgtcgacgtccggtcgctcgcccggctcgtcgtctggctgcgctgccaccgtcgtgggcatcgctgcggcgtgtcccacgccgtcctcacctccgtgcagctgctgccggctgccctcgtcgcctcctcgccagccccagtcgtcgtcgtcgtcgtcctctcgtcgttcccggtcgttgtggcattcgtccctccgtcgagccgtcctcgtccgtcctcggtgtttcgtcaaggtcgctgcagcccccgtcgtcgtcttcgtcctcggctccgcgtcgtcaagcctcgtgccggccgcgtctcgccttcgtccaaggatcgccgctgaagtcgttccctcgccgtccgtctccgccgcgcccgttcgtcgttgtcgtcccctcgcctcgtcgcgtggtggtaaggatctctcctctcgctgccccgtcctcgtcctttcggtgtcgcccgtgcccgttgtgcggttgtcggccccgcttctgtcgttccagaggttcccgaagcgtggttcgcggtcgtcgccgaagccgtgctccgccgtcgctccagctgtcgccgccgctcgggaagaccgccgtcgtcatcgccaagtcgccgccgtcctcgtctgccccttcgcagccgtcggaacccgccggagcatcgtcgccgtcgtcaacccgaaggtagccgccgcttccttctcgtcgccgtcgccgtccgttccttttccgccgccgttttggtcaccggtgtgttcgccgcgttgtcctctacgtgctggtgccctccgttggtgccgtggtgccgccgttcgccggcgagtgtccgccgcccgagccgtcttcttcgccgagccgccgccgtcgtcggtgacgtcatcgctgacgtcatcgggatcctatcccgtgagccggtcgtag

SEQ ID NO: 66075 - DNA, 1398 bp, Oryza sativa
  Clone ID: PAT_MRT4530_67061C.1
atgggcgaggcggaggtggatgttgaaggtaatgacgttgccgatgaacttggtcaaatattgcgggatgtacaggaggattgcgaaagtgaaaaggaggtgcagaaactggagcgcatccccctcccgcgatctcccgtggtccctagccacctccccgccgtcgtcccctctctcgcgtgccgccggccgtcttcagccgcccctgccgccgcgttagcacgccggccggctgtgccgtcgcctcctccagcgtcacagccgcctcctcttcgccggcctgccctctgtttcccgcgaagaccgccggaggcgcgtgcccgccagcaactggtggcattgccgccacccactgcctccagccgcccctgccgcgccgctcaagtgcgggccggccgcaccgtctcctccctcggcgtcgccgcgtcgacctccaccctggcctaccctctgattcgtccggagaccgccgtcgcccgcgccggcctctccatcctcttcgtcgccgacgtcccttcggccgcccctccctcctccccggctcgtcggctcgctgcgccaccaccacctccggcatcgcagcggcaaggtcgccctaggcctcgcctccccttcgaccgaaccccaccggtgttcgtcgtcgtcgtcatcgttcctcctcgccggctcgtcatctcgcggcgccgcctccgtcgtcggcatcgcagcgacgtgttccacgccgtcctcgtctccgtgcagccactgccggctgccctcgtcgcctcctcgccggccccggtcgtcgtcgtcatcgccctctcgtcgttcccggtcgtcgtggcccccatcctcgtcttcgtcctcgcctccacgtcgtcaggcctcatgccggccgtgtctcgccttcgttcaaggatcgccgccgaagtcgttccctcgccgtccgtcttcgccgcgcccccgtgcaccgccgccgttccggtcgtcgtcgtcgcttggggaggtcgccatcgtggtcgccaagtcgccgccgtcctcgtccgctccttcgccgccgccgaagaccgccggagcaccgtcgccgccgtcgacccgatctccgccgtcgcttcttcctcgtcgccgccgccgtccgttggtcttccgccgacgttttggtcatcggtgagttcgctgcgccgtgatctacgtcttggtgccctccgtttgtgccgtagagccgccgttcgccggcgagcgtgcaccgtccgagccgtccgagccgccgagccgccgccggaggtgacgtcgtcgctgacgtcatcgtcgccctctccccttctgtcgttccggaggttcccgaagcgtggttcgcagtcgtcgccgaaggttcgtaaggccgttctctctgagcaaggcaagtcacatcatccttga

SEQ ID NO: 66076 - DNA, 666 bp, Oryza sativa
  Clone ID: PAT_MRT4530_67062C.1
atcatgggattccaaaattaaatagggggaattaatccccattgattcctctttgatttcccccgttttcccccttgaatggcacccccaatcgcccggaacggccgcgccattcccggccgccttccatggccgccggccgtgtttcccgtcgccgttccgccctctcccatgcccggctccctcccctgacctataaaatggaaccccctccatgcgttctcttgttttagcctcctctccccggtcagccctccgtttcacggggaaatcaccggagacgcgtcctcgccggcaaaacagtggcgttgccgccactgtactgcctccagccacccctgccgcgccgctcaggtgcgggccggccacgccgtctcctccctcggcgtcgccacgtcgacctccaccccggcctaccctctgattcgtccggagaccgccgtcgctcgcgccggcctctccatcctcttcgtcgccggcgtcccttcggccgcccctccctcctccccggctcgtcggctcgctgagccaccaccacctccggcatcgcagcggcaaggtcgccctcggcctcgcctcccctttgaccgaaccccgccggtgttcgtcgtcgtcgtcatcgttcctcctcgccggctcgttgtctcgctgcgccgcctccgtcat

SEQ ID NO: 66077 - DNA, 1524 bp, Oryza sativa
  Clone ID: PAT_MRT4530_67063C.1
atggccagcaagactcttcgcgagttcgctgctccctctactgacaatgtggccattgggccgcaaatcaacataggagacatggatttcgacttgaagtccagccttatcacaatggcgcaggctagcccgttctgtggcaagcctaatgtggatgccaatgctcatctgcaacagttcctggagatctgtagcacgtacaccatcaagggcgtcagtcccgacgccatcaggctgcggctgtttccgttctcccttctcgggagagcgaagcagtggttttatgccaaccgtgctgctgttaacacctgggacaaatgctcaccgggattcctctcgaaattcttcccgatgggtaaaaccaatgcccttcgtggaaggatttccaatttccagcagacaagggacgagtctattcccgaagcattagaacgactgcaggagtatgtggccgcttgtcctcatcatgggatggacgactggctgattgtcacccccttcccgagattctccgtggctgcaccacctctccccacctcctccttctctttcctcggcgccggccaccctccagccgcctgtgccgcctcgcccgtgcggtggctgacgtcgccaccaccttcctcggcctcgcagtggcatcgccaccactgcaccgcctccagtcggccgttcaccgtgcctaaagcgttggccgacgctgctgccccctccctcggcacggtgacatcgccatcaacctcggccactccccggtttcgccgaaatttccccggtcggcccttcctccacccatgcgccgtcggccgcgccaccaccgcctccggcatcgcagcggcaaggtcgccctcggcctcgcctcccctccacccgaaccccgtcggtgttcgtcgtcgtcgtctccgtccgacgtcgccatcccctcctccggtcggccgttcctcctcgccggctcatcatctcgcggtgccgcctccgtcgtcggattcgcagcggcgtgttccgcgccgtcctcgcctccgtgcagctgctgccggctgcctcgtcgcctcatcgccggccccggtcgtcgtcgtcgtcgtcctctcgtcgttcccggtcgtcgtggcgtccgtccctccgtcaagccgcgttcgttcgtcgtccgcgttccgtcaagtgagctgcggcagccccgtcgtcgtcttcgtcctcagctccgcgtcgtcaagcgttgcgccggccgcgtctcgccttcgtccaaggatcgtcgccgaagtcgttccctcgccgttcgtctccgtcgtccccgagccgtctccgctgcacccgtttgccgttgtcgttcccacgcctcgtcgtgtggtggtaaggatccgtcctctcgctgcccccgtcctcgtcctttcggtgtcgcccgtgcccgttgtgcggttgtcgaccccgcttctgtcgttccgaaggttctcgaagcgtggttcgcggtcgtcgccgaaggttcggaaggccgttctctctgagcaaggcaagtcgcatcacccttga

SEQ ID NO: 66078 - DNA, 2080 bp, Oryza sativa
  Clone ID: PAT_MRT4530_67064C.1
ttaccaccacgcgacgaggcgtgggaacaacaacgacgaccgggcgcggcggaggcggccgggaactatggagacgaacggggaggggacgacttcggcggcgatccttggacgaaggcgagacgcggccggcacgagacttgacgacgcggaggcgaggacgaagacgatgacgggggctgcagcgcgaggagacgacgagccggcgagacaacgacgaccggggccggcgaggagacgacgagggcagccggcagtggctgcacggaggcgaggatgccgtggaacgtgccgctgcgatgccgacgacggaggcagcgccgcgagacgacgagccggcgagaaggaacgatgacgacgaacaccggcggggttcgatcgaaggggaggcgaggccgagggcgaccttgccgctgcgatgccggaggggaagatggcgacgtcggccggcgcacgggcacggcggaggaggctgccgaaggcgacgtcgacgaggagaaaggagaggccggcgcgggcgacggcgttccggcgaaacagaggagcagctggcggtgaggacaacgctgcgacgtcgacggaggagatggcgacgtcgatcggcgtaccggcgatgtacaggagccgaccggagaccgggaggtactggacgcagacgaggaggccaccccggcgagcttcgggcgaggaggaggtgatgccggggaaggaggcgatgccgcggtgtcgacgaagcagacggcgacgtcggccgacgctccgacgagggacagcagccggctggagggagtacagtggcaccaatgccactggttgccggcggggacgcgtctccggcgatttccccacgaatcggaggcagcgccggcgaagaggaggcggctgcgacgccggggaaggacgtgacaactccctggatgcccgttgctactcatgttgtgggcgcacgagcacttcgacattgggaggcctcagctggactcgtatgcaaactacggattgcgagagatgtacaagtccagggttggtgacctcgacgatcgtcccactatggaatccttgcggacacaccctgaagtgggttagcgggacgacgcgtcgtgtgtacacacagttcgtagctgactttgatcagcttatgcctgaccgtgtgcggtggacttcgtacacacagcacgatgtcaatgatcatgcaccgcactgtctcgcggacctttgcacgcgggatcaagaactctggaggacgacttgtcacctcgtgctggacgtgcacatcgagccacacaatgtccacagggttcttaaacagttgggcatgtatcaagagttccctcccagagttggtcgtgctttggctgatagtcttcataggtattcccgaaaggggctcgggctttcctacgagcttgttattgtgaccacggcagaatttgttgagcacgttcaggtcgagtcagacaccctgctgcaaagactagagacgagacctccagtcgtcagtcctgacgacgtggcgagcgtccttcgcaacttccgtgcccgtgctgccgcactacttcgtcgtgtctcctgtcggagcgcggcagatgtggtgcagccgtctgcccgtagggcatcaccaccactaccccgacgttccagcgtggatcacagtgctccctcctcgtcacgccgcgggtacgaagcggcccggagatctcacagtcgtccttcctttcaacacaccccagcaccggagtacaccagggggtcagctggatcaggggtacccccgacgagcacggcacagccacgtccccaggcattccaaactctgccttatgttcaccccacccagggagcatctgggtcgggacacttcccttacatgccaacaggggacaacgtgttgaacacacctgcatggagacttcacgtcactccgcacgatgaatacggttcagcgtcgacgcatcatggaatgcctgcttactcccctcgcacagcattcgttgaggacttcttttccactgagcctcctcaaggggaatcagggatggattactggcacgcagcacctcaggtgacacagtcgacgtag

SEQ ID NO: 66079 - DNA, 306 bp, Oryza sativa
  Clone ID: PAT_MRT4530_67065C.1
atggtgttcccgagcaacgcgcacccggagagggtggtggaaggcggaggaagagagagggatggccggaacggcggcaacaagagctcagttccggcgataagagaaggtggtggtggcggcttatcccaaggtggagggagaggggaaagggggaaaatggaatcatctgggcaaggcggagttggtggcgcaagggtttggcttgcgaagcttcggtcgcggaggtcggtttggagagaaggagagcgactaaggcatggcgacggcagcgaagagaagaggagcacggcgccgatttcttag

SEQ ID NO: 66080 - DNA, 1113 bp, Oryza sativa
  Clone ID: PAT_MRT4530_67066C.1
atggctggctccggcgacatcgacggcgaggtcgtcttcgaggtcgaacactgcatacgcatcttcaagggcggccgcgtcgagcgctacttcggttccgactccgtcccggcctccacagatgccgccaccggcgtcgcctccaaagaccgcgccatctcccccgacgtctccgtccgcctctacctcccgcccgtcgccggcgtgagcggggaaggtgagggaaagaagctcccgctcctcatctacttccatggcggcggcttctgcctccacacggccttcaacttcgtcttccacgcctacctcacctccctcgccgcgcgcacccgagccatcgtcgtctccgtcgagtaccgcctcgcgcccgagcaccccctccccgccgcgtacgaggactcgtggcaggctgtcctctgggcggcctcccacgcccccggcgccggcgaggagacctggctcaccgaccacgccgacttctcccgcgtgtacctcgccggggagagcgccggcgcgaacatcgcgcacaacatggccatgcgagccggcgccgaggggctcccccacggcggcagggtcaacggcgtcgtcctagtccacccctacttcctcggccgcggcaaggtcccctcagaggactgggacccggcgatggcggagaacgtggtgaagatgtggagcgtcgtgtgcccggcgaccaccggcgtcgacgatccgtggatcaacccgctcgccgacggcgcgccggggttggaagggctggcctgcggccgcgtgctcgtgtgcctcgcggagaaggatgtgatccgcgaccgcggccgcgcgtactgcgaggggcttaaggcgagcgggtgggcgggggaggtggaggtcgtcgaggtggccggccatggccactgcttccacctgatggacttcaacggcgacgaggccgtcaggcaggacgacgccattgctgagttcgtaaatcggtagagaatccaatggcctcttgggtaactgttgcattgggcatgctgctgtctattgctattgctgtatgatttgttatttgatttatgctgatttcgcctagtatgaatccatgtaaaaaaaaaaaaaaaaaaaaaaaaa

SEQ ID NO: 66081 - DNA, 726 bp, Oryza sativa
  unsure (1)..(726): unsure at all n locations
  Clone ID: PAT_MRT4530_67067C.1
gcttctcgttcttgttttctctcttctgataatcttcacgagacccaaattgatcgccgatcatcacttaactacaagaatctcgccgatttatccttcgatttctacgtttcagccttcgattccgccgtttttacctccatcgccgtcgcgcagagcacaatctccgacggtgaagccgtctttgccatttgtaccggcgttgttcgttttcggagattcctcagtcgatagcggaaccaataactttcttggaaccttagcgagagcagatcggcttccctacggtcgcgatttcgatacgcatcaaccaacgggaaggttttgcaatggaagaatcccagttgattatctaggttacaattcttccccagtttctggatattgattatagtcccagttgattcttagaagtgtaagcgaaaatgttgacttcttgtgttcgattctttatacaattgagaggaacaaattcattgaggaaatgttgaatcattcgttttttgttgtccattgaaaatcttgtgaacagctgatcgtttaggcttaccattcgttcctagctatcttggacaaactgngactgttgaagacatgtttcaaggagtaaactatgcatcagctggtgctggaatcatcttatcaagtggatctgaattgggccagcgggtttcatttgcgatgcaagttgagcagtttgttgatacgtttcagcagatgatactg

SEQ ID NO: 66082 - DNA, 606 bp, Oryza sativa
  Clone ID: PAT_MRT4530_67068C.1
agccgagccggcccacagcccagccgcctctctcctcctcctcccagtgcgcgtgttgcgcacggcgcacgccgccgcaaactcttttccgtcgttgctaagaaatcggcgccgtgctcctcttctcttcgctgccgtcgccgtgccttagtcgctctccttctctccaaaccgacctccgcgacctataaatagacaacgaggtcgcccctcttcctctccacaacggagctttccctttttctctctctactcccatgtccggccatcactaccgtcggccgatctccctcaccgaagcttcgcaagccaaacccttgcgccaccaactccgcctcgcccaggtgattccatttttccccttcccctctccctccaccttgggataagccgccaccaccaccttctcttatcgccggaactgagctcttgttgccgccgttccggccatccctctctctccctccgccttccaccaccctctccgggtgcgcgttgctcgggaacaccatctcctaccggcgttcccacctcccgaccaccggagagccggcgccccgctcgccctcttagtggtcggagcctcactactccctcgacctccac

SEQ ID NO: 66083 - DNA, 317 bp, Oryza sativa
  Clone ID: PAT_MRT4530_67069C.1
gctgcgcagcggaaggcgctaagaaatcgaaggaattctcgcgaagtagcgcgtgtcgttatagaggaagtagtcgatcgcaccggctcgaccttctcctcgccgtattcccacgccgatcagcatcacaaatcagaggcgcctctaccggatccatcactcgggcctccaaggcccataggactcctattcggatccctatctgaagttcatgtacactcggctgtaacccgaaaactccttttcggtccacgcgtcaacagcggctcctagcagaacgtattgactcaccgggcatacataaagatcatatcggc

SEQ ID NO: 66084 - DNA, 596 bp, Oryza sativa
  Clone ID: PAT_MRT4530_6706C.1
gaaccactgccagtgacggagccaggatttcaaagttaggtattcccatctaagcgctgagccgctggccgcccctgcccctcgcggctaccggccacccaaccggcttgaccgcctgagcttggcggagtgtcgggtgccggccgtcgtggcaatggcctccccctccgcggtagcacgggccagctcccgccgccggttgccgccttgcctcgtcgcgccgccgcctagggtttgcaaatagggagcggcgcgagggagccgagctatggagggatgggtcacggagggagagcgagagggcgccgtccgggagcctgggggcctccgcccccgaccactgccgcctgccgcgcgggagaccgccgtgtccccttccggccgatttggcggaggggagggcacggcagctgccgccttcgccgggccgtcgccaacctcgggagcccgccgccaccgccgggcagccgcgggagaccttcacctcccctcccgccggatctggcggaggggagggcgcagcaaccgccaccttcgccaggcatccgcccgcctcgatcgggagcttgccgccagcgatggaggtagcctcgtca

SEQ ID NO: 66085 - DNA, 320 bp, Oryza sativa
  Clone ID: PAT_MRT4530_67070C.1
gcgcagcggaaaaaggcgctaagaagtcgaaggaattctcgcgaagtagcgcgcgtcgatgtagaggaagtagtcgatcgcaccggctcgaccttctcctcctcgccgtactcccacaccgatcagcaccgcaaaccagcggcgcctctaccggatccatcactcgggcctccaaggctcgtaggactcctattcggatccctatccgaaattcatgtacactcggctgtaacctgaaaactccttttcggtccatgcgtcaacagcggcccctagcagaacgtattgacccgccgggcatacataaagatcatatcggc

SEQ ID NO: 66086 - DNA, 462 bp, Oryza sativa
  Clone ID: PAT_MRT4530_67071C.1
atgcgaattccggcgacgaatcccgacggaggaagggcggacggggtggagttcgtccttgcgaacccgacggcggcgagcctagcggcggctagcggcgggaaaggcggcggcgggtcggcaccctcgcccttcttggagctcctccccttctctgtggggagtttctgggttggattgaggcggcagctcgtcagcgggggaagcctaggctgccaaagcaatgccatccagtcccgggttctcctttcgtccaaagctggcgaggaggccagcgggtggtggaacggaggggtcctgggccagctctcaggcaagggtcccaggcgaaagcctagtccggtggttcaccgggccggcagcggctacgtcttcgggcgtcgtaacctccttggggcgttgtcgagggagtcttgtctctgtggtgttgccgtaggcctagcggcgttcggccacgcttag

SEQ ID NO: 66087 - DNA, 333 bp, Oryza sativa
  Clone ID: PAT_MRT4530_67072C.1
gtacagcggaagaagacgctgagaagtcgaaggaactctcgcgaagtagcgcgcatcgatgtagaggaagtagtcgatcgcaccggctcgaccttctcctcctcttgcgttctcctcgccgtactcccacgccgatcagcaccgcaaaccagcggcgcctctaccggatccatcattcgggcttccaaggcccgtaggactcctattcgaatccctatccgaagttcatatatactcggctgtaacccgaaaactccttttcagtccacgcgtcaacagcggtccctagcagaacgtattgacccaccgggcatacataaaaatcatatcggc

SEQ ID NO: 66088 - DNA, 333 bp, Oryza sativa
  Clone ID: PAT_MRT4530_67073C.1
gcgcaacggaaaaaggcgctaataagtcgaaggaattcttgcgaagtagcgcgcggcgatgtagagaaagtagtcgatcgcaccggctcgaccttctcctcctcgtgcgttcttctcgccgtactcccacgccgatcagcaccgcaaactagcggcgcctctaccggatccatcactcgggcctccaaggcccgtaggaatcctattcagatccctatccgaagttcatgtacactcggttgaaacccgaaaactccttttcggtccacgcgtcaacggcggcccctagcagaacatattgacccaccgggcatatataaagatcatatcgac

SEQ ID NO: 66089 - DNA, 282 bp, Oryza sativa
  unsure (1)..(282): unsure at all n locations
  Clone ID: PAT_MRT4530_67074C.1
ncccggccgggacatccaattagcctttaagctttcccataagccaaggtacaaaaatagcctattggccgaagtttcccgtttttcttcttccgggtttttcctataataccattttggggggttcctttttatttatgcccatgggtttttatggcccaggtttttttaatcccaaccccaaacccatgggattaggccctccgggcaagggaagtttttggggaggggagaattttgtataaaccacaagccttttgggccccctttcgaaaagggggg

SEQ ID NO: 66090 - DNA, 338 bp, Oryza sativa
  Clone ID: PAT_MRT4530_67075C.1
gcgcagcggaagaaagcgctaaggggtcgaaggaaccctcgcgatgtagcgcgcgtcgatgtaaaggaagtagtcgatcgcaccggctcgatcttctcctcctcgttcgtcctccttgccgtactcccacgccgatcagcaccgcaaaccaacggcgcggcgcctctaccggatccatcactcgggcctccaaggcccgtaggactcctattcggatccctatccgaagttcatgtacactcggctgtaacccgaaaactccttttcggtccacatgtcaacagcggcccctagcagaatgtattgacccaccggtcatacataaagatcatatcggc

SEQ ID NO: 66091 - DNA, 560 bp, Oryza sativa
  Clone ID: PAT_MRT4530_67076C.1
acagaagagtcatccaacactgaaccgaagcctctgctcttcgtagcagagcagggcggcattccagaacccgagctgaatcctcagctccagacagctgaacaacatggcagcgacggcaacacggccatgttccagccgtcggtgacgtccggcggcatttggggtccggccgacgaggcgtggttcagcgcttgggggccaggaagctccgtctgggactacgacatggacagcgcccacgtgcctcctcctccagtctcgcttggccggtgagcagaccggcatggactacgcctacaccgcgccggaagtcctcgtggcaccggtgccggcggcagggacagccatggccactgccgcttcctcctctcttcctccatcgtcctcccccatcacttgccacagtccaacccttcgcatggaaggactaaacaagcatcacacgccactcttacacgcaggaacacctaggttgtgagatgcacacaggttgcaaatttttgagacagcttgtggcatcgcacagtatgatcagcgatcacatcgcaggaatatct

SEQ ID NO: 66092 - DNA, 1990 bp, Oryza sativa
  Clone ID: PAT_MRT4530_67077C.1
ccccgggctgcaggaattcggcacgagggcttcccgccactcgctgtcgcccgccgcgacgcccatgcacgtccacgccgcgcgccccgtcctccccgccacgccacccaagctccgccgccaccatgccgccgccctccgcctcaccgtcacccgcgccgccgcgccggggagcgacgccaccggcggcggcggcggtggtaataaggccgtcattgtcggtggcgggctagcgggcctcgccgcggcgaaccacctggcgtccatgtcggtgccgttcacgctgctcgaggcgtcggaccgcctcggcggccgtgtcgccaccgacgaggtcgatgggtatcggttggatagggggttccagatcttcctcaccgcctacccggagtgccggcgtctccttgacttcccggcgttgcggctccggccgttttatcctggagcgctcgtcttcctcggcgccggcgagccgttctacctgttgtctgacccgttccggcttcctctgcgttccctctccgccgtgttctcccccgtcggaacgctcgctgataagctcctcgtcggcctcgcccggctccgcgcggcgtccaccccggacgacgtcatcctctcgtcgccggagacgaccacggcggcgcacctggagaagctcgggttctcgccgtccatcgtggagcggttcctgcggccgttcctggctgggatattcttcgacccggcgctcgacacgtcgtcgcgcctcttcgagctcgtgttcaagcgcctcgccctcggggacaacgcgctgccggaggccggcatcggcgccatcgcgtcgcagctcgcggaccgcctgccggcgggctccgtccgcctcaactcccgcgccgcggccatcggccagtccagcgtgacgctcgacaccggcgagaccgtctccggcgagctcggcgtcatcgtcgccgtcgagcagccggaggccgagaagctcctaccgcagctaccaacgattccggcgaaacccaagaagaactccgagcggagcaccgtctgcctctacttcgccgccgacaaggcggcggtccaagaccccatcctgctcctcaacggctcaggcaaagggatcgtcaacaacatgttcttcgccaccaacgtggcgccgtcgtacgcgccgccggggaggtcgctggtgtccgtatccctcgtcggctccttcgccgggcggtccgacgccgacctcgccggcgaggtggtcaccgagctcgccgggtggttcggcgccggggaggtcgcgtcgtggacgcacctgaggacgtaccgcatcggcttcgcgcagccggaccagacgccgccgacttcgccggcggggcgcgacccgagggtcggcgacgggctgtacatgtgcggcgaccactggtgctacgcgacgttcgacggcgcgctgaatggcgagcagcggcgggcggcgcagaggggcggcgacggagctgtgaggcagcaggccgcgggtggagcggcgcgtcgcgccccggcgcccgcgccccagcgtcgccacgtcgatgtcgcggatgttgttcgccaacgtcgtctcgttcggggcggcgtagcaggtcttgttcaggacgttgtcgtggtagttggcattgatctcggagttcggctcggtgaggcggtcgttgaaggagaagcagtgcgccttgcctatggagtacgcgccagagaggatcaccagctcctccggggtgaatcccttcgccgcgaagttggcgctgtgagcttgtccaagtcggccttggagtcagggagcatattttgggcgacctcggaggacgagacaatgccgtcgaggcggccgaccgggacattgaatttgacgccgccgttgctcatgtacctcgatgcgtcgtggccagtgaacgcgacaatgtccgcgcaggagatgacgccggggcacgcagcctcgatactagcaaattaaccatcaaattaaacacagcacattaaaaat

SEQ ID NO: 66093 - DNA, 331 bp, Oryza sativa
  Clone ID: PAT_MRT4530_67078C.1
gcgcagcgaaagaaggcgctaagaagtcgaaggaattctcgcgaagtagcgggtcgatgtagaggaagtagtcgatcgcaccagctcgatcttcttctcctcgtgcgttctcctcgccgtattcacatgctgatcagtaccgcaaaccagcggcgcctctaccggatccatcacttgggcctccaaggcccgtaggactcctattcggatccttatccgaagttcatgtacactcggctgtaacccaaaaactccttttcggttcacgcgtcaacagcggcccctagcagagtgtattgacccacggggcatacataaagatcatatcggc

SEQ ID NO: 66094 - DNA, 4551 bp, Oryza sativa
  Clone ID: PAT_MRT4530_67079C.1
atggccgaacgggcagtggcgcacagcctctctccgaacgctagcggtgacgacggggagcagaacccgcgccgtcgggctcgcaccccaccgtccccctctcgccgaaatcttgggcggggggaggcgctcagggaggtcggaggatccgcgacttcgccgcccgcgggcgacgggggaggacgacgagacggggcgcgtcaccgcctcgtctacggcgatggcggcacgccccagggcgcgctccaggctgcgggcgcgctcctgcgtcacccgcccgtcgtccccgatccagagactccagcccgacgttggctggatgacgtggccgacttggtcatgacggcgcagcagcgactaggcgccggcgggcggtcctccgccaccgaggcctctggtgctgccgccgccggctccaattcgtcgaggtggagggcgcggcgagcggcggccgttacccgccgttcgtccgccattccctcgtcaacgcctccaacccaagaagatgtgcatggggggccggatgcccgcctcgatatcgagcgccggcgcgacgatcgtcgcgccgcccacgcaacggagggcgcttcctcgtccggagcgccgcttcggtccgggcacgggggccggccccccgtgtccccggttggcggtgccggctgtcgagcctttgtggcgagccttcggaacgtccgttggcccccaaggttccggcccaccatcaccgaaaaatatgacggaagcgtcaaccccgccgagtttctccagagtctacacgcgcggggatggaggccggcggggggtgacgacagggtcatggcgaatttctttcccatgaccctgaagggtcaggcgcggggttggctaatgaacttgccacccgcgtcggtccactcttgggaggatttgtgccagcagttcaccacgaacttccagggcacatatccgcgcccgggcgaagaagcggacttgcatgcggtacagcgaagggacgatgagtctcttcgctcgtacattcagcggttctgtcaagtccgcaacaccataccgtgcatccccgcacacgcggtgatctacgcgttcagggggggcgtgcggcacaaccgcatgctcgagaagatcgcctccaaggagccccagaccaccgcgcagctttttgagctcgcggaccgtgtggctcgcaaggaggaggcctggacctggaactccaccggttctggtgtggcagctccggccgcccccgggtccgccgctcagtcagggcggcgggacaggaggaggaagaaggggtcggcccgttccgacgacgagggtcatgtcctcgccgtcgagggcgcttcgcaggccccccgaaaggggaggcctgcgagcgacaaaaaggaggtcggcgctcccagcaaggagcagcccaaccaggcaacctttgacgccatcaaggccccggggatggtgctccggccgtcccagccgatcatcggtgtgacgccggggcacacctggccgctgggtcatatcgacctcccggtcaccttcggtggttccgccaacttccgcacggagcgggtggacttcgatgtggcggacctcagtctgccctacaacgcggtcctggggaggcccgcgttggtgaagttcatggcagtggtccactacgcctatctccagatgaagatgccgggccccggtggccccatcaccgtccatggcgacctcaaagtcgcgcttgcttgtatggagcagcgcgcggaccaccttgccgtggcgtccaagcccgtaggtggcgacgagagactcagcacctccgtcccggccgccccaaggcggcggatggtcacgtgcgacgaggtcccggaagacgcgctcgtctccttcctgcgggcaaacgccgatgtcttcgcctggagaccggcggacatgcccggggtccccagggtagtgattgagcaccgtctcgccgtgcggccgggcgcaaggccggtccggcagaaagtgcggcggcagggcccagaacgtcaagccttcatccgcgaggaggtggcgcgacttctggaggccggattcatccgcgaggtcatccatccggagtggctggcgaaccctgtcgtcgttcccaaggcgaacggcaagcttcggatgtgcattgactacaccgaccttaacaaggcatgtcctaaggacccttaccccctgccacgcatagatcggattgtcgactccaccgcggggtgcgaccttttgtgttttctagatgcatactctggttatcatcagattcgcatggctagggacgatgaggaaaaaactgcattcattacccccataggaacttattgttatacgacaatgcctttcgggttaaagaatgcaggtcctacttttcaacgtactactcgaatttctttgggtagccagataggacgcaatgttgaggcctatgttgatgacttggttgtgaagacgcgcaaccaagagaccttactctcggatctagcagaaactttcgaaagtctccgctccgcccgcataaagctgaaccccgataagtgcgtgttcggcgtgcctgcgggcaagcttctcgggttcttggtctctgcccgaggcatcgaggccaaccccgagaagatacgagctatagagcggatgcgcccccccagcaagcttagggatgtgcagtgcgtcaccggctgcatggccgccctaagtcggttcatatcgaggctgggagagaaggcgctacccctatttaagctcctcaaacgctccgggctgtttacctggacggaggaggctgagcgggccttcactcagttgaaggcgtacctcagttctcccccagtcctggtcgccccggagccagatgagccgttgctactctacctggcggcaaccccgcaggtggatggccccggggccactgcgggaaggccgcgcctgtcgccctctgaccccgaggtcatcggcacagaagccgagtgcgccccgcgtggcctctcgaatgaagagcgccctggagatgcgacccctggcaaaggggatcggccctgccgaaaggtgcagcggcccgtctacttcgttagcaaggccctccgggacgccaagacccgataccctcaggcccagaagatgctttacgctattctgatggcttcgaggaagttgcgccattatttccaggcgcatcgggtcacggtggttacgtcttaccccctcggccaaatcttgcataaccgagagggtactggacgggtggtgagatgggcaatcgaactctctgaattcgatttgcgctttgaaccacgccacgcgatcaagagccaggccctcgccgactttgtggcggagtggaccccagctcccgagcccgtctccgcccccgaggtcagctcgggcccctcgcagctacctcacaccgcctactgggtgatgcagttcgacggctccctgtctcttcagggcgccggtgcgggggtcacgttgacctcgccgagcggagacatcctcagatacttggtccgcctcgactttcgggcgaccaacaatatggcggagtacgagggactccttgcgggactcagagtggcagctgggctggggatccgccgcctcctggtgttaggcgactcccagttggtcgttaaccaggtctgtaaggagtaccggtgctctgacccgcagatggacgcttacgtgcgccaggcgtacctcgcagataagactctacccgaggaccgcgaagggagtgaacgcgtccggcgcatctccaagcgctacgtgctggtggaagggaccctctatcggcgcgcggctaacggagtcctcctgaagtgcattcctcgggaacaaggcgtcgagcttctcgccgatgtccatgaaggcgagtgcggagcccactccgcctcacgcaccttggttggcaaggcctttcgccagggtttctattggccgatggctctcaacgatgcggtcgacctggtccgacggtgcagggcgtgccagttccacgccaggcaaacccatcagccggcccaggccctgcagaccatacctctttcgtggccgtttgctgtctgggggctcgatatcctgggtccgttcaggcgggccccgggcgggttcgagtatctgtatgtcgctgtcgacaagttcactaagtggcccgaggcttatccggtcatcaagatcgataatcactccgcgcttaaattcatcaggggcatcactgctcggttcggggtgcctaaccgtatcattacggataacggcacccagttcactagtgagctcttcggtgactactgcgaagacatgggcatcaagctctgcttcgcctcccccgcccaccccagaagcaatggccaagtggagcgcgccaacgcggaaatcctcaagggcctcaaaaccaagaccttcaacatcctcaagaagcacggcgactcgtggatcgaggagctgccagcggtgctctgggcgaaccgaaccacgccaagccgagcaacacggggaaacgcctttcttcctcgtctacggcgcggaggcggtcctcccatctga

SEQ ID NO: 66095 - DNA, 1554 bp, Oryza sativa
  Clone ID: PAT_MRT4530_6707C.1
atgaatccgacaaaatgtgcttttggtgtatcggctggccagtttttgggatttcttgttcacgaaagagggatcgaggtaactcagcggagcattaacgcaatccagaggattaaacccccggaaaataaaaccgagttaaaggagatgattggcaacataaattttgttagaaggtttatttccaatttatccggaaagttggaacctttcatgcctttattgaggttgagagccgatcagcaatttacttggggggtagagcagcaaaaagctttggataatatcaaggattatcttagctctcctcctgttttgattcctccacagaggggaataccgttccgattgtatttatcggctggtgagaagtcaatcggctcggttctggttcaagagcttgaagggaaggagcgagttgtgttttatcttagtcgacggctcttggatgctgagactcggtattctcctgtagagagttatgcttgtgcctttatttttcgtgtacaagctgaatatgaggcagtgctcaagaggttgcagttactcaaggaagttgaagccgatactattgaaatcatgggggattctttgctagtaatcagccagttggtgggcgaatatgaatgcaagaatgatacattgctggtttataatgagaagtgcttagagttaatgaaagagtttcggctggttactttgaagcatgtatctcgagatcaaaatcttgacgctaacgatttgactcaaggggcatcggggtataagccgatgatcaaggatgtgaaggttgagattgcagcaatatcagccaatgattggaggtatgatgtgcatcagtatttgagcaatccttcccaatcggcttctagaaaattacgatataaggcattgaagtatacattgctggatgatgagctctattatcggacaattgatggggtattacttaagtgtttgagtgccgatcaggctaaggttgcaatcggtgaagttcatgaggggatctgtgatcagggttccatattcgtgtccgatgagtttgttcagtttgctgatagcgtgggtatcaagttgttgaatttttcaccttattatgcacaagctaatgggcaagccgaggcgtctaataagagcttgatcaaattgatcaagcggaagatttctgattatcctcggcagtggcatactcgtttggccgaagcattatggtcttataggatggcttgtcatggattgatccaagttcctccttacaaactcgtctatggacatgaggctattctgccttgggaagttagaatcggttctcgtcgaacggagttgcaaaatgatttgacagccaatgagtattacaatcttatggccgatgagagggaggatttggttcagtcatgtttgcgagcccttgcgaaggttactaaggacaagcaacgcgtcgctcggcattataataagaaagttgtgcctaaggatttttcagagggcgagcttgtatggaagttgatattgccgattgatactcgtgatagtaaattcgacaagtggtcataa

SEQ ID NO: 66096 - DNA, 333 bp, Oryza sativa
  Clone ID: PAT_MRT4530_67080C.1
gcgcagcggaagaagacgctgagaagtcgaaggaactctcgggaagtagcgcgcgtcgatgtagagaacgtagtcgatcgcatcggctcgaccttctcctcctcgtacgttctcctcgccgtactcccacgctgatcagcaccgcaaaccagcgacgcctctaccggatccatcacttgggcctccaaggcccgtaggaatcctattcggatccctatccaaagttcatatatactcggttgtaaaccgaaaactccttttcggtccacgcgtcaacagcggcccctagcagaacgtattgacccaccgggcatacataaagatcatatcggc

SEQ ID NO: 66097 - DNA, 4898 bp, Oryza sativa
  Clone ID: PAT_MRT4530_67081C.1
cgcgggcgatggagaagaacggcgagacggggagcgtcgcctcctcgtctacggcgatggcagcacgccccagggcgcgctccaggttggtcatgacggcacggcagcgcctaggtgctggtgggcggtcctccgccactaagacctctggcgctgctaccaccggctccatgtcgtcaaggcggagggcgcggcgagcggcggccgttgctcgccattcggccgccactccctcgtcagcacctccgacccgggaagatcagcgtggggggccggatgcccaccgcggctccgaacgccggcgtaatggtcgacatgctccccatgtaacggagggcgcctcctcgtccggagtgtcacctcagcacggacgcggggatcagccctccgtgcccccggttggtggtgtcggctgtagagcctttgtggcgagccttcggaatgtccgttggcccccaaggttccggcccaccatcaccgaaaaatatgacgggagcgtcaaccccgccgagtttctccaggtctacacgaccgggatcgaggccgctgggggtgacgacagggtcatggcgaatttctttcccatggccctgaagggacaggcgcggggttggctaatgaatttgtcacccgcatcggtccactcttgggaagatttgtgccagcagttcaccatgaacttccaaggcacgtatccactcccaggtgaagaagcggacttgcacgcggtacagcgaagggatgatgagtcgcttcgctcgtacattcagcggttctgtcaagtccgcaacaccataccatgcatccctgcacacgcggtgatctacgcgttcagggggggcgtgcggcacaaccgcatgctcgaaaagatcgcctccaaggagccccagactaccgcggagctttttcagctcgtggaccgagtggctcgcaaggaggaggcctggacttggaacccctccggttccggagtggcagcttcggccgcccccggatccgctgctcggacagggcggcgtgacaggaggaagaagaagaggtcagtccattccgacgacgagggtcatgtcctcgccgtcgagggcgcttcgcgggcgacccgaaaggggaggcctgcgagcgacaaaaagaaggaggccggcgctcccagcagggagcgcccaaccggcaagtggtgcaccgtccacaacacctccctccacgacctcgtggactgccgcgcagccaaaagtttggctgagcggacgaggaagtgggaggaggagaggaggcaggagcgccgagaaggcaagtccccggcggttccctctggcaatcagcgaagtgaggccaagcagaaggcccccgccgaggacatcgatgacggcgatgatgacttaggtttccaggagcctggggccaccattgccactgtcgatgggggagcgtgtgctcacgtttctcgccagagcctcaaggccatgaagcgagagcttctggccacggcccctactcatgaggcgacgcgtcgggcgcggtggtcggagattgccctcacctttgaccagaccgaccacccaccgtgtgttgcccgggaaggacagatcgcgatggtggtttcccccaccgtttgcaacgtgaagttggggcgtgtcctcatagatggtggggcagccctcaacatcctttcccccgcagcctttgacgccatcaaggccccggggatggtgctccagccgtcccagccgattatcggtgtaacgccggggcacacttggccgttaggtcatatcgacttcccggtcaccttcggtggatccgccaacttccgcacggagcgggtgaacttcgatgtggcggacctcagtctgccctacaacgcggtcctagggaggcccgcgttggtgaagttcatggtggcggtccactacgcctacctccagatgaagatgccgggccccggtggccctatctctgtccatgacgacctcaaagtcgcgcttgcttgtatggagcagcgcgcggaccacctcgccgccgcgtccaagcccgagggtggtgacgagaggcttggcacctccgtccccgccgccccgaggcagcggatgatcacgtgcgacgaggtcccggtcaaggaggttgccctgggcgacggcccgtccaagaccacacggatcggtggtcctacttttcaacgtactactcgaatttctttgggtagccaaataggacgtaatgttgaggcttatgtcgatgacttggttgtgaagacacgcaaccaagaaactttactttcggatctggcggaaacttttgagagtctccgctccgcccgcataaaactgaaccccgataagtgcgtgttcggtgtacctgcgggcaagcttctcgggttcttggtctctgcccgaggcatcgaggccaaccccgagaagatacgagctatagagcggatgcgcccccccagcaagcttagggatgtgcaatgcgtcaccggttgcatggccgccctaagtcggttcatatcaaggctgggagagaaggcgctaccattatttaagctcctcaaacgctccgggccgtttacctggacggaggaagctgaacgtgccctcactcagttgaaggcgtatctcagctctcccccagttctggtcgccccggagccagatgaacccttgctactctacttagcggcgaccccgcaggtagttagtgcggcgttggttgtggagcgcgatgaggacaaccctcattccgcatatccccaccctgtgccaactcaacccgggagagagcagggaggagaggcccccgagccgaacggtggcccaaggcccccgacgaccggagttggccctctgcccgcttgtcaaacggtgccgggtgcccccaacccccaggatggcccgagggccactgtgggaaggccgcacctatcgccctctgaccccgaggttaaccctgtgccgacccgacccaggagagagcagggaggagaggcccccgagccaaacggtggcccaaggcccccgacgaccggagctggccctctgcccgcttgtccgacgacgccaggcctccccgacacccaggacggccccgaagccactgtgggaaggccgcgcctgtcgtcctccgaccccgaggtcatcggcacagaagacgagtgcaccccgcatggcctcttggacgaagagtgccccagggatgcggcccctggcgaagaggatcggccccgccgaaaggtgcagcggcccgtctactttgttagtgaggccctccgggacgccaagacccgataccctcaggcccagaaaatgctttacgctattctgatggcttcgaggaaactgcgtcattatttccaggcgcatcgggtcacggtggttacgtcttaccccctcggccaaatcctgcataatcgagagggtacaggacgggtggtgaaatgggcaatcgaactttctgagttcgatttgcactttgaaccacgccacgctatcaagagccaggccctcgccgactttgtggcagagtggaccccggctctcgaacccgtctcagaccccgaggccagctcgagcccctcgcagccgcctcacaccacccactgggtgatgcagttcgacggctccctgtctcttcagggcgctggtgcgggggtcacgttgacctcgccgagcggagacatcctcagatacctggtccgtctcgactttcgggcgaccaatattatggcagagtacgagggactccttgcgggactcagggtggcagctggactggggatccgccgcctcctggtgttaggcgactcccagctggtcgttaaccaggtctgtaaggagtaccggtgctctgacccgcagatggatgcttatgtacgccaagtgcggcgtatggagcgccatttcgacgggatagagcttcggcacgtgcccaaacgggataacacgattgccgacgaactctcacggctcgcttcctcacgagcccagaccccaccgggcgcctttgaagaaaggcttgcccagccgtcggcgcgacccgaccccctaggggagacggacgcgcctgaccggcccccgaggcccgtcggagtccaggcctcgggacccgaggggagcgttcccagctcccttagattgattgcttggatcgctgagatccaagcatacctcacagataagactctacccgaggaccgcgaagggagtgaacgcgtccaacgcatctccaaacgctacgtgctggtagaagggaccctctatcggcgcgcggctaatggaatcctcctgaagtgcattcctcgggaacaaggcgtcgagcttcttgccgatatccatgaaggcgaatgcggagcccacttcgcctcacgcaccttggttggcaaagcctttcgccagggtttctattggccgacagctctcaatgatgtggtcgacctggtccggcgatgcagagcgtgtcaattccacgccaagcaaatccatcagccggcccaggccctgcagatcataccactttcatggccatttgctgtctgggggctcgatatcctgggaccgtttaggcgggccccgggcgggtttgagtatctgtatgtcgcgatcgacaagttcactaagtggcccgaggcttatccggttatcaagatcgataaacactccgcacttaaattcatcaagggcatcacagcccggtttggggtgccgaaccgtattattacggataatggcacccaattcactagtgagcttttcggtgactactgcgaagacatgggcatcaagctctgcttcgcctcccccgcccaccccagaagcaatggccaagtggagcgcgccaatgcggaaatcctcagaggccttaaaaccaagaccttcaacatcctcaagaagcacggcgattcgtag

SEQ ID NO: 66098 - DNA, 333 bp, Oryza sativa
  Clone ID: PAT_MRT4530_67082C.1
gcgcagcgagagaaagcgctaagaagtcgaaggaactctcgcgaagtagcgtgtgtcgatgtagaggaagtagtcgatcgcaccggctcgaccttctcctcctcgtgcgttctcctcgctgtactcccacgccgatcagcaccgcaaaccagtggcacctctaccggatccatcactcgggcctccaaggcccgtaagactcctgttcggatccctatctgaagttcatgtacactcggctgtaacccgaaaataccttttcagtccacgcgtcaacagcggcccctagcagaacgtattgacccaccgggcatacataaagatcatatcggc

SEQ ID NO: 66099 - DNA, 998 bp, Oryza sativa
  Clone ID: PAT_MRT4530_67083C.1
agtggaccccagctcccgagcccgtctcagtccccgaggccagctcgggcccctcgcagctgcctcacaccgcccactgggtgatgcagttcgacggctccctgtctcttcagggcgccggtgcgggggtcacgttgacctcgccgaacggagacgtcctcagatatttggttcgccttgactttcgggcgaccaataatatggcagagtacgagggactccttgcgggactcaaggtggcagctggactagggatccgccgcctcctggtgttaggcgactcccagctggtcgttaaccaggtctgtaaggagtaccggtgctctgacccgcagatggacgcttacgtgcgccaaaccccaccgggcgcctttgaagaaaggcttgcccagccgtcggcgcgacccgaccccttaggggagacggacgcgcctgacaggcccccgatgcccgtcggagtccaggcctcgggacccgaggggagcgctcccagctcccttagattgattgcttggatcgctgagatccaagcatacctcacagataagactctacccgaggaccgcgaagagagtgaacgcgtccagcgcatctccaaacgctacgtgctggtagaagggaccctctatcggcgcgcggctaacggaatcctcctgaagtgcattcctcgggaacaaggcgtcgagcttcttgccgatatccatgaaggcgaatgtggagcccactccgcctcgcgcaccttggttggcaaagcctttcgacaaggtttctattggccgacagctctcaatgatgcggtcgacctggtccggcgatgcagagcgtgtcaattccacgccaagcaaatccatcagccggcccaggccctgcagatcataccactttcatggccatttgctgtctgggggctcgatatcctgggaccgtttaggcgggccccaggcgggtttgagtatctgtatgtcgcgatcgacaagttcactaaggggatcctctag

SEQ ID NO: 66100 - DNA, 1402 bp, Oryza sativa
  Clone ID: PAT_MRT4530_67084C.1
atggtgctgcggcgcttcgcgtggccgtacggcggccagcgggcctccttctgcggcagcttcaccgggtggagggagtgccccatggggctcgtcggggccgagttccaggtggtgttcgatctgccccccggggtttatcagtaccggtttttggttgatggtgtctggcgatgtgatgagacgaaaccttgtgtacgggatgaatatgggttgattagcaatgaagttcttgtggataatacacatccggttgtacagccagaaacttccatcagagtagtgagtatggatgagggtactatactgacaacaatgcccccagatcagttatctcaaaactcaggcgtgcagatagcaattttccgccatcgagtctctgagatattattacataataccatatatgatgttgttcctgtttctagcaagatagcagttttggatgctcgtcttcctgtcaagcaagcctttaaaatcatgcatgatgagggtctttctttggttcctctttgggatgatcagcagcaaaccgtaacaggcatgctaaccgcatccgattttgtattaattttgagaaagctgcagagaaacattcgaactcttggccatgaggaacttgaaatgcattcagtgtctgcttggaaagaagcaaaattgcagttttatgggggacctgatgttgctgccattcagagaaggccattaattcatgttaaggattcagataatttaagggatgtggcattggctataattagaaatgaaatatcttcagttcctatctttaagccctcaacggattcatcagggatgcctttgcttggtcttgcaacccttccagggattgtgaaatttatttgctcaaagctgcaagaacagcctgaagggtactcatttctgcaaaaccagattgtcagtatgcctattggtacatggtcaccacatactggcaaggcaagcaatagacagcttagaacttcgcgaccaagcactcctctaaattcatgcctggatttgctgcttgaagatagagtaagctcaattcctatagttgacgataatggcgctctccttgatgtctactcgctcagtgatatcatggctctaggcaagaatgatgtctacactcgtattgagcttgaacaggtgacggtggagcatgccttggagctgcaataccaggtgaatggccgaagacactgtcatacctgcttgagcactagtaccttcctggaggttttggagcaattgtcagctccaggggtgcggcgagtcgtcgttattgaaccaaggagcagatttgtgcaaggaataatctcattgagggacgcatttacatttctcattggataactcctgtgcagcctgccagtcccttcgtctaaaagaaacaacagac

SEQ ID NO: 66101 - DNA, 237 bp, Oryza sativa
  Clone ID: PAT_MRT4530_67085C.1
atggcggcgctaggctacacggcgctagggctctaccggcgacgagaggcgaaggcgagggtggcggcgggtagcggcgggcttggggtactggtcgaagttgtaatctctggaggaccatctcgaacagcatcaacagtacccgaacccgacgaccctggccagtctgaccgctcctcatgggtcggtctgaccggaggtgtgccggcagtccgaccggcctggcacccagtctga

SEQ ID NO: 66102 - DNA, 333 bp, Oryza sativa
  Clone ID: PAT_MRT4530_67086C.1
gtccagcggaagaagacgctgagaagtcaaaggaactatcgcgaagtagcgcgcgtcgatgtagaggaagtagtcgatcgcaccggctcgaccttgtcctcctcgtgcgttctcctcgccgtactcccacgccaatcagcaccgcaaaatagcggcgcctctaccggatccatcactcgggcctccaaggcccgtaggactcctattcggatccctatccgaagttcatatatactccgctgtaacccgaaaactcctttttggtccacgcatcaacaacggcccctagcagaacgtattgacccaccgggcttacataaagatcatatcggc

SEQ ID NO: 66103 - DNA, 2129 bp, Oryza sativa
  unsure (1)..(2129): unsure at all n locations
  Clone ID: PAT_MRT4530_67087C.1
acacaatcgcccacgtggcctggcaccctcggggggcgtcgggcccgagggtgatgtgttcgccctcctctttgtctccccgagggggtcggaccgctcccgcctcggccccgagggccgaggcgccccgaccccttaccggtcagattgcgggttaggtggcgacaggcggtctgacgcacgcctcgccccatcccgtcaggacgagagcctccaagcactcgtccctagccggagccggcgtgttagctcctggagatggcacgttggttccgacagccatgttcccacgtcgcgcctgcttccggcggaagtggagggccctcggccgaaccggcaaaggggggcctgcgcggtctcccggtgaggagccccacgctccgtcatctggcgcgccaggtagggggttctgcgtgtgttcttctaagctctcgcactctttcgtgtgcgccaagcttttcctgttcagcccaatggctgaacaagcaaaggcgcacaacctctctccgagtgttagcggtgacgacggggagccaaacccacgccgtcgagctcgtactccaccgccccctccacgccaaagtcctaggcgggaggaggcgctcgagagggtcgaaggatctgcgacttcgacatccacgggtgatggggaagtgcggcgagatggggagcgtcgtctcctcgtctacggcgacggcagcacgccccagggcgcgctccaagctgcgggcgcgctcctacgtcacccgcccattgtccctgacccggagtctccagcccaacgttggctggacgacgtggccaacttggtcatgacggcacggcagcgcctaggtgctggtgggcggtcctccgccaccaagacctctggcgctgctaccaccggctccgtgtcgtcaaggcggagggcgcggcgagcggcggctgttgctcgccattcggccgccactccttcgtcagcgcctccgacccaggaagatctgcgtggggggccggatgcccgcatcagtatcgagcgccggcgtaatggccgacgtgctgcccacgcaacggagggcgcctcctcgtccggagtgtcacatcaacacggacgcggggatcagccctccgtgcccccggttggtggtgtcggctgtagagcctttgtggcgagccttcggaacgtccgttggcccccaaggttccggcccaccatcgccgaaaaatatgacgggagcgtcaaccccgccgagtttctccaggtctacacgaccgggatcgaggccgccgggggtgacgacagggcacatatccgcgcccaggtgaagaagcggacttacatgcagtccagcgaagggatgatgagtcacttcgctcatacattcagcggttctgtcaagtccgcaacaccataccatgcatccctgcacacgcgctcgcggaccgagtggctcgcaaggaggaggcctggacttggaacccctccggttccggtgtggcagcttcggccgcccccgggtccgccgctcggtcagggcggcgggacaggaggaggaagaagaggtcggcccattccgacgacgagggtcatgtcctcgccgtcgaaggcatttcgctggccacccgaaagaggaggcctgcgagcgacaaaaagaaggaagccgacgctccctgacctcggctacttggaagagcgaaggtggcgcgcggcccttngagccgngcgctaccagcagagcctgcggcgctaccatcagcgccacgtccgggcccgatcactctgcgtcgacgacctcgtcctacgccgtgtccaaacgcgtgctggactgagcaaactctcaccaatgtgggagggtccgtatcgagtgatcggcgtcccccggccgggcttcgtttggctggccacgggcgacggcacagagctgcctaacccgtggaacatcgaacaccttcgtcgcttctacccctatctcgacatgtggatctccccaggcactagccttgacccgcgccgtttgaggctgggacctgggcacgagcccttgttcaagccaagacacagaaggaccgtggcacagaccatcctcgtctcatacacagaacaaatgaaattgacacaaaaatttcctctttatttgattgcagattaa

SEQ ID NO: 66104 - DNA, 145 bp, Oryza sativa
  Clone ID: PAT_MRT4530_67088C.1
aacaaatcacaacctgtatttggccgaaattgcctggtacatgttaaaaatcacaaaggcataataccatcgtatgtcacattgacatgtgggactggaccccacattggattcccatataccaatgcattggaacacttttttt

SEQ ID NO: 66105 - DNA, 333 bp, Oryza sativa
  Clone ID: PAT_MRT4530_67089C.1
gcgcagcggaagaatgcgctaagaagtcgaagaaactcccgcgaagtagcgcacgtcgatgtagaggaagtagtcgatcgcaccggctcgaccttctcctcctcgtgcgttcccctcgccgtattcccacgccgatcagcaccgcaaagtagtggcgcctctaccggatctatgactcgagcctccaaggcccataggactcctattcggatccctatccgaagttcatgtacactcggctgtaacccgaaaactcattttcggtccacgtgtcaacaacggcccctagcagaacgtattgacccaccgagcatacataaagatcatatcggc

SEQ ID NO: 66106 - DNA, 360 bp, Oryza sativa
  Clone ID: PAT_MRT4530_6708C.1
atgggcgccaccacctgcatcatcgtcgtcgccatcgtcgtcgttttccaagcgcacgtccatgcgccccgagccggccggccagcccctgcctgcctctcctctgctttgacgaagagaaaggaaagccggccacgctgcccactgtgggagtctcggaaaagagcgacaaaagcggtagtgcaccgcattcgcatgcaccatactctctcccccacccccacaccgcggctggctgatcacggcgcggcccccgcgcgctccggtgactggacacggccgccgccccggcccgggcgcacaccgcacaggcgggcgggggccaatgacgccatgcggcagctgcgcgggatcgtcttt

SEQ ID NO: 66107 - DNA, 2223 bp, Oryza sativa
  Clone ID: PAT_MRT4530_67090C.1
atggcggcggtccattacgcctacctccagatgaagatgccgggccccgggggccccatctttgtccatggcgaccttaaagtcgcgcttgcttgtatggagcagcgcgcggaccacctcaccgccgcgtccaagcccgagggaggcgacgagaggcttggcacctccgcctccgccgccccgaggcagcggatagtcacatgcgacgaggtcccggaagacgcgctcgtctctttcctgcgggcaaacgctgacgtcttcgcatggagaccggcggatatgcctggggtccccagggaggtgattgagcaccgtctcgccgtgcggtcgggcgcaaggccggtccggcagaaagtacggcggcaggccccggaacgtcaagccttcatccgcgaggaggtggcgcgacttctggaggccggattcatccgcgaggtcatccatccggagtggctggcgaacccggtggtcgttcccaaggcgaacggcaagcttcggatgtgcatcgactacaccgaccttaacaaggcatgtcctaaggacccttaccccctgcctcgcatagatcagattgtcgactccacagcggggtgcgaccttttgtgttttctagatgcatactctggttaccatcagattcgcatggctagggaggatgaggaaaaaactgcattcattacccccataggaacttattgttatacgacaatgccctttgggttaaagaatgcaggtcctacttttcaacgtactactcgaatttctttgggtagccaaataggacgtaatgttgaggctcatgtcgatgacttggttgtaaagacgcgcaaccaagagaccttactctcggatctagcggaaacttttgagagtctccgctccgcccgcataaaactgaaccccgataagtgcgtgttcggtgtacctgcgggcaagcttctcgggattttggtctttgcccgaggcatcaaggccaaccccgagaagatacgagctatagagcggatgcgcccccccagcaagcttagggatgtgcaatgcgtcaccggttgcatggccgccctaagtcggttcatatcgaggctgggagagaaggcgctacccttatttaagctcctcaaacgctccgggccgtttacttggacggaggaagctgaacgtgccctcactcagttgaaggcgtatctcagctctccccactccgcctcgcgcaccttggttggcaaagcctttcgacaaggtttctattggccgacagctctcaatgatgcggtcgacctggtctggcgatgcagagcatgtcaattccacgccaagcaaatccatcagccggcccaggccctgcagatcataccactttcatggccatttgctgtctgggggctcgatatcctgggaccttttaggcgggccccgggcgggtttgagtatctgtatgtcacgatcgacaagttcactaagtggcccgaggcttatccggtcgtcaagatcgataagcactccgcacttaaattcattaagggcatcacagcccggtttggagtgcctaaccgtattattacggataacggcacccaattcactagtgaacttttcggcgattactgcgaagacatgggcatcaagctttgcttcgcctcacctgcccaccccagaagcaacggccaagtggagcgcgccaatgcggaaatcctcagaggccttaaaaccaagaccttcaacatcctcaagaagcacggcgattcgtggatcgaggagttgccagcggtgctctgggcgaaccgaaccacgccaagccgagcaaccggggaaacgcctttcttcctcgtctacggcgcggaagcggttctcccatccgagctcaccctgaggtcccctcgggccaccatgtactgcgaggctgatcaagatcagcttcgcagagatgacctcgactacttggaagagcgaaggcggcgcgcggccctccgagccgcgcgctaccagcagagcctgtggcgctaccatcagcgccatgtccgggcccgatcactctgcgtcgacgacctcgtcctacgccgcgtccaaacgcgtgctggattgagcaagctctcaccaatgtgggagggtccgtatcgagtgatcggcgtcccccggccgggctccgttcggctggccacgggcgacggcacagagctgcctaacccgtggaacatcgaacaccttcgtcgcttctacccctaa

SEQ ID NO: 66108 - DNA, 1428 bp, Oryza sativa
  Clone ID: PAT_MRT4530_67091C.1
aacaacatgatcgccgccaaggccctcctcgacaacatgccggtcccagtcgacccggccgtgaacaccaccatcgcccaagtgaaggctatggtggaagccaccgctgttcaacacgctgatgcactgccaacgacttcaactgccggcggttcctccggcaagagacagtcccgacaaccagcctttgagttgaagcgcgtcaaggcgtcccaagcggggagttcacaccccagtctacgcaccagcgacctaagagacaagatcgaagccgggcgccggctaaacgccgacctccgtaacgtcatgaacgagcattgccgacttcgtgacgctgaaaggttgcggattcacgaggacgacttcgacgctagccgtcgtcacacagacgtccagccggacggccgcatcgtcgtccatcgaccttaccaatactaccacgaccactcaccagaccacatcccacaccgcgacgacggcgctgagggcataccggccttcaccgacaacctatgccgagtccgctggctagccaacttcaaacccataggcatcgacaaatacgatggcaagaccgaccccaacgcatggctcgccgtctactccatcgccattcaagctaccgggggcgaccaggtggtcatagcgaactacctgccggtcatgctgaccaccgtcgcccgagcatggctgacagggctaccaaggtacaccatcaacagctgggccgagctgaagggacagttcatcgccaactttcaaggcactttccctcacccgggcacccagtgggacctctaccgaattgtccaaggccacaacgaatgcttctccgactacattcgctgcttcacggaacggtgcaacaccatcccacacgtcaccgacacagaggtgatggccgccttccaacaaggctgcaagaacgaagacttcatcaagtggtgggcctgcaagacgtcactcggagggtgcgccgctctcaccgtccgacagatgttcgaccacgccaacaaggacgccaactccgagctagcagtctacgcccaaatcaagaggaggccttcgtaccagccgcgtcgagaaagcaactcctcccgtagtaggccacccaagtgcaagagtgatgataaagtcaacaccatcgggcgcagcaacgcccagcgcaagttccgccaacccaagaaagacgacttcgacaggatgatggacggtccatgcctataccaccccgagctcaagcactccgctaagcaatgctggctactcaaacagtatgcccagcaattggccgacaagagtggctcaggaggaagaacacacgatccctctcaagacggggacaagaccaaattcgaggaggaagactaccctgttgtcgactatgagtcagcacttcagaccgccaagtcgacaacagttagatag

SEQ ID NO: 66109 - DNA, 1408 bp, Oryza sativa
  Clone ID: PAT_MRT4530_67092C.1
agcctttgtggcgagccttcggaacgtccgttggcccccaaggttccggcccaccatcgccgaaaaatatgacgggagcgtcaaccccgccgagtttctccaggtctacacgaccgggatcgaggccgccgggggtgacgacagggtcatggcgaatttctttcccatggccctgaagggacaggcacggggttggataatgaacttgccacccgcgtccttccactcttgggaggatttgtgccaacagttcaccatgaactttcaaggcacatatccgcgcccaggtgaagaagcggacctgcacgcagtacagcgaagggatgatgagtcacttcgctcgtacattcagcggttctgtcaagtccgcaacaccataccatgcatccctgcacacgcggtgatctacgcgttcagggggggtgtgcggcacaaccgcatgctcgaaaagatcgcctccaaagagccccagactaccgcggagctttttcagctcgcggaccgagtggctcgcaaggaggaggcctggacttggaacctctccggttccggtgtggcggcttcggccgcccccgggtccgccgctcgatcagggcggcgggacaggaggaggaagaagaggtcggcccattccgacgacgagggtcatgtcctcgccgtcgaaggcgtttcgctggccacccgaaaggggaggcctgagcgaaggtggcgcgcggcccttcgagccgcgcgctaccagcagagcctgcggcgctaccatcagcgccacgtccgggcccgatcactctgcgtcgatgacctcgtcctacgccgcgtccaaacgcgtgctggattgagcaagctctcaccaatgtgggagggcgcccccgacccccaggatggccccgaggccactgcgggaaggccgcgcctgtcgtcctccgaccccgaggtcgtcggcacagaagacgagtgcaccccgcgaggccgcttggacaaagagcgccccagggatgtggcccctagcgaagaggatcggccccaccgaaaggtgcagcggcccgtctactttgttagtgaggccctccgggacgccaagacccgataccctcaggcccagaagatgctttacgctattctgatggcttcgaggaaactgcgccattatttccaagcgcatcgggtcacggtggttacgtcttatcccctcggccaaatcttgtataaccgagagggtactggacggatggtgaaatgggcaatcgaactctctgaattcgatttgcgctttgaaccacgccacgcgatcaagagccaggccctcgccgactttgtggcggagtggaccccagctcccgagctcgtctccgcccccgaggccagctcgggcccatcgcagctgcctcacaccgccctctgggtgatgtag

SEQ ID NO: 66110 - DNA, 358 bp, Oryza sativa
  unsure (1)..(358): unsure at all n locations
  Clone ID: PAT_MRT4530_67093C.1
cctgtntggtttgnanttgcantgcgtaacattcaatctgggtgacatnganccccaccggananatctgaanccaaggaactcccnnngangcntccacatcaaatgcttccctatgacaattccaatataacgaaacggtatagccngcccaactgcccntttaccttcntcnttttgggcttgtgnatattgttccatttgtanctgccactctccccggtgttncccggcttgcannanaaatttanccgtttnaaangtntttgcgctgccaaaggcatcngaannaaattaccttccnggatngnctngttgaccanatggaanactttgcaattttgggntnccntccttt

SEQ ID NO: 66111 - DNA, 4806 bp, Oryza sativa
  Clone ID: PAT_MRT4530_67094C.1
atggccgaacaagcaaaggcgcacaacctctctccgagagttagcggtgacgacgggcagccgaacccacgccgtcgagctcgtactccaccgccccctccacgccaaagtcctaggcgggaggaggcgctcgagagggtcgaaggatccgcgacttcgacatccacgggtgatggggaagggcggcgagatggggagcgtcgcctcctcgtctacggcgacggcagcacgccccagggcgcgctccaagctgcgggcgcgctcttacgtcacccgcccattgtccctgacccggagtctccagcccaacgttggctggacgacgtggccaacttggtcatgacggcacggcagcgcctaggtgctggtgggcggtcctccgccaccaagacctctggcgctgctaccaccggctccgtgtcgtcaaggcagagggcgcggcgagcggcggctgttgctcgccattcggccgccactccttcgtcagcgcctccgacccaggaagatctgcgtggggggccggatgcccgcatcagtatcgagcgccggcgtaatggccgacgtgctgcccacgcaacggagggcgccttctcgtccggagtgtcacatcaacacggacgcggggatcagccctccgtgcccccggttggtggtgtcggctgtagagcctttgtggcgagccttcggaacgtccgttggcccccaaggttccggcccaccatcgccgaaaaatatgatgggagcgtcaaccccgccgagtttctccaggtctacacgactgggatcgaggccgccgggggtgacgacagggtcatggcgaatttctttcccatggccctgaagggacaagcacggggttggctaatgaacttgccacccgcgtcagtccactcttggaaggatttgtgccaacagttcaccatgaactttcaaggcacatatccgcgcccaggtgaagaagcggacttacatgcagtccagcgaagggatgatgagtcacttcgctcatacattcagcggttctgtcaagtccgcaacaccataccatgcatccctgcacacgcggtgatctacgcgttcagggggggtgtgcggcacaaccgcatgctcgaaaagatcgcctccaaagagccccagactaccgcggagctttttcagctcgcggaccgagtggctcgtaaggaagaggcatggacctggaacccctccggttccggtgtggcagcttcggccgcccccggatccgctgctcggacagggcggcgtgacaggaggaggaagaagaggtcagcccattccgacgacgagggtcatgtcctcgccgtcgagggcgcttcgcgggccacccgaaaggggaggcctgcgagcgacaaaaagaaggaggccggcgctcccagtagggagcgcccaaccggcaagtggtgcatcgtccacaacacctcccttcacgacctcgcggactgccgcgcagtcaaaagtttggctgagcggacgaggaagtgggaggaggagaggaggcaggagcgccgagagggcaagtccccggcggttccttccggcaatcggcgaagtgaggccaagcagaaggcccccaccgaggacatcgatgacggcgatgatgacctaggtcatatcgacctcccggtcaccttcggtggatccgccaacttccgcacggagcgggtgaactttgatgtggcggacctcagtctgccctacaacgcggtcctagggaggcccgcgttggtgaagttcatggcggcagtccactacgcctacctccagatgaagatgccgggccccggtggccccatctctgtccatggcgacctcaaagaagacgcgctcgtctctttcctgcgggcaaacgctgacgtcttcgcatggagaccggcggatatgcccggggtccccagggagctgattgagcaccgtctcgccgtgcggtcgggcgcaaggccggtccggcagaaagtacggcggcaggccccggaacgtcaagccttcatccgcgaggaggtggcgcgacttctggaggccggattcatccgcgaggtcatccatccggagtggctggcgaacccggtggtcgttcccaaggcgaacggcaagcttcggatgtgcatcgactacaccgaccttaacaagacgcgcaaccaagagaccttactctcggatctagcggaaacttttgagagtctccgctccgcccgcataaaactgaaccccgataagtgtgtgttcggtgtacctgcgggcaagcttctcgggtttttggtctctgcccgaggcatcgaggccaaccccgagaagatacgagctatagagtggatgcgcccccccagcaagcttagggatgtgcaatgcgtcaccggttgcatggccgccctaagtcggttcatatcgaggctgggagagaaggcgctacccttatttaagctcctcaaacgctccgggccgtttacttggacggaggaagctgaacgtgccctcactcagttgaaggcgtatctcagctctcccccagttctggtcgccccggagccaaatgaacccttgctactctacttagcggcgaccccgcaagtggttagtgcggcgttggttgtggagcgcgatgaggacaatcctcattccgcgcaccctcaccctgtgccggcttggcccgggagagagcagggaggagaggcccccgagccgaacggtggcccaaggcccccgacgaccggagcaggccctctgcccgcttgtcagacggtgcctggtgaccccgacccccaggatggcccgagggccactgcgggaaggccgcacctatcgccctctgaccccgaggctaaccctgtgccgactcgacccgggagagagcagggagaagaggcccccgagccgaacggagcccccgacccccaggacggccccgaggccactgtgggaaggccgcccctatcatcctccgaccccgaggtcgtcggcacagaagacgagtgcactccgcgaggccacttggacaaagagcgccccagggatgtggcccctagcgaagaggatcggccccaccgaaaggtgcagcggcccgtctactttgttagtgaggccctccgggacgccaagacccgataccctcaggcccagaagatgctttacgctattctgatggcttcgaggaaactgcgccattatttccaggcgcatcgggtcacggtggttacgtcttaccccctcggccaaatcttgcataatcgagagggtactggacgggtggtgaaatgggcaatcgaactttctgagtttgatttgcactttgaaccacgccacgctatcaagagccaggccctcgccgattttgtggcagagtggaccccagctcccgagcccgtctcagtccccgaggccagctcgggcccctcgcagctgcctcacaccgcccactgggtgatgcagttcgacggctccctgtctcttcagggcgccggtgcgggggtcacgttgacctcgccgaacggagacgtcctcagatatttggttcgccttgactttcgggcgaccaataatatggcagagtacgagggactccttgcgggactcagggtggcagctggactagggatccgccgcctcctggtgttaggcgactcccagctggtcgttaaccagcgagcccagaccccaccgggcgcctttgaagaaaggcttgcccagccgtcggcgcgacccgaccccttaggggagacggacgcgcctgacaggcccccgatgcccgtcggagtccaggcctcgggacccgaggggagcgctcccagctcccttagattgattgcttggatcgctgagatccaagcatacctcacagataagactctacccgaggaccgcgaagagagtgaacgcgtccagcgcatctccaaacgctacgtgctggtagaagggaccctctatcggcgcgcggctaacggaatcctcctgaagtgcattcctcgggaacaaggcgtcgagcttcttgccgatatccatgaaggcgaatgtggagcccactccgcctcgcgcaccttggttggcaaagcctttcgacaaggtttctattggccgacagctctcaatgatgcggtcgacctggtccggcgatgcagagcgtgtcaattccacgccaagcaaatccatcagccggcccaggccctgcagatcataccactttcatggccatttgctgtctgggggctcgatatcctgggaccgtttaggcgggccccaggcgggtttgagtatctgtatgtcgcgatcgacaagttcactaagtggcccgaggcttatccggtcgtcaagatcgataagcactccgcacttaaattcattaagggcatcacagcccggtatggagtgcctaaccgtattattacggataacggcacccaattcactagtgaacttttcggcgattactgcgaagacatgggcatcaagctctacttcgcctcacctgcccaccccagaagcaacggccaagtggagcgcgccaatgcggaaatcctcagagaccttaaaaccaagaccttcaacatcctcaagaagcacggtgattcgtggatcgaggagttgccagcggtgctctgggcgaaccgaaccacgccaagccgagcaaccggggaaacgcctttcttcctcgtctacggcgcggaagcggttctcccatccgagctcaccctgaggtcccctcgggccaccatgtactgcgaggctgatcaagatcagcttcgcatagatgacctcgactacttggaagagcgaaggcggcgcgcggccctctga

SEQ ID NO: 66112 - DNA, 999 bp, Oryza sativa
  Clone ID: PAT_MRT4530_67095C.1
atgattctaagggcgtggccgtcggcggctttgtgtccctcgcggtcgcggtggcgcgggaacggcgccgacgagacggggcgtactcggcagcgcgcggccgggaaacgggacaccgtggtggcgatggtggcaaatcgacggtcgttgaggttccagtcggtggaggttcgtcgagggcgcggttcgtcctcgctgtacgtttgcggttctcggtttggcgtggctccgtgcgcccaccaggtgttcgacgcgcgaaggaaggggtgccggggcgggtgcgacgaagaggtcgctctcgttgacatggacgagaagccgagcgccgaggccgaggcggtcgccgtccttgcgctcccgcgcttgtcgctagcggaagcagggagcgtactacgtgcccgaggaagcgaagtgaccatcggtcgctcggccgtcccagggtgcgtggccgcagcggctcgtgggctagggttcgaggcgtggctgggctatttccgacgacttcaaggcgcggtggaaggggtggacaccggaggcatgctcgccggcggcgtcgggcaaacggtggctgccgagctccgggatggaagaggggaacaagccggggtggtggccggctcggttcggcggcttgccagctcccgaggccagttcgaccacgagggctgccgggttgggccagcctggtgggctgggctagaaagaggaagggccggccggcgagtgggaaaggaggttgccggggcgaggcgggagaagaagtccgacgacgcggcgacgacggcggagttcgtcgccagtggtgctcaccaccttagccgcgccgagaacgtgaagccgccggagctcatgacgcggcggccaacaatgtccagcgccgggaaaacgtcgaacagcgtcgcgccaccgtcgccgccctccccttctccccccgggcgctggccgccgtcgcgccgctgccgccctccccttcttgccgtggaggagaaaggtttatga

SEQ ID NO: 66113 - DNA, 141 bp, Oryza sativa
  Clone ID: PAT_MRT4530_67096C.1
atgacgacctcgccccgacatggtggccgagacaacatgagcgacggcggcgcagcaatgaagccagcggtgggccgcggagataccgcgtccaccaccggaggccgggggaagttctccccaagattgcgtcttccctga

SEQ ID NO: 66114 - DNA, 2910 bp, Oryza sativa
  Clone ID: PAT_MRT4530_67097C.1
atattgtatgaagaagggcgaacatgcagattgttaaactgacacgtggtggacaagaatgaccgatttgtgaccggtctgacaatggtcatgtcgtcagtagacagccatgttcccacctcgcgcctgcttccggcggaagtggaggtagaaaccaagagcttagagtctcacccagagtccccggccgaaccggcaaaggggggccagcgcggtctcccggtgaggagccccacgctccgtcatctggcgcgccagcttttcctgttcagcccaatggccgagcaagcaaaggcgtacgacctctccccgagtatgagcggtgacgacggggagccaaacccacgccgtcgagctcgtactccaccgccccctccacgccaaagtcctaggagggaggaggtgctcgagagggtcgaaggatccgcgacttcgacatccacgggtgatggggagcgtcgcctcctcgtctacggcgacggcagcacgccccagggcgcgctccaagctgcgggcgcgctcctacgtcacccgcccgttgtccctgacccggagtctccagcccaacgttggctggacgacgtggccaacttggtcatgacgacacggcagcgcctaggtgctggtgggcggtcctccgccaccaagacctctggcgctgctaccaccggctccgtgtcgtcaaggcggagggcgcggcgagcggcggctgttgctcgccattcggccgccactccttcgtcagcgcctccgacccaggaagatctgcgtggggggccggatgcccgcatcagtatcgagcgccggcgtaatggccgacgtgctgcccacgcaacggagggcgcctcctcgtccggagtgtcacatcaacacggacgcggggatcagccctccgtgcccccggttggtggtgtcggctgtagagcctttgtggcgagccttcggaacgtccgttggcccccaaggttccggcccaccatcgccgaaaaatatgacgggagcgtcaaccccgccgagtttctccaggtctacacgaccgggatcgaggccgccgggggtgacgacagggtcatggcgaatttctttcccatggccctgaagggacaggcacggggttggctaatgaacttgccacccgcgtccgtccactcttgggaggatttgtgccaacagttcaccatgaactttcaaggcacatatccgcgcccaggtgaagaagcggacttacatgcagtccagcgaagggatgatgagtcacttcgctcatacattcagcggttctgtcaagtccgcaacaccataccatgcatccttgcacacgcggtgatctacgcgttcagggggggtgtgcggcacaaccgcatcctcgaaaagatcgcctccaaagagccccagactaccgcggagctttttcagctcgcggaccgagtggctcgcaaggaggaggcctggacctggaacccctccggttccggtgtggcagcttcggccgcccccgggtccgccgctcggtcagggcggcgggacaggaggaggaagaagaggtcggcccattccgacgacgagggtcatgtcctcgccgtcgaaggcgcttcgctggccacccgaaaagggaggcctgcgagcgacaaaaagaaggaagccgacgctccctgacctcggctacttggaagagcgaaggcggcgcgcggcccttcgagccgcgcgctaccagcagagcctgcggcgctaccatcagcgccacgtccgggcccgatcactctgcgtcgacgacctcgtcctacgccgcgtccaaacgcgtgctggactgagcaaactctcaccaatgtgggagggtccgtatcgagtgatcggcgtcccccggccgggctccgttcggctggccacgggcgacggcacagagctgcctaacccgtggaacatcgaacaccttcgtcgcttctacccctacctcgccgtcgctgtcgtccgcaccgtcgtcaccgcactcctcgtcggagttgaaggcaaacgcgagccgaggggccgctcattattgtcggtcggttttcccttgctgatgcgcgcgatttgcgaccgccgggattctgcccgaagagagagagagagcagggaggagaggcccccgagccgaacggcggcccaaggcccccgacggccggagctggccctccgcttgcttgtccgacggtgccaggcgcccccgacccccaggatggccccgaggccactgcgggaaggccgcgcctgtcgccctctaaccccgaggtcgtcggcacagaagccgagtgcgccccgcgctgtctctcggatgaagagcgccctggagatgcggcccctagcgaagaggatcggccccgccgaaaggtgcagcggcccgtctactttgttagcgaggccctccgggacgccaaaacccgataccctcaggcccagaagatgctatacgctattctgatggctccgaaaaaagcgccatcaccatatctccaggcaaaacgaaccggctcgtcccgattcgcatatatgccaggcttcatcctaaccattacaggcaagatattgtatgaagaagggcgaacatgcagattgttaaactgacacgtggtggacaagaatgaccgatttgtgaccggtctgacaatggtcatgtcgtcagtagacagccatgttcccacctcgcgcctgcttccggcggaagtggagatccaccaaaacacaggagtagggtattacgcttctcagcggcccgaacctgtatacatcgcccgtgtcttgtgtgtttcctgtctcgcgaaccttccacatacagagagcttagaatctcaccctgagtccccggccgaaccggcaaaggggggcctgcgcggtcttccggtgaggggccccacgctccgtcaaatcggattg

SEQ ID NO: 66115 - DNA, 1770 bp, Oryza sativa
  Clone ID: PAT_MRT4530_67098C.1
atgtgcacgaataagctagcggcagtggggcgagaccgggccgacgcagcagctcagcgagtcagtgaggtgcagcgagcagccaatgcctatacctgcatgaggccccaacgtaacaagcagcggacaaaagagatgaccgtgagcaggagagtaggcgacagtggagggcatacacagcagaggaagagaaggggagggcggcagcggcgcgacggcggccagcgcccggggggagaaggggagggcggcgacggtggcgcgacgctgttcgacgttttcccggcgctggacattgttggccgccgcgtcatgagctccggcggcttcacgttctcggcgcggctaaggtggggtggcggcggtggtgactccctcgccgctgcccccccgtgccgcccggccccgcctccgccttcgctcctggccccacctccgccgtcgtcgccgcgtcgtcggacttcttctcccgcctcgccccggcaacctcctttcccactcgccggccggctgcctagagaggagaaacccagcccaccaggctggcccaacccggcagccctcgtggtcgaactggcctcgggagctggcaagccgccgaaccgagccggccaccaccccggcttgttcccctcttccatcccggagctcggcagccaccgtttgcccgacgccgccggcgagcatgcctccgcccacgagctgcgccgccaagccatcgtcgctgcccctgcttctcccgtgcactgcgcgccgcacggcgcccgtgagaggcgatgccgcgacgagacagacgccaacatcccgcgtatcgcctccttgtgcgccgctccccgtaataccgcgcccaaactccttcgtggggcctacggcagcgacgttcgtgccctcgccgtgccgccgcactgggcggcgctagctgttgatccacagcgccatggccgccgtccatccaacccgctgcggccacgcaccctgggacggccgagcgaccgatgcgacaagcgcgggagcgcaaggacggcgaccgcctcggcctcggcgctcggcttctcgtccatgtcaacgagagcgacctctgccgcctataaaacccaggggtcccagccattcgcgcccttcctctcttgctcgcgctggccgtcgtgcccgtgtcgaacaccttcgtcgcacccgccccggcaccccttccttcgcgcgtcgaacacctggtgggcgcacggagccacgccaaaccgagaaccgcaaacgtacagcgaggacgaaccgcgccctcgacgaacctccaccgactggaacctcaacgaccgtcgatttgccaccatcgccaccacggtgtcccgtttcccggctgccgcccgcccttggaaccctatagcttatcccaacccgcgcgctgccgagtacgccccgtctcgtcggcgccgttcccgcgccaccgcgaccgcgagggacacaaagccgccgacggccacgcccttagaatcatctcccattgctacggtgacactcatcgagccacgccgcggccagtttcgcctcgtccccgccaccattggtttcggcatcgccgtcaggcagtcgcttcgtcggcgtgcccctcagttcggaaccgaaggccgctaccggccgcctcaaccaactgccgtcgcctcaacacaccattgctgccgctacgccgcctcccacatgtggctggggtcccccgtccccgtggccctcccctcactggccacaccggcctccggcccggccagccgccgcacaggc

SEQ ID NO: 66116 - DNA, 1057 bp, Oryza sativa
  Clone ID: PAT_MRT4530_67099C.1
tgcatccctcgggaacaaggcgtcgagcttcttgccgatatccatgaaggcgaatgcggagcccactccgcctcgcgcaccttggttggcaaagcctttcgtcaaggccctgcagatcataccactttcgtggccatttgctgtctgggggctcgatatcctgggaccgtttaggcgggccccgggcgggtttgagtatctgtatgtcgcgatcgacaagttcactaagtggcccgaggcttatccggtcgtcaagatcgataagcactccgcacttaaattcattaagggcatcacagcccggtttggagtgcctaaccgtattattacggataacggcacccaattcactagtgaacttttcggcgattactgcgaagacatgggcatcaagctctgcttcgcctcacctgcccaccccagaagcaacggccaagtggagcgcgccaatgcggaaatcctcagaggccttaaaaccaagaccttcaacatcctcaagaagcacggcgattcgtggatcgaggagttgccagcggtgctctgggcgaaccgaaccacgccaagccgagcaaccggggaaacgcctttcttcctcgtctacggcgcggaagcggttctcccatccgagctcaccctgaggtcccctcgggccaccatgtactgcgaggctgatcaagatcagcttcgcagagatgacctcgactacttggaagagcgaaggtggcgcgcggccctccgagccgcgcgctaccagcagagcctacggcgctatcatcagcgccacgtccgggcccgatcactctgcgtcgacgacctcgtcctacgccgcgtccaaacgcgtgctggattgagcaagctctcaccaatgtgggagggtccgtatcgagtgatcggcgtcccccggccgggctccgttcggctggccacgggcgacggcacagagctgcctaacccgtggaacatcaacaccttcgtcgcttctacccctaaagggggatcgggtgtcaggctgtatctgtgctattgtttccttttgaaggatattgacttgaaatag

SEQ ID NO: 66117 - DNA, 2649 bp, Oryza sativa
  Clone ID: PAT_MRT4530_6709C.1
atggcgccaggccagccagtgaaccctcggttattaatgagagagcagccacagcatggcgggcaggttgcgaatcggctgacccaagatcatgttgctgccacgtttctgccgcctcaacctattgttgatccaatacaacagcagccgattcagcagacaccccaattcagtaggttgtgcaaccaatccagcaacagcctgcttccccgcaagcccaatatcagccagggggattggctcaacctcagtttgcgtctcagtatgaaagtaaccttgcatgagcataggtccgcggaagttaggaaaaactcaaagaaggttaatcatgtttatccgtacatgtatgggtcggatgatgatgaggacttttctaaaatagctgcagccgagtgggtgaggagtaaaaaggtcataccatgccaatgggtaaaaagttctggaaaagagaagtatgactttgatattactaaacctgacaagatctttgatttgctactccgagagaagcaaattcaacttcttgctggtcatacaatcccatcggctgaggaattaggcagaaagaggtttttagatagcagattcaggtggccattgagggaggcaagattagctggccaaacagccgatagggcccgtgcaatgggttttcaggtgaattcggctaagattatcaacaaatatcagaagaagtatgacaagcagcaggagaaggatcatgagaaatacgatgatggttttgatcctcattggtgttgtgagttctttagattctgctggaatgaagccgatgaggcaaagaggttggcaaaagggaagagtgttgtgacggcaccggttaacatggtctttaccctgccagccgaattcgggatagaccaagccgatgtcgacgaggtggaagaggaattggctaagttggttctgtcaccagaacaggcagtgttcgagaaacccgaggggacagagaatcggcatcttaaaccattgtatataaacggctacgtcaatgggaagccgatgtctaaactgatggttgatggtggggctgcggtaaatttgatgccctatgctacgttcaggaaattaggtaaaaatgccgaggatctcgtcaagacaaacttgctcaacgattttggtggcaatccatcagaaaccaaaggtgttctaaatgtggagctgacagttggcagtaagactattcctaccacgttttttgtcatcaatgggaaaggttcttacagcttgttgcttggaagggattggattcacgccaattgttgcattccttcaactatgcatgaatgtttgattcagtggcaaggcgacaaaatagagatcgtaccagccgacagccaattgaagatggagaacccaagctattattttgagggcgtcgtggagggttcaaatgtctacactacggacacggtagatgatctcgatgacaagcaaggtcaaggtttcatgtcggccgatgatttggaagaagtggacataggtctaggcgatcatctaaggccgacatttattagtaggaacttatctccagagtttagaaccaagctgatagagctcttaaaagagtttagagattgcttcgcttgggagtattacgagatgcctggactcagcggatcgattgttgaacatcggctacctatcaaaccagtggttaggccacttcaacaacctccgaggagatgcaaggccgacatgcttgaaccggtttctagtatagttcatgttatcaagaaaaacgacaaggtcaggagtgctggagctacatatcaaagagccatgaattacatatgtcacgatctaatcggctggttggttgaagtcgacattgatgatgtggttgttaagtctagagaaacaaaggaccatatagctgatttgaggaaggttttcgagagaaccagaaaatatggcctgaagatgaatccgacaaaatgtgcttttggtgtatcggctggccagtttttgggatttcttgttcatgagagggggatcgaggtaactcaaaggagtgttaatgcgatcaagaagattcagcctccagagaataagacagagttacaagagatgatcggcaagataaattgtgttagaaggtttatttctaatttgtctggaaggttgaggcattatctactgtccaacgagtgtactgttatatgtaaggccgacgttgtcaagtacatgctatcggctccaatatttaaaggaagggttggaaagtggatattttccttaaccgagtttgatcttcggtatgagtcgccgaagttgattaagggacaagctatagctgattttattgtggaacatcgtgatgattcaatcggctcggttgaaatagtgccatggactttattctttgatggatcgtttgcttatactattaaaccgtatgcgactaataatcaagctgagtatgaggcagtgctcaaagggttgcaattactcaaggaagttgaagccgataccattgaaatcatgggggattctttgctagtaatcagtcaattggcaggagagtatgaatgcaagaatgatacattgatggtttataatgagaagtgccaagaactaatgaaggagtttcggctggttactttaaagcatgtcactcgagaataa

SEQ ID NO: 66118 - DNA, 486 bp, Oryza sativa
  Clone ID: PAT_MRT4530_670C.1
atggtggaaaccctagctccccaagagaacgttatcatcacagctgccaccgacattgtcgtagctcccatgccagatccgccatcgctgaggtcatccacgccgccagatccatcctgtcattgtggtcccagcgccggatccactgccgccgaggttccccatgcaggatacgccactccgccaagctcttcgcatggagaagaggaggccgcacgaaggagacgaagaggcagaggagaggaggccgacggcgtagatccagtgcgcgcggtgacgacgaagaggcagaggagaggaggccggcggtgcagacccaagcgcgcggcgacaatgaagaggcagaggagaggaggtgccagatccaactctctcgaggttgcccaagctggagccgatcctcccatgtccaccggcgtgaagaagggggacaggggaagcctttccgccgcacgctgccttatgggggttggtctagcctcctag

SEQ ID NO: 66119 - DNA, 246 bp, Oryza sativa
  Clone ID: PAT_MRT4530_67100C.1
atgatccggcgagtttgcaatccagatccgcgcgatgaagaagagctcgtcatcctcaccgctgcagtggcccctctcatcggtggagaaggatcactatcctcactcccgtcatggtcccctctcgtcggcggaaagggaaatggagctcactctggatccgccgagctcgcggtgaatcagaggagagggatctcgtcgaggaggaggcgtggacgaacaacggaggtgtcggtggcggcatga

SEQ ID NO: 66120 - DNA, 630 bp, Oryza sativa
  Clone ID: PAT_MRT4530_67101C.1
atggcgtggttcaaagtgcaaatcaaactcagaaagttcgattgcccattttaccacccgtcctgtaccctctcgattatgcaagatttgaccgagggggtaagacgtaaccacggttacccgatgcgcctgaaaataatggcgcagtttcctcgaagccatcagaatagcgtaaagcatcttctgggcctgagggtatcgggtcttggcgtcccggagggcctcactaacgaagtaaacgggccgctgcacctttcggtggggccgatcctcttcgccaggggccgcatcccaggggcgttcttcgtccaagtggcctcgcggggcgcacttgtcttctgtgccgacgacctcggggtcggaggacgacaggggcggccttcccacagtggcctcggggctgtcctagggaggatgataggtgcggccttcccgcagtggccgccgggccatcctgggggtcgggggcacctggcaccgtctgacaagcgggcagagaaccagctccggtcgtcgggggccttgggccaccgtttggctcgggggcctctcctccctgctctctcccgggccaagccagcacagggggcgaccagaactgggggagagctgagatacgccttcaattga

SEQ ID NO: 66121 - DNA, 602 bp, Oryza sativa
  Clone ID: PAT_MRT4530_67102C.1
cgggctgcaggaattcggcacagggcgagcaccgcaattgcagggttccggaggccgaataaaaaagtttggcctctccccgcaaaaaagtaaaaaacccaaaacaaccatccaccagcgcatcgcggcaccgcgagcgagcgagcggagggagggaggtggagagcaaaagttcgataaaaggagaggaggagacgaagcgtcgaagcccaagtaacatccccccaaccgcggcctcctcctcctccccctcctcccatgcccgcatcgagatcttagccgcgccggagatcgagagggaggagcgtcgactcggtcgcttttgatcctttcttcttgccgacgtctttgtttgtgtttcctgaatagtaataagtcttttttgacaactttattttaaattagttcgtatgtttatgttattaaatgttttattacttcattttatgtattttatataatatatttattttttttttatttacgattatttttttatttttttaaatatttaatatatttttatatatattatttatttattttttgtaataaatttttatttttatattttattatattatttgttcattttttttata

SEQ ID NO: 66122 - DNA, 204 bp, Oryza sativa
  Clone ID: PAT_MRT4530_67103C.1
atggtggtcgaggagcatccacggcagtggcggtacggcaagaggaagagctccatgagcatctggtcgctcggctcaaacttgaaccctgacgagagcgcctgtgacctcaccattgccagctcctttcccatcgtccgttgtgcgctgccccttctccccaccggcgactgcccttctccctaccgctcgtcgcaccgttag

SEQ ID NO: 66123 - DNA, 540 bp, Oryza sativa
  Clone ID: PAT_MRT4530_67104C.1
tcagttcttcccctcgatcatcttgttgagaggaatgtcgtctggcctgagatcgtaccacagtggtgggtacacgtggacggtctcggaccaggcttcattcccctcaacaactcgtcggagtagaggaagaagacggacagtgatggagctcatctggacctcctctgatatccttttgcaccagcaacaatcttcgtcttgcctatcatggaaagatcgcttccaagattgcttcgcctgctcgcacgtgtgaagcccaagaatccagctttgcttgctgcccctgttgcagccggcgtggaagatggaggcgacgaccgacgggaagaagatggaggccattgatggagctcatctggacctcctctgatatccttttgcaccagcaacaatcttcgtcttgccctgtggtaactggtagtatgcttgcggctctgcatgcatgatcagctgtggtgtcgtcgtcgccacggatctttctcttactatcatggacagatcgcttccaagattgcttcgcctgctcgcacgtgtgaa

SEQ ID NO: 66124 - DNA, 218 bp, Oryza sativa
  Clone ID: PAT_MRT4530_67105C.1
aggggggtttttttaacaatttttcgcgtttctaactcagacaattttttttaggcatggaaacaacactcatttggtcccgcaaaaacttgctccagccaccatgaaaaaaggggatttggaaacctttacttattgctgccgaaaaatctaaaactgggaactgtttccccaaaccaattggtacagattatgggggggactaaaaatacccccca

SEQ ID NO: 66125 - DNA, 312 bp, Oryza sativa
  Clone ID: PAT_MRT4530_67106C.1
atgggcagcgccggcgtggaggatgcagcggcggtggcggcgttcctggagcggtgcgcgccgtcgggagacgcggcctacggcgagctcaaggcggtgctggggcgcctccacgagccgaccactcgccgcgccgcccgcgccttcctgacggcgctccggcctttctgctccagcggcgactcgctggcgcgctacggattccgcatccacgacctctccctcctccactgcgcccacgaccaccaattctcagcttcaatggagcaagtcttcgagaagatccaatatacctcgcactcatcagaataa

SEQ ID NO: 66126 - DNA, 396 bp, Oryza sativa
  Clone ID: PAT_MRT4530_67107C.1
atgaccatcattgatgggtcaaggttgattccgccggcgcctaggatcagagcaggcaatcagattatcacttgggagcttgatgcgtacatggacatgggccatggggacatgcgtgtgcggagtcgacgccggaccggtacggcgaggcggtgcgtcgatgatctggcgaagcgaggtgacatgagggcgatctcctggcggcaacggtacctgcttgtggtggcggcgcttagggttttgcacggtgaagggagggggacagcactgggctggggaaccggggaaaggaagtgcgcaccgtgggtgtgcgtagcggctgcacctaagaggacagcaaagacggtgatctggcggcgaatgatcgggaggcaacacgactgcggcggcgcttga

SEQ ID NO: 66127 - DNA, 151 bp, Oryza sativa
  Clone ID: PAT_MRT4530_67108C.1
ggatgtcaggctgacgctgcctcccctcccactagatctggcggaggggagggcgctgcccctgcccgccaccgtggagggggagggggagcggcgtcaccgccggtgggagagggggaggggaacagtgtcgctggcgccgtcgttttga

SEQ ID NO: 66128 - DNA, 1206 bp, Oryza sativa
  Clone ID: PAT_MRT4530_67109C.1
atggcgcatagagaagattgggaccgacagggcaatcgaggctggggaagaagagatgattcgcattgggaggatgaaggcaattttttccaggagagaggccaagaggggctagaagttttgggaccagaagaggaggctttgctggaaggccaggtcgcagcggagcacatcatgccgggcggtcgaatctgcccagttatggccaaagggttcaaggaaggttttgggaggaaagaaggaagcatggcaaaacaaggttggggatttaggagcatcggtggctggaaaggaaggaagagggaaaatgtggtaggagaagttgtcagcgagggtgatgcaaaggatcaggagttcgatcgaccattgtttgaggacagaaataacaaaggtgaaggcgtaaaaggggcagcgaagaagggaaaggactcttttgtggtgcttttcccatctaaaggggagttgcagcgggcaattaacttcggaggcgctgagatggttgacatgaaaaccacaaggaaaaatgactttggtagaatttttattgctattcttgatccaaagattattcctcggaatattgatgttgtgattggtgatcattattttgagctaagatttgaggtggaaaagaaagggtttgatgataatggagatgaagtggaattccatttcgaaaaggaggatggggatggggatgacgatgggcaagatggaggctcaaaggagaatggtgacaaaatgacagaacaagaagctagagtcgaggaagaggaggaagagctgaagaaaatggcagatcaaattattgatgggcaagcgatgggtgatgggctgcaggagaaggtggtgctgatggcaaacgttgaggaggttattgtgacgccggagggtgaacttgacaggatggggaggttagaggaaaattttttaggggacccttttactgatgaggaggagtgttcaatctcgggagttcaatcctttgagaaggagtatcctaacctctacaatctagttagaaacaaaaatgaggtggtggccaaggtcattttcatgggaacacattgggcaaggacttggtctttgcttcttaagggaaccgatgaagaaatagttaagaactattgcaaagtgctggagaagcgtgtggtggaattcttctccgtgtatggctggaaccttagaagaagattggaagcctag

SEQ ID NO: 66129 - DNA, 873 bp, Oryza sativa
  Clone ID: PAT_MRT4530_6710C.1
atggacatctctagggcaaatgagggctacacgagctgcggctcggtagtcgagatgtcatgccacagggccggtgtcctgctgctaggggctcaaccttggttacctttctcgggaatcccggccgtagccagggttgggtcggtactcttgtttatggctaggatgggttgggaactatgtcacgtcttgcgtccgtatgccgtggtgtgggtttctagtatagttcctgttatcaagaagaacagcaaggtgagggtgtgcattgacttcagagatttacataaagctaccccaaaggacgagtatccaatgccagtagctgatcagctggttgatgctgcctcaggacacaagattttaagttttatcgatgagatagaagaccacatagctgatttgaggaaggtttttgagagaaccaggaaatatggcctgaagatgaacccgacaaaatgtgcttttggcgtatcagctggccagttcttgaggtttcttgttcatgagagggggatcgaggtaactcaaaggagtgttaatgcaatcaagaagattcagcctccggagaacaagacagagttacaggagatgatcggcaagataaattttgttaggaggtttatttctaatttatctggacggttaaggcattatctattgtccaacgaatgcactgtcatatgcaaagccgatgtcgttaaatacatgttatcggctccaattttgaaaggaagggttggaaagtggatattttccttaactgagtttgaccttcggtatgagtcattgaaggcggtcaaagggcaagctatagccgattttattgtagaacatcgtgatgattcaatcggctcggttgagattgttccatga

SEQ ID NO: 66130 - DNA, 431 bp, Oryza sativa
  unsure (1)..(431): unsure at all n locations
  Clone ID: PAT_MRT4530_67110C.1
cggtgtctcccttctgttgccatctgacgttatcattgctgataagtttgctcctgatgctaacanccangtngttccagcatctgctattcctgatngttggatgggtctgggatattggtccatnattcagtcncgtcattcagctctaccctggaaacaacncanacagtcatntggaatggacctntggggtgtcttcnaaattngacngtttggcaatcaggaactgangnctattgcaaacaaaattgggcngancttagccggcaaggggtgtttacaacccacnacngggaaagaaggtgattctnttgnccgcngtggnaaaaagnggggagtttncncattttatgaacccncnttncaactgggnaggtggtgcctnncttggaacnnnttggnnnggaaaagaantnccttgnaaatcc

SEQ ID NO: 66131 - DNA, 2565 bp, Oryza sativa
  Clone ID: PAT_MRT4530_67111C.1
atgaaggttgatggcacaatccagaacatttcggacatagtcccagtaccatctgagttagctactcgagcaaggaaaatcatggacatgtttaatgaaatcaaagattacgctagtaaattcagtttgtctgagaatgatggagtgcggcgatctattcctgatatgcaccaagtgcggcagactagctctatggtatttgagcagagcattattggcagaggaagtatcaaggacactgtaattgaaaagatgctgtcccaaaacaaaagcagtacacctgaaagccatgtttcagtcctgggcatagttggtatgccaggagtaggcaagacaactctagcgcagcttgtgtacaacaacacagaagtatgcaaatcttttgatgtccgtgtttgggtctgtgtatcagagaacttcgatgtaaaagaaattcaggataagaggtttttgctagtattggatgacgtatggaatgaacgaagagactactgggaaatgttccgtttgccaatgttgacaacaaagctttgcaaaattatagtaactactcgaactggtcattgttcaaacaaactgcccttttggatgaagaacatgcaatataatccaagtctacaagaaattggcaaggatattgtttcaaggtgtaaagggttgccgttggcaatcaagactattggaagcatgctgcgctacgaaccagatgaaactaagtggaaggatatcttagagagtgatctatgggacttagagcaatcacagaatgaggtactgccagcactggagctgagctataagcagatgcccatgtacttgaaacgatgttttattgccctctccttgtttccaaaagattacatacttcatgaagaaaatgtggttcttctgtgggagccactggagttacttcaacatggtgatggagcaaataaggcaaaacttgcagtttcatatctccatgaattagctcagaggtctatgattgaaattagtactcatagtgcatacaagatgcatgacctcatccatgatcttgcatgctttcttgctggagatgagtttgttagaactgaagattcttcagattcactcaaagctatcattgtgattggtcatggacttgacgaaattgtaatcccagatgacatattcctaaagttcaaacggctgcgcgtctttagcttgaatggagctgcgcctaccaatctattaccagactcagctggcaacctaaaactcttacgctttttgaggttgagatgcagcatagattgccagatcatgcaactacctaaatcggtattccagctttttaatttacataccctagaactgatgaagccagcttttgatctgtatacaccaattgtaagtggaatcggccgactaattaagctagaaactttgcctccacttgaaatactaagtggatatgacagtaacttaagtgagctgaggaatataagaaaagtaaggagcctgagtctaaaagggctggattatgtatgtagtgttgaagatgcaatggaagctgatatcccgagtaaaattcacctccaatcactcaacttggattttacgagctcacaccatcaacaactgcagcagcataagcctggtgcagtatctcataaggaactattggagagtttgcaaccatgtcacaccctcagagatctgagtatatatggttacagaggcctgaccttcccgtgttgggttggtaacacttccttttccaagttgacaaaagtagtgttatccaagtgtgaatgggaatgccttccagcacttggtgagttgccttcccttgagtctttggagatttccagaatgtataatcttcgattcattggacgagagttttgctgcctaaatcaaagtgttaaagttttccgctcattggtcaacttgagtttttcctggatgtatgaattgtcagaatggtctggagtgaaggacggtgatttcgcttgcttagagactctcttgttatgccaggacaataaactaagatttcttccattggtgcccttctcgtccttggttacatgtaggttatcgaattgtggtaatctggtaacagttccagtatcctatgccctttgtgacctatatataaatgattgtgcaagtcttattgaacttccttctctcccatcccttattaagctgaagatatcaaactgctcaagcctaggagctacaatccctatgttcccagcccttcagtatctaagtatcaaggactgtgcgagtctacttgaacttcccactctcccatcacttatggaactgaacatatcaaattgctcaggcctgggagctacaatccctatgttcccagcccttcagtatctaagtatcaaggattgtgcgagtctacttgaacttcccactctcccatcacttatggaactgaacatatcagattgttcaggcctgggagctacaatccctatgttcccatcccttcagtatctaagtatcaagaactgtgcgagtctacttgaacttcccactctcctatcacttatggaactgaacatatcaaattgctaa

SEQ ID NO: 66132 - DNA, 510 bp, Oryza sativa
  Clone ID: PAT_MRT4530_67112C.1
atgtacttggggaaagcgatgctcacgcaccaagacaaaaatgccctaatggtcccttccactttgcccgaccactacatactatttctagtatatccgtgggaccacttggtcgtcgtgcttgatccggcacattatgccgagaagacattcacggaattccttgtgttgttgaacttagcacacaagtattacaaagaccaaagcggacgagtaaaggatgccagtaagagtaagcttctcgtgaagacacgatggccgaattttcaacacagtgttgcaagcaaccaccaggcactaacttatgtggatactacatgtgcgagatgcttcaaattaatgggagatcatgtcaattccatgggtagcaaacctgttcgacaaaaaaaaccattctcaacttgtgtgcagatatttgtcgttacatccgccacgatgtttgtaaccatttgggcgaattctacgatccggagagcgaccttgcaaagaatgacgctttcaaacgcctaa

SEQ ID NO: 66133 - DNA, 315 bp, Oryza sativa
  Clone ID: PAT_MRT4530_67113C.1
gtgcagcggaaaaagacgttgagaagtcgaaggaactctcgcgaagtagcgcgcgtcgatcgcaccggctcgaccttctcctcctcgtgcgttctcctcgccgtactctcgcaccgatcagcaccgcaaaccagcggcgcctctaccggatccatcactcgggcctccaaggcccgtaggactcctattcggatccttatccgaagttcatatatactcggctgtaacccgaaaactccttttcggtccacgcgtcaacagcggcccctagcagaacgtattgacccaccggacatacataaagatcatatcggc

SEQ ID NO: 66134 - DNA, 1533 bp, Oryza sativa
  Clone ID: PAT_MRT4530_67114C.1
atggcgcggcggcgtggcatggcaggcggcgatggtggcgagcccgcctccaacaccggccgcacggtcatgctccgtctctgccgccagccgtcgagcgcatgtgcctcctcctcggcaatcgagcgcatgcgcgcaagagaggagggcacagagacagaggccaaggccgaggagacgggcccagcaggcgtggccacaacggtgttggcagtagccaacgcgagagatgccatcaaggaggaaacacgagagatgctaggatggtcgaggcataggaggctgaagctaggccaagcatcggaagacaaagaggaggtgtcagcggaagtggagttggcggataaagcattgcgggaggccccacatgtgctccatgataggtccaaaattgccaacgccatcgctgttgccgacgtcttctcctccatctcatacatatgtgctgcaacaaggggtcgtatccatccagtgccaggccagtccaccgtgccaaggcatcggcccaggcatgacccaactatcgggccgggccagcacaggcccgacaccagtcgtgccatgccgtgcttgagccgggccaaatggccgtgccatggcgtggagatgcgagggcagcgacggcggtgtgcagctgcgagggcggcggctgcggtggcggcgtggagctacaagggcggcggctgcagcgtcggcatagagctacgagggcggcggcagcggcgtggagatgcgagggcggcggtggcgacggcggcatggagctatgagggcggcgactgcggcgtcggcatagagctgcgagtgcggtggctgcggctgtggtgtggagctgcgagggcggcggcgcttggagccgcctgcgccgtattcgggctcgcagccgcctgtggcaggctcggcgacggaagggcgtggagctctgggcgttgggggggtgggggtggctccacaaatgagctcgccgacaactatggcattggcgtccgcgagctcgtcgtcgcccgcatgggcgcaccacttccaccgccagatctggaatgtggttgctgtccgcgagctttgccgtcgcccgactgccctgctcgagctcctccgccaccgctctcctcgtcgacggccacatccccccagcgccacaccggcggacgggacgtcatcgtcgatgacgacgacgctggcgctgtcccagctgtccaagaagttggtgaaggggaagagcggcaggacatgctcccggagcacctcgtcgtccccgacagggcgttcgcagtcaccgaccagccagcatgcgtccttgagagccaccaggacgacgtgctcgacctcaccgttaccgggaattttgtgtggaattttgtattgctgcacacaccgctcaagtgcttggtgtccgtccgcgtcagtgtcactcatgccttcgaggagagcgacccgtcgtcttcctcgcggacggtgttcaccattgcagcgacctctctcgtggtgggcggtggcgaggaggcgtcgatgcatctcatggtgacatgctga

SEQ ID NO: 66135 - DNA, 333 bp, Oryza sativa
  Clone ID: PAT_MRT4530_67115C.1
gtgcagcggaagaagacgctgagaagtcgaaggaactctcgcgaagtaccgcgcgtcaatgtagaggaagtaatcgatcgcaccggctcgaccttctcttcctcgtgcgttctcctcaccgtactcccacgccgatcagcaccgcaaaccagcggcgcctctaccagatccatcactcgggcctccaaggcccgtaggactcctattcgaatccctatccaaagttcatatatactcggctgtaacccgaaaactccttttcggtccacgcgtcaacaacggctcctagcagaacgtattgacccaccgagcatacataaagatcatatcggc

SEQ ID NO: 66136 - DNA, 719 bp, Oryza sativa
  Clone ID: PAT_MRT4530_67116C.1
gcacgagcaaccgcgcgttgctggagaaacaggggaggagaagagatgggggaggacgcccgcatggtgctcgccctcgcgctcaccgccggcgtcatcgtcgcgctgttgtctctactcgtggccgttcttgtccggcggtggtggcgacgccgcgagtccgtcgcgtccagccgcggcttcgtcctgttcggcatatgcttcaatgacaaggagagccagcagctgcgcatggccaggccgtccttggagaggaaccggcggtggccgtcgcgggagcgccaacccggcgaggcagaggatgatgaccaggagccggaccagtgcgagctcgagaggtggaagaagatgttcgggggcccggccaggagcctgtccacgatagacgaggggacggagaaggggacgacgccgatcaccacgccggcgttctgctcaccggcggcgtcgccggaccgaagagacgcccggtcactccagacgatgtccatcgcggtgtaaagttgagatttacttttcgctcgttcagaaaaacgaccaaaaaaaatttacttgtcatgttgttagttgctaatagctggttcgattcttaaacaaattggaactccaaagtaggcttgatatacgaatcatacaaaatacagatgctgattaacagatgaagaatagattatttgttgtttaaaaaaaaaaaattattaaaaaaatataaaaaaata

SEQ ID NO: 66137 - DNA, 296 bp, Oryza sativa
  unsure (1)..(296): unsure at all n locations
  Clone ID: PAT_MRT4530_67117C.1
gcactccaacggctactacntcccctcctcctcangntcctnccccaccgccaacggctacttctcctccaagggcaccgtcggctttgcggccaacggcgaccggcggatcgagatctacaccacggcgccgcccccgccgctgccccctccgccgcgcctcggctcccgccgccgcccgggagcgggacggctacctgggaggtggcgganggtggggtggnggtggaggaggcggaagcggttggcatgtggtgctttaggnacccggagatnaagcggcggcngcgggtggc

SEQ ID NO: 66138 - DNA, 330 bp, Oryza sativa
  Clone ID: PAT_MRT4530_67118C.1
gcgtagcggaagaagacgctgagaagtcgaaggaactctcgcgaagtagcgcactcgatgtagaggaagtagtcgatcgcaccggctcgaccttctcctcctcgtgcattctcctcgccgtaatcccacgccgatcagcaccgcaaaccagcggcgcctctaccggatccatcactcaggcctccaaagcctgtaggactcctattcggatccctatccgaagttcatatatactcggctgtaacacgaactccttttcggtccatgcgtcaacagtggcccctagcagaacgtattgacccaccgggcatacataaagatcatatcggc

SEQ ID NO: 66139 - DNA, 333 bp, Oryza sativa
  Clone ID: PAT_MRT4530_67119C.1
gcgcagcggaagaaagcgctaagaaggcgaaggaaccctcgcgatgtagcgcgcgtcgatgtagaggaagtagtcgatcgcaccagcttgaccttctcctcctcgtgcgttctcctcgccatactcccacgccgatcagcaccacaaagtagcggcgcctctatcggaaccatgactcgagcctccaaggcccgtaggactcctattcggatctctatccgaagttcatgcacactcggctgtaacccgaaaactccttttcggtctacgtgtcaacagcggtccctagcagaacgtattgacccgccgggcatacataaagatcatatcggc

SEQ ID NO: 66140 - DNA, 5437 bp, Oryza sativa
  Clone ID: PAT_MRT4530_6711C.1
atgtcgtcgtctgctgcccgcccctatcagggcgcctctgcctccgcccacgccgccgcagacgcctcgccgacgtggggggctctcggcgccgccgcctgcacctctgactgcctgcctgactcgacgcctcgcatctcctccgccgcctgttcgacgggtggcggtgaagggaaggcttggacgagtacgtctctgagcgacctgcgacgaccgacgagcgccgccgccgccgccaccgactctgccggggacggtagccccgggataggaggagggaggaggcgctgccgagttggcttcttcgccgcgcacggctattaccgacagggcggcggctcctacgaccgctcctaccccgatgaatcgctcggctacacgccgtcgcgctcagaccggtactggctggacgacgacggtggcggcggcggctataagggtttcagccggtacggtggtggtggtggtggtggcagccggagggacggccgtgacatgcggggttcctaccggaggtcgccctttaggggatacgggagcgacttctccagaaaccaccaagaacacccgcctccgccactgaggaggtcgcccctgagatcagttgctgtaccgatgtcttatgaccctcctggtgatagggctgataggggggatagagaccatcatcaccgtgtgactccttggcggccgctgcgccggagggagagcagatctgatgctgcagacgctgctggggctggacctgtgcctgttggacaggccgctgcagcagcggcctcagagaaggacgtttcagctcggtcctcagccgtcgcggctcctcaggtctctgaggaggaggcaccaaggaagaagcctcggcttggatgggggcaaggtttggccaagtatgagaagcagaaggtgcaaggacctgcagagtctgctgaagctgttgccgaaggcagcccaactgccaccgaacaaaagggaatcacccatacaccagcacctgcgccttgtgtgtccccagtggcggcaccatcacccacgccttgtgcgtccccagtggcggcaccatcacccgcgccttgtgtgtccccagtggcggcaccatcacctgcaccgccatgtaaatcaccagtccctgaagataaatcctgtgaactgacagcaaatacagtcactgaatccaataaaaatatcccaggacctgacgttcaggcttgcaataacgaagtccccactaagttagatcagcttgagggtgatcccattgattcgcttgcaaaggtcctttctgaactggtgcaacatgaagattcctgttctggggattcgaaaagactgtccaatgtcagtaagttattgttactgaaggaaagcattagcaaagagctcgaaaagacagaacttgagattgactccttggaaggtgaacttaaatctgttaatgtggaagccagaaatagaacactcaaagatccacctacagctgtaacttatgcacaaaatccttcaccttcacctgtgaaagaacaaggagagctgaccccttctcccaagatttctatggagcaggatgctgatgtaaaaggctcagagctcatggaaatagagacagctcaagctcataatgcaaaagcagtttcttcagaagagagtgttgcttgtcctggagttgctctgggtcaggtccctgccgctgctgatgttatcccatctgatccatgtgggaaaactggttctggaattgatgtcgatattgagcagcgcgaagagaatccatgccaagaaacttttaatgccatgaaagcagatggaagcagtgacttggccacaaggccttgctcttatcgtgaagttaaatataacttaatggatcaaattattgctgcgaacaggagtgaagccaaaaaaaattctcaattactatttaagcctgtgccagctgatcggtccaatcttgatttattggcatcaagctatctttctagccaaatgaagaatgatgtaattatcaagaagaagcatgccatacttaaaaatcgacaaagattcaaagagcagattcttaccttcaagttcagggtgctgcgtcacctctggaaggaggatgtgcgacttctttctgtaagaaagcagcgctctaagtctcataagcgcacagaccagagcaaccgatcatcacagagcggatctcagaggcaacggtcctctaatcgctccagattggctgtaccagctggtaatttaagcacatttcctatcacagaaatgtcaggtgtagcaaggaagctgttttcagaatttcagctcaagcgttgcagaaattacttgaaaatgcctgcactgattgttgacgaaaaagagaaggcaggtgctaagtttgtgagcaagaacggtttagttgaggatcctgtttcagttgagaaggagcgagctttgataaatccatggattcaggaggaaaaggaaatttttatggagaaacttgcaacatttggtaaggatttctccaaaatatccagtttccttcagcacaagacaactgctgattgtattgagttctactacaagcaccataaatctgatagtttccgagaagttaagaaacttcttgatcttcggcagcaacagcaacctgccaacaattacctaggagcagtatctggaaagaaatggaatcctgaggcaaatgcggcatcacttgatatgcttggggtggccacagaggtggcagcccaaggccttgaatatgtgaatgaagtgaagaaaaattctgcgaaatctatcctgaggactgtttgtggtgttgataattctaccaaaggatccgagaaggattgtgttggggatgtttctttgcacgagagagaatctgtagctgctgatgtcttggcaggcatatgtggaactctctccccagaaggcatgggctcatgcattaccagttctgctgatcctggccagaagatagggatcatctcaagaatggagcatcttttaactcctgaagcagataaaaactttgatgatgacggcactctctcagatcaggagtgtgaagttgacatagttgattggaatgatgatgagaagtcaagttttattgaggctatgaatagatatgggaaggatttcgctcgaatttcgtcatacgtgaagagcaagtcatttgaacaatgcaaggtttttttcagcaaggctcggaaatcacttggtttggatctgatccatcaaggtgctgctgatgctggtttccctacaggtgatgccaatggaggaaggagtggtacagatggagcctgtattgctgagatggattcagctatctgtagtgcacagtcatgtcctaaagtggagatagatgcatgtcctgtttctgatggagaaattcaaggacataatcctctttctgatattgcctctaggcagccagaagctgacaaatcaaacatgcctgatgttgtggacataaatgtcgaggaaggtgaaagcaaagcagaaaaagactgcagcattcttgttgatcataaacagttacgtgaagacattaatcaaacatcatgtgctcgtatcgacatcaactgtcctgagagcacagataagctgcaagacatagaggatgtaacaccagtgaacatgcatggagatgatctcatggccacttcagttgaacaggttgcggcagcgcatgtggaaagtagatccagtttacattctgaagggattggcattgatgtttccaggatcgaaggatgttcacatgagagtacaattggtaaaggtggaaaatcaacaccgtctgtttgcttgcctgcagaaaatggggttagtaaggaaaatatcatccacttctcgaacatggatggtgcttcctccattagtcctgcatttacttcaaattatcagcaaagtaagctggcagatccaatccaatcaaaaccgaagccccttaccccaaaggatttaatgcctgtccaatttagttcgtcgctgcctgatcctacctcaatctgttttgagggtatagctgccataactacacccaattttgaggatcatggcaacagagccagcattgcttcaggggcaaaagatgtgaacatgttcccaacatttaaagaccagtccagtaatcgtcatgatgcactgttttctaatgtcgatgggtacatgcaacagagacgaaataatcactttggaactgaagtatgtggcttatctgaaagcacaggcatttcccagtcggaccagttcacagtatcgaaattccagaatggcaggcccagcagcttgggcctttcgaatggaaatcttggggttctatcgactgggagaagagaggaagcacgtgaaggcttgtttaggccttgttctgtcaagacaagtgctgggaatgaggagcagcaaaagcggcctggtgatgtcaagttgtttgggcaaattcttagccatcaatcatccttgcaaagctctggttcatcagttcatggaagcaaaagcaagcccccctcaccaaaggttgataagccagcttcttctaggttgttgagtaatccaagggaacgcctggtttattcttccaggcctccaatcattgctaacttggggctagaggagagagcgatgaggagttttgaccatatggatgggcgaacaatacagcctgagcctatggttatggtggcaaagtgtcagagaccgtcagctggtgtaccagtttactcaaccaaaaatggcgcgctcagcgtgtttgcggaatttcagcaaccttcaatgccgccacatacatcagatcacaaactactagaaaactttgccgatcttcataagaggaatggaatcgaactcctttcggggttccagcagcctgggaggcttgggggtgctggggtcctggttagcggtgtatctgaccctgtggctgctctcaaggcacagtacggctctggttcgaagatgttgagcagcagcaacgacgtggatacatggaaagacataggaagcaggtagcgtctgtagtgttggtagcggcaatagtgcaatgctttcttgctctctgtatcatacttagtttttgtaacttgggatgaaactaaacatgggaaagtgaatggctttcctgtccatattgttgtaggatttgcagtagaagttcgtttaaatttatcgctggtattaactttttgtacctttcttttttgctgcagccgctccatacttgatagtttttacctgttaacagtgatgtaggttttgctagaggtgttggtcatgctgtccgctggctgacaaggatgtttgttggtatgtctatcagtatttatgcagaaacctcacacagatcattgtaatgtggtaatgattcctaactgagtttactcctttgcctgctggagttttggtgaaaaaaaaaaaaaaaaaaaaaaaaaaaaaaaaaaaaaaaaaa

SEQ ID NO: 66141 - DNA, 695 bp, Oryza sativa
  Clone ID: PAT_MRT4530_67120C.1
ccggccgggaagcctcccgcacttgctgctctccccttccactctcatccccttcccctcccaccacccttcgccatggccgtctccacctccgcctcctccacccccccgctcctctccctccatcgcgccgcggggaaccccaacccggccgcactctccttcccgcctcccctccgcgcgcccccgctccgctcccgcgccgccgctgccgcggcctccgccgcagcaccgcccgccgagaccatccccgacatgcccgaggagacggaggggacggggattccgatgccgtcgtcgattggggatgatggggagcagttggcacccaagcagaagatcagaattaagctgaggtcttactgggtaccattgatcaaggactcctgtaagaagatcattgaagctgcaaaaacaacaaatgcaaagacgatgggtccagttcctctgccaaccaagcgaagagtatattgtgtgctcaattctcctcacgtgcacaaagattcaaggttccattttgagatcagaacgcaccagcgattgattgatatcatgtacccgactgcacaaacaatagattccttgatgcagctccagctccctgccggggtagatgttgagggtaagctatgacttcatgattcacgcggagctggagttctaaaaatggccggggtaaagtaaagctcttttct

SEQ ID NO: 66142 - DNA, 333 bp, Oryza sativa
  Clone ID: PAT_MRT4530_67121C.1
gcgctgcggaagaagacactgagaagtcgaaggaactctcgcgaagtagcacgtgtcgatgtagaggaagtagttgattgcaccggctcgaccttctcctccccgtgcgttcttctcgccgtactcccacgtcgatcagcactgcaaaccagcggcgcctctactggatccatcactcgagcctccaaggcccgtaggactcctattcggatccctatccgaagttcatgtacactcggctgtaacccgaaaactccttttctgtccacgtgtcaacaacggcccctagcagaacgtatttacccactgggcatacacaaagatcatatcggc

SEQ ID NO: 66143 - DNA, 719 bp, Oryza sativa
  Clone ID: PAT_MRT4530_67122C.1
ttttttttttttttttttttttacagatacaaactagtatactattgtataattttattcatcgttgttttgtacaaacagcgacatgtaaccatataagcagcaaggaccggtgaacacgatggcaagacatgtgggtccaggcaggtttacaagcatcacagcatatatgtatatcaactactaccataataccttcacatcacttagtctgaaagaagacttaatgtgcaaatcctcttcagagcctcagaggctagtgccacaccagaagcaggatgagtgtgccactcgccggtcaccgctatgcccgtttcaccacatgcagctgccgctgcggcgcagctgggctgccacccctatttgcattcatcttctccttggactgctccatcattttctcaaccagcatttgcttctttgtcagtagaaccgtcttctctgcctctttgagacgagcgttctcctgcttgagatagttcagttcagcttcgagctccaccgtataagcctgctttctagcacgggaccgtgcagctgactcacggttcttgatcatgcgccgttggcggcgctccaccgtcttctcggcgcagccatcctctctgtggggacgctttcttgttccattctcaatcatcatcccattcccaatacaattcatcatatcagcatgtgtcatggcactcatcccatctgatcggacgccgtgggtcgac

SEQ ID NO: 66144 - DNA, 333 bp, Oryza sativa
  Clone ID: PAT_MRT4530_67123C.1
gcgcagcggaagaagacgctgagaagtcgaaagaattctcgcgaagtagagcgcgtcgatgtagaggaagtagtcgatcgcaccggctcgaccttctcctcctcatgcgttctcctcgccgtactcccacgttgattagcaccgcaaaccagcggtgcctctaccggatccatcacccgggccaccaaggcccgtagaactcctattcggatccctatccgaagttcatgtacactcagctgtaacccgaaaactccttttcggtccacgcgtcaacagcggcccctagcagaacgttttgacctaccgggcatacacaaagatcatatcggc

SEQ ID NO: 66145 - DNA, 2011 bp, Oryza sativa
  Clone ID: PAT_MRT4530_67124C.1
cgcacagccatgctcccacgacgcgctcacccccggcggaagtggaggtaggcgtgggctgtcccatcggagcgtcattcggacagcaaccgtgctgatctccgcccgttcaagagaaaaagaacagtccagtttggaaagagaagggtgcatgtgggccgggggtatcgtgactagaggattgggttgccgcggtcgcccacgtggcctgaccccctcgggggggtcgggcccgagggtgatgtggccgcccccctctttgtctccccgaggggtcggaccgctcccgtttcgcccccgaggggtgaggcgccccgacccaggcggtctgacgcacgcctcgccccatcccgtcaggatgagagcctccaagcactcgtccctagccggagccggcgtgttagctcctggagatggcacgttggtcccgacagccatgttcctacgtcgcgcctgcttccggcggaagtggagggggctctgcgtgtgtttttctaagctctcgcattctttcgtgtgcgccaagcttttcctgttcagcccaatggccgaacaagcaaaggcgcacaacctctctccgagtgttagcggtgacgacggggagccgaacccacgccgtcgagctcgtactccaccgccccctccacgccaaagtcctaggcgggaggaggcgctcgagagggtcgaaggatccgcgacttcgacatccacgggtgatgaggaagggcggcgagatggggagcgtcgcctcctcgtctacggcgacggcagcacgccccagggcgcgctccaagctgcgggcgcgctcctacgtcacccgcccattgtccctgacccagagtctccagcccaacgttggctggacgacgtggccaacttggtcatgacggcacggcagcacctaggtgctggtgggcggtcctccgccaccaagacctctggcgctgctaccaccggctccgtgtcgtcaaggcggagggcgcggcgagcgacggctattgctcgccattcggccgccactccttcgtcagcgcctccgacccaggaagatctgcgtggggggccggatgcccgcatcagtatcgagcgccggcgtaatggccgacgtgctgcccacgcaacggagggcgcctcctcgtccggagtgtcacatcaacacggacgcggggatcagccctccgtgcccccggttggtggtgtcggctgtagagcctttgtggcgagccttcggaacgtccgttggcccccaaggttccggcccaccatcgccgaaaaatatgacgggagcgtcaaccccgccgagtttctccaggtctacacgaccgggatcgaggccgccgggggtgacgacagggtcatggcgaatttctttcccatggccctgaagggacaggcacgggtccagcgaagggatgatgagtcacttcgctcatacattcagcggttctgtcaagtccgcaacaccataccatgcatccctgcacacgcggtgatctacgcgttcagggggggtgtgcggcacaaccgcgtgctcgaaaagatcgcctccaaggagccccagactaccgcggagctttttcagctcgcggaccgagtggctcgcaaggaggaggcctggacttggaacccctccggttccggtgtggcagcttcggccgcccccgggtccgccgctcggtcagggcggcgggacaggaggaggaagaagaggtcggcccattccgacgacgaggagcgaaggtggtgcgcggcccttcgagccgcgcgctaccagcagagcctgcggcgctaccatcagcgccacgtccgggcccgatcactctgcgtcgacgacctcgtcctacgccgtgtccaaacgcgtgctggactgagcaaactctcaccaatgtgggagggtccgtatcgagtgatcggcgtcccccggccgggctccgttcggctggccacgggcgacggcacagagctgcctaacccgtggaacatcgaacaccttcgtcgcttctacccctag

SEQ ID NO: 66146 - DNA, 1375 bp, Oryza sativa
  Clone ID: PAT_MRT4530_67125C.1
cgcacttgctgctctccccttccactctcatccccttcccctcccaccacccttcgccatggccgtctccacctccgcctcctccaccctcccgctcctctccctccatcgcgccgcggggaaccccaacccggccgcactctccttcccgcctcccctccgcgcgcccccgctccgctcccgcgccgccgctgccgcggcctccgccgcagcaccgcccgccgagaccatccccgacatgcccgaggagacggaggggacggggattccgatgccgtcgtcgattggggatgatggggagcagctattactgagtacgatgtatggaaatgtgctgctcagtaagtcatcaaagtaaagtaaaaacatatgaaatcacagtgatgcactaacttcagaaaataatagcaaatttcgttttgattttactggcactggagaaagtgaaggcacattccagtatggcaactattacaaagaggtggatgatttgcgtgatgtaattctacatttcaagaaacacaagcgtgacacccgcggtattgctggccacagtaaaggaggaaatgtggtcatcctgtattcatccattcatcgagatgtagctagtattattaacatgtctggaagatttgatctaagacgtggaattgctgatcgtcttggaagtgattatatggaaaagatagaccggtatgggttcattgatgtgggagtgaaaacaggacgttccatctaccgtgtaaccaaagaaagtctgatggatcgccttaagatagatatgaagagtgcatgcatgtctattgatcctaaatgcagggttctgacaattcatggttctgatgatgatattgtgccatcagaggatgccctagaatttgacaaatatataagcaatcatgaattgagtattattgaaggagctgatcatagatattcattgcatcaccttgagttggctaccattgtactgaaatttattaatgtttcttccgtttacctgtggaagttgctattttctggaacactaatgccatttagggtcaatgttttctgttttcagttggcacccaagcagaagatcagaattaagctgaggtcttactgggtaccattgatcgaggactcctgtaagaagatcattgaagctgcaaaaacaacaaatgcaaagacgatgggtccagttcctctgccaaccaagcgaagagtatattgtgtgctcaattctcctcacgtgcacaaagattcaaggttccattttgagatcagaacgcaccagcgattgattgatatcatgtacccgactgcacaaacaatagattccttgatgcagctccagctccctgccggggtagatgttgaggttaagctatga

SEQ ID NO: 66147 - DNA, 333 bp, Oryza sativa
  Clone ID: PAT_MRT4530_67126C.1
gtgcagcggaagaagacacttagaagtcgaaggaactctcgcgaagtagcacgcgtcgatgtagaggaagtagtcgatcgcaccggctcgaccttctcctcctcgtgcgttctcctcgctgtactgccacgccgatcagcactgcaaaccagcggcgcctctaccggatccatcactcgggcctccaaggcccgtaggactcctattcagatcccgatccaaagttcatatatactcggctgtaacccgaaaactccttttcggtccacgcgtcaatagcggcctctagcagaacgtattgacccaccgggcatacataaagatcatatcaga

SEQ ID NO: 66148 - DNA, 2813 bp, Oryza sativa
  Clone ID: PAT_MRT4530_67127C.1
atggccgaacaagcaaaggcgcacaacctctctccgagcattagcggtgacgatggggagccaaacccatgccgtcgagctcgtactccaccgccccctccacgccaaagtcctaggagggaggaggtgctcgagagggtcgaaggatccgcgacttcgacatccacgggcgatggggaagggcggcgagatggggagcgtcgcctcctcgtctacggtgacggcagcacgccccagggcgcgctccaagctgcgggcgcgctcctacgtcacccgcccgttgtccctgacccggagtctccagcccaacgttggctggacgacgtggccaacttggtcatgacggcacggcagcgcctaggtgctggtgggcggtcctccgccaccaagacctctggcgctactaccaccggctccgtgtcgtcaaggcggagggcgcggcgagcggcggctgttgctcgccattcggccgccactccttcgtcagcgcctccgacccaggaagatctgcgtggggggccggatgcccgcatcagtatcgagcgccggcgtaatggccgacgtgctgcccacgcaacggagggcgcctcctcgtccggagtgtcacatcaacacggacgcggggatcagccctccgtgcccccggttggtggtgtcggctgtagagcctttgtggcgagccttcggaacgtccgttggcccccaaggttccggcccaccatcgccgaaaaatatgacgggagcgtcaaccccgccgagtttctccaggtctacacgaccgggatcgaggccgccgggggtgacgacagggtcatggcgaatttctttcccatggccctgaagggacaggcacggggttggctaatgaacttgccacccgcgtccgtccactcttgggaggatttgtgccaacagttcaccatgaactttcaaggcacatatccgtgcccaggtgaagaagcggacctgcacgcagtacagcgaagggatgatgagtcacttcgctcgtacattcagcggttctgtcaagtccgcaacaccataccaagcatccctgcacacgcggtgatctacgcgttcagggggggtgtgcggcacaaccgcatgctcgaaaagatcgcctccaaagagccccagactaccgcggagctttttcagctcgtggaccgagtggctcgcaaggaggaggcctggacttggaacccctccggttccagtgtggcagcttcggccgcccccgggtccgccgctcggtcagggcggcgggacaggaggaggaagaagaggggaggcctgcgagcgacaaaaagaaggaagccgacactccctgacctcggctacttggaagagcgaaggcggcgcgcggcccttcgagccgcgcgctaccagcagagcctgcggcgctaccatcagcgccacgtccgggcccgatcactctgcgtcgacgacctcgtcctacgccgcgtccaaacgcgtgctggattgagcaagctctcaccaatgtgggagggctgtatctgtgctgttgtcgctgtcgtccgcaccgtcgtcaccgcactcctcgtcggagttgaaggcaaacgcgagccgaggggccgctcattattgtcggtcggttttcccttgctgatgcgcgcgatttgcgaccgccgggattctgcccgaagagagagagagcagggaggagaggcccccgagccgaacggcggcctaaggcccccgacgaccggagctggccctccgcctgcttgtccgacggtgccaggcgcccccgacccccaggatggccccgaggccactgcgggaaggccgcgcctgtcgccctctgaccccgaggtcgtcggcacagaagccgaatgcgccccgcgtggcctctcggatggagagcgccctggagatgtggcccctgacgaagaagatcggccccgccgaaaggtgcagcggcccgtctacttcgttagcgaggccctccgggacgctgagacccgataccttcaggcccagaagatgctttatgctatcctgataacttcgaggaagttgcgccattatttccaggcgcatcgggtcacggtggttacgtcttatcccctcggccaaatcttgtataaccgagagggtactggacgggtggtgaaatgggcaatcgaactctctgaattcgatttgcgcttgaaaccaagccacgcgatcaagagccaggccctcgccgactttgtggtggagtggaccccagctcccgagctcgtctccgcccccgaggccagctcaagcccatcgcagctgcctcacaccgccctctgggtgatgtagttcgacggcaccggtcagattgcgggttaggtggcgacgggcggtctgacgcacgcctcgccccatcccgtcaggatgagagcctccaaacactcgtccctagccggagccggcgtgttagctcctgggggtggcacgttggacccggtcagatatatgccaggcttcatccgatttgtgaccggtctgacactggtcatgtcgtcagcagacaaccatgttcccacgtcgcgcctgcttccggcggaagtggaggtaggtatgggccgtcccatcagaaggtcattcggacggcaaccatgcaagtctccgtgatcagagagggagagagtaagagctctctggttctccagctctttggtagcttcttcatacatagatccaccaaaacacaggagtagggtattacgcttctcagcggcccgaacccagggcccccggccgaaccggcaaaggggggcctgcgcggtctccccgtgaggagccccacgctccgtcat

SEQ ID NO: 66149 - DNA, 180 bp, Oryza sativa
  Clone ID: PAT_MRT4530_67128C.1
atgggcgagatttggaggatttttaggatggggtttggtctggagctgatggcgactacgaaaaagagagacgaaagcgctatctctgatctcgccgggcacagattcgaggaggaagactaccctgtcatcgactatgagtcagaacttcagaccgccatatcgacaacagttagatag

SEQ ID NO: 66150 - DNA, 333 bp, Oryza sativa
  Clone ID: PAT_MRT4530_67129C.1
gtgcagcggaagaagacgctgagaagtcgaaggaactctcgcgaagtagcgcgcgtcgatgtagaggaagtagtcgatcgcactggctcggccttctcctcctcgtgcgttctcttcgccgtactcccacgccaatcagcaccgcaaaccagcggcgcctctaccagatccatcactcgggcctccaaggcccgtaggactactatttggatccctatccgaagttcatgtatacttgactgtaacccgaaaactccttttcggtccacgcgtcaacagcagctcctagcagaacgtattgacccatcgggcatacataaagatcatatcggc

SEQ ID NO: 66151 - DNA, 3878 bp, Oryza sativa
  Clone ID: PAT_MRT4530_6712C.1
atgaagaacttcttcaggaagctccacatcggggaggggtcgggcgacggcgcctcctcgtctccccctccaccgccctcctcgaggaaggggagcggcggggtggggggtaatcatcacctgcacgccgagcagaggcagccatcggcgtcggcggtgtcgagctggcttgattccgtcccaggtcggcctcagccccctacgccgtcgacgccgtcggaggcggaggggtcgccgttctcgtcgtcggtagggtcgggggcggaggagaggaggcaatccgtggcggctgagaggaggagatcgcaggaggaggagtgggagaggaggcggtcgcaggaggaagaggccgtgagggagatgaggcggtcgcaggaggaggacgaggtggaggagcgagtgataagggagtcgtcggaggcggaggagaggaagcgggtcagggagaaggaggacgacgaccttgaggagttccagctgcagcttgtgcttgagatgagcgcgcgggacaatcctgaagagatggagattgaagttgccaagcagatcagcctgggcttctgcccgcctcagagctctactgcagaggccctcgcggcccgatactggaatttcaacgcccttggctatgatgacagaatatcagatgggttttatgatctctatgtgactgggaatggcccggcttcaataaccatgccctctcttaaagatttgcgagcgcagtcactatcacatagggtcaactgggaagctgtattggtacacagaggtgaagatcctgagcttatgaaacttgaccagacggctctaatcatgagccttgaactccgtgaatctaaaccttcagaatttgttggaaatgatttggttcagaaacttgctggcctagtagccagacacatgggtggaactttttttgattctgagggcatgttggtgaaataccagaaaatgatgagatacctgagaaccagtattggaagtgtagttgttcctcttggccaattaaaaattggtctggcacgtcatcgtgcactgctatttaaggttttggccgataacattggtatcccctgtcgactcctgaaaggaaggcagtacactggatcggacgatggggctttgaatattgtgaaatttgatgatggaagggagttcattgttgatcttgtcgcagatcctggtacacttattccttcagatggtgctgttttgtctacagaatttgaagaaagttccttctcaaataatcatcattttaacaaagataatgacatcaggcagttgggatcttcaaatagtttatcgaattctgcatgtagttcttttgagtgtgagttacttgacagaagatctacatggatcaacgttggtccttctgatagtgatggagctacaacgagccagacaagtaaaaacaatcaacaaaatacactatcagattcattcgggattttatctgttagcacattcactagtgaaaataggcctattacaaatgaatcaagaagtacagacgacattgctgccgcaaagaacaaagaaagatcaagtgtaacaattaattcttcgtcaacttcaccttcaccttcttccccagaagtaggcagtactccagctgtccggaggatgaaagtaaaggatatttcggagtacatgattaatgctgccaaagagaatccacaactagctcagaagatccatgaggttttacttgaaaatggagttgtagcaccacctgacttgttttcagaagattccatggaagagccaaaggacctcatcgtgtatgacaccaccctttttcaaagcaaggatgaaatgaaaaagaggatgaatgaacttgggtcgagggaatatgctgatcgtggtcatggtccattattgcctcatcatcctggacatgaactcccatcaaaagttcctcaccgggcacctctagactcacttaagccagttgagggtttgggcattgaccacccccctgacatccaagataacacatcttttatttctcagtatgaaccttctgcacctccccaggaagcttcatcgcagcttacaaagcaattgcctgttacggctgctgctgttgcaactgctgcagtggttgcgtcttcaatggttgttgctgctgctaaatcaaacaatgatgtgaactttgacgtgcctgttgcagctgctgcaacagtcactgcagctgcagttgttgccacaactgctgctgttagcaagcaatatgaacacttggagcctggtaatcagctgcatagtttaccaagtccctccgaagggaatgaatcaatcgagaaaagtgcagatgagttttgggataaacagaattttgaaattgatcatggtcaagataatactttggatcaagaaaaagattcagctgaagttcgccaggatgctgaaagaacctcagataagtcaagcggaacagagagtgcaaaatctgaaatcactctggatgatgttgcggagtttgaaatccaatgggaagaaattactattggggaacgcattggtcttggatcatttggagaagtttatagaggagagtggcatggaacatgtatcaaaatcgctttgtttataggaagttgctgtaaagaagtttctgcaacaagatatttcaagtgatgctctggaagaatttagaactgaggtgcgaataatcaagaggttgcggcatccgaatgttgttctcttcatgggtgctattactcgtgtacccaatctttctattgtcaccgaatttcttccaagaggtagcttatttcggttaattcatcgtcccaacaaccagttggatgaaagaaagcgcttaagaatggcacttgatgtggcacgtggtatgaattatctacataactgcacaccggtgatagtccatcgagatctgaagtctccaaacctactggttgacaagaattgggttgtgaaggtttgcgactttggtttatctaaaatgaagaacaagaccttcttgtcatcaagatcaacagctggaacagcggagtggatggcacctgaagtacttcgtaatgaaccatcagacgagaaatgcgatgtttttagctatggggtcatactgtgggaactttgtacattactgcaaccttgggaaggcatgaacgccatgcaagtcgtcggagctgttgggtttcagaatcgtcgccttgatattccagataacactgatcccgccattgcagaaataatagcaaaatgctggcagacggacccaaaattgcggccatcatttgcagatatcatggcctcattgaaaccactgctgaaaaacatgaccgctcaagcgccaaggcagagagtacaacaaaccgacgagtaagaaaaaagaggatgttaccagctgcccgaaggcctaagtatagcatttttttttgttttttgtatagtaacaccaattgtgtgttcgagattggaaagcgtgatgatgttagtgtgctgggtatccatctgtgaagaccagcgctgccaaacccgtccacgatggaggaaaattgaacagcggcaagaaactgtgcaaacgcgaatcaaatgtttagcacagttcttccccaaaaacaccagtctcaggaaatcacatggcgggcggaagttacacatgcttttttcataccatctctcttttcctttatctcgtgttctccaccaaatggtggtatttgtgtaatatggcaagaaaaagaaaaaaaaatgatttgctgtccatcaagaaaatgaaaaaggagaaaacggttgttcaatcgtgctcagtgctcccttccctgctgtgctgatggccagcattttcagaaagttttaaagattgagcaaatcttattatatcgaaaaaaaaaaaaaaa

SEQ ID NO: 66152 - DNA, 5820 bp, Oryza sativa
  Clone ID: PAT_MRT4530_67130C.1
atggccgaacaagcaaaggcgcacaacctctctccgagtgttagcggtgacgacggggagccgaacccacgccgtcgagctcgtactccaccgccccctccacgccaaagtcctaggcgggaggaggcgctcgagagggtcgaaggatccgcgacttcgacatccacgggtgatggggaagggcggcgagatggggagcgtcgcctcctcgtctacggcgacggcagcacgccccagggcgcgctccaagctgcgggcgcgctcctacgtcacccgcccattgtccctgacccggagtctccagcccaacgttggctggacgacgtggccaacttggtcatgacggcacggcagcgcctaggtgctggtgggcggtcctccgccaccaagacctctggcgctgctaccaccggctccgtgttgtcaaggcggagagcgcggcgagcggcggctgttgctcgccattcagccgccactccttcgtcagcgcctccgacccaggaagatctgcgtggggggccggatccccgcatcagtatcgagcgccggcgtaatggccggcgtgctgcccacgcaacggagggcgcctcctcgtccggagtgtcatatcaacacggacgcggggatcagccctccgtgcccccggttggtggtgtcggctgtagagcctttgtggcgagccttcggaacgtccgttggcccccaaggttccggcccaccatcgccgaaaaatatgacgggagcgtcaaccccgccgagtttctccaggtctacacgaccgggatcgaggccgccgggggtgacgacagggtcatggcaaatttctttcccatggccctgaagggacaggcacggggttggctaatgaatttgccacccgcgtccgtccactcttgggaggatttgtgccaacagttcaccatgaactttcaaggcacatatccgcgcccaggtgaagaagcggacttacatgcagtccagcgaagggatgatgagtcacttcgctcatacattcagcggttctgtcaagtccgcaacaccataccatgcatccctgcacacgcggtgatctacgcgttcagggggggtgtgcggcacaaccgcatgctcgaaaagatcgcctccaaagagccccagactaccgcggagctttttcagctcgcagaccgagtggctcgaaaggaagaggcatggacctggaacccctccggttccggtgtggcagcttcggccgcccccgaatccgctgctcggacagggcggcgtgacaggaggaggaagaagaggtcagcccattccgacgacgagggtcatgtcctcgccgtcgagggcgcttcgcgggccacccgaaaggggaggcctgcgagcgacaaaaagaaggaggctggcgctcccagtagggagcgctcaaccggcaagtggtgcatcgtccagaacacctcccttcacgacctcgcggactgccgcgcagtcaaaagtttggctgagcggacgaggaagtgggaggaggagaggaggcaggagcgccgagagggcaagtccccggcggttccttccggcaatcggcgaagtgaggccaagcagaaggcccccgccgaggacatcgatgacggcgatgatgacctaggtttccaagagcctggggccaccattgccactgtcgatgggggagcgtgtgctcacgtttctcgccggagcctcaaggccatgaagcgagagcttctggccgcggcccctactcatgaggcgacgcgccgggcgcggtggtcggaggttgctctcacctacgaccagaccgaccacccaccgtgcgttgcccggggaggacagatcgcaatggtggtttcccccacggtttgcaacgtgaagctggggcgtgtcctcattgatgggggagcagccctcaacatcctttcccccgcagcctttgacgctatcaaggccccggggatggtgctccggccgtcccagccgattatcggtgtgacgccgggtcacacttggccgctaggtcatatcgacctcccggtcaccttcggtggatccgccaacttccgcacggagcgggtgaactttgatgtggcggacctcagtctgccctacaacgcggtcctagggaggcccgcgttggtgaagttcatggcggcagtccactacgcctacctccagatgaagatgccgggccccggtggccccatctctgtccatggcgacctcaaagtcgcgcttgcttgtatggagcagcgcgcggaccacctcaccgccgcgtccaagcccgagggaggcgacgagaggcttggcacctccgcccccgccgccccgaggcagcggatagtcacatgcgacgaggtcccggaagacgcgctcgtctctttcctgcgggcaaacgctgacgtcttcgcatggagaccagcggatatgcccggggtcccaagggaggtgattgagcaccgtctcgccgtgcggtcgggcgcaaggccggtccggcagaaagtacggcggcaggtcccggaacgtcaagccttcatccgcgaggaggtggcgcgacttctggaagccggattcatccgcgaggtcatccatccggagtggctggcgaacccggtggtcgttcccaaggcgaacggcaagcttcggatgtgcatcgactacaccgaccttaacaaggcatgtcctaaggacccttaccccctgcctcgcatagatcagattgtcgactccacagcggggtgcgaccttttgtgttttctagatgcatactctggttaccatcagattcgcatggctagggaggatgaggaaaaaactgcattcattacccccataggaacttattgttatacgacaatgcccttcgggttaaagaatgcaggtcctacttttcaacgcactactcgaatttctttgggtagccaaataggacgtaatgttgaggcttatgtcgatgacttggttgtaaagacgcgcaaccaagagaccttactctcggatctagcggaaacttttaagagtctccgctccgcccgcataaaactgaaccccgataagtgcgtgttcgatgtacctgcgggcaagcttctcgggtttttggtctctgcccgaggcatcgaggccaaccccgagaagatacgagctatagagcggatgcgccccccagcaagcttagggatgtgcaatgcgtcaccgctactctacttagcggcgaccccgcaagtggttagtgcggcgttgattgtggagcgcgatgaggacaatcctcattccgcgcacccccaccctgtgctggcttggcccgggagagagcagggaggagaggcccccgagccgaacggtggcccaaggcccccgacgaccggagcaggccctctgcccgcttgtcagatggtgccaggtgcccccgacccccaggatggcccgagggccactgcgggaaggccgcacctatcgccctctgaccccgaggctaaccctgtgccgactcgacccgggagagagcagggagaagaggcccccgagccgaacggtggcctaaggcccctgacgaccggagttggccctttgcccgcttgtccgacgacgccaagagcccccgaccccctggacggccccgaggccactgtgggaaggccgcccctgtcgtcctccgaccccgaggtcgtcggcacagaagacgagtgcaccccgcgaggccgcttggacaaagagcaccccagggatgtggcccctagcgaagaggatcggccccaccgaaaggtgcagcggcccgtctactttgttagtgaggccctccgggacgccaagacccgataccctcaggcccagaagatgctttacgctattctgatggcttcgaggaaactgcgccattatttccaggcgcatcgggtcacgggtactggacgggtggtgaaatgggcaatcgaactttctgagtttgatttgcactttgaaccacatcacgctatcaagagccaggccctcgccgattttgtggcagagtggaccccagctcccgagcccgtctcagtccccgaggccagctcgggcccctcacagctgcctcacaccgcccattgggtgatgcagttcgacggctccctgtctcttcagggcaccggtgcgggggtcacgttgacctcgccgagcggagacgtcctcagatatttggttcgccttgactttcgggcgaccaataatatggcagagtacgagggactccttgcgggactcagggtggcagctggactggggatccgccgcctcctggtctgtaaggagtaccggtgctctgacccgcagatggacgcttacgtgcgccaagtacggcgtatggagcgccattttgacgggatagagcttcggcacgtgcccagacgggataacacggttgccgacgaactctcacggctcacttcctcgcgagcccagaccccaccgggcgcctttgaagaaaggcttgcccagccgtcagcgcgacccgaccccttaggggagacggacgcgcctgacaggcccccgaagcccgtcggagtccaggcctcgggacccgaggggagcgctcccagctcccttagattgattgcttggatcgctgagatccaagcatacctcacagataagactctacccgaggaccgcgaagggagtgaacgcgtccaacgcatctccaaacgctacgtgctggtagaagggacccactatcggcgcgcggctaatggaatcctcctgaagtgcattcttcgggaacaaggcgtcgagcttcttgccgatatccatgaaggcgaatgcggatcccactccacctcgcgcaccttggttggcaaagcctttcgacaaggtttctattggccgacagctctcaatgatgcggtagacctggtccggcgatgcagagcgtgtcaattccacgccaagcaaatccatcagccggcccaggccctgcagatcataccactttcatggccatttgctgtctgggggctcgatatcctgggaccgtttaggcgggccccgggcgggtttgagtatctgtatgtcgcgatcgacaagttcactaagtggcccgaggcttatccggtcgtcaagatcgataagcactccgcacttaaattcattaagggcatcacaacccggtttggagtgcctaaccgtattattacggataacggcacccaattcactagtgaacttttcggcgattactgcgaagacatgggcatcaagctctgcttcgcctcacctgcccaccccagaagcaacggccaagtagagcgcgccaatgcggaaatcctcagaggccttaaaaccaagaccttcaacatcctcaagaagcacggcgattcgtggatcgaggagttgccagcggtgctctgggcgaaccgaaccacgccaagccgagcaaccggggaaacgcctttcttcctcgtctacggcacggaagcggttctcccatccgagctcaccctgaggtcccctcgggccaccatgtactgcgaggctgatcaagatcagcttcgcagagatgacctcgactacttggaagagcgaaggcggcgcgcggccctccgagccgcgcgctaccagcagagcctgcggcgctaccatcagcgccacgtccgggcccgatcactctgcgtcgacaacctcgtcctacgccgcgtccaaacgcgtgctggattgagcaagctctcaccaatgtgggagggtccgtatcgagtgatcggcgtcccccggccgggctccgttcggctggccacgggcgacggcacagagttgcctaacccgtggaacatcgaacaccttcgtcgcttctacccctaa

SEQ ID NO: 66153 - DNA, 1633 bp, Oryza sativa
  Clone ID: PAT_MRT4530_67131C.1
ctaccacaccacacatctacgaccaaaaccaaccactactacaaaaaagatctttccagatgggcaaaactgattttcgcgtgcggacctccggctcgtctgcctcaaagggtcactgccgccgtcgtgctccacccgctgccggcctcttcccatcgctgccgccaccggcctcttcccacccctaccaccgtcgggctcctcccaccgcggcgaccgtgctcctcccgccaccgcagctggatccgtgcaaatccgggtgggggacagccgtcgccgccggatctgcgcaggggacggccgccgccgccaccgcccggccccacgccgccttcatcgctctcccgtcggccaacatggccatcttatgactgcaaggccccaccacaagaagactagcatctagatcgaagcccgtcacaggcccgacagggccttccctagacatcgtgactaccgccgtccccagagctagccacgggccaacgctagcgcggggtttgagggttgccttcgccacgcctgaccagccttccatagccgctgtcgtccccagatctggccggggaaaaaaaaaaattgatgtgaataaatcagaggataccaccatgtttacaaacacttccaataacttcacaaatagcttcttgttacaggaacgggtcaacaaacacgcgcaatcaaactacagcaataattttggattcacacccacaccgtaatttacaatcacctgcaacaataacagataattacagcacccagtatggtcttatcatttcttcttagcagactgcttctcttgctccatctttgcaaataggcttccatcatagactgccctgacagtatccttgtgaagaaatccatccttgtctttgcagaggtagtacaatactttccactctgtgaagccacccaaccatcctttgaaatctttaggctccctgtttgattggagcaactccttcagctctttgtctgttagggcatcaggcctggtgtgagcatgcttcttgaatatttcctcgaacttttctgggacaaaccttccattcgcatcatacacgcctgaatcgcttccatgcttgcctttgtggatgttcttgacgtatatgggtaacttgagaccagtcttggtgttctccggtatcgtcttgggcccaagtccgccattgatgaacacggcgccgacggcggacagcacgactcctgccccgattgcgcggaacccttggtaggtctcggaggggtagatgatgccgtccttgttgcggtcgaagaaggcgacgtgcttctgcagcggcgtcagctcggagcggtacacctccgcctcgccgccgccggcgttgttgttgttgtcacggacgacggcgacgccgccgccacctagcagcagggcacacagaggcacggtgacgacggtggcgacaaggaacgcgacagatttattcgagccacaggaataatcagacgatgaagatgaaggagaagcagcaggcatagcgggtggagtggagttgacagggtgtgcattcgtggacctgatgctggaggtggtgggctaatctgcagactgcagagatcgatcgatcgtttggcactttggctgatcctcgtccgtccccgcgcc

SEQ ID NO: 66154 - DNA, 334 bp, Oryza sativa
  Clone ID: PAT_MRT4530_67132C.1
gcgcagcggaagaaggcgctaagaagtcgaaggaattctcgcgaagtagcgcgcgtcgatgtagaggaagtagtcgatcgcaccgactcgaccttctcctcctcgtgcgttctcctcaaccgtattcccacgccgatcaacaccgcaaaccagcggcgcctctaccggatccatcactcgggcctccaaggcccgtaggactcctattcagatccctatccgaagttcatgtacactcagctgtaacctgaaaactccttttcgatccacgcatcaacagcggcccctagcagaacgcattgacccaccgggcatacataaagatcatatcggc

SEQ ID NO: 66155 - DNA, 5049 bp, Oryza sativa
  Clone ID: PAT_MRT4530_67133C.1
atggccgaacaagcaaaggcgcacaacctctctccgagtgttagcggtgacgacggggagccgaacccacgccgtcgagctcgtactccaccgccccctccacgccaaagtcctaggcaggaggaggcgctcgagagggtcgaaggatccgcgacttcgacatccacgggtgatggggaagggcggcgagatggggagcgtcgcctcctcgtctacggcgacggcagcacgccccagggcgcgctccaagctgcgggcgcgctcctacgtcacccgcccgttgtccctgacctggagtctccagcccaacgttggctggacgacgtggccaacttggtcatgacggcacggcagcgcctaggtgctggtgggcggtcctccgccaccaagacctctggcgctgctaccaccggctccgtgtcgtcaaggcggagggcgcggcgagcggcggctgttgctcgccattcggccgccactccttcgtcagcgcctccgacccaggaagatctgcgtggggggtcggatgcccgcatcagtatcgagcgccggcgtaatggccgacgtgctgcccacgcaacggagggcgcctcctcgtccggagtgtcacatcaacacggacgcggggatcagccctccgtgcccccggttggtggtgtcggctgtagagcctttgtggcgagccttcggaacgtccgttggcccccaaggttccggcccaccatcgccgaaaaatatgacgggagcgtcaaccccgccgagtttctccaggtctacatgaccgggatcgaggccgccgggggtgacgacagggtcatggcgaatttctttcccatggccctgaagggacaggcacggggttggctaatgaacttgccacccgcgtccgtccactcttgggaggatttgtgccaacagttcaccatgaactttcaaggcacatatccgcgcccaggtgaagaagcggacttacatgcagtccaacgaagggatgatgagtcacttcgctcatacattcagcggttctgtcaagtccgcaacaccataccatgcatccctgcacacgcggtgatctacgcgttcagggggggtgtgcggcacaaccgcatgctcgaaaagatcgcctccaaagagccccagactaccgcggagctttttcagctcgcggaccgagtggctcggcggcgtgacaagaggaagaagaagaggtcagcccattccgacgacgagggtcatgtcctcgccgtcgagggcgcttcgcgggccacccgaaaggggaggcctgcgagcgacaaaaagaaggaggccggcgctcccagtagggagcgcccaaccggcaagtgtaaggccaagcagaaggcccccgccgaggacatcgatgacggcgatgatgacctaggtttccaagagcctggggccaccattgccactctcgatgggggagcgtgtgctcacgtttctcgccggagcctcaaggccatgaagcgagagcttctggccgcggcccctactcatgaggcgacgcgccgggcacggtggtcggaggttgtcctcaccttcgaccagaccgaccacccaccgtgcgttgcccggggaggacagatcgcaatggtggtttcccccactgtttgcaacgtgaagctggggcgtgtcctcattgatgggggagcagccctcaacatcctttcccccgcagcctttgacgctatcaaggccccggggatggtgctccggccgtcccagccgattatcggtgtgacgccgggtcacacttggccgctaggtcatatcgacctcccggtcaccttcggtggatccgccaacttccgcacggagcgggtgaactttgatgtggcggacctcagtctgccctacaacgcggtcctagggaggcccgcgttggtgaagttcatggcggcagtccactacgcctacctccagataaagatgccgggccccggtgggcccatctctgtccatggcgacctcaaagtcgcgcttgcttgtatggagcagcgcgcggaccacctcaccgccgcgtccaagcccgagggaggcgacgagaggcttggcacctccgcccccgccgccccgaggcagcggatagtcacatgcgacgaggtcccggaagacgcgcttgtctttttcctgcgggtaaacgctgacgtcttcgcatggagaccggcggatatgcccggggtccccagggaggtgattgagcaccgtctcgccgtgcggtcgggcgcaaggccggtccggcagaaagtacggcggcaggccccggaacgtcaagccttcatccgcgaggaggtggcgcgacttctggaggccggattcatccgcgaggtcatccatccggagtggctggcgaacccggtggtcgttcccaaggcgaacggcaagcttcggatgtgcatcgactacaccgaccttaacaaggcatgtcctaaggacccttaccctctgcctcgcatagatcagattgttgactccacagcggggtgcgaccttttgtgttttctagatgcatactctggttaccatcagattcgcatggctagggaggatgaggaaaaaactgcattcattacccccataggaacttattgttatacgacaatgcccttcgggttaaagaatgcaggtcctacttttcaacgtactactcgaaattctttgggtagccgaataggacgtaatgttgaggcttatgtcgatgacttggttgtaaagacgcgcaaccaagagaccttactctcggatctagcggaaacttttgagagtctccgctccgcccgcataaaactgaaccccgataagtgcgtgttcggtgtacctgcgggcaagcttctcgggtttttggtctctgcccgaggcatcgaggccaaccccgagaagatacgagctatagagcggatgcgcccccccagcaagcttagggatgtgcaatgcgtcaccggttgcatggccgccctaagtcggttcatatcgaggctgggagagaaggcgctacccttatttaagctcctcaaacgctccgggccgtttacttggacggaggaagctgaacgtgccctcactcagttgaaggcgtatctcagctctcccccagttctggtcgccccggagccaaatgaacccttgctactctacttagcggcgaccccgcaagtgacggtgccaggtgcccccgacccccaggatggcccgagggccactgcgggaaggccgcacctatcgccctctgaccccgaggctaaccctgtgccgactcgacccgggagagagcagggagaagaggcccccgagccgaacggtggcctaaggcccctgacgaccggagttggccctttgcctgcttgtccgacgacgccaggagcccccgacccccaggacggccccgaggccactgtgggaaggccgcccctgtcgtcctccgaccccgaggtcgtcggcacagaagacgagtgcaccccgcgaggccgcttggacaaagagcgccccagggatgtggcccctagcgaagaggatcggccccaccgaaaggtgcagcggcccgtctactttgttagtgaggccctccgggacgccaagacccgataccctcaggcccagaagatgctttacgctattctgatggcttcgaggaaactgcgccattatttccaggcgcatcgggtcacggtggttacgtcttaccccctcggccaaatcttgcataatcgagagggtactggacgggtggtgaaatgggcaatcgaactttctgagtttgatttgcactttgaaccacgccacgctatcaagagccaggccctcgccgattttgtggcagagtggaccccagcacccgagcccgtctcagtccccgaggccagctcgggcccctcgcagctgccccacaccgcccactgggtgatgcagttcgacggctccctgtctcttcagggcgccggtgcgggggtcacgttgacctcgccgagcggagacgtcctcagatatttggttcgccttgactttcgggtgaccaataatatggcagagtacgagggactccttgcgggactcagggtggcagctggactggggatccgccgcctcctggtgttaggcgactcccagctggtcgttaaccaggtctgtaaggagtaccggtgctctgacccgcagatggacgcttacgtgcgccaagtacggcgtatggagcgccattttgacgggatagagcttcggcacgtgcccagacgggataacacggttgccgacgaactctcacggctcgcttcctcgcgagcccagaccccactgggcgcctttgaagaaaggcttgcccagccgtcggcgcgacccgaccccttaggggagacggacgcgcctgacaggcccccgatgcccgtcggagtccaggcctcgggacccgaggggagcgctcccagctcccttagattgattgcttggatcgctgagatcaagcatacctcacagataagactctactcgaggaccgcgaagggagtgaacgcgtccagcgcatctccaaacgctacgtgctggcgggccccgggcgggtttgagtatctgtatgtcgcgatcgacaagttcactaagtggcccgaggcttatccggtcgtcaagatcgataagcactccgcacttaaattcattaagggcatcacagcccggtttggagtgcctaaccgtattattacggataacggcacccaattcactagtgaacttttcggcgattactgcgaagacatgggcatcaagctctgcttcgcctcacctgcccaccccagaagcaacggccaagtggagcgcgccaatgcggaaatcctcagaggccttaaaaccaagaccttcaacatcctcaagaagcacggcgattcgtggatcgaggagttgccagcggtgctctgggcgaaccgaaccacgccaagccgagcaaaccggggaaacgcctttcttcctcgtctacggcgcggaagcggttctcccatccgagctcaccctgaggtcccctcgggccaccatgtactgcgaggctga

SEQ ID NO: 66156 - DNA, 845 bp, Oryza sativa
  unsure (1)..(845): unsure at all n locations
  Clone ID: PAT_MRT4530_67134C.1
atcatttcttcttagcagactgcttntctgctcccatctttgcaaataggcttccatcatagactgccctgccagtatccttgtgaagaaatccatccttgtctttgcagaggtagtacaatactttccactctgtgaagccacccacccatcctttgaaatctttaggctccctgtttgattggagcaactccttcagctctttgtctgttagggcatcaggcctggtgtgagcatgcttcttgaatatttcctcgaacttttctgggacaaaccttccattcgcatcatacacgcctgaatcgcttccatgcttgcctttgtggatgttcttgacgtatatgggtaacttgagaccagtcttggtgttctccggtatcgtcttgggcccaagtccgccattgatgaacacggcgccgacggcggacagcacgactcctgccccgattgcgcggaacccttggtaggtctcggaggggtagatgatgccgtccttgttgcggtcgaagaaggcgacgtgcttctgcagcggcgtcagctcggagcggtacacctccgcctcgccgccgccggcgttgttgttgttgtcacggacgacggcgacgccgccgccacctgtagccgtaacgtccgcgggtttggaggccatgggaacgacgagatcagagagagagagagagagggagaggaaaggttgagatgtgaaggtggcggggagagggaaagaaaagcgggtggagtggagttgacagggtgtgcattcgtggacccgatgctggaggtggtgggctaatctgcagactgcagagatcgatcgatcgtttggcactttggctgatggtggt

SEQ ID NO: 66157 - DNA, 333 bp, Oryza sativa
  Clone ID: PAT_MRT4530_67135C.1
gcgcagcggaagaaaacgctgagaagtcgaaggaactctcgcgaagtagcgcgcgtcgatgcagaggaagtagtcgatcgcaccggctcgaccttctccttctcgtgcgttcacctcgtcgtactcccacgccgatcagcaccacaaaccagcggcgcctttaccgaattcatcactcgggcctccaaggcccgtaggacttctattccgatccctatccgaagttcatatatactcggctgtaacccgaaaactccttttcggtccacgcatcaacagcggcccctagcagaacgtattgacccaccgaacatacataaagatcatatcggc

SEQ ID NO: 66158 - DNA, 5485 bp, Oryza sativa
  Clone ID: PAT_MRT4530_67136C.1
atggccgaacaagcaaaggcgcacaacctctctccgagagttagcggtgacgacgggcagccgaacccacgccgtcgagctcgtactccaccgccccctccacgccaaagtcctaggcgggaggaggcgctcgagagggtcgaaggatccgcgacttcgacatccacgggtgatggggaagggcggcgagatggggagcgtcgcctcctcgtctacggccgacggcagcacgccccagggcgcgctccaagctgcgggcgcgctcctacgtcacccgcccattgtccctgacccggagtctccagcccaacgttggctggacgacgtggccaacttggtcatgacggcacggcagcgcctaggtgctggtgggcggtcctccgccaccaagacctctggcgctgctaccaccggctccgtgtcgtcaaggcagagggcgcggcgagcggcggctgttgctcgccattcggccgccactccttcgtcagcgcctccgacccaggaagatctgcgtggggggccggatgcccgcatcagtatcgagcgccggcgtaatggccgacgtgctgcccacgcaacggagggcgccttctcgtccggagtgtcacatcaacacggacgcggggatcagccctccgtgcccccggttggtggtgtcggctgtagagcctttgtggcgagccttcggaacgtccgttggcccccaaggttccggcccaccatcgccgaaaaatatgatgggagcgtcaaccccgccgagtttctccaggtctacacgactgggatcgaggccgccgggggtgacgacagggtcatggcgaatttctttcccatggccctgaagggacaagcacggggttggctaatgaacttgccacccgcgtcagtccactcttggaaggatttgtgccaacagttcaccatgaactttcaaggcacatatccgcgcccaggtgaagaagcggacttacatgcagtccagcgaagggatgatgagtcacttcgctcatacattcagcggttctgtcaagtccgcaacaccataccatgcatccctgcacacgcggtgatctacgcgttcagggggggtgtgcggcacaaccgcatgctcgaaaagatcgcctccaaagagccccagactaccgcggagctttttcagctcgcggaccgagtggctcgtaaggaagaggcatggacctggaacccctccggttccggtgtggcagcttcggccgcccccggatccgctgctcggacagggcggcgtgacaggaggaggaagaagaggtcagcccattccgacgacgagggtcatgtcctcgccgtcgagggcgcttcgcgggccacccgaaaggggaggcctgcgagcgacaaaaagaaggaggccggcgctcccagtagggagcgcccaaccggcaagtggtgcatcgtccacaacacctcccttcacgacctcgcggactgccgcgcagtcaaaagtttggctgagcggacgaggaagtgggaggaggagaggaggcaggagcgccgagagggcaagtccccggcggttccttccggcaatcggcgaagtgaggccaagcagaaggcccccaccgaggacatcgatgacggcgatgatgacctaggtttccaagagcctggggccaccattgccactgtcgatgggggagcgtgtgctcacgtttctcgccagagcctcaaggccatgaagcgagagcttctggccgcggcccctactcatgaggcgacgcgccgggcgcggtggtcggaggttgccctcaccttcgaccagaccgaccacccaccgtgcgttgcccggggaggacagatcgcaatggtggtttcccccactgtttgcaacgtgaaactggggcgtgtcctcattgatgggggagcagccctcaacatcctttcccccgctgcctttgacgctatcaaggccccggggatggtgctccggccgtcccaaccgattatcggtgtgacgccgggtcacacttggccgctaggtcatatcgacctcccggtcaccttcggtggatccgccaacttccgcacggagcgggtgaactttgatgtggcggacctcagtctgccctacaacgcggtcctagggaggcccgcgttggtgaagttcatggcggcagtccactacgcctacctccagatgaagatgccgggccccggtggccccatctctgtccatggcgacctcaaagaagacgcgctcgtctctttcctgcgggcaaacgctgacgtcttcgcatggagaccggcggatatgcccggggtccccagggagctgattgagcaccgtctcgccgtgcggtcgggcgcaaggccggtccggcagaaagtacggcggcaggccccggaacgtcaagccttcatccgcgaggaggtggcgcgacttctggaggccggattcatccgcgaggtcatccatccggagtggctggcgaacccggtggtcgttcccaaggcgaacggcaagcttcggatgtgcatcgactacaccgaccttaacaaggtatgtcctaaggacccttaccccctgcctcgcatagatcagattgtcgactccacagcggggtgcgaccttttgtgttttctagatgcatactctggttaccatcagattcgcatggctagggaggatgaggaaaaaactgcattcattacccccataggaacttattgttatacgacaatgcccttcgggttaaagaatgcaggtcctacttttcaacgtactactcgaatttctttgggtagccaaataggacgtaatgttgaggcttatgtcgatgacttggttgtaaagacgcgcaaccaagagaccttactctcggatctagcggaaacttttgagagtctccgctccgcccgcataaaactgaaccccgataagtgtgtgttcggtgtacctgcgggcaagcttctcgggtttttggtctctgcccgaggcatcgaggccaaccccgagaagatacgagctatagagtggatgcgcccccccagcaagcttagggatgtgcaatgcgtcaccggttgcatggccgccctaagtcggttcatatcgaggctgggagagaaggcgctacccttatttaagctcctcaaacgctccgggccgtttacttggacggaggaagctgaacgtgccctcactcagttgaaggcgtatctcagctctcccccagttctggtcgccccggagccaaatgaacccttgctactctacttagcggcgaccccgcaagtggttagtgcggcgttggttgtggagcgcgatgaggacaatcctcattccgcgcaccctcaccctgtgccggcttggcccgggagagagcagggaggagaggcccccgagccgaacggtggcccaaggcccccgacgaccggagcaggccctctgcccgcttgtcagacggtgcctggtgaccccgacccccaggatggcccgagggccactgcgggaaggccgcacctatcgccctctgaccccgaggctaaccctgtgccgactcgacccgggagagagcagggagaagaggcccccgagccgaacggagcccccgacccccaggacggccccgaggccactgtgggaaggccgcccctatcatcctccgaccccgaggtcgtcggcacagaagacgagtgcactccgcgaggccacttggacaaagagcgccccagggatgtggcccctagcgaagaggatcggccccaccgaaaggtgcagcggcccgtctactttgttagtgaggccctccgggacgccaagacccgataccctcaggcccagaagatgctttacgctattctgatggcttcgaggaaactgcgccattatttccaggcgcatcgggtcacggtggttacgtcttaccccctcggccaaatcttgcataatcgagagggtactggacgggtggtgaaatgggcaatcgaactttctgagtttgatttgcactttgaaccacgccacgctatcaagagccaggccctcgccgattttgtggcagagtggaccccagctcccgagcccgtctcagtccccgaggccagctcgggcccctcgcagctgcctcacaccgcccactgggtgatgcagttcgacggctccctgtctcttcagggcgccggtgcgggggtcacgttgacctcgccgaacggagacgtcctcagatatttggttcgccttgactttcgggcgaccaataatatggcagagtacgagggactccttgcgggactcagggtggcagctggactagggatccgccgcctcctggtgttaggcgactcccagctggtcgttaaccagcgagcccagaccccaccgggcgcctttgaagaaaggcttgcccagccgtcggcgcgacccgaccccttaggggagacggacgcgcctgacaggcccccgatgcccgtcggagtccaggcctcgggacccgaggggagcgctcccagctcccttagattgattgcttggatcgctgagatccaagcatacctcacagataagactctacccgaggaccgcgaagagagtgaacgcgtccagcgcatctccaaacgctacgtgctggtagaagggaccctctatcggcgcgcggctaacggaatcctcctgaagtgcattcctcgggaacaaggcgtcgagcttcttgccgatatccatgaaggcgaatgtggagcccactccgcctcgcgcaccttggttggcaaagcctttcgacaaggtttctattggccgacagctctcaatgatgcggtcgacctggtccggcgatgcagagcgtgtcaattccacgccaagcaaatccatcagccggcccaggccctgcagatcataccactttcatggccatttgctgtctgggggctcgatatcctgggaccgtttaggcgggccccaggcgggtttgagtatctgtatgtcgcgatcgacaagttcactaagtggcccgaggcttatccggtcgtcaagatcgataagcactccgcacttaaattcattaagggcatcacagcccggtatggagtgcctaaccgtattattacggataacggcacccaattcactagtgaacttttcggcgattactgcgaagacatgggcatcaagctctacttcgcctcacctgcccaccccagaagcaacggccaagtggagcgcgccaatgcggaaatcctcagagaccttaaaaccaagaccttcaacatcctcaagaagcacggtgattcgtggatcgaggagttgccagcggtgctctgggcgaaccgaaccacgccaagccgagcaaccggggaaacgcctttcttcctcgtctacggcgcggaagcggttctcccatccgagctcaccctgaggtcccctcgggccaccatgtactgcgaggctgatcaagatcagcttcgcatagatgacctcgactacttggaagagcgaaggcggcgcgcggccctctga

SEQ ID NO: 66159 - DNA, 5619 bp, Oryza sativa
  Clone ID: PAT_MRT4530_67137C.1
atggccgaacaagcaaaggcgcacaacctctctccgagtgttagcggtgacgacggggagccgaacccacgccgtcgagctcgtactccaccgccccctccacgccaaagtcctaggcgggaggagacgctcgagagggtcgaaggatccgcgacttcgacatccacgggtgatggggaagggcggcgagatggggagcgtcgcctcctcgtctacggcgacggcagcacgccccagggcgcgctccaagctacgggcgcgctcctacgtcacccgcccattgtccctgacccggagtctccagcccaacgttggctggacgacgtggccaacttggtcatgacggcacggcagcgcctaggtgctggtgggcggtcctccgccaccaagacctctggcgctgctaccaccggcttcgtgtcgtcaaggcggagggcgcggcgagcggcggctgttgctcgccattcagccgccactccttcgtcagcgcctccgacccaggaagaactgcgtggggggccggatgcccgcatcagtatcgagcgccggcgtaatggccggcgtgctgcccacgcaacggagggcgcctcctcgtccggagtgtcacatcaacacggacgcggggatcagccctccgtgcccccggttggtggtgtcggctgtagagcctttgtggcaagccttcgaaacgtccgttggcccccaggtgaagaagcggacttacatgcagtccagcgaagggatgatgagtcacttcgctcatacattcagcggttctgtcaagtccgcaacaccataccatgcatccctgcacacgcggtgatctacgcgttcagggggggtgtgcggcacaaccgcatgcttgaaaagatcgcctccaaagagccccagactaccgcggagctttttcagctcgcggaccgagtggctcgtaaggaagaggcatggacctggaacccctccggttccggtgtggcagcttcggccgcccccggatccgctgctcggacagggcggcgtgacaggaggaggaagaagaggtcagcccattccgacgacgagggtcatgtcctcgccgtcgagggcgcttcgcgggccacccgaaaggggaggcctgcgagcaacaaaaagaaggaggccggcgctcccagtagggagcgcccaaccggcaagtggttcatcgtccacaacacctcccttcacgacctcgcggactgccgcgcagtcaaaagtttggctgagcggacgaggaagtgggaggaggagaggaggcaggagcgccgagagggcaagtcctcggcggttccttccggcaatcggcgaagtgaggccaagcagaaggcccccgccgaggacatcgatgacggcgatgatgacctaggtttccaagagcctggggccaccatttccactgtcgatgggggagcgtgtgctcacgtttctcgccggagcctcaaggccatgaagcgagagcttctggccgcggcccctactcatgaggcgacgcgccgggcgcggtggtcggaggttgccctcaccttcgaccagaccgaccacccaccgtgcgttgcccagggaggacagatcgcaatggtggtttcccccactgtttgcaacgtgaagctggggcgtgtcctcattgatgggggagcagccctcaacatcctttcccccgcagcctttgacgctatcaaggccccgggaatggtgctccggccgttccagccgattatcggtgtgacgccgggtcacacttggccgctaggtcatatcgacctcccggtcaccttcggtggatccgccaacttccgcacggagcgggtgaactttgatgtggcggacctcagtctgccctacaacgcggtcctagggaggcccgcgttggtgaagttcatggcggcagtccactacgcctacctccagatgaagatgccgggccccggtggccccatctctgtccatggcgacctcaaagtcgcgcttgcttgtatggagcagcgcgcggaccacctcaccgccgcgtccaagcccgagggaggcgatgagaggcttggcacctccgcccccgccgccccgaggcagcggatagtcacatgcgacgaggtcccggaagacgcgctcgtctctttcttgcgggcaaacgctgacgtcttcgcatggagaccggcggatatgcccggggtccccagggaggtgattgagcaccgtctcgccgtgcggtcgggcgcaaggccggtccggcagaaagtacggcggcaggccccggaacgtcaagccttcatccgcgaggaggtggcgcgacttctggaggccggattcatccgcgaggtcatccatccggagtggctggcgaacccggtggtcgttcccaaggcgaacggcaagcttcggatgtgcatcgactacaccgaccttaacaaggcatgtcctaaggacccttaccccctgcctcgcatagatcagattgtcgactccacagcagggtgcgatcttttgtgttttctagatgcatactctggttaccatcagattcgcatggctagggaggatgaggaaaaaactgcattcattacccccataggaacttattgttatacgacaatgcccttcgggttaaagaatgcaggtcctacttttcaacgtactactcgaatttctttgggtagccaaataggacgtaatgttgaggcttatgtcgatgacttggttgtaaagacgcgcaaccaagagaccttactctcggatctagcggaaacttttgagagtctccgctccgcccgcataaaactgaaccccgataagtgcgtgttcggtgtacctgcgggcaagcttctcgggtttttggtctctgcccgaggcatcgaggccaaccccgagaagatacgagctatagagcggatgcgcccccccagcaagcttagggatgtgcaatgcgtcaccggttgcatggccgccctaagtcggttcatatcgaggctgggagagaaggcgctacccttatttaagctcctcaaacgctccgggccgtttacttggacggaggaagctgaacgtgccctcactcagttgaaggcgtatctcagctctcccccagttctggtcgccccggagccaaatgaacccttgttactctacttagcggcgaccccgcaagtggttagtgcggcgttggttgtggagcgcgatgaggacaatcctcattccgcgcacccccaccctgtgctggcttggcccgggagagagcagggaggagaggcccccgagccgaacggtggcccaaggcccccgacgaccggagcaggcactctgcccgcttgtcagacggtgccaggtgcccccgacccccagtatggcccgagggccactgcgggaaggccgcacctatcgccctctgaccccgaggctaactctgtgacgactcgacccgggagagagcagggagaagaggcccccgagccgaacggtggcctaaggcccctgacgaccggagttggccctttgcccgcttgtccaacgacgccaggagcccccgacccccaggacggccccgaggccactgtgggaaggccgcccctgtcgtcctccgaccccgaggtcgtcggcacagaagacgagtgcaccccgcgaggccgcttggacaaagagcaccccagggatgtggcccctagcgaagaggatcggccccaccgaaaggtgcagcggcccgtctactttgttagtgaggccctccgggacgccaagacccgataccctcaggcccagaagatgctttacgctattctgatggcttcgaggaaactgtgccattatttccaggcgcatcgggtcacggtgattacgtcttaccccctcggccaaatcttgcataatcgagagggtactggacgggtggtgaaatgggcaatcgaactttctgagtttgatttgcactttgaaccacgccacgctatcaagagccaggccctcgtcgattttgtggcagagtggaccccagctcccgagcccgtctcagtccccgaggccagctcgggcccctcacagctgcctcacaccgcccactgggtgatgcagttcgacggctccctgtctcttcagggcgccggtgcgggggtcacgttgacctcgccgagcggagacgtcctcagatatttggttcgccttgactttcgggcgaccaataatatggcagagtacgagggactccttgcgggactcagggtggcagctggactggggatccgccgcctcctagtgttaggcgactcccagctggtcgttaaccaggtctgggagacggacgcgcctgacaggccctcgatgcccgtcggagtccaggcctcgggacccgaggggagcgctcccagctcccttagattgattgcttggatcgctgagatccaagcatacctcacagataagactctacccgaggaccgcgaagggagtgaacgcgtccaacgcatctccaaatgctacgtgctggtagaagggaccctctatcggcgcgcggctaacggaattctcctgaagtgcattcctcgggaacaaggcgtcgaacttcttgccgatatccatgaaggcgaatgcggatcccactccgcctcgcgcaccttggttggcaaagcctttcgacaaggtttctattggccgacagctctcaatgatgcggtcgacctggtccggcgatgcagagcgtgtcaattccacgccaagcaaatccatcagccggcccaggccctgcagatcataccactttcatggccatttgctgtctgggggctcgatatcctgggaccgtttaggcgggccccgggcgggtttgagtatctgtatgtcgcgatcgacaagttcactaagtggcccgaggcttatccggtcgtcaagatcgataagcactccgcacttaaattcattaagggcatcacagcccggtttggagtgcctaaccgtattattacggataacggcacccaattcactagtgaacttttcggcgactactgcgaagacatgggcatcaagctctgctttgcctcacctgcccaccccagaagcaacggccaagtggagcgcgccaatgcggaaatcctcagaggccttaaaaccaagaccttcaacatcctcaagaagcacggcgattcgtggatcgaggagttgccagcggtgctctgggcgaaccgaaccacgccaagccgagcaaccggggaaacgcctttcttcctcgtctacggcgcggaagcggttctcccatccgagctcaccctgagctcccctcgggccaccatgtactgcgaggctgatgaagatcagcttcgcagagatgacctcgactacttggaagagcgaaggcggcgcgcggccctccgagccgcgcgctaccagcagagcctgcggcgctaccatcagcgccacgtccgggcccgatcactctgcgtcgacgacctcgtcctacgccgcgtccaaacgcgtgctggattgagcaagctctcaccaatgtgggagggtccgtatcgagtgatcggcgtcccccggccgggctctgttcggctggccacgggcgacggcacagagttgcctaacccgtggaacatcgaacaccttcgtcgcttctacccctaa

SEQ ID NO: 66160 - DNA, 6084 bp, Oryza sativa
  Clone ID: PAT_MRT4530_67138C.1
atggccgaacaagcaaaggcgcacaacctctctccgagtgttagcggtgacgacggggagccgaacccacgccgtcgagctcgtactccaccgccccctccacgccaaagtcctagccgggaggaggcgctcgagagggtcgaaggatccgtgacttcgacatccacgggtgatggagaagggcagcgagatggggagcgtcgcctcctcgtctacggcgacggcagcacgccccagggcgcgctccaagctgcgggcgcgctcctacgtcacccgcccattgtccctgacctggagtctccagcccaacgttggctggacgacgtggccaacttggtcatgacggcacgacagcgcctaggtgctggtgagcggtccaccgccaccaagacctctggagctgctaccaccggctccgtgtcgtcaaggcggagggcgcggcgagcggcggcggttgctcgccattcggccgccactccttcgtcagcgcctccgacccgggaagatctgcgtagggggccagatgcccgcatcagtatcgagcaccggcgtaatggccgacgtgctgcccacgcaacggagggcgcctcctcgtccggagtgtcacctcgacacggacacggggatcagccctccgtgcccccggttggtggtgtcggctgtagagcctttgtggcgagccttcggaatgtccgttggcccccaaggttccggcccaccatcgccgaaaaatatgacgggagcgtcaaccccgccgagtttctccaggtctacacgaccgggatcgaggccgccgggggtgacgacagggtcatggcgaatttctttcccatggccctgaagggacaggcacggggttggctaatgaacttgccacccgcgtccgtccactcttgggaggatttatgccaacagttcaccatgaactttcaaggcacatatccgcgcccaggtgaggaagcggacttgcacgcagtacagcgaagggatgatgagtcacttcgctcatacattcagcggttctgtcaagtccgcaacaccataccatgcatccctgcacacgaggtgatctacgcgttcagggggggtgtgcggcacaaccgcatgctcgaaaagatcgcctccaaagagccccagactaccgcggagctttttcagctcgcggaccgagtggctcgtaaggaagaggcatggacctggaacccctccggttccggtgtggcagcttcggccgcccccggatccgctgctcggacagggcggcgtgacaggaggaggaagaagaggtcagcccattccgacgacgagggtcatgtcctcgccgtcgagggcgctccgcgggccacccgaaaggggaggcctgcgagcgacaaaaagaaggaggccagcgctcccagcagggagtgcccaaccggcaagtggtgcaccgtccacaacacctcccttcacgacctcgcggactgccgcgcagtcaaaagtttggctgagcggacgaggaagtgggaggaggagaggaggcaggagcgccgagagggcaagtccccggcggttccttccggcaatcggcgaagtgaggccaagcagaaggcccccgccgaggacatcgatgacggcgatgatgacctaggtttccaagagcctggggccaccattgccactctcgatgggggagcgtgtgctcacttttctcgtcggagcctcaaggccatgaagcgagagcttctggccgcggcccctactcatgaggcgacgcgccgggcgcggtggtcggaggttgccctcaccttcgaccagaccgaccacccaccgtgcgttgcccagggaggacagatcgcaatggtggtttcccccactgtttgcaacgtgaagctggggcgtgtcctcattgatgggggagcagccctcaacatcctttcccccgcagcctttgacgctatcaaggccccggggatggtgctccggccgtcccagccgattatcggtgtgacgccgcctcacacttggccgctaggtcatatcgacctcccggtcaccttaggtggatccgccaacttccgcacggagcgggtgaactttgatgtggcggacctcagtctgccctacaacgcggtcctagggaggcccgcgttggtgaagttcatggcggcagtccactacgcctacctccagatgaagatgccgggccccggtggccccatctctgtccatggcgacctcaaagtcgcgcttgcttgtatggagcggcgcgcggaccacctcaccgccgcgtccaagcccgagggaggcgacgagaggcttggcacctccgcccccgccgccccgaggcagcggatagtcacatgcgacgaggtcccggaagacgcgctcgtctccttcctgcgggcaaacgctgacgtcttcgcatggagaccggcggatatgcccggggtccccagggaggtgattgagcaccgtctcgccgtaaggtcgggcgcaaggccggttcggcagaaagtacggcggcaggccccggaacgtcaagccttcatccgcgaggaggtggcgcgacttctggaggccggattcatccgcgaggtcatccatccggagtggctggcgaacccggtggtcgttcccaaggcgaacggcaagcttcggatgtgcatcgactacaccgaccttaacaaggcatgtcctaaggacccttaccccctgcctcgcatagatcagattgtcgactccacagcggggtgcgaccttttgtgtttcctagatgcatactctggttaccatcagatccgcatggctagggaggatgaggaaaaaactgcattcattacccccataggaacttattgttatacgacaatgcccttcgggttaaagaatgcaggtcctacttttcaacgtactactcgaatttctttgggtagccaaataggacgtaatgttgaggcttatgtcgatgacttggttgtaaagacgcgcaaccaagagaccttactcttggatctagcggagacttttgagagtctccgctccgcccgcataaaactgaaccccgataagtgcgtgttcggtgtacctgcgggcaagcttctcgggtttttggtctctgcccgaggcatcgaggccaaccccgagaagatacgagctatagagcggatgcgcccccccagcaagcttagggatgtgcaatgcgtcaccggttgcatggccgccctaagtcggttcatatcgaggctgggagagaaggcgctacccttatttaagctcctcaaacgctccgggccgtttatttggacggaggaagctgaacgtgccctcactcagttgaaggcatatctcagctctcccccagttctggtcgccccggagccaaatgaacccttgctactctacttagcggcgaccccgcaagtggttagtgcggcgttggttgtggagcgcgatgaggacaatcctcattccgcgcacccccaccctgtgctggcttggcccgggagagagcagggaggagaggcccccgagccgaacggtggcccaaggcccccgacgaccggagcaggccctctgcccgcttgtcagacggtgccaggtgcccccgacccccaggaaggcccgagggccactgcgggaaggccgcacctatcgccctctgaccccgaggctaaccctgtgccgactcgacccgggagagagcagggagaagaggcccccgagccgaacggtggcctaaggcccctgacgaccggagttggccctttgcccgcttgtccgacgacgccaggaggccccgacccccaggacggccccgaggccactgtgggaaggccgcccctgtcatcctccgaccccgaggtcgtcggcacagaagacgagtgcaccccgcgaggccgctcggacaaagagcgccccagggatgtggcccctagcgaagaggatcggccccaccgaaaggtgcagcggcccgtctactttgttagtgaggccctccgggacgccaagacccgataccctcaggcccagaagatgctttacgctattctgatggcttcgaggaaattgcgccattatttccaggcgcatcgggtcacggtggttacgtcttaccccctcggccaaatcttgcataatcgagagggtactggacgggtggtgaaatgggcaatcgaactttctgagtttgatttgcactttgaaccacgccacgctatcaagagccaggccctcgccgattttgtggcagagtggaccccagctcccgagcccgtctcagtccccgaggccagctcgggcccctcgcagccgcctcacaccacccactgggtgatgcagttcgacggctccctgtctcttcagggcgccggtgcgggggtcacgttgacctcgccgagcggagacgtcctcagatatttggttcgccttgactttcgggcgaccaataatatggcagagtacgagggactccttgcgggactcagggtggcagctggactggggatccgccgcctcctggtgttaggcgactcccagctggtcgttaaccaggtctgtaaggagtaccggtgctctgacccgcagatggacgcttacgtgcgccaagtacggcgtatggagcgccattttgacgggatagagcttcggcacgtgcccagacggggtaacacggttgccgacgaactctcacggctcgcttcctcgcgagcccagaccccactgggcgcctttgaagaaaggcttgcccagccgtcggcgcgacccgaccccttaggggagacggacgcgcctgacaggcccccgatgcccgtcggagtccaggcctcgggacccgaggggagcgctcccagctccctgagattgattgcttggatcgctgagatccaagcatacctcacagataagactctacccaaggaccgcgaagggagtgaacgcgtccagcgcatctccaaacgctacgtgctggtagaagggaccctctatcggcgcgcggctaacggaatcctcctgaagtgcattcctcgggaacaaggcgtcgagcttcttgccgatatccatgaaggcgaatgcggagcccactccgcctcacgcaccttggttggcaaagcctttcgtcaaggtttctattggccaacagctctcaatgatgcggtcgacctggtccggcgatgcagagcgtgtcaattccacgccaagcaaatccatcagccggcccaggccctgcagatcataccactttcatggccatttgctgtctgggggctcgatatcctgggaccgtttaggcgggccccgggcgggtttgagtatctgtatgtcgcgattgacaagttcactaagtggcccgaggcttatccggtcgtcaagatcgataagcactccgcacttaaattcattaagggcatcacagcccggtttggagtgcctaaccgtattattacggataacggcacccaattcactagtgaacttttcggcgattactgcgaagacatgggcatcaagctctgcttcgcctcacctgcccaccccagaagcaacggccaagtggagcgcgccaatgcggaaatcctcagaggccttaaaaccaagactttcaacatcctcaagaagcacggcgattcgtggatcgaggagttgccagcggtgctctgggcgaaccgaaccacgccaagccgagcaaccggggaaacgcctttcttcctcgtctacggcgcggaagcggttctcccatccgagctcaccctgaggtcccctcgggccaccatgtactgcgaggctgatcaagatcagcttcgcagagatgacctcgactacttggaagagcgaaggcggcgcgcggccctccgagctgcgcgctaccagcagagcctgcggcgctaccatcagcgccacgtccgggcccgatcactctgcgtcgacgacctcgtcctatgccgcgtccaaacgcgtgctggattgagcaagctctcaccaatgtgggagggtccgtatcgagtgatcggcgtcccccggccgggctccgttcggctggccacgggcgacggcacagagctgcctaacccgtggaacatcgaacaccttcgtcgcttctacccctaa

SEQ ID NO: 66161 - DNA, 5274 bp, Oryza sativa
  Clone ID: PAT_MRT4530_67139C.1
atggccgaacaagcaaaggcgcacaacctctctccgagtgttagcggtgacgacggggagcagaacccacgccgtcgagctcgtactccaccgccccctccacgccaaagtcctaggcgggaggaggcgctcgagagggtcgaaggatccgcgacttcgacatccacgggtgatggggaagggcagcgagatggggagcgtcgcctcctcgtccacggcgacggcagcacgccccagggcgcactccaagctgcgggcgcgctcctacgtcacccgcccattgtccctgacccggagtctccagcccaacgttggctagacgacgtggccaacttggtcatgacggcacggcagcgcctaggtgctggtgggcggtcctccgccaccaagacctctggcgctgctaccaccggctccgtgtcgtcaaggcggagggcgcggcgagcggcggttgttgctcgccattcagccgccactccttcgtcagcgcctccgacccaggaagatctgcgtggggggccggatgcccgcatcagtatcaagcgccggcgtaatggccggcgtgctgcccacgcaacggagggcgcctcctcgtccggagtgtcacatcaacacggacgcggggatcaccctccgtgcccccggttggtggtgtcggctgtagagccttcgtggcgagccttcggaacgtccgttggcccccaaggggggggtgtgcggcacaaccgcatgctcgaaaagatcgcctccaaagagccccagactaccgcggagctttttcagctcgcggaccgagtggctcgaaaggaagaggcatggacctggaacccctccggttccggtgtggcagctttggccgcccccggattccctgctcggacagggcggcgtgacaggaggaggaagaagaggtcagcctattccgacgacgagggtcatgtcctcgccgtcgagggcgcttcgcgggccacccgaaaggggaggcctgcgagcgacaaaaagaaggaggccggcgctcctagtagggagcgcccaaccggcaagtggtgcatcgtccacaacacctcccttcacgacctcgcggactgccgcgcagtcaaaagtttggctgagcggacgaggaaatgggaggaggagaggaggcaggagcaccgagagggcaagtccccggcggttccttccggcaatcggcgaagtgaggccaagcagaaggcccccgccgaggacatcgatgacgatgatgatgacctaggtttccaagagcctggggccaccattgccactgtcgatgggggagcgtgtgctcacgtttctcgccggagcctcaaggccatgaagcgagagcttctggccacggcccctactcatgaggcgacgcgccgggcgcggtggtcggaggttgccctcaccttcgaccagaccgaccacccaccgtgcgttgcccggggaggacagatcgcaatggtggtttcccccaccgtttgcaacgtgaagctggggcgtgtcctcattgatgggggagcagccctcaacatcctttcccccgcagcctttgacgctatcaaggccccggggatggtgctccggccgtcccagccgattatcggtgtgacgccgggtcatacttggccgctaggtcatatcgacctcccggtcaccttcggtggatccgccaacttccgcacggagcgggttaactttgatgtggcggacctcagtctgccctacaacgcggtcctagggaggcccgcgttggtgaagttcatggcggcagtccactacgcctacctccagatgaagatgccgggccccggtggccccatctctgtccatggcgacctcaaagtcgcacttgcttgtatggagcagcgcgcggaccacctcaccgccgcgtccaagcccgagggaggcgacgagaggcttggcacctccgcccccgccgccccgaggcagcggatagtcacatgcgacgaggtcccggaagacgcgctcgtctctttcctgcgggcaaacgctgacgtcttcgcatggagaccggcggatatgcccggggtccccagggaggtgattgagcatcgtctcgccgtgcggtcgggcgcaaggccggtccggcagaaagtacggcggcaggccccggaacgtcaagccttcatccgcgaggaggtggcgcgacttctggaagccggattcatccgcgaggtcatccatccggagtggctggcgaacccggtggtcgttcccaaggcgaacggcaagcttcggatgtgcatcgactacaccgaccttaacaaggcatgtcctaaggacccttaccccctgcctcgcatagatcagattgtcgactccacagtggggtgcgaccttttgtgttttctagatgcatactctggttaccatcagattcgcatggctagggaggatgaggaaaaaactgcattcattacccccataggaacttattgttatacgacaatgcccttcgggttaaagaatgcaggtcctacttttcaacgcactactcgaatttctttgggtagccaaataggacgtaatgttgaggcttatgtcgatgacttggttgtaaagacgcgcaaccaagagaccttactctcggatctagcggaaacttttgagagtctccgctccgcccgcataaaactgaaccccgataagtgcgtgttcggtgtacctgcgggcaagcttctcgggtttttggtctctgcccgaggcatcgaggccaaccccgagaagatacgagctatagagcggatgcgcccccccagcaagcttagggatatgcaatgcgtcaccggttgcatggccgccctaagtcggttcatatcgaggctgggagagaaggcgctacccttatttaagctcctcaaacgctccgggccgtttacttggacggaggaagctgaacgtgccctcactcagttgaaggcgtatctcagctctcccccagttctggtcgccccggagccaaatgaacccttgctactctacttagcggcgaccccgcaagtggacggccccgaggccactgtgggaaggccgcccctgtcgtcctccgaccccgaggtcgtcggcacagaagacgagtgcaccccgcgaggccgcttggacaaagagcaccccagggatgtggcccctagcgaagaggatcggccccaccgaaaggtgcagcggcccgtctacattgttagtgaggccctccgggacgccaagacccgataccctcaggcccagaagatgctttacgctattctgatggcttcgaggaaactgcgccattatttccaggcgcatcgggtcacggtggttacgtcttaccccctcggccaaatcctgcataatcgagagggtactggacgggtggtgaaatgggcaatcgaactttctgagtttgatttgcactttgaaccacgtcacgctatcaagagccaagccctcgccgattttgtggcagagtggaccccagctcccgagcccgtctcagtccccgaggccagctcgggcccctcacagctgcctcacaccgcccactgggtgatgcagttcgacggctccctgtctcttcagggcgccggtgcgggggtcacgttgacctcgccgagcggagacgtcctcagatatttggttcgccttgactttcgggcgaccaataatatggcagagtacgagggactccatgtgggactcagggtggcagctggactggggatccgccgcctcctggtgttaggcgactcccagctggttgttaaccaggtctgtaaggagtaccggtgctctgacccgcagatggacgcttacgtgcgccaagtacggcgtatggagcgccattttgacgggatagagcttcggcacgtgcccagacgggataacacggttgccgacgaactctcacggctcgcttcctcgcgagcccagaccccaccgggcgcctttgaagaaaggcttgcccagccgtcggcgcgacccgaccccttaggggagacggacgcgcctgacaggcccccgaagcccgtcggagtccaggcctcgggacccgaggggagcgctcccagctcccttagattgattgcttggatcgctgagatccaagcatacctcatagataagactctacccgaggaccgcgaagggagtgaacgcgtccaacgcatctccaaacgctacgtgctggtagaagggaccctctatcggcgcgcggctaacggaatcctcctgaagtgcattcctcgggaacaaggcgtcgagcttcttgccgatatccatgaaggcgaatgcggatcccactccgcctcgcgcaccttggttggcaaagcctttcgacaaggtttctattggccgacagctctcaatgatgcggtcgacctggtccggcgatgcagagcgtgtcaattccacgccaagcaaatccatcagccggcccaggccctgcagatcataccactttcatggccatttgctgtctgggggctcgatatcctgggaccgtttaggcgggccccgggcgggtttgagtatctgtatgtcgcgatcgacaagttcactaagtggcccgaggcttatccggtcgtcaagatcgataagcactccgcacttaaattcattaagggcatcacagcccgtgaacttttcggcgactactgcgaagacatgggcatcaagctctgcttcgcctcacctgcccaccccagaagcaacggccaagtggagcgcgccaatgcggaaatcctcagaggccttaaaaccaagaccttcgacatcctcaagaagcacggcgattcgtggatcgaggagttgccagcggtgctctgggcgaaccgaaccacgccaagccgagcaactggggaaacgcctttcttcctcgtctacggcgcggaagcggttctcccatccgagctcaccctgaggtcccctcgggccaccatgtactgcgaggctgatcaagatcagtttcgcagagatgacctcgactacttggaagagcaaaggcggcgcgcggccctccgagccgcgcgctaccagcagagcctgcggcgctaccatcagcgccacgtccgggcccgatcactctgcgtcgacgacctcgtcctacgccgcgtccaaacgcgtgctagattgagcaagctctcaccaatgtgggagggtccgtatcgagtgatcggcgtcccccggccgggctccgttcggctggccacgggcaacggcacagagttgcctaacccgtggaacatcgaacaccttcgtcgcttctacccctaa

SEQ ID NO: 66162 - DNA, 2004 bp, Oryza sativa
  Clone ID: PAT_MRT4530_6713C.1
gtttttagacagcagattcaggtggccattgagggaggcaagattaggtttgatgattccaaaaagccgatgaaggtcgatgtgaatcaagatcatggccaagaggacaatgtaatcaggaagaatcaatggtgtccttctggtattttcacgaagaatcagaagataagggttcaaagattgaggaacagggagcgccttcaggaggttgaacaagaaattaatcatcggctgaggaaagcaaagccaaggcaggagtggcgtgttaagaatcaggttcctgtagccgatgatgttgcagccgatgaggtgaagaggttggcaaaagggaagagtgttgtgacagcaccggtcaacatggtctttaccttgctagccgaattcgggatcgatcaagccgatgtcaacgaggtggaagaggaatcggctaagttggttctatcaccagaacaggcagtgttcgagaaacccgaggggacagagaatcggcatcttaaaccattgtatataaacggctacgtcaatgggaagccgatgtctaaaatgatggttgatggtggggccgcggtaaatttgatgccttatgctacattcaggaagttgggtagaaatgccgaggatctcatcaagacaaacatggtgctcaaagacttggtgggttcttacagcttgttgcttggaagggattggattcatgctaattgttgcattccttcaactatgcatcaatgtttgattcaatggcaaggcgacaagatagagatcgtgccagccgacagccaattgaagatggagaacccaagctattattttgagggcgtcgtggagggttcaaatgtctacaataaggatacagtagatgatctcaatgacaagcaagtagccgatcagctggttgatgctgcatcagggaacaaaattttgagttttatagatggaaacgcaggatataatcaaatctttatgactgaagaagatatgcataagacagcttttagatgccctggtgcaatcggcttatttgaatgggttgtcatgactttcggcttgaagagtgctggagctacatatcaaagagccatgaattacatatatcatgatttaatcggctggttggttgaagtctacatcgatgatgtggttgttaagtctaaagaaatagaggaccatatagccgatttgaggaaggttttcgagagaaccagaaaatatggcctgaagatgaacccgacaaaatgtgcttttggtgtatcggctggccagttttgggatttcttgttcatgaaagagggatcgaggttgaggcattatctactatccaacgagtgtactgttatatgcaaagccgacgttgtcaagtacatgctatcggctccaatattgaaaggaagggttggaaagtggatattttccttaaccgagtttgatcatcggtatgagtcgctgaaggcgattaagggacaagctatagccgattttattgtggaacatcgtgatgattcaatcggctcggttgaaatagtgccatggactttattctttgatggatcggtgtgtactcatggttgtggtatcggtctggttataatttcccctaggggggcttatttcgagtttgcttatactattaaaccgtatgcgactaataatcaagctgagtatgaagcagtgctcaaagggttgcaattactcaagaaagttgaagccgaaaccattgaaatcatgggggattctctgctagtaatcagtcaattggcaggagagtatgaatgcaagaatgatacattgatggtttataatgagaagtgccaagaactaaagaaggagtttcggctggttactttaaagcatgtctctcgagaacaaaatattgaagctaatgatttggcccatggggcatcggggtataagccgatgatcaaagatgttaaagttgaaattgcagcaatgacagccgatgattggaggtatgatgtgcatcagtgttcgttcaagaacatataa

SEQ ID NO: 66163 - DNA, 457 bp, Oryza sativa
  unsure (1)..(457): unsure at all n locations
  Clone ID: PAT_MRT4530_67140C.1
ggtggcgctggcatcaaccacgcaccttggatcctgatatgattcaacggttgagatgcaaaagctagctctggctatatatgcctttgcctcttaattctaagttaatttcatctattttttagccctatatatacgaagagaggggtttaattttctcnccttatatatattccacatgtgtcacttctctggttttttttttttggtataccatcatgtgtgtgcatgtgttgtcaacttcttctttgagtcttttcactttttctctatcgttaaatgtaaaatatactgtacgtgagtgtgtgtgtgttcgtcgaacttatgatgtaaggatcggagtcttttcaagttatgggatgataaaaatctcacatgtgtactccgaattcttgattatatatataattcacatgggaatctatcttatatctccctgtacaaaaaaaaaaaaaaa

SEQ ID NO: 66164 - DNA, 5775 bp, Oryza sativa
  Clone ID: PAT_MRT4530_67141C.1
atggctgaacaagcaaaggcgcacagcctctctccgagtgttagcggtgacgacggggagccgaacccacgccgtcgagctcgtactccaccgccccttccacgccaaagtcctaggcgggaggaggcgctcgagagggtcgaaggatccgcgacttcgacatccacgggtgctggggaagggcggcgagatggggagcgtcgcctcctcgtctacggcgacggcagcacgccccagggcgcgctccaagctgcgggcgcgctcctacgtcacccgcccattgtccctggcccggagtctccagcccaacgttggctggacgacgtggccaacttggtcatgacggcacagcagcgcctaggtgctggtgggcggtcctccgccaccaagacctctggcgctgctaccacccgctccgtgtcgtcaaggcggagggcgcggcgagcggcggctgttgctcgccattcggccgccactccttcgtcagcgcctccgacccaggaagatctgcgtggagggccggatgcccgcatcagtatcgagcaccagcgtaatggccgacgtgctgcccacgcaacggagggcgcctcctcgtccggagtgtcacatcaacacggacgcggggatcaaccctccgtgcccccggttggtggtgtcggctgtagagcctttgtggcgagccttcggaacgtccgttggcccccaaggttctggcccaccatcgccgaaaaatacgacgggagcgtcaaccccgccgagtttctccaggtctacacgaccgggatcgaggccgccggggatgacgacagggtcatggcgaatttctttcccatggccctgaagggacaggcacggggttggctaatgaacttgccacccgcgtccgtccactcttgggaggatttgtgccaacagttcaccatgaactttcaaggcacatatccgcgcccaggtgaagaagcggacttacatgcagtccagcgaagggatgatgagtcacttcgctcatacattcagcggttctgtcaagtccgcaacaccataccatgcatccctgcacacgcggtgatctacgcgttcaggggggggcggcgtgacaggaggaggaagaagaggtcagcccattccgacgacgagggtcatgtcctcgccgtcgagggcgcttcgcgggccacccgaaaggggaggcctgcgagcgacaaaaagaaggaggccggcgctcccagtagggagcgcccaactggcaagtggtgcatcgtccacaacacctcccttcacgacctcgcggactgccgcgcagtcaaaagtttggctgagcggacgaggaagtgggaggaggagaggaggcaggagcgccgagagggcaagtccccggcggttccttccggcaatcggcgaagtgaggccaagcagaaggcccccgccgaggacatcgatgacggcgatgatgacctaggtttccaagagcctggggccaccattgccactgtcgatgggggagcgtgtgctcacgtttctcgccggagcctcaaggccatgaagcgagagcttctggccgcggcccctactcatgaggcgacgcgccgggcgcggtggtcggaggttgccctcaccttcgaccagaccgaccacccaccgtgcgttgcccggggaggacagatcgcaatggtggtttcccccactgtttgcaacgtgaagctggggcgtgtcctcattgatgggggagcagccctcaacatcctttcccccgcagcctttgacgctatcaaggccccggggatggtgctccggctgtcccagccgattatcggtgtgacgccgggtcacacttggccgctaggtcatatcgacctcccggtcaccttcggtggatccgccaacttccgcacggaacgggtgaactttgatgtggcggacctcagtctgccctacaacgcggtcctagggaggcccgcgttggtgaagttcatggcggcgctccattacgcctacctccagatgaagatgccgggcctcggtggtcccatctctgtccatggcgacctcaaagtcgcgctcgcttgtatggagcagcgcgcggaccacctcgccgctgcgtccaagcccgagggtggcgacgagaggcttggcacctccatccccgccgccccgaggcagcggatagtcacgtgcgacgaggtcccggaagacgcgctcgtctctttcctgcgggcaaacgctgacgtcttcgcatggagaccggcggatatgcccggggtccccagggaggtgattgagcaccgtctcgccgtgcggtcgggcgcaaggccggtccggcagaaagtacggcggcaggccccggaacgtcaagccttcatccgtgaggaggtggcgcgacttctggaggccggattcatccgcgaggtcatccatccggagtggctggcgaacccggtggtcgttcccaaggcgaacggcaagcttcggatgtgcatcgactacaccgaccataacaaggcatgtcctaaggacccttaccccctgcctcgcatagatcagattgtcgactccacagcggggtgcgaccttttgtgttttctagatgcatactctggttaccatcagattcacatggctagggaggatgaggaaaaaactgcgttcattacccccataggaacttattgttatacgacaatgcccttcgggttaaagaatgcaggtcctacttttcaacgtactactcgaatttctttgggtagccaaataggacgtaatgttgaggcttatgtcgatgacttggttgtaaagacgcgcaaccaagagaccttactctctgatctagcggaaacttttgagagtctccgctccgcccgcataaaactgaaccccgataagtgcgtgttcggtgtacctgcgggcaagcttctcgggtttttggtctctgcccgaggcatcgaggccaaccccgagaagatacgagctatagagcggatgcgcccccccagcaagcttagggatgtgcaatgtgtcaccggttgcatggccgccctaagtcggttcatatcgaggctgggagagaaggcgctacccttatttaagctcctcaaacgctccgggccgtttacttggacggaggaagctgaacgtgccctcactcagttgaaggcgtatctcagctctcccccagttctggtcgccccggagccaaatgaacctttgctactctacttagcggcgaccccgcaagtggttagtgcggcgttggttgtggagcgcgatgaggacaatcctcattccgtgcacccccaccctgtgctggcttggcccgggagagagcagggaggagaggcccccgagccgaacggtggcccaaggcccccgacgaccggagcaggccctctgcccgcttgtcagacggtgccaggtgcccccgacccccaggatggcccgagggccactgcgggaaggccgcacctatcgccctctgaccccgaggctaaccctgtgccgactcgacccgggagagagcagggagaagaggcccccgagccgaacggtggcctaaggcccctgacgaccagagttggccctttgcccgcttgtccgacgacgccaggagcccccgacccccaggacggccccgaggccactgtgggaaggccgcccctgtcgtcctccgaccccgaggtcgtcggcacagaagacgagtgcaccccgcgaggccgcttggacaaagagcgccctagggatgtggcccctagcgaagaggatcggccccaccgaaaggtgcagcggcccgtctactttgttagtgaggccctccaggacgccaagacccgataccctcaggcccagaagatgctttacgctattctgatggcttcgaggaaactgcgccattatttccaggcgcatcgggtcacggtggttacgtcttaccccctcggccaaatcttgcataatcgagagggtactggacgggtggtgaaatgggcaatcgaactttctgagtttgatttgcactttgaaccacgccacgctatcaagagccaggccctcgccgattttgtggcagagtggaccccagctcccgagcccgtctcagtccccgaggccagctcgggcccctcgcagctgcctcacaccgcccactgggtgatgcagttcgacggcttcctgtctcttcagggcgccggtgcgggggtcacgttgacctcgccgagcggagacgtcctcagatatttggttcgccttgactttcgggcgaccaataatatggcagagtacgagggactccttgcgggacttagggtggcagctggactggggatccgccgcctcctggtgttaggcgactcccagctggtcgttaaccaggtttgtaaggagtaccggtgctctgacccgcagatggacgcttacgtgcgccaagtacggcgtatggagcgccattttgacgggatagagcttcggcacgtgcccagacgggataacacggttgccgacgaactctcacggctcgcttcctcgcgagcccagaccccaccgggcgtctttgaagaaaggcttgcccagccgtcggcgcgacccgaccccttaggggagacggacgcgcctaacaggcccccgaggcccgtcggagtccaggcctcgggacccgaggggagcgctcccagctcccttagattgattgcttggatcgctgagatccaagcatacctcacagataagactctacccgaggaccgcgaagggagtgaacgcgtccagcgcatctccaaacgctacgtgctggtagaagggaccctctatcggcgcgcggctaacggaatcctcctgaagtgcattcctcgggaacaaggcgtcgagcttcttgccgatatccatgaaggcgaatgcggagcccactccgcctcgcgcaccttggttggcaaagcctttcgtcaaggtcgacctggtccggcgatgcagagcgtgcgggccccgggcgggtttgagtatctgtatgtcgcgatcgacaagttcactaagtggcccgaggcttatccggtcgtcaagatcgataagcactccgcacttaaattcattaagggcatcacagcccggtttggagtacctaaccgtattattacggataacggcacccaattcactagtgaacttttcggcgattactgcgaagacatgggcatcaagctctgcttcgccttacctgcccaccccagaagcaacggccaagtggagcgcgctaatgcggaaatcctcagaggccttaaaaccaagaccttcaacatcctcaagaagcacggcgattcgtggatcgaggagttgccagcggtgctctgggcgaaccgaaccacgccaagccgagcaaccggggaaacacctttcttcctcgtctacggcgcggaagcggttctcccatccgagctcaccctgaggtcccctcgggccaccatgtactgcgaggctgatcaagatcagcttcgcagagatgacctcgactacttggaagagcgaaggcggcacgcggccctccgagccgcgctctaccagcagagcctgcggcgctaccatcagcgccacgtccgggcccgatcactctgcgtcgacgacctcgtcctacgccgcgtccaaacgcgtgctggattgagcaagctctcaccaatgtgggagggtccgtatcgagtgatcggcgtcccccggccgggctccgttcggctggccacgggcgatggcacagagctacctaacccgtggaacatcgaacaccttcgtcgcttctacccctaa

SEQ ID NO: 66165 - DNA, 432 bp, Oryza sativa
  Clone ID: PAT_MRT4530_67142C.1
atggattggttggtgtgggtggcagtagcaagtagtagtgagtcagtacgtgggaaacggctcagcacgaagagatgcggcgaatttcgccggtttcgcgcggaaacccgtgtgccacggaaggaaacagggttggcgggccgcgatccatcggctgctcggcctcggcggaatggaggagagacgtggatgcgccgcgcgctcgtgctctctgttgtgctggctggttggtgggcacggccgcatgggcaaattgacaagtcgtatcgtctcgttgggctagtccgccgctctgacctggtcacgggggcaaagcggtggtggggttggtgtggcgcgataggagcgtctggatggccgatggacggccaggatggaggcttagttccggggttgggtttggtggtggtgggaggccagcgacctgtgtga

SEQ ID NO: 66166 - DNA, 6030 bp, Oryza sativa
  Clone ID: PAT_MRT4530_67143C.1
atggccgaacaagcaaaggcgcacaacctctctccgagtgttagcggtgacgacggggagccaaacccacgccgtcgagctcgtactccaccgccccctccacgccaaagtcctaggcgggaggaggcgctcgagagggtcgaaggatccgcgacttcgacatccacgggtgatggggaagggcggcgagatggggagcgtcgcctcctcgtctacggcgacggcagcacgccccagggcgcgctccaagctgcgggcgcgctcctacgtcacccgcccattgtccctgacccggagtctccagcccaacgttggttggacgacgtggccaacttggtcatgacggcacggcagcgcctagatgctggtgggcggtcctccgccaccaagacctctggcgctgctaccaccggctccgtatcgtcaaggcggagggcgcggcgagcggtggctgttgctcgccattcggccgccactccttcgtcagcgcctccgacccaggaagatcagcgtggggggccagatgcccgcatcgatatcgagcgccggcgtaatggtcggcgtgctccccacgcaacggagggcgcctcctcgtccggagtgtcacctcaacacggacgcggggatcagccctccgtgcccccggttggtggtgtcggctgtagagcctttgtggcgagccttcggaacgtccgttggcccccaaggttccggcccaccatcgccgaaaaatatgatgggagcatcaaccctgccgagtttctccaggtctatacgaccgggatcgaagccgccgggggtgatgacagggccatggcgaatttctttcccatggccctgaagggacaggcgcggggttggctaatgaacttgccacccgcgtcggtccactcctgggaggatttgtgccaacagttcaccatgaactttcaaggcacatatccgcgcccaggtgaagaagcggacctgcacgcagtacagcgaagggatgatgagtcacttcgctcgtacattcagcggttctgtcaagtccgcaacaccataccatgcatccctgcacacgcggtgatctacgcgttcagggggggtgtgcggcacaaccgcatgctcgaaaagatcgcctccaaagagccccagactaccgcggagctttttcagctcgcggaccgagtggctcgtaaggaggaggcatggacctggaacccctccggttccgggtggcgtgacaggaggaggaagaagaggtcagcctataccgacgacgagggtcatgtcctcgccgtcgagggcgcttcgcgggccacccgaaaggggaggcctgcgggcgacaaaaagaaggaggccggcgctcctagcagggagcgcccaaccggcaagtggtgcatcgtccacaacacttcccttcacgacctcgctgactgccgcgcagtcaaaggtttggctgagcggacgaggaagtgggaggaggagaggaggcaggagcgccgagagggcaagtccccggcggttccttccggcaatcggcgaagtgaggccaaacagaaggcccccgccgaggacatcgatgacggcgatgatgacctaggtttccaagagcctggggccaccattgccactgtcgatgggggagcgtgtgctcacgtttctcgccggagcctcaagaccatgaagcgagagcttctggccgcggcccctactcatgaggcgacgcgccgggcgcggtggtcggaggttgccctcaccttcgaccagaccgaccacccaccgtgcgttgcccggggaggacagatcgcaatggtggtttcccccactgtttgcaacgtgaagctggggcgtgtcctcattgatggaggagcagccctcaacatcctttcccccgcagcctttgacgccatcaaggccccggggatggtgctccggccgtcccagccgattatcggtgtgacgccgggtcacacttggccgctaggtcatatcgaactcccggtcaccttcggtggatccgccaacttccgcacggagcgggtgaactttgatgtggcggacctcagtctgccctacaacgcggtcctagggaggcccgcgttggtgaagttcatggcggcggtccactacgcctacctccagatgaagatgccgggccccggtggccccatctctgtccatggcgacctcaaagtcgcgcttgcttgtatggagcagcgcgcggaccacctcgccgccgcgtccaagcccgagggtggcgacgaaaggcttgacacctccgtccccgctgccccgaggcagcggatgatcacatgcgacgaggtcccggaagacgcgctcgtctccttcctgcgggcaaacgctgacgtcttcgcatggagaccggcggatatgcccggggtccccagggaggtgattgagcaccgtctcgccgtgcggccgggcgcaaggccggtccggcagaaagtgcggcgccaggccccggaacgtcaagccttcatccgcgaggaggtggcgcgacttctggaggccggattcatccgcgaggtcatccatccggagtggctggcgaacccggtggtcgttcccaaggcgaacggcaagcttcggatgtgcatcgactacaccgaccttaacaaggcatgtcctaaggacccttaccccctgcctcgcatagatcagattgtcgactccacagcggggtgcgaccttttgtgttttttagatgcatactctggttaccatcagattcgcatggctagggaggatgaggaaaaaactgcattcattacccccataggaacttattgttatacgacaatgcccttcgggttaaagaatgcaggtcctacttttcaacgtactactcgaatttctttgggtagccaaataggacgtaatgttgaggcttatgtcgatgacttggttgtaaagacgcgcaaccaagagaccttactctcggatctagcggaaacttttgagagtctccgctccgcccgcataaaactgaaccccgataagtgcgtgttcggtgtacctgctggcaagcttctcgggtttttggtctctgcccgaggcatcgaggccaaccccgagaagatacgagctatagagcggatgcgcccccccagcaagcttagggatgtgcaatgcgtcaccggttgcatggccgccctaagtcggttcatatcgaggctgggagagaaggcgctacccttatttaagctcctcaaacgctccgggccgtttacttggacggaggaagctgaacgtgccctcactcagttgaaggtgtatctcagctctcccccagttctggttgccccagagccaaatgaacccttgctactctacttagcggcgaccccgcaagtggttagtgcggcgttggttgtggagcgcgatgaggacaatcctcattccgcgcacccccaccctgtgctggcttggcccgggaaagagcagggaggagaggcccccgagtcgaacggtggcccaaggcccccgacgaccggagctggccctctgcccgcttatcagacggtgccaggtgcccccgacccccaggacggccccgaggccactgcgggaaggccgcacctatcgccctctgaccccgaggctaaccctgtgccgattcgacccaggagagagcagggagaagaggcccccgagccgaacggtggcctaaggcccctgacgaccggagttggccctttgcccgcttgtccgacgacgccaggagcccccgacccccaggacggccccgaggccactgtgggaaggccgcccctgtcgtcctccgaccctgaggtcgtcggcacagaagacgagtgcaccccgcgaggccgcttggacaaagagcgccccagggatgtggcccctagcgaagaggatcggccccaccgaaaggtgcagcggcccgtctactttgttagtgaggccctccgggatgccaagacccgataccctcaggcccagaaaatgctttacgctattctgatggcctcgaggaaactgtgccattatttccaggcgcatcgggttacggtggtcacgtcttaccccctcggccaaatcttgcataatcgagagggtactggacgggtggtgaaatgggcaatcgaactttctgagttcgatttgcactttcaaccacgccacgctatcaagagccaggccctcgccgactttgtggcagagtggaccccggctcctgagcccgtctcagtccccgaggccagctcgggcccctcgcagctgcctcacaccgcccactgggtgatgcagttcgacggctccctgtctcttcagggcgccggtgcgggggtcacgttgacctcgccgagcggagacgtcctcagatatttggttcgccttgactttcgggcgaccaataatatggcagagtacgagggactccttgcgggactcagggtggcagctggactggggatccgccgcctcctggtgttaggcgactcccagctggtcgttaaccaggtctgtaaggagtaccggtgctctgacccgcagatggacgcttacgtgcgccaagtacggcgtatggagcgccattttgacgggatagagcttcgacacgtgcccagacgggataacacggttgccgacgaactctcacggctcgcttcctcgcgagcccagaccccaccgggcgcctttgaagaaaggcttgcccagccgtcggcgcgacccgaccccttaggggagacggacgcgcctgacaggcccccgatgcccgtcggagtccaggcctcgggacccgaggggagcgctcacagctcccttagattgattgcttggatcgctgagatccaagcatacctcacagataagactccacccgaggaccgcgaagggagtgaacgcgtccagcgcatctccaaacgctacgtgctggtagaaggggccctctatcggcgcgcggctaacggaatcctccttaagtgcattcctcgggaacaaggtgtcgagcttcttgccgatatccatgaaggcgaatgcggagcccactccgcctcgcgcaccttggttggcaaagcctttcgacaaggtttctattggccgatagctctcaatgatgcggtcgacctggtccggcgatgcagagcgtgtcaattccacgccaagcaaatccatcagccggcccaggccctgcagatcataccactttcatggccatttgctgtctgggggctcgatatcctgggaccgtttaggcgggccccgggcgggtttgagtatctgtatgtcgcgatcgacaagttcactaagtggcccgaggcttatccggtcgtcaagatcgataagcactccgcacttaaattcattaagggcatcacagcccggtatggagtgcctaaccgtattattacggataatggcacccaattcactagtgaacttttcggcgattactgcgaagacatgggcatcaagctctgtttcgcctcacccgctcaccccagaagcaatggccaagtggagcgcgccaatgcagaaatcctcagaggccttaaaaccaagaccttcaacatcctcaagaagcacggcgattcgtggatcgaggagttgccagcggtgctctgggcgaaccgaaccacaccaagccgagcaaccggggaaacgcctttcttcctcgtctacggcgcggaagcggttctcccatccgagctcaccctgaggtcccctcgggctaccatgtactgtgaggctgatcaagatcagcttcgcagagatgacctcgactacctggaggagcgaaggcggcgcgcggccctccgagccgcacgctaccagcagagcctgcggcgctaccatcagcgccacgtccgggcccgatcactctgcgtcgacgacctcgtccaaacgcgtgctggattgagcaagctctcaccaatgtgggagggtccgtatcgagtgatcggtgtcccccagccgggctccgttcggctggccacgagcgacggcacagagctgcctaacccgtggaacatcgaacaccttcatcgcttctacccctaa

SEQ ID NO: 66167 - DNA, 449 bp, Oryza sativa
  Clone ID: PAT_MRT4530_67144C.1
atacaagtcgacgttagttgccctgatgcaggaaagtatctgtaacatttgacccattcatgtacctgtctttgcccctgccttcaacaactatgagaacaatgactataacagtcttcaataccgatgggactactgggccatctccgtatactgtgagtgtaccgaaatctggagatacaaagactcttatcgatgcattaagcattgcttgttccttgaaaggcgacgagcgccttttggttgctgaggtctacaatagtgcacttatccggtacttggaggaaccctctgaagtcatctccttgatcagagatggagatcgcttggttgcatataaacttccaaaagacagtgaagatgctccaatagtggtgttcagaaaccaacggatggagtccaccctcactagttttggcagaaaatcctggaagtcttttggtacaccc

SEQ ID NO: 66168 - DNA, 319 bp, Oryza sativa
  Clone ID: PAT_MRT4530_67145C.1
gggtggtgtatttatttttgtgtgtgttttttagaatgtttattttttattggtaatttttgattgggagggggcgggggtttctattagcatatgagggggaggacaggggggggggaacaattgccaaaacaggagggacagtaaaaattgtattaaaatcagaagtacaaacatgttttggagaaaaatggaaaagggtaaatgctggaaccaataaggggcggggaaaaaaaaggaaaaagctcgggggactctgtcggggttgaaaacatgaatcttgggggggcggttaacattatcaattgatggggaaaaa

SEQ ID NO: 66169 - DNA, 843 bp, Oryza sativa
  unsure (1)..(843): unsure at all n locations
  Clone ID: PAT_MRT4530_67146C.1
atggcgacgtcgacggcgacggcgaggactccgaccaaggcggcggcggcggcggcgggggggagggcggccgggaacaccaccccgtccttcaagcccgcctcacgcgcgcggttcttgcacgccttcttggagaacgcgcaccccaacatcccggcggcggggcngcngcngccgcngcnggggagaccaggaccccgtccaagaaccccaccctggcgcggcggcggcggtggcggagaaggcgacttcgacttcgacaagtgcagggaggccgcccgcgaggccctgcgcacgtctcacgaggagttcttccgcaaggagcgcgccgcatcggccgcagcagcagaggagcagttgcaaaaggaggaggaggaggagaaggcggccgcgcaagaagccaagaaaggagcattggagacattggaggaggaagatgtagcggaactggaagggagcagcaaagtgagggcgctgaggaccaaagtgatgaccaaggcgttgagcagcgtccctgattctggcgctggtcgtgtcaagcaccttgtgcaggccttcgagagcatcctctccatctctggagccacctctgacgccgacagggccggtgaggggtcctgggcgctccccgggttacaggcatggaaggaagattgcgagggaccgaacaggctctgttcttcacttgatgggaaaagcgacaggttgagttgggacagccggacatcggcaggggggtgcaggagcaggcgaaatacatcggagtcgctaagaagcagttggaacaagaaactgaaggtcacaagccagcatccgttcaagctgagaaccgaggccgtttag

SEQ ID NO: 66170 - DNA, 516 bp, Oryza sativa
  Clone ID: PAT_MRT4530_67147C.1
atggcggcgatctcgccacgtctggttgtgttcgtcgccgtcctcctcctcctcctcctcgccacggcgaccaccacgcaatgccaccgtcacggcaagcgacaccgccaccacgccgtcgccgccaagggcgccgcggcggcggcggccacgccgggggtgacagacgtccatgccgtctgccgcacgacgccgcaccaggactcctgcctcgcgtcgacggccgcgcacctcgacgccgtctccgcggaggtggtggcagcggcgtcggccatctcggtgcagctgctcccgccgaacatcctgtccgtcgcgctcgcgtcgctccggggcgcgctcgccgccgtgtcgtcgctctccccggcgctcttcctgcgcactctccccatcgtcgaagggcgcatgccccgctccggcgcgggccggcaccagaactcgcgttcagagctccactccgccgcaaggtcgcctcccgtgacccggaagaaaaatcggacactcgccaagccgcgctag

SEQ ID NO: 66171 - DNA, 897 bp, Oryza sativa
  unsure (1)..(897): unsure at all n locations
  Clone ID: PAT_MRT4530_67148C.1
tttttttttttttttttttaatcacgttgactctgtattaagctttctttatttgaagcgccatgtacatacttgccatgcaaacagttatcttgagagttaaagcaagctatagacacattcgcaaattacaattttttttttttttttatgcgaagaaatctgcagcaaactgtaagtgtaaaacaatatggcaaggcgttgccggccgtctcaagtgcaaacagatggctacacttgaccgttccatccaggtaacaaaatacataatataaatctcttcgacagacatcaaagccacacgctaagaacatagagactgaaaggcacgctaacaaataaaattctaaaacccacgtagacctaagtagggcaggcctacatggtcaaccgccacataaccttacctcacagtgactatatcatcaatcttcagtatcattctaacacactcgcaagctagtgtgatggcgcttgtgctcaccagcaaaggttgcacaacgttctcctccaggatgtttgtaatctgacccttcctcacattgatgcctgcattcttctcacccttggcatgacgattccgaagctcagtcacaatagaaataggattgagccctgcattctctgctaatgtgtaaggaatgacctcaagtgcctcagcaaactccttgatgcagtaactctccatcccttggagctcctttgcccaagcagcaagctgcattgacatctctatttctggtgcaccaccaccagcaatcaaaaacctcttgttcaccaagcacctgatgacacaaagggcatcatgaagactgcgctcagcttcatcaattactaactggtttttttttttttttttttttttttttttttttttttttttttntttttaataaa

SEQ ID NO: 66172 - DNA, 421 bp, Oryza sativa
  Clone ID: PAT_MRT4530_67149C.1
aaggaaacctagggtggtgataaaaaaacagcagcacaggggggttgtttggttggtggtgcttttgctgacaggacaggccttgtttcaaaaccaagatccagccccaaaatttgcccaatcagtcacaccgccccgggaaggaaaaacatactggtggggcatacggattcatggcgaaacccccatacagaacaggattttcagataatttaagcaccccagttttcaagcttcaagggccccccctcctggtttcattttaaaatcgaccacgcccacgggcgggaccacggaagggccccgggccttcgccccttttttccctggcacgtccacgggctggagggggggagccctttgggttttcaaaggattcgccctgatcttcataatagtcccccctggcgccataaccgga

SEQ ID NO: 66173 - DNA, 456 bp, Oryza sativa
  unsure (1)..(456): unsure at all n locations
  Clone ID: PAT_MRT4530_6714C.1
gcaatctcaattaaatatttgacgtttaagaaaataaatgggataaggtcaatacaataaaagggaaaattgcgagaacatcttctgctcaataatgccaaaaagtgacccaacctctgaccaactgacctaaaaaatgttgaatatcgataagcatttcttaactgcaatccatttgctctgttccaaggtggacctcatgaccgcacttgcaccttgctgtaaaccatcgtgtcgaggtagatcaagcaatcgatcagggggaaaggccgtgaggccttcccagcgatcatctganaaagccaaacgtggcgtggcgtatgcaaaagatcgcggcggacagcaacacttcntccgcagaagatcgtcngcaggcaactgatggatagagagaggaggcacanggtatggcgatttgttgaaacatgaacaagtgatatgtgtctggccatcggc

SEQ ID NO: 66174 - DNA, 1997 bp, Oryza sativa
  Clone ID: PAT_MRT4530_67150C.1
atgcccgcgcccgcgcccgcggcgccgtggcccgtgtcgcaggagatctcgtccctggccgaccgcctcctcgcccacgccggcggcgacggcgacggcgccgcggggatgcgggacctcgcgggcgcgctcctccggatccagcccgtcgcgcgcggggtcgagcggcgcggggacgcggggcagcgcgacctcgcggactggctcctccagctcaagggcgccgtcgccgaggccgacgacctcctcgacgagctcctcctccgccgccgccacgggagccggctcagcccttcgttagcgtcctgcttagctcgcggcaagccgccctcccgggagctcaagcgactggtgggcaggatcgaccgcatccacgacgtctccgagcgtctcgttgacgccgcggcggaagaagaagccggcgaggcgggtcgcggcgtgaggtcgccgaaccgcgtgaccggctccgtgctcacggagaggaaggtgtttgggcgtgagaaagagtgtggcgaggtaatcagcaggctggtggattgtccggagaatgcatgctcttctgctcttccggttgttgcaatcgtcggacatggtggaatggggaagacaaccgttgcgcagttcgtttacagcgatgagaggattgaacagaaatttgatatcaaagcctgggtctgtgtctgggatagatctgatgtcgcggagctaacaagggagatattgcagtccattggtggtccggatgatacgctgtacggtgataattctgccaaattggatattctgcaggcaaaacttgaagtattggtcaggtcaaagaggtttctactagttcttgatgatgtttggaatgatgaggctaagatggagctggagaataaggatctgtggagaaaggtgctggcacctcttaggtctgccgggagaggcagcaagatcttggtgaccactcgaatgaaactagtagcgcggtatctcaattcgactcatgttgtctcccttgatgtgttgggaagcagcgactgctggttgttgttaaaggaggctgctctgggtggagaaagcaaggatattcctcctgatttgcaagagattggaagaaccattgctgcaaaggcaaagggctcccctttagtttccaaggctcttggacagatgctaagaaacaccaggagtacatggaggtggagagcacttctggatgcagaaattagtcataacatcattatatcgtctctccaacacagttatcagcacttacctggacaccttcagcgatgctttgcatactgcagcatatttccaaggggctgtaggtttcaacgagataaattggtgaagatgtgggtggctctgggttttattcaaacatcaaggaaggaaagaaaaggggagtatgatttagcacaagaatacttttatgatctgctttcacggtcattcttctgtgctgccagcaaagacaaccaaacattttatttcctagataacctcatgcacgatttggcacagcacgcttctgttcacgattgcatgaaaattgatgaaggcatgcctagtgtgattccaccaacagtgcgccacttgtctgtctcaactgattattttccacagctcaagagtaagtgtaagttggaaaggctacggacattattagttcttagaagctcttcgttgtcattgagtcatcttcctagtaaatttctatctgaatttaagaacttgcgtgttcttgatcttagtgagtcagatattttagaattaccagaaaccattagccagttgtttcatcttcattacctagctttatgccacatgactagcaaacttcccaaatgtatatacaagcttgtacagagtggtgtcctggatatgcctatactgctatttcctgatagtcatcctagaggtatgagcaaatttgtcacacagaaaacatcttgaaacttgttgcaacaccaacaagggtgtagttggctcagcaacgttggcttgca

SEQ ID NO: 66175 - DNA, 2832 bp, Oryza sativa
  Clone ID: PAT_MRT4530_67151C.1
atgcgggttgtggcggaggaaggcactttgaccatgcaaaatcagcaaggttctccttctcaagagatgcatcgtgcaagagcaaggttgtttcttgacaaatgtcgagaacaacttcttgagagccagagggacaagtggcccccgaagttctgccccaacctcaccgagaagtatgacagctgcgtcaacccctctgagttcctccagatctacaccatgatcatcgaggctgcggggggtgacgaccggcccccgcgcaaggagaaggccaccgacagcaagccaagcgccactacccccggcgaaagccgttcggcggacaagtggtgctcgatgcacaacacttatcgggacagccttgctgattgtcgcacggtcaagaacttggccgtgcggtacaggaagaccgatgaggagagacagcagagtcgccgggagggcaaggcccccacaacctccgctggcaaccggcaaggggatgccaagaaaaaggcccccgccgatgatgacgatgacagcgaggacctggagttcaaggaacctcagcagaccgtcgctacgctcgacggaggggcttgcgctcaagtctcctgtcgcagcttcaaggccatgaggcgtgcgcttctggccgccgtcccgacccacgaagcggcacggcgggcgcgctggtcggaggaagctggccctcgtggtctccccgaccgtttacaacgtcaagttgagacgcgtcttgatcgacggggggccagcctcaacatcatctccccggccgcctttcatgctctcaaggctccggggatgaagctccagccgtcgctgccgatcatcggcgtgaccccggggaatacgtggcttttgggccacatcgagctcccggtcaccttcggcgaccccaccaacttctgcaccgagcggatcgacttcgatgtggcgaatctcaatttgccctacaacgcggtcctggggagacctgcattggtgaagttcatggctgccacccattatgcctacccccagattaagatgtcgggccccaacggccctatcaccatctccagcgatgtcaagatcgccctggcttgtgcggagcagcgtgccgacagtttggcggcagccaccgagccagaggaggccggcagacccccggaggcctccacatcacgcgcctccgagaagcggatcacctcgggcgacgagggaggtgatcgagcaccacctcgccgtgcggtcggatgcgtgacccatctggcagaagatacggcgccaagccccggagcgacaagccttcatccgcgaggtgacgcggctcctggaggccggcttcatccgagaggtcatctacccagagtggctggcgaaccggtggtcattccaaaggccaacggcaagctccggatgtgcatcgactacacggacctcaacaaggcatgccccaaggatcctttccctttactacgcatagatcagatagtcgactccactatggggtgcaaccttttgtgtttcctagatgcttattcagtataccatcagattcgcatggcttgggaagatgaggaaaaaactgcttccattacccctgtgggcaccttttgttatacaactatgccttttggtttaaagaatgcaggccctacttctcagcgcatgactcgcattactttgagtaatcagatacggcataatgttgaggcctatgtcgatgacttggtggtaaaaacgcgccaaaaagacacattgctgcaggatctggctgagaccttcgatagccttaggtccacgcgcatgaaacagaaccccgaaaggcgcgacaacgcagtcgccgatgagctgtcgcgtattgcgtcggcgcgagccccactccccccgggagtctttgaagaaagtctcatgcagccatcggcgcgctcggatcccccgagggtgcttaacgccacaacccccacctcgatgcctagcgagccacaggcctcggggcccgagggggtcaaccccgaccccacacgtcagatcgcctggatggccgacattcgggcatacctcgacaatcacactcttcctgaggatcgcgcggaagccaaaaagctcgcgcgcatctccaaacgatatgtgctagtagaagggaccctctaccggcgcgacgctaatggagtcctcttgaagtgtatccctcggaagcaaggcgtcgagctcatcgccgatgcccatgagggagaatgcagggcctactcggcctcgcgcattttggttgtctggggtttggatatcctggggcccttcaaagcggcccgtggcgggtaccagcacctgtacatcgccatcgacaagttcaccaagtggcccgaggcttacccggtcatcaagatcaataagcattcggccctgaagttcatcagaggcatcacatcccgattcagagtgccgaaccgtattatcacggataacggcacccagttcaccagtctcaaaaccaagacgtacaacgtcctcaagaagcacggggactcttggcttgaggaactacctgtggtgctgtgggccaattggactaccccgagccgtgcaacaagagaaacccctttcttcctggtgtacggcgtcgaggcggtcctaccgttggagctctccctgggctcgcctcgtgttgcgctctacaacgaggcggaccaggacgagctccgtcgcgatgacctcgactatttggaagagcgaagaaggcgcacggcccttcggacggtgcactaccaacagagcttgcagcgctatcatcagcgccacgtctgggcccgatcactgcaagtccacgaccttttcctacgccgcgtctag

SEQ ID NO: 66176 - DNA, 219 bp, Oryza sativa
  Clone ID: PAT_MRT4530_67152C.1
atggatatggataaagttgacccagtggtgggtgcgaccaagctcgaggtgacaggagtggctgagtcagaactggtgaatgatcttgcttgggcagggtggccagaagtggtaacacggcataaggacaccacgtggctaaaccaaaggctagaggaggtggaggtggtgctcgaagaggaggtggaggtggtgctcctatgtattggtgataactag

SEQ ID NO: 66177 - DNA, 195 bp, Oryza sativa
  Clone ID: PAT_MRT4530_67153C.1
atggcagccgtctgtgtcctcattgtagtcgcctccatcctcctcaagggcctcctccaccacctcggccaggcacgcaggattgccagtgtggccatctcgctgggccacaagcgagacctgaggctcaatagtcctctcgctcagccaaatagcgacaccgaggccggtcgtctcacattttcgccttgctag

SEQ ID NO: 66178 - DNA, 171 bp, Oryza sativa
  Clone ID: PAT_MRT4530_67154C.1
atcgacctagctgcaaatgcaggagaattggagttattttcatgtgctgaccatccccaatatgcattaatcaagaatttttttgaatctggttttgggattcataatgctggaatgattcgatcagatagaaagttgaaggagcgcttgtttgctgatgggctcctgaaa

SEQ ID NO: 66179 - DNA, 6928 bp, Oryza sativa
  Clone ID: PAT_MRT4530_67155C.1
tggcggaaatttcttagaattaaactgccccatgggcatgtccatttaggtgctaaagcctcaaggcttaccccccctgatttgctgcagattgcaaaaacaaggcccttctatagaaatggggggccttggcgtcgcggcgcgatccaaaccgccactatcccccaatcacaccgacaacccgatcgccgtatcgccgccctcgccgttccgctccgcctcccgcaccgaaaccctcgccggcggcggcagccgctacgccgagatgctcgcgccgctcccgcgcctgacgagcgcgctccgcggccactacgacgccgaccaggcctacctcctccgcaagtccgcgctccaatccctcaagctcccgaggccgcgcgacgagtgggagctcgcacggaagatcgtccccgactgggacgatgcgcccagtgatgtgcgccaggcgtacaagcagttcctcggtgccgtggtggagttgttgaatggggaggtcgtgtctgaagagcttcaggaagttgcccctgctgtgtacgccttgtttgctggcgatgatacgcagtctaatctcgctgacaatgtccttcgcagaaggaatgaattggagaaccttgtgggttacagtgtgcaagactctgttttaaagaagctagctcagttagctcagatgctctgttctctccaacgggcaaggggccatgaacttgttcagataaatgcagatgaaagtattacaagtgaatttggagcaaactttgatttcaaaccaccttctcgtttcattgttgatgtttcccttgatgatgacctacccttaggaagtggtgtattgagctctaaacctgctgaacatgatcaatacgatgccagcagcgcatccgtaagtcataattcagtttctcctgggggttatgtaaatttgaggtggctaaaggatcagtgtgatttgataactagaagtggtggctcagttctctcaggagatgaacttgcaaaggctttgtgcagagtgctcctatctaataaagctggcgatgagatagctggtgaactgttggatcttgttggtgatgctgcttttgaaacagttcaggatctcctttcgcataggaaagagctagtggatgcaattcagcacggattgatgatattgaaatcagaaaaaatgtcttcaagtaatcaaccaaagatgccaacatatggcacacaagtaacagtacaaacagaatatgagcgccagcttgataagattaggaggaaagaggaaaaacgtggcaagcgtggtacagaaactgcaacaaatgatattttttctgatgatttttcatcatttctcctggcgagtgaaagaaagcagccatttgatgatgtggttgggactggagaaggggcgaacagttttactataacttctcttcctcaagggaccacaaggaaacatatgaaggggtatgaagaagtgaaaattccaccaactccaacagcaccactgaaagccaatgagaagctgattgaaataggagagttggatgaactcgcccaagctgctttccagggatacaagtcactcaaccgtgttcagagtcgtatttttcaagctacatactacacgaatgagaacattctagtttgtgctccaacaggtgctggcaaaacaaatattgcaatgattgctgttcttcatgaggtcaaacaacacttcagagatggcattttgcataaaaacgaattcaaaatagtctatgttgcccctatgaaggctttggctgcagaggtaacatccacattcagtcgccgattatctccgttgaacctggttgttagagaacttacaggagacatgcagctgaccaaaaatgagattgaagaaacacagatgatagtgactactcctgagaagtgggatgttattacacggaaaagcagtgacatgtcactgtcaatgttggtgaagcttataatcattgatgaggtgcacttgctaaatgatgatagaggttcagtcattgaggcgctagttgctcggactcttcgccagggtgagtctatgcaatcaatgattcgcattgttggcctatctgctaccctgcccacttacttggaggttgcacaatttttgcgggttaatccagatactggtcttttctttttcgattcgagttaccgtccagttcctcttgctcaacagtacattggaatcagcgaaagggattatgccaagaaaatcgaactattcaatacattgtgctatgagaaggttgtggagtccattaagcaaggtcaccaagcattggtttttgttcatactcgtaaggatacggggaaaactgctagaacattgatcgacctagctgcaaatgcaggagaattggagttattttcatgtgctgaccatccccaatatgcattaatcaagaaagatgttagcaaagccaaaagtcgtgaagttgcagaattttttgaatctggttttggtattcataatgctggaatgattcgatcagatagaagtttgatggagcgcttgtttgctgatgggctcctgaaagtccttgtttgtactgcaacattggcttggggagtgaacttaccggctcatacagtcgttataaagggaacacaactatatgatcctaaagctggtggatggcgagatttggggatgcttgatgtgatgcagatcttcgggcgtgctggacgaccgcagtttgacaaaagtggcgaaggaattattatcacgacacacgacaaattggcttactacttaagattattaacaagtcagcttccgatagaaagccagttccttggatctttgaaagataatttgaatgctgaggttgccttgggcactgttacaaatgtcagggaggcctgtgcctggcttggctacacatacttatttataaggatgaagactaatcctctggtgtatggaatagcttgggaagaggttattggagatccttccttgggttccaagcaaagagcgtttattattgatgctgcacgtgcgctagacaaggctaagatgatgcggtatgatgaaaagagtggcaacttttactgcacagaacttggtcgaattgcaagccacttttaccttcagtactccagtgttgaggcttacaatgagatgcttcggcgtcacatgaatgagagtgaggtgattaatatggtggcccattcctctgagtttgagaatattgtagtaagagaagaagaacaggatgaattagaatccctttttaagaatgcatgcccacatgatattaagggggggccaactgacaaacatgggaaaatttcaattctcatacaggtttacatatcgcgtgctccaattgatagctcctctttgcactctgatgctcaatacattagtcaaagcttggctcgcattatgagggcattatttgagatttgtctgcgccgagggtggtctcagatgacatccttattattagagttctgcaagggtgttgaccgcaaaatatggcccgaacaacatccacttaggcagtttgacagagacctttctcatgagatatgtaaaagacttgaggaaaaacatgttgatctggatcgtctttatgagatggaagaaaatgatatcggagctcttattcggttttctcatctaggaaaggtggttaaacaatatgttggatactttccatatgtcaacttatctgctactgtgagcccaatcaccaggactgttcttaaagtggaccttcttataactcctgaatttttgtggagagatcgtcatcatggcatgtcgctacgatggtggattattgttgaggattctgaaaatgatactatttatcattcagagttgttcacactaatgaagaaggcaagaggagcacctacaaagatttcttttaatgtaccgatctttgaacctcatccaccacagtactacatacgggccatatcagattcctggttaggagcagagtcactgtttactgtttcttttcataaccttaccttgccacagacacaaataacacacactgaacttttggacctgaagcctcttccattgagtgctcttggcaacaagacgtatcaagatctatacagattttcccatttcaacccgatacaaacacaggcttttcacgtcctctatcacagcgacaataacgtactcttgggagctccaactgggagtggcaagacgatttctgcagaactagcaatgcttcatcttttcaacacacaaccagacatgaaggtagtttacattgctccattaaaggctatagtacgggaaagaatgaatgattggagacaacgtcttgttactcagcttgggaagaagatggttgagatgactggcgacttcactccagatatgatggccctattatcagcggacatcataatttctacccctgaaaagggggatgggattagtcgtagttggcatagtagaagttatgttatgaaggttgggctcatgatattagatgagatacaccttcttggagctgaccgtggccctattctcgaggtcattgtatcaagaatgcgatacatatcatcacaaacagaacgttcaattcggtttgttggtttatcaacagcattagccaatgctcgtgatttagctgattggttgggcgtgagagatgatggtctattcaatttcaagcccagcgtgaggcctgtacctcttgaagtgcatatccagcttgctgcatcagatgaaaaaccaaggcagttcctaagcatggcagataactctctcgacatgattctttcacaagtctctgacaccaatttgagacatactctgcaatttggaataggtctgcatcatgcaggtctaaatgatagagatagatccttggtcgaggaactcttttcaaacaacaagattcaggtactggtatgtactagcacactggcttggggtgttaatcttccagctcacctggtcataattaagttcctgtatgaaccattccctgttgaaagtaatctaagggagcacttgcatgatcacataaatgcggagattgtttccggcactatcagtaataaagaggaggcgatcatttatcttacttggacatacctgtaccgaagactggttgttaacccagcttactatggattggaagatactgaaacgtacaccttgaattgctacctctcaaggctagtggaaacaacatttgaagatcttgaggacagtggatgcataaaagtggatgatcactctgtaaagtacttgattttgggaaagatagcgtcacagtattaccttagttaccttacagtctcaatgttcgggacaaatataggccccaacacatcattagaggcatttgtgcacatactgtcagcttctgcagaatttgatgagcttcctgtacgccacaatgaggataacttgaaccgaaccctgtgtggaaaagtcccgtactcagttgatcagcaacaccttgatgacccacatgttaaagcaaacttactctttcaggcacacttttccagagcagaattaccaattagtgactatgtcactgatttgaaatcggttcttgatcagagcatacgtattatacaggctatgattgacatatgtgccaatagtggatggctttcaagcgcattgacttgtatgcatcttctacaaatgatcatacagggctttcctgggagcgtcactccggattacgtcccgttccagatgtgggataccttgcagggtctctcgacttacatccgtgcaatgctgtctactcaagctcttttaggcgctattggagtaggtgagaaatctgccacggttataggtgccacttttcagtggtttctcagggatttgacaggaatgctcggtgggatactgttcactttttatcaggtgtcaaattctcttgctaactcgaataggcaatgccatcttattgccattgatagtttgtttactgatgagataacttgcttgggatctaaccttgatagcaatgctaaaatgtggcgcctagttgcagactttatgaatgaccttgggatgttgatggatctcttaagccctctgtttccttcatcattgattgttataatgtgtttaggcagcctatctcgatccttcactggtgttgctagtggagcaactagagcagcgttaacccagcattttgcacttgccaataatgcagctgatatatctgcaaaggagggcagtcaggagacacttgcaacaatgttaggaatgggactgggaatgcttcttgcccatgttaccagagggcatgctttgggtgtatgggtttcattcctttctctaacgatattccatatgtatgcaaattacaaggcagtgcagtcactttcactcacaacactaaattatgagagaagttccatcctgctgcagtacttcatggacaatggtgaagagaactatttcttgctggataaggaaggcagtgttcacattttcatccacaagcaggcagcggcaacagatattttgatgtccttcatacatggactcgtgttagcacatttgatgcagaagagcaaatctgggcatgcggaggctcgccaatggattgatgagaaatataacacttttatctcaaagttgcaagttgaaggttactcaacagagcgacttctttcacactcgatcgtgtggagggcacattgggttcatggtccctctgaagagaagctcgagtaggaggaagcaggcgaaggtaccagtatctgttcaacccgatattattaaagcaattcgacatactgcataggatgctttgcatatctcgtttgtttccgttccgaattgccccttttcaccatggagttgccctgcatcttgtaatcgcatgggatatactttaaaagccagtcttgataataagccttttaaaaatgaaatagcctattt

SEQ ID NO: 66180 - DNA, 660 bp, Oryza sativa
  Clone ID: PAT_MRT4530_67156C.1
atggaggatggtagtatagagggttcgtcggcgagcctcgctggtgttggaggtggcagcgagacggcggcgacgacgctgcaatgggcaatgtcagagctgttgaacaatccaaaggtgatgcagaaggcacaagacgagatacgacaagtgctttatggacaagaaagaataaccgaggagaccataagtagtctgcattacttacacttagtcatcaaggagacgcttcggctacaccctccaacgccactacttctaccaagggaatgtcgtgaaccatgccaaatattaggattcgacgtgtctaaaggggctatggtactcatcaatgcatggtctattggtagggacccaagcaactggcatgcacccgaaaaattcatgccagagaggttcgagcaaaacaacattgactttaaggaaacaagctttgagtacataccttttggagcaggacgaagaatctgcccaggcatgacgtttaggctagcaaacatcgagcttttactcgcaagccttctgtatcactttgactgggagcttccatatgggatgcaggcaggcgacctcgatatgactgaaactctggcggttaccgcacggcgaaaagccgacctgttggtagttccagttgtgcgtgtccccatcgtgggttaa

SEQ ID NO: 66181 - DNA, 331 bp, Oryza sativa
  Clone ID: PAT_MRT4530_67157C.1
tcgcccacgcgttcgcccacgcgttcgcccacgcgtgcggcctgagcatcatcgaccctggtgactcggacatcatcaacacaacccctgcctaccagtgaagaagttaatacctatttagttgagatgtaaggctcagacgtgcttacatggccaatggctgatctaggtatcttagttgagaactctgctatgctgagcagggatctgccatacagataatactccatattgatgccaaagcattactataggtggggaagatgagatctctatggatatagtgagcaaggttattctccgaaaaaccaggggtaaataatctgaagcc

SEQ ID NO: 66182 - DNA, 352 bp, Oryza sativa
  Clone ID: PAT_MRT4530_67158C.1
ctgcacgggcccggcctgacttcccggacccacccacgcgtttgctttttgcgcaaagcagacttgtgcacctggacgatatactggtcttgctacagcctccactgggggtgcttgggggtcaagtgagcatcgcatcaaccaatccatccggtggcaactagtgagtgcagctaagggctgcttgtgtgcacataacgagagatttgaatgtggcatgggctcaaaaggacagatctttcgatgtctgtattgagagtgcaagaggagaggacgttcctgtgtgatgatatgtccgtgactgcctgtgtgtgtgagtgccaggtaatctggatgcagtccacaaaaccgt

SEQ ID NO: 66183 - DNA, 153 bp, Oryza sativa
  Clone ID: PAT_MRT4530_67159C.1
cgttttcttgctgtttccgtggatgccatggcaggagccggtcaagagctgaccatctacgtcctgccacctgcgtctgcactggcgcgccacggtgctgtacgcccgcgccgcatgctcgccgtcacccctagctctcttggtcggcagtga

SEQ ID NO: 66184 - DNA, 282 bp, Oryza sativa
  Clone ID: PAT_MRT4530_6715C.1
atgacgtgtcgcttacgtggcaatgtgttccagaaaaataataaatctcgtgggacccacatgtcagggccatatgcaaccacagcaccatcagtaaccaaagcgcggccggtcggaggggccggcctggcgtggaagatgtcgacgaacgaggggctgcggttcgaggaggcggtggcggaggtcgcgtcggatgagggctgggggttgcataataggtggaggctgtggctaacatcgtcgagcggcggtgatggccgtgaggcggtgatgcgactctga

SEQ ID NO: 66185 - DNA, 252 bp, Oryza sativa
  Clone ID: PAT_MRT4530_67160C.1
atggcggtgatgaccatggagatgaaaatggatatggtggtggtggcgatggcagtggcggtggcggtggagatggaggtggttgtgatggacctggtgctggtgtcggagatgatagattatcgtcaagtacatatcgataagaacgatattctgctggcgaaggtggcgaggccatgggagtatacccggctggaattagcatacgacatagggatacctttgttggatgatagttctggcccgttatag

SEQ ID NO: 66186 - DNA, 333 bp, Oryza sativa
  Clone ID: PAT_MRT4530_67161C.1
gtacagcggaaaaatgcgctaagaagtcgaaggaattcttgcgaagtagcgcgcgtcgatgtagaggaagtagtcgatcgcaccggctcgaccttctcctcctcgtgtgttctcctcgccgtactcccatgccgatcagcaccgcaaaccagcagcgcctctaccggatccatcactcgggcctccaaggcccgtaggactcctattcggatccctatccgaagttcatgtatattcggctgtaacccgaaaactccttttcggtccacgcgacaacagcggcccctagcagaacgtattgacccaccggacatacataaagatcatattggc

SEQ ID NO: 66187 - DNA, 288 bp, Oryza sativa
  Clone ID: PAT_MRT4530_67162C.1
atggctggcccacgcgtcgtcgaagccaggggagtcgggcgcctgaacggtcgcagatcatctccaactgcctctccgattgatgaagccgcaccctctgattggttcaaaggcacagagaatccaccattacaagaacattacaagggggtttgtttttcagcacaaaagggaggtcaggatcttcaatctctctggtttcaggaatattatggattcagtttggcaatctgttcttcacatctggtacatcggcaggggaagaagagttatatgcagcccatttaa

SEQ ID NO: 66188 - DNA, 333 bp, Oryza sativa
  Clone ID: PAT_MRT4530_67163C.1
gcgcagcggaagaagacgctgagaagtcgaaggaactctcgcgaagtagcgcgcgtcgatgtagaggaagtagtcgatcgcaccggctcgaccttgtcctcctcgtgtgttctcctcgccgtactcccatgccgatcagcaccgcaaaccagcggcgcctctaccggatccatcactcggacctccaaggcctgtaggactcctattcggatccctattcgaagttcatatatactcggctgtaacccgaaaactccttttcggtccacgcgtcaacagtggcccctagcagaacgtattgacccaccgggcatacataaagatcatatcggc

SEQ ID NO: 66189 - DNA, 333 bp, Oryza sativa
  Clone ID: PAT_MRT4530_67164C.1
gtgcagcggaagaagacgctgagaagtcgaaggaactctcgcgaagtagcgcgcgtcgatgtagaggaagtagtcgatcgcaccggctcgaccttctcctcctcgtgtgttctcctcgccgtactcccacgccgatcagcaccgcaaaccagcggcgcctctaccggatccatcactcgggtctccaaggcccgtaggactcctattcggatccttatccgaagttcatatatactcggctgtaacccgaaaactccttttcggtccacgcgtcaacagcggcccctagcagaacgtattgacccaccgggcatacataaagatcatatcggc

SEQ ID NO: 66190 - DNA, 441 bp, Oryza sativa
  Clone ID: PAT_MRT4530_67165C.1
atggtgttcatcggcaaatatccacggacggctggagcggtggggcgacgggaactcggcgaaccacctctcctcgccaccaactcctcatccccgcctcctctcctcccttctcatcgtgttgatggcggtgttgatggtgttggtgtcagcacagttcaagacaacaggaacggcggagtggcggcatctcctccgacctcaccaccgccgcctcccctcccgtgcccctcctcagccgcctcctctccttcctccccacctcatccccgcgctctcctcctccgaccttgcggcggccaggttgatggcggtgttgatggtgttggggtcggcagctgggttgatggcggcgttggtggccttggggtcctagtcgagggcatctccgtcagccaggttgatggtggcggccggtgggtggaagaggaggtgaggtga

SEQ ID NO: 66191 - DNA, 290 bp, Oryza sativa
  Clone ID: PAT_MRT4530_67166C.1
ccccccaaaggaagaagggaaccaattggtatttaggaaaaaaccactatataaggcgggtattaaaaaaggaacaggaacgggttcggttttttaaaagaaggggttgaggagggcgaaaataaccccgccttatgatacaacatatggaaattaggggggggacatataaaacctctttattaaaggggaatggaaagaaatacccatatttccttttaaatgagagccttaaggtccggggccctggttaattcttttcttcgcaccacctggatttcgtttggcgg

SEQ ID NO: 66192 - DNA, 5682 bp, Oryza sativa
  Clone ID: PAT_MRT4530_67167C.1
atggccgaacaagcaaaggcgcacaacctctctccgagtgttagcggtgacgacggggagccgaacccacgccgtcgagctcgtactccaccgccccctccacgccaaagtcctaggcgggaggaggcgctcgagagggtcgaaggatccgcgacttcgacatccacgggtgatggggaagggcggcgagatggggagcgtcgcctcctcgtctacggcgacggcagcacgccccagggcgcgctccaagctgcgggcgcgctcctacgtcacccgcccattgtccctgacccggagtctccagcccaacgttggctggacgacgtggccaacttggtcatgacggcgcggcagcgcctagatactggtgggcggtcctccgccaccaagacctctggtactgctaccaccggctccacgtcgtcaagacggagggcgcggcgagcggcggccgctgttcgccattcggccgccactccttcgtcagcgcctccgacccgggaagatctgcgtggggggccggatgcccgcatcagtatcgagcgccggcgtaatggccgacgtgctacccacgcaacggagggcgcctcctcgtctggagtgtcacctcaacacggacgcggggatcagccctccgtgcccccggttggtggtgtcggctgtagagcctttgtggcgagccttcggaacgtccgttggcccccaaggttccggcccaccatcgccgaaaaatatgacgggagcgtcaaccccgccgagtttctccaggtctacacgaccgggatcgaggccgccgggggtgacgacagggtcatggcgaatttctttcccatggccctgaagggacaggcacggggttggctaatgaacttgccacccgcgtccgtccactcttgggaggatttgtgccaacagttcaccatgaactttcaaggcacatatccgcgcccaggtgaagaagcggacttacatgcagtccagcgaagggatgatgagtcacttcgctcatacattcagcggttctgtcaagtccgcaacaccataccatgcatccctgcacacgcggtgatctacgcgttcagggggggtgtgcggcacaaccgcatgctcgaaaagatcgcctccaaagagccccagactaccgcggagctttttcagctcgcggaccgagtggctcgtaaggaagaggcatggacctggaacccctccggttccggtgtggcagcttcggccgcccccggatccgctgctcggacatggcggcgtgacaggaggaggaagaagaggtcagcccattccgacgacgagggtcatttcctcgccgtcgagggcgcttcgcgggccacccgaaaggggaggcctgcgagcgacaaaaagaaggaggccggcgctcccagtagggagcgcccaaccggcaagtggtgcatcgtccacaacacctcccttcacgacctcgcggactgccgcgcagtcaaaagtttggctgagcggacgaggaatgaggccaagcagaaggcccccgccgaggacatcgatgacggcgatgatgacctaggtttccaagagcctggggccaccattgccactgtcgatgggggagcgtgtgctcacgtttctcgccggagcctcaaggccatgaagcgagagcttctggccgcggcccctactcatgaggcgacgcgccgggcgcggtggtcggaggttgccctcaccttcgaccagaccgaccacccaccgtgcgttgcccggggaggacagatcgcaatggtggtttcccccactgtttgcaacgtgaagctggggcgtgtcctcattgatgggggagcagccctcaacatcctttcccccgcagcctttgacgctatcaaggccccggggatggtgctccggccgtcccagccgattatcggtgtgacgccgggtcacacttggccgctaggtcatatcgacctcccggtcaccttcggtggatccgccaacttccgcacggagcgggtgaactttgatgtggcggacctcagtctgccctacaacacggtcctagggaggcccgcgttggtgaagttcatggcggcagtccactacgcctacctccagatgaagatgccgggccccggtggccccatctctgtccatggcgacctcaaagtcgcgcttgcttgtatggagcagcgcgcggaccacctcaccgccgcatccaagcccgagggaggcgacgagaggcttggcacctccgcccccgccgccccgaggcagcggatagtcacatgcgacgaggtcccggaagacgcgctcgtctctttcctgcgggcaaacgctgacgtcttcgcatggagaccggcggatatgcccggggtccccagggaggtgattgagcaccgtctcgccgtgcggtcgggcgcaaggccggtccggcagaaagtacggcggcaggccccggaacgtcaagccttcatccgcgaggaggtggcgcgacttctggaggccggattcatccgcgaggtcatccatccggagtggctggcgaacccggtggtcgttcccaacgcgaacggcaagcttcggatgtgcatcgactacaccgaccttaacaaggcatgtcctaaggacccttaccccctgcctcgcatagatcagattgtcgactccacagcggggtgcaaccttttgtgttttctagatgcatactctggttaccatcagattcgcatggctagggaggatgaggaaaaaactgcattcattacccccataggaacttattgttatatgacaatgcccttcgggttaaagaatgcaggtcctacttttcaacgtactactcgaatttctttgggtagccaaataggacgtaatgttgaggcttatgtcgatgacttggttgtaaagacgcgcaaccaagagaccttactctcggatctagcggaaacttttgagagtctccgctccgcccgcataaaactgaaccccgataagtgcgtgttcggtgtacctgcgggcaagcttctcgggttcttggtctctgcccgaggcattgaggccaaccccgagaagatacgagctatagaacggatgcgcccccccagcaagcttagggatgtgcaatgcgtcaccggttgcatggccgccctaagtcggttcatatcgaggctgggagagaaggcgctacccttatttaagctcctcaaacactccgggccgtttacttggacggaggaagctgaacgtgccctcactcagttgaaggcgtatctcagctctcccccagttctggtcgccccggagccaaatgaacccttgctactctacttagcggcgaccccgcaagtggttagtgcggcgttggttgtggagcgcgatgaggacaatcctcattccgcgcacccccaccctgtgctggcttggcccgggagagagcagggaggagaggcccccaagccgaacggtggcccaaggcccccgacaatcggagcaggccctctgcccgcttgtcagacggtgccaggtgcccccgacccccaggatggcccgggggccactgcgggaaggccgcacctatcgccctctgaccccgaggctaaccctgtgccgactcgacccgggagagagcagggagaagaggcccccgagccgaacggtggcctaaggcccctgacgaccggagttggccctttgcccgcttgtccgacgacgccaggagcccccgacccccaggacggccccgaggccactgtgggaaggccgcccctgtcgtcctccgaccccgaggtcgtcggcacagaagacgagtgcgccccgcgaggccgcttggacaaagagcgccccagggatgtggcccctagcgaagaggatcggccccaccgaaaggtgcagcggcccgtctactttgttagtgaggtcctccgggacgccaagacccgataccctcaggcccagaagatgctttacgctattctgatggcttcgaggaaactgcaccattatttccaggtgcatcgggtcacagtggttacgtcttaccccctcgcccaaatcttgcataatcgagagggtacaggacgggtggtgaaatgggcaattgaactttctgagttcgatttgcactttgaaccacgtcacgctatcaagagccaggatctcgccgattttgtggcagagtggaccccggctcccgagcccgtctcagtccccgaggccagctcgggcccctcgcagctgcctcacaccgcccactgggtgatgcagttcgacggctccctgtctcttcagggcgccggtgcgggggtcacattgacctcgccgagcggagacgtcctcagatacctggttcgccttgactttcgggcgaccaataatatggcagagtacgagggactccttgcgggactcagggtggcagctggactggggatccgccgcctcctggtgttaggcgactcccagctagttgttaaccagatccaagcatacctcacagataagactctacccgaggaccacgaaggaagtgaacgcgtccagcgcatctccaaacgctacgtgctgatagaagggaccctctatcggcgcgcgactaacggaatcctcctgaagtgcattcctcgggaacaaggcgtcgagcttcttgctgatatccatgaaggcgaatgcggagcccactccgcctcgcgcaccttggttggtaaagtctttcgtcaaggtttctattggccgacagctctcaatgatgcggtcgacctggtccggcgatgcagagcgtgtcaattccacgccaagcaaatccatcagccggcccaggccctgcagatcataccactttcatggccatttgctgtctgggggctcgatatcctaggaccgtttaggcgggccccgggcgggtttgagtatctgtatgttgcgatcgacaagttcactaagtggcccgaggcttatccggtcgtcaagatcgataagcactccgcacttaaattcattaagggcatcacatcccggtttggagtgcctaaccgtattattacggataacggcacccaattcactagtgaacttttcggcgattactgcgaagacatgggcatcaagctctgcttcgcctcacctgcccaccccagaagcaacggccaagtggagcgcgcaaatgcggaaatcctcagaggccttaaaaccaagaccttcaacatcctcaagaagcacggcgattcgtggatcgaggagttgccagcggtgctctgggcgaaccgaaccacgccaagccgagcaaccggggaaacgcctttcttcctcgtctacggcgcggaagcggttctcccatccgagctcaccctaaggtcccctcgggccaccatgtactgcgaggctgatcaagatcagcttcgcagagatgacctcgactacttggaagagcgaaggcggcgcgcggccctccgagccgcgcgctaccagcagagcctgcggcgctaccatcagcgccacgtccgggcccgatcactctgcgtcgacgacctcgtcctacaccgtgtccaaacgcgtgctggattgagcaagctctcaccaatgtgggagggtccgtatcgagtgatcggcgtcccccggccgggctccgttcggctggccatgggcgacggcacagagctgcctaacccgtggaacatcgaacaccttcgtcgcttctacccctaa

SEQ ID NO: 66193 - DNA, 201 bp, Oryza sativa
  Clone ID: PAT_MRT4530_67168C.1
atgaggaggctggctgttgggtgcggcggcgggcggacggtgagggtgcgacggatggtggctacgcagcctccgcaacggtggcggctctgccgccctcgggtgcggctgtggcttggcgacggcggaggatctggcggcgccgccctcaaggagggggggagggacgccggtgaaggagcgggtggcggcgggagttag

SEQ ID NO: 66194 - DNA, 5919 bp, Oryza sativa
  Clone ID: PAT_MRT4530_67169C.1
atggccgaacaagcaaaggcgcacaacctctctccgagtgttagcggtgacgacggggagccgaacccacgccgtcgagctcgtactccaccgccccctccacgccaaagtcctagccgggaggaggcgctcgagagggtcgaaggatccgtgacttcgacatccacgggtgatggagaagggcagcgagatggggagcgtcgcctcctcgtctacggcgacggcagcacgccccagggcgcgctccaagctgcgggcgcgctcctacgtcacccgcccattgtccctgacctggagtctccagcccaacgttggctggacgacgtggccaacttggtcatgacggcacgacagcgcctaggtgctggtgagcggtccaccgccaccaagacctctggagctgctaccaccggctccgtgtcgtcaaggcggagggcgcggcgagcggcggcggttgctcgccattcggccgccactccttcgtcagcgcctccgacccgggaagatctgcgtagggggccagatgcccgcatcagtatcgagcaccggcgtaatggccgacgtgctgcccacgcaacggagggcgcctcctcgtccggagtgtcacctcgacacggacacggggatcagccctccgtgcccccggttggtggtgtcggctgtagagcctttgtggcgagccttcggaatgtccgttggcccccaaggttccggcccaccatcgccgaaaaatatgacgggagcgtcaaccccgccgagtttctccaggtctacacgaccgggatcgaggccgccgggggtgacgacagggtcatggcgaatttctttcccatggccctgaagggacaggcacggggttggctaatgaacttgccacccgcgtccgtccactcttgggaggatttatgccaacagttcaccatgaactttcaaggcacatatccgcgcccaggtgaggaagcggacttgcacgcagtacagcgaagggatgatgagtcacttcgctcatacattcagcggttctgtcaagtccgcaacaccataccatgcatccctgcacacgaggtgatctacgcgttcagggggggtgtgcggcacaaccgcatgctcgaaaagatcgcctccaaagagccccagactaccgcggagctttttcagctcgcggaccgagtggctcgtaaggaagaggcatggacctggaacccctccggttccggtgtggcagcttcggccgcccccggatccgctgctcggacagggcggcgtgacaggaggaggaagaagaggtcagcccattccgacgacgagggtcatgtcctcgccgtcgagggcgctccgcgggccacccgaaaggggaggcctgcgagcgacaaaaagaaggaggccagcgctcccagcagggagtgcccaaccggcaagtggtgcaccgtccacaacacctcccttcacgacctcgcggactgccgcgcagtcaaaagtttggctgagcggacgaggaagtgggaggaggagaggaggcaggagcgccgagagggcaagtccccggcggttccttccggcaatcggcgaagtgaggccaagcagaaggcccccgccgaggacatcgatgacggcgatgatgacctaggtttccaagagcctggggccaccattgccactctcgatgggggagcgtgtgctcacttttctcgtcggagcctcaaggccatgaagcgagagcttctggccgcggcccctactcatgaggcgacgcgccgggcgcggtggtcggaggttgccctcaccttcgaccagaccgaccacccaccgtgcgttgcccagggaggacagatcgcaatggtggtttcccccactgtttgcaacgtgaagctggggcgtgtcctcattgatgggggagcagccctcaacatcctttcccccgcagcctttgacgctatcaaggccccggggatggtgctccggccgtcccagccgattatcggtgtgacgccgcctcacacttggccgctaggtcatatcgacctcccggtcaccttaggtggatccgccaacttccgcacggagcgggtgaactttgatgtggcggacctcagtctgccctacaacgcggtcctagggaggcccgcgttggtgaagttcatggcggcagtccactacgcctacctccagatgaagatgccgggccccggtggccccatctctgtccatggcgacctcaaagtcgcgcttgcttgtatggagcggcgcgcggaccacctcaccgccgcgtccaagcccgagggaggcgacgagaggcttggcacctccgcccccgccgccccgaggcagcggatagtcacatgcgacgaggtcccggaagacgcgctcgtctccttcctgcgggcaaacgctgacgtcttcgcatggagaccggcggatatgcccggggtccccagggaggtgattgagcaccgtctcgccgtaaggtcgggcgcaaggccggttcggcagaaagtacggcggcaggccccggaacgtcaagccttcatccgcgaggaggtggcgcgacttctggaggccggattcatccgcgaggtcatccatccggagtggctggcgaacccggtggtcgttcccaaggcgaacggcaagcttcggatgtgcatcgactacaccgaccttaacaaggcatgtcctaaggacccttaccccctgcctcgcatagatcagattgtcgactccacagcggggtgcgaccttttgtgtttcctagatgcatactctggttaccatcagatccgcatggctagggaggatgaggaaaaaactgcattcattacccccataggaacttattgttatacgacaatgcccttcgggttaaagaatgcaggtcctacttttcaacgtactactcgaatttctttgggtagccaaataggacgtaatgttgaggcttatgtcgatgacttggttgtaaagacgcgcaaccaagagaccttactcttggatctagcggagacttttgagagtctccgctccgcccgcataaaactgaaccccgataagtgcgtgttcggtgtacctgcgggcaagcttctcgggtttttggtctctgcccgaggcatcgaggccaaccccgagaagatacgagctatagagcggatgcgcccccccagcaagcttagggatgtgcaatgcgtcaccggttgcatggccgccctaagtcggttcatatcgaggctgggagagaaggcgctacccttatttaagctcctcaaacgctccgggccgtttatttggacggaggaagctgaacgtgccctcactcagttgaaggcatatctcagctctcccccagttctggtcgccccggagccaaatgaacccttgctactctacttagcggcgaccccgcaagtgacggtgccaggtgcccccgacccccaggaaggcccgagggccactgcgggaaggccgcacctatcgccctctgaccccgaggctaaccctgtgccgactcgacccgggagagagcagggagaagaggcccccgagccgaacggtggcctaaggcccctgacgaccggagttggccctttgcccgcttgtccgacgacgccaggaggccccgacccccaggacggccccgaggccactgtgggaaggccgcccctgtcatcctccgaccccgaggtcgtcggcacagaagacgagtgcaccccgcgaggccgctcggacaaagagcgccccagggatgtggcccctagcgaagaggatcggccccaccgaaaggtgcagcggcccgtctactttgttagtgaggccctccgggacgccaagacccgataccctcaggcccagaagatgctttacgctattctgatggcttcgaggaaattgcgccattatttccaggcgcatcgggtcacggtggttacgtcttaccccctcggccaaatcttgcataatcgagagggtactggacgggtggtgaaatgggcaatcgaactttctgagtttgatttgcactttgaaccacgccacgctatcaagagccaggccctcgccgattttgtggcagagtggaccccagctcccgagcccgtctcagtccccgaggccagctcgggcccctcgcagccgcctcacaccacccactgggtgatgcagttcgacggctccctgtctcttcagggcgccggtgcgggggtcacgttgacctcgccgagcggagacgtcctcagatatttggttcgccttgactttcgggcgaccaataatatggcagagtacgagggactccttgcgggactcagggtggcagctggactggggatccgccgcctcctggtgttaggcgactcccagctggtcgttaaccaggtctgtaaggagtaccggtgctctgacccgcagatggacgcttacgtgcgccaagtacggcgtatggagcgccattttgacgggatagagcttcggcacgtgcccagacggggtaacacggttgccgacgaactctcacggctcgcttcctcgcgagcccagaccccactgggcgcctttgaagaaaggcttgcccagccgtcggcgcgacccgaccccttaggggagacggacgcgcctgacaggcccccgatgcccgtcggagtccaggcctcgggacccgaggggagcgctcccagctccctgagattgattgcttggatcgctgagatccaagcatacctcacagataagactctacccaaggaccgcgaagggagtgaacgcgtccagcgcatctccaaacgctacgtgctggtagaagggaccctctatcggcgcgcggctaacggaatcctcctgaagtgcattcctcgggaacaaggcgtcgagcttcttgccgatatccatgaaggcgaatgcggagcccactccgcctcacgcaccttggttggcaaagcctttcgtcaaggtttctattggccaacagctctcaatgatgcggtcgacctggtccggcgatgcagagcgtgtcaattccacgccaagcaaatccatcagccggcccaggccctgcagatcataccactttcatggccatttgctgtctgggggctcgatatcctgggaccgtttaggcgggccccgggcgggtttgagtatctgtatgtcgcgattgacaagttcactaagtggcccgaggcttatccggtcgtcaagatcgataagcactccgcacttaaattcattaagggcatcacagcccggtttggagtgcctaaccgtattattacggataacggcacccaattcactagtgaacttttcggcgattactgcgaagacatgggcatcaagctctgcttcgcctcacctgcccaccccagaagcaacggccaagtggagcgcgccaatgcggaaatcctcagaggccttaaaaccaagactttcaacatcctcaagaagcacggcgattcgtggatcgaggagttgccagcggtgctctgggcgaaccgaaccacgccaagccgagcaaccggggaaacgcctttcttcctcgtctacggcgcggaagcggttctcccatccgagctcaccctgaggtcccctcgggccaccatgtactgcgaggctgatcaagatcagcttcgcagagatgacctcgactacttggaagagcgaaggcggcgcgcggccctccgagctgcgcgctaccagcagagcctgcggcgctaccatcagcgccacgtccgggcccgatcactctgcgtcgacgacctcgtcctatgccgcgtccaaacgcgtgctggattgagcaagctctcaccaatgtgggagggtccgtatcgagtgatcggcgtcccccggccgggctccgttcggctggccacgggcgacggcacagagctgcctaacccgtggaacatcgaacaccttcgtcgcttctacccctaa

SEQ ID NO: 66195 - DNA, 4998 bp, Oryza sativa
  Clone ID: PAT_MRT4530_6716C.1
atggccgagaaacaagcaccactaccatcaagcccaggctctgttaaaggcaaattaccgaagccgggattgactgacatcattgatgacaatgtcctgccgatcgatcccgagaaatttacgcctgacaacaagcaggagtttgaagcaatgatgcagcaagcacgggatcagtatctgagctcgttcatgcaaacccgcaagggaacgctagttcagaagtacaagttaaaactggttgctgatagccctggaaccggttcttccaaagatagagaagtgaaacaagctccagatggctcagctcagccgaacaacaagggtgctaccgggggttctataggaaatcaaggcgataaccctcaagaagtgcacggagctccaggtgatgctgctcaagggccgcaaggaggaaatcttaatcagaatattgagctagcacaagattttttcaacaactttcaagattgggttgattacgcggtgcatcatgctttgatcaatcaatccggggtcttagtcaatacaatgtcgaacatgaataaaacgataccactaattcagccggtgatggttcctgagcacttggtgcgcaacattcagccgaatctgcataactaccaagggggtaacttgagctatcagtatcagcctccatccccgcaagcccaatatcaaccagcgggatcggcccagcaacaattcgctcatcagtttggtcagttcgagcccatgcagcagcaaccacaaggagcagctcagcaacgaccatgggctgatgtcattgctgatgtaatgagggagcaatttgggctgagaccaaaagagactgggagtttgtatcggcagccttatcccgagtggtttgaaagggttcctcttcctaatcggtttaaaatccctgatttctccaagttctcaggacaagagggcgtgtcgacttatgagcacatcagccgataccttgctcagtgtggtgaagcatcggctgtggacgccttgagagttaggatgttccgattatcattatccgggtcagcttttacttggttttcatctttgccatatgggtcggtcaatagttgggccgatttagagaagcaattccacagctatttctacaacggggtccacgagatgaagttgtctgacttaacggcgatcaagcaaaggtatgatgaacccgtacacgagtatatccagaggttcagagaggtgaggaacaagtgctttagcttgagtttgaccgatgcccagttagccgatctagccttccagggtatgattcctccgatcagggagaaattctcgtccgaagacttcaatagtttgtcgcatctgatacaaaaggtaaccttgcatgagcataggtcggctgacgtcaggagaagctccaggaaggttaatcacgtttgcccgtatacgtatggatcggacgatgaagacgatgattctgagatagctgcagtcgaatgggtgaggagcaaaaaggtagccatcgaaggggggaagattaagtttgacgattccaagaagccgatgaaggtcgatggaaatccttttcccgacaacatggtacatacagctagtcaagcagccggtggagctaagattattaacaagtatcaaaggaagtatgataagcagcaggcgaggcgttatgaagagaacaacaatggtttcgatcctcattgggattgtgagttctttagattcttctgcaacgaaggaatgaggttgccatctattgaaaactgtcctgggtgcagtgacgtcattgagagctcaagccgaccacataatcagggtgatcggccaagacagacaagacttcctgttcatcaaagattgggtccgatgagtcaagatcatggtcaagaagatgaagggactaggaagaatcaatggtgtccctctggtatttacacaaaaaatcagaaaaggagggtccagagattgaggagcagggaacgttttcaagaggttgaagagggaatcaatcatcggctgaggaaaccaagaccaaggcaggtgtggcgtgttaagaatcaagctcctacagccgatgatgctgcagccgatgaagcgaagaggttggcaaaaggaaagagtgttgttacagcaccaatcaacatggtctttacgctaccagccgaatttggaatcaatcaggccgatgttgatgaagtagaggaggaatcggccaagttggtcctgtcaccagagcaagcggtattcgaaaagcccgagggaacggagaatcggcatattaaaccattgtatgtaaacggctacgtcaatggaaagccgatgtctaaaatgatggtcgatggtggggctgcggtgaatttgatgccttatgctacgttcaggaagctgggtaggaatgctgaggatcttatcaagacaaatatggtgctcaaagattttggtggtaatccatcggagaccaaaggtgttttaaatgtggagctgacagtcggcagtaaaactattcctaccacgttttttgtcattgatgggaagggttcatacagtttgttgcttggaagatattggattcatgccaattgttgcatcccttcaactatgcatcagtgcttgattcagtggcaaggtgacaagatagaggttgtgccagccgacagccaatcgaagatggagaacccaagctattactttgagggcgttgtggagggttcagatgtttacgctaaggatacagtagatgatctcgatgacaagcagggtcaaggttttatgtcggatgatgatttggaagaaattgatataggcccaggtgatcagccaaggccgacattcattagcaaaggtttgtcttcggagtttagaaccaagctgatagagctcctaaaagagtttagagattgcttcgcttgggagtattatgaaatgcctggactcagccgatcgatcgtcgaacatcggttacctatcaaaacgggagttagaccacatcagcaacctccgaggagatgcaaagccgatatgcttgaatctgttaaggctgaaattaaacgattgtatgatgctggttttattcgtccctgccgatatgctgaatgggtttctagcatagttccagttattaagaagaatggcaaggttagggtgtgcattgattttcgagatttaaataaagcgacaccgaaggacgaatatccaatgccggtagccgatcagctagtcgatgccgcgtcagggaacaagattttgagttttatggatgggaacgcagaacttgatgatcacatagccgatctaagaaaagtttttgagagaaccaggaagtatggcttgaagatgaatccgacaaaatgtgcttttggtgtatcggctggccagttcttgggatttcttgttcatgaaagagggattgaggcgattaagggacaagctatagccgattttattgtggaacatcatgatgattcaatcggctcggttgagatagcaccgtggactttattctttgacggatcggtacgcactgatggttgtggcatcgacttagttataatttcccctaggggggcatgttttgagtttgcttatactattaaaccatatgcgactaataatcaagctgaatgtgaggcagtgcttaaggggttgcaattactcaaggaagttgaagccgatactattgaaatcatgggggattctttgctagtaatcagccagttggcaggcgaatatgaatgcaagaatgatacattgatcgtttataatgagaagtgcctggaattaatgaaagagtttcggctggtgactttgaagcatgtatctcgagaacaaaatcttgaagctaatgatttggctcaaggggctcgggccgatgactggaggtatgatgtgcatcagtatttgagcaatccgtctcaatcggcttccagaaaattgcgatataaggcgttgaagtatacgttgctgggtgatgagctctattatcggacgattgatggggtattacttaagtgcttgagtgccgatcaggctaaggttgcaatcggtgaagttcatgaggggatttgtggtactcatcaatcggctcacaagatgaagtggttgcttcgacgtacaggatacttttggctgacgatgctggaggattgtttccgatattataagggttgtcaagattgtcagaagtttggagcaattcagcgagcaccggcgtcggctatgaatcctataattaaaccatggccgttcagaggttggggaattgatatgatcggcatgataaacccaccatcaagtaaagggcataaatatatattggtggcgactgattatttcaccaaatgggtagaggcgattcctttgaagaaagttgattcgggggatgctattcagtttgttcaagagcatataatttatcgatttggtcttcctcagactattactatggatcagggttcaatatttgtgtccgatgaatttgttcagtttgccgatagcatgggtatcaagctgttgaattcttcaccttattatgcacaagctaatgggcaagccgaggcgtctaataagagtttgattaagttgatcaagcggaagatttccgattatcctcggcaatggcatactcgattggccgaagcattctggtcttataggatggcttgtcatggatcgatccaagttcctccttacaaacttgtttatggacatgaggctgttttaccatgggaagttagaatcggctctcgacaaacggagttgcaaaatgatttgacagccgacgagtattacaatcttatggccgatgagagggaggatttggttcagtcccgattgcgagcccttgcgaaggttactaaggataaggaacgtgttgctcggcattataataagaaagttgtgcctaaggatttttcggaaggagaacttgtctggaagttgattttgctgattggtactcgtgataataaattcgacaagtggtcgccaaattggggaggaccgttctag

SEQ ID NO: 66196 - DNA, 528 bp, Oryza sativa
  Clone ID: PAT_MRT4530_67170C.1
atgaagggctcggcggcggcgggcggcgaggacgacgtggagctgctcaaggcggtggcgcaggcgtggcacgcgcagtcgggcaacccgcgcgcggtggcgtcggcggcggcgcaaggggcggacgacgacggcggcggcggcggcgtctcttcctcgggcacgcgccgcgcgggagtgggaggcccgggacggcgcaggccgtcacggttcaagctggaggccgcggcgatccgtgaccgggacacgcgcggcggcggcggcggcgagagggcgtgggacttcgcgcagtcgctgtgggacacgtacgagctcgtcgccgtggcgcggaggctcgagtccggcctcgtcctcgccgaccaccatcccggcgccgccgccgcccaggagcgcgccgccaccacgcgggaaggaggaggaggaggaggaggggtgaagcgagcgagggagagcagccgcagcctgaggagcatattcctccggtcatcgtggtcatcgtccaggaggttcgacgaaccacgcagctag

SEQ ID NO: 66197 - DNA, 276 bp, Oryza sativa
  unsure (1)..(276): unsure at all n locations
  Clone ID: PAT_MRT4530_67171C.1
cgaccacgcgtccgcccacgcgtccgantcgctaattagcatatctatcagctctcacagctgactggactgcacttagcagccaggtccggttgccgatgtgcgtgcgggtggcgacggcgccggcgccggcgcgcgtgtcggtgctgccggcgagcaacaagctgggagacaggctgcggatgcaggcgacgtacaacgtgaagctgatcacaccggacggcgaggcggcgctgtacgttacgtacgaccggtacattctggacccgcgagcta

SEQ ID NO: 66198 - DNA, 5826 bp, Oryza sativa
  Clone ID: PAT_MRT4530_67172C.1
atggctgaacaagcaaaggcgcacaacctctctccgagtgttagcggtgacgacggggagccaaacccacgccgtcgagctcgtactccaccgccccctccacgccaaagtcctaggcgggaggaggcgctcgagagggtcgaaggatccgcgacttcgacatccacgggtgatggggaagggcggcgagatggggagcgtcgcctcctcgtctacggcgacgacagcatgccccagggcgcgctccaagctgcgggcgcgctcctacgtcacccgcccattgtccttgacccggagtctccagcccaacgttggctggacgacgtggccaacttggtcatgacggcacggcagcgcctaggtgctggtgggcggtcctccgccaccaagacctctggcgctgctaccaccggctccgtatcgtcaaggcggagggcgcggcgagtggcggctgttgctcgccattcggccgccactccttcgtcagcgcctccgacccaggaagatctgcgtggggggccggatgcccgcatcagtatcgagcgccggcgtaatggccgacgtgctgcccacgcaacggagggcgcctcctcgtccggagtgtcacatcaacacggacgcggggatcagccctccgtgcccccggttggtggtgtcggctgtagagcctttgtggcgagccttcggaacgtccgttggcccccaaggttccggcccaccatcgccgaaaaatatgacgggagcgtcaaccccgccgagtttctccaggtctacacgaccgggatcaaggccgccgggggtgacgacagggtcatggcgaatttctttcccatggccctgaagggacaggcacggggttggctaatgaacttgccacccgcgtccgtccactcttgggaggatttgtgccaacagttcaccatgaactttcaaggcacatatccgcgcccaggtgaagaagcggacttacatgcagtccagcgaagggatgatgagtcacttcgctcatacattcagcggttctgtcaagtccgcaacaccataccatgcatccctgcacacgcggtgatctacgcgttcagggggggtgtgcggcacaaccgcatgctcgaaaagattgcctccaaagagccccagactaccgcggagctttttcagctcgcggaccgagtggctcgtaaggaagaggcatggacctggaacccctccggttccggtgtggcagcttcggccgcccccggatctgctgctcggacagggcggcgtgacaggaggaggaagaagaggtcagcccattccgacgacaagggtcatgtcctcgccgtcgagggcgcttcgcgggccacccgaaaggggaggcctgcgagcgacaaaaagaaggaggccggcgctcccagtagggagcgcccaaccggcaagtggtgcatcatccacaacacctcccttcacgacctcgcggactgccgcgcagtcaaaagtttggctgagcggacgaggaagtgggaggaggagaggaggcaggagcgccgagagggcaagtctccggcggttccttccggcaatcggcgaagtgaggccaagcagaaggcccccgccgaggacatcgatgacggcgatgatgacctaggtttccaagagcctgggggcaccattgccactgtcgatgggggagcgtgtgctcacgtttctcgccggagcctcaaggccatgaagcgagagcttctggccgcggcccctactcatgaggcgacgcgccgggcgtggtggtcggaggttgccctcaccttcgaccagatcgaccacccaccgtgcgttgcccggggaggacagatcgcaatggtggtttcccccactgtttgcaacgtgaagctggggcgtgtcctgattgatgggggagcagccctcaacatcctttcccccgcagtctttgacgctatcaaggccccggggatggtgctccggccgtcccagccgattatcggtgtgacgccgggtcacacttggccgctaggtcatatcgacctcccggtcaccttcggtggatccgccaacttccgcatggagcgggtgaactttgatgtggcggacctcagtctgccctacaacgcggtcctagggaggcccgcgttggtgaagttcatggcggcagtccactacgcctacctccagatgaagatgccgggccccggtggccccatctctgtccatggcgacctcaaagtcgcgcttgcttgtatggagcagcgcgcggaccacctcaccgccgcgtccaagcccgagggaggcgacgagaggcttggcacctccgcccccgccgccccgaggcagcggatagtcacatgcgacgaggtcccggaagacgcgctcgtctctttcctgcgggcaaacgctgacgtcttcgcatggagaccggcggatatgcccggggtccccagggaggtgattgagcaccgtctcgccgtgcggtcgggcgcaagaccggtccggcagaaagtacggtggcaggccccggaacgtcaagccttcatccgcgaggaggtggcgcgacttctggaggccggattcatccgcgaggtcatccatccggagtggctggcgaacccggtggtcgttcccaaggcgaacggcaagcttcggatgtgcatcgactacaccgaccttaacaaggcatgtcctaaggacccttaccccctgcctcgcatagatcagattgtcgactccacagcgggccaaataggacgtaatgttgaggcttatgtcgatgacttggttgtaaagacgcgcaaccaagagaccttactctcggatctagcggaaacttttgagagtctccgctccgcccgcataaaactgaaccccgataagtgcgtgttcggtgtacctgcgggcaagcttctcggcaagcttagggatgtgcaatgcgtcaccggttgcatggccgccctaagtcggttcatatcgaggctgggagagaaggcgctacccttatttaagctcctcaaacgctccgggccgtttacttggatggaggaagctgaacgtgccctcactcagttgaaggcgtatctcagctctcccccagttctggtcgccccggagccaaatgaacccttgctactctacttagcggcgaccccgcaagtggttagtgcggcgttggttgtggagcgcgataaggacaatcctcattccgcgcacccccaccctgtgctggcttggcccgggagagagcagggaggagaggcccccgagccgaacggtggcccaaggcccccgacgaccggagcaggccctctgcccgcttgtcagacggtgccaggtgcccccgacccccaggatggcccgagggccactgcgggaaggccgcacctatcgccctctgaccccgaggctaaccctgtgccgactcgacccgggagagagcagggagaagaggcccccgagccgaacggtggcctaaggcccctgacgaccggagttggccctttgcccgcttgtccgacgacgccaggagcccccgacccccaggacggccccgaggccactgtgggaaggccgcccctgtcgtcctccgaccccgaggtcgtcggcacagaagacgagtgcaccccgcgaggccgcttggacaaagagcgccccagggatgtggcccctagcgaagaggatcggccccaccgaaaggtgcagcggcccgtctactttgttagtgaggccctccgggacgccaagacccgataccctcaggcccagaagatgctttacgctattctgatggcttcgaggaaactgcgccattatttccaggcgcatcgggtcacggtggttacgtcttaccccctcggccaaatcttgcataatcgagagggtactggacgggtggtgaaatgggcaatcgaactttctgagtttgatttgcactttgaaccacgccacgctatcaagagccaggccctcgccgattttgtggcagagtggaccccagctcccgagcccgtctcagtccccgaggccagctcgggcccctcgcagctgcctcacaccgcccactgggtgatgcagttcgacggctccctgtctcttcagggcgccggtgcgggggtcacgttgacctcgccgagcggagacgtcctcagatatttggttcgccttgactttcgggcgaccaataatatggcagagtacgagggactccttgcgggactcagggtggtagctggactggggatccgccgcctcctggtgttaggcgactcccagctggtcgttaaccaggtctacaaggagtaccggtgctctgacccgcagatggacgcttacgtgcgccaagtacggcgtatggagcgccattttgacgggatagagcttcggcacgtgcccagacgggataacacggttgccgacgaactctcacggctcgcttcctcgcgagcccagaccccaccgggcgcctttgaagaaaggcttgcccagccgtcggcgcgacccgaccccttaggggagacggacgcgcctgacaggcccccgatgcccgtcggagtccaggcctcgggacccgaggggagcgctcccagctcccttagattgattgcttggatcgctgagatacaagcatacctcacagataagactctacccgaggaccgcgaagggagtgaacgcgtccagcgcatctccaaacgctacgtgctggtagaagggaccctctatcggcgcgcggctaacggaatcctcctgaagtgcattcctcgggaacaaggcgtcgagcttcttgccgatatccatgaaggcgaatgcggagcccactccgcctcgcgcaccttggttggcaaagcctttcaacaaggtttctattggccgacagctctcaatgatgcggtcgacctggtccggcgatgcagagcgtgtcaattccacgccaagcaaatccatcagccggcccaggccctgcagatcataccactttcatggccatttgctgtctggaggctcgatatcctgggaccgtttaggcgggccccgggcgggtttgagtatctgtatgtcgcgatcgacaagttcactaagtggcccgaggcttatccggtcgtcaagatcgataagcactccgcacttaaattcattaagggcatcacagcccggtttggagtgcctaactgtattattacggataacggcacccaattcactagtgaacttttcggcgattactgcgaagacatgggcatcaagctctgcttcgcctcacctgcccaccccagaagcaacggccaagtggagcgcgccaatgcggaaatcctcagaggccttaaaaccaagaccttcaacatcctcaagaagcacggcgattcgtggatcgaggagttgccagcggtgctctgggcgaaccgaaccacgccaagccgagcaaccggggaaacgcctttcttcctcgtctacggcgcggaagcggttctcccatccgagctcaccctgaggtcccctcgggccaccatgtactgcgaggctgatcaagatcagcttcgcagagatgacctcgactacttggaagagcgaaggcggcgcgcggccctccgagccgcgcgctaccagcagagcctgcggcgctaccatcagcgccacgtccgggcccgatcactctgcgtcgacgacctcgtcctacgccgcgtccaaacgcgtgctggattgagcaagatctcaccaatgtgggagggtccatatcgagtgatcggcgtcccctggccgggctccgttcggctggccacgggcgacggcacagagctgcctaacccgtggaacatcgaacaccttcgtcgcttctacccctaa

SEQ ID NO: 66199 - DNA, 5874 bp, Oryza sativa
  Clone ID: PAT_MRT4530_67173C.1
atggccgagcaagcaaacgcgcccaacctttctccgagcatcagcggagacgacggggagccaaacccacgccgtcgagctcgtactccaccgccccctccacgccaaagtcctaggcgggaggaggcgctcaagagggtcgaaggatccgcgacttcgacatccacgggtgatggagaagggcggcgagatggggagcgtcgcatcctcgtctacggtgacggcagcacgccccagggcacgctccaagctgcgggcgcgctcctacgtcacccgcccgtcgtccctgacccggagtctccagcccaacgttggctggacgacgttgccaaattggtcatgacggcgcggcagcgcctagatgctggtggacggacctccgccacaaagacctctggtactgctgccaccggctccgcgtcgtcaagacgaagggcgcggcgagcggcggccgctgttcgccattcggccgccactccttcgtcaacgcctccgacccgggaagatccgcgtggggggccggacgtccgcaccagcatcgagcgccggcgtaatggccgacgtgctgcccacgcaacggagggcgcctcctcgtccagagtgtcacctcaacacggacgcggggatcagccctccgtgcccctggttggtggtgtcggctgtagagcctttgtggcgagtcttcggaatgtccgttggcccccaaggttccggcccaccatcgccgaaaaatatgacgggagcgtcaaccccgccgagtttctccaggtctacacgaccgggatcgaggccgctgggggtgacgacagggtcatggcgaatttccttcccatggccctgaaggggcaggcgcggggttggctaatgaacttgccacccgcatctgtccactcttgggaggatttgtgccaacagttcactatgaactttcaaggcacatatccgcgcccaggtgaggaagcggacttgcacgcagtacagcgaagggatgatgagtcacttcgctcgtacattcagcggttctgtcaagtccgcaacaccataccatgcatccctgcacacgcggtgatctacgcgttcagggggggtgtgcggcacaaccgcatgctcgaaaaaatcgcctccaaagagccccagactaccgcggagctttttcagctcgcggaccgagtggctcgtaaggaggaggcatggacccggaacccctccggttccggtgtggcagcttcggccgcccccggatccgctgctcagacagggcgacgtgacaggaggaggaagaagaggtcagcccattccgacaacgagggtcatgtcctcgccgtcgagggcgcttcgcgggccacccgaaaggggaggcctgcgagcgacaaaaagaagaaggccagcgctcctagcagggagcgcccaaccggcaagtggtgcaccgtccacaacacctcccttcacgacctcgcggactgccgcgcagtcaaaagtttggctgagcggacgaggaagtgggaggaggagaggaggcaggagcgccgtgagggcaagtccccggcggttccttccggcaatcggcgaagtgaggccaagcagaaggcccccgccgaggacatcgatgatggcgatgatgacctaggtttccaagagcctggggccactattgccactgtcgatgggggagcgtgtgctcacgtttctcgccggagcctcaaggccatgaagcgagagcttctggccgcgacccctactcatgaggcgacgcgccgggcgcgatggtcggaggttgccctcaccttcgaccagaccgaccaccccctgtgcgttgcccggggaggacagatcgcaatggtggtttcccccactatttgcaacgtgaagctaaggcgtgtcctcattgatgggggagcagccctcaacatcctttcccccgcagcctttgatgctatcaaggccccggggatggtgctccggccgtcccagccgattatcggtgtgacgccgggtcacacttggccgttaggtcatattgacctcccagtcaccttcggtggatccgccaatttccgcacggagctggtgagctttgatgtggcggacctcagtctgccctacaacgcggtcctagggaggcccgcgttggtgaagttcatggcggcggtccactatgcctacctccagatgaagatgccgggccatggcgacctcaaagtcgcgctcgcttgtatggagcagcgcgcggaccacctcgccgctgcgtccaagcccgagggtggcgacgaaaggcttagcacctctgtccccgccgccccgaggcagcggatgatcacatgcgacgaggtcccggtcaaggaggttgccctgggcgacggcccaccggcggacatgcccggggtccccagggaggtgattgagcaccgtctcgccgtgcggccgggcgcaaggccagtccggcagaaagtgcggcggcaggccccggaacgtcaagccttcatccgcgaggaggtggcgcgacttctggaggccggattcatccgcgaggtcatccatccggagtggatggcgaacccggtcgtcgttcccaaggcgaacggcaagcttcggatgtgcatcgactacaccgaccttaacaaggcatgtcctaaggacccttaccccctgcctcgcatagatcagattgtcgactccactgcggagtgcgaccttttgtgttttttagatgcatactctggttaccatcagattcgcatggctagggaggatgaggaaaaaactgcgttcattacccccataggaacttattgttatacgacaatgcccttcgggttaaataatgcaggtcctacttttcagcgtactactcgaatttctttgggtaaccaaataggacgtaatgttgaggcttatgtcgatgacttggttgtaaagacgcgcaaccaagagaccttactctcggatctagcggaaacttttgagagtctccgctccgcccgcatgaaactgaatcccgataagtgcgtgttcggtgtacctgcgggcaagcttctcgggttcttggtctctgcccgaggcatcgaggccaaccccgagaagatacgagctatagagcggatgcgccccccagcaaacttagggatgtgcaatgcgtcaccggttgcgtatctcagctctcccccagttctggtcgcccctgagccaaatgagcccttgctactctacttagcggcgacaccgcaagtagttagtgcagcattggttgtggagcgcgatgaggaaaatcctcattccgcgcatccccaccctgtgctggcttggcccgggagagagcagggaggagaggcccccgagccaaacggtggcccaaggcccccgacgaccggagctggttctctgcccgcttgtcagacggtgccaggtgcccccgacccccaggatggcccggcggccactgcgggaaggccgcacctatcatcctctgaccccgaggctaaccctgtgctgactcgacccgggagagagcagggagaagaggcccccgagccgaacggtggcttaaggcccctgacgatcggagttggcctctcgcccgacagccccgaggccactgtgggaaggccgcccctgtcgtcctccgaccccgaggtcgtcggcacagaagacaagtgcgccccgcgaggccacttggacgaagaacgcccctgggatgcggcccctggcgaagaggatcggccccaccgaaaggtgcagcggcccgtttacttcgttagtgaggccctccgggacgccaagacccgataccctcaggcccagaagatgctttacgctattctgatggcttcgaggaaactgcgccattattttcaggcgcatcgggtaaccgtggttacgtcttaccccctcggtcaaatcttgcataatcgagagggtacaggacgggtggtaaaatgggcaatcgaactttctgagtttgatttgcactttgaaccacgccatgctatcaagagccaggcccttgccgattttgtggcagagtggaccccagcacccgagcccgtctcaatccccgaggctagctccgacccctcgcagctgcctcacaccgcccattgggtgatgcagttcgacggctccctgtctcttcagggcgtcggtgcgggggtcacgttgacctcgccgagcagagacgtcctcagatacttggttcgccttgactttcgggcgaccaataatatggcagagtacgagggactccttgcgggactcagggtggcagctggactggggatccgccgcctccttgtgttaggcgactcccagctggtcgttaaccaggtctgtaaggagtaccggtgctctgacccgcagatggacgcttacgtgcgccaggtacggcgtaaggagcgctattttgacgggatagagcttcggcacgtgcccagacgggataacatggttgccgacgaactctcacggctcgcttcctcgcgagcccagaccccaccgggcgcctttgaagaaaggcttgcccagccgtcggcgcgacctgaccccttaggggagacggacgcgcctgaccggcccccgaggcccgtcggagtccaggcctcgggacccgaggggagcgttcccagctcccttagattgattgcttggatcactgagatccaagcatacctcacagataagactctacccgaggatcgcgaagggagtgaacgcgtccagcgcatttccaaacgctacgtgctggtagaagggaccctctatcggcgcgcggctaatggaatcctcctgaagtgcattcctcgggaacaaggcgttgagcttctcaacgatatccatgaaggcgaatgcggagcccactccgcctcgcgcaccttggttggtaaaggctttcgtcaagttttctattggccgaccgctctcaatgatgcagtggatctggtccggcggtgtagagcgtgtcaattccacgccaagcgaatcaatcagccggcccaggccctgcagaacatacctctttcatggccatttgctgtctgggggctcgatatcctgggaccgtttaggcgggccctgggtgggtttgagtacctgtatgtcgcaatcgacaaattcactaagtggcccgaggcttatccggtcatcaagattgataagcactccgcacttaaattcattaagggcatcacagcccggtttggagtgcctaaccgtattattacggataacggcacccaattcactagtgagcttttcggtgactactgcgaagacatgggcatcaagctctgcttcgcctcacctgcccaccccagaagcaatggccaagtggagcgcgccaatgcagaaatcctcagagcccttaaaaccaagaccttcaacatcctcaagaagcacggcaattcgtggatcgaggagttgccagcggtgctctgggcaaaccaaaccacaccaagccgagcaaccggggaaacgcctttcttcctcgtctacggcgcggaagcggttctcccatccgagctcaccctgaggtcccctcgggccaccatgtactgcgaggctgatcaagatcagcttcgcagagatgacctcgattacttagaggagcgaaggcggcgcgcggccctccgagccgcgcgctaccaacagagcctgcggcgctaccatcagcgccacgtctgggcccgatcactctgcgtcgacgacctcgtcctacgccgcgtccaaacgcgtgctggattgagcaagctctcaccaatgtgggagggtccgtatcgagtgatcggcgtcccccggccaggctccgttcggctggccacgggctacggcacagagctgcctaacccatggaacatcgaacaccttcgtcgcttctacccctaa

SEQ ID NO: 66200 - DNA, 3045 bp, Oryza sativa
  Clone ID: PAT_MRT4530_67174C.1
atgcccggggtccccagggaggtgattgagcaccgtcttgccgtgcgatcgggcgcaaggccggtccggcagaaagtacggcggcaggccccggaacgtcaagccttcatccgcgaggaggtggcgcgacttttggaggccggattcatccgcgaggtcatccatccggagtggctggcgaacccagtggtcgttcccaaggcgaacggcaagcttcggatgtgcatcgactacaccgaccttaacaaggcatgtcctaaggacccttaccccctgcctcgcatagatcagattgtcgactccacagcgggccaaataggacgtaatgttgaggcttatgttgatgacttggttgtaaagacgcgcaaccaagagaccttactctcggatctagcggaaacttttgagagtctccgctccgcccgcataaaactgaaccccgataagtgcgtgttcggtgtacctgcgggcaagcttctcgggttcttggtctctgcccgaggcatcgaggccaaccccgagaagatacgagctatagagcagatgcgcccccccagcaagcttagggatgtgcaatgcgtcaccggttgcatggccgccctaagtcggttcatatcgaggctgggagagaagacgctacccttatttaagctcctcaaacgctccgggccgtttacttggacggaggaagctgaacgtgccctcactcagttgaaggcgtatctcagctctcccccagttctggtcgccccggagccaaatgaacccttgctactctacttagcggcgaccccgcaagtgacggtgccaggtgcccccgacccccaggatggcccgagggccactgcgggaaggccgcacctatcgccctctgaccccgaggctaaccctgtgccgactcgacccgggagacagcagggagaagaggcccccgagccgaacggtggcctaaggcccctgacggccggagttggccctttgcccgcttgtccaacgacgccaggagcccccgacccccaggacggccccgaggccactgtgggaaggccgcccctgccgtcctccgaccccgaggtcgtcggcacagaagacgagtgcaccccgcaaggccgcttggacaaagagcgccccagggatgtggcccctagcgaagaggatcggccccaccgaaaggtgcagcggcccgtctactttgttagtgaggccctccaggacgccaagacccgataccctcaggcccagaagatgctttacgctattctgatggcttcgaggaaactgcgccattatttccaggcgcatcgggtcacggtggttacgtcttaccccctcggccaaatcttgcataatcgagagggtactggacgggtggtgaaatgggcaatcgaactttctgagtttgatttgcactttgaaccacgccacgctatcaagagccaggccctcgccgattttgtggcagagtggaccccagcacccgagcccgtctcagtccccgaggccagctcgggcccctcgcagctgcctcacaccgcccactgggtgatgcagttcgacggctccctgtctcttcaaggcgccggtgcgggggtcacgttgacctcgccgagcggagacgtcctcagatatttggttcgccttgactttcgggcgaccaataatatggcagagtacgagggactccttgcgggactcagggtggcagctggactgggaatccgccgcctcctggtgttaggcgactcccagctggtcgttaaccaggtatgtaaggagtaccggtgctctgacccgcagatggacgcttacgtgcgccaagtacggcgtatggagcgccattttgacgggatagagcttcggcacgtgcccagacgggataacacgattgccgacgaactctcacggctcgcttcctcgcgagcccagaccccaccgggcgcctttgaagaaaggcttgcccagccgtcggcgcgacccgaccccttaggggagacggatgcgcctgacaggcccccgaggcccgtcggagtccaggcctcgggacccgaggggagcgctcccagctcccttagattgattgcttggatcgctgagatccaagcatacctcacagataagactctacccgaggaccgcgaagggagtgaacgcgtccagcgcatctccaaacgctacgtgctggtagaagggaccctctatcggcgcgcggctaacggaatcctcctgaagtgcattcctcgggaacaaggcgtcgagcttcttgccgatatccatgaaggcgaatgcggagcccactccgcctcgcgcaccttggttggcaaagcctttcgacaaggtttctattggccgacagctctcaatgatgcggtcgacctggtccggcgatgcagagcgtgtcaattccacgccaagcaaatccatcagtcggcccaggccctgcagatcataccactttcatggccatttgctgtctgggggctcgatatcctgggaccgtttaggcgggccccgggcgggtttgagtatctgtatgtcgcgatcgacaagttcactaagtggcccgaggcttatccggtcgtcaagatcgataagcactccgcacttaaattcattaagggcatcacagcccggtttggagtgcctaaccgtattattacggataacggcacccaattcactagtgaacttttcggcgattactgcgaagacatgggcatcaagctctgcttcgcctcacctgcccaccccagaagcaacggccaagtggagcgcgccaatgcggaaatcctcagaggccttaaaaccaagaccttcaacatcctcaagaagcacggcgattcgtggatcgaggagttgccagcggtgctctgggcgaaccgaatcacaccaagccgagcaaccggggaaacgcctttcttcctcgtctacggcgcggaagcggttctcccatccgagctcacccagaagtcccctcgggccaccatgtactgcgaggctgatcaagatcagcttcgcagagatgacctcgattacttggaagagtga

SEQ ID NO: 66201 - DNA, 551 bp, Oryza sativa
  Clone ID: PAT_MRT4530_67175C.1
atttttatgccttcatattctgattgtctaatggctctaaaacaacagacgtttcatccctacgaaaataggtggcctcatcaggcgaattgctccctatgcaacctgacatttcaagatgacacccaacctttttgttcaatgtgctttcacaaacaggatttggagattgctcaggagctaggtgaatgttggctttccgcttcccagtgacctcaatgtagacttggctgattggcggatggcttcaaggagaagcttcagagattatctcagaaaagttttcggtacactcttcttcttcagagattgtctcagcaagttgtatggttgtgcagctctttggtgacatcaaagaaaaaatcacaatctggagggaggcaggcttcatggtaggcgaaaaacgattggcattattccttttgcagttttttctctcccgctctttgtaaccggtttcgacaacttcgtgtggacgcttagtttgtaacaccatctcataatcttaatgaatttgcttagcctactcttgggccagtctggcttggaat

SEQ ID NO: 66202 - DNA, 5964 bp, Oryza sativa
  Clone ID: PAT_MRT4530_67176C.1
atggctgaacaagcaaaggcgcacaacctctctccgagtgttagcggtgacgaaggggagccgaacccacgccgtcgagctcgtactccaccgccccctccacgccaaagtcctaggcgggaggaggcgctcgagagagtcgaaggatccgcgacttcgacatccacgggtgatggggaagggcggcgagatggggagcgtcgcctcctcgtctacggcgacggcagcacgccccagggcgcgctccaagctgcgggcgcgctcctacgtcacccgcccattgtccctgacccggagtctccagcccaacgttggctggacgacgtggccaacttggtcatgacggcacggcagcgcctaggtgctggtgggcggtcctccgccaccaaaacctctggcgctgctaccaccggctccgtgtcgtcaaggcgaagggcgcggcgagcggcggcggttgctcgccattcggccgccactccttcgtcaacgcctccgacccaggaagatctgcgtggggtgccggatgcccgcatcagtatcgagcgccggcgtaatggccgacgtgctgcccacgcaacggagggcgcctcctcgtccggagtgtcacatcaacacggacgcggggatcagccctccgtgcccccggttggtggtgtcggctgtagagcctttgtggcgagccttcggaacgtccattggcccccaaggttccggcccaccatcgccgaaaaatatgacgggagcgtcaaccccgtcgagtttctccaggtctacacgaccgggatcgaggccgccgggggtgacgacaggatcatggcgaatttctttcccatggccctgaagggacaggcacggggttggctaatgaacttgccacccgcgtccgtccactcttgggaggatttgtgccaacagttcaccatgaactttcaaggcacatatccgcgcccaggggggggtgtgcggcacaaccgcatgctcgaaaagatcgcctccaaagagccccagactaccgcggagctttttcagcacgcggaccgagtggctcgtaaggaagaggcatggacctggaacccctccggttccagtgtggcagcttcggccgcccccggatccgctgctcggacagggcggcgtgacaggaggaggaagaagaggtcagcccattccgacgacgagggtcatgtcctcgccgtcgagggcgtttcgcgggccacccgaaaggggaggcctgcgagcgacaaaaagaaggaggccggcgctcccagtagggagcgcccaaccggcaagtggtgcatcgtccacaacacctcccttcacgacctcgcggattgccgcgcagtcaaaactttggctgagcggacgaggaagtgggaggaggagaggaggcaggagcgccgagagggcaagtccccggcggttccttccggcaatcggcgaagtgaggccaagcagaaggcccccgccgaggacatcgatgacggcgatgatgacctaggtttccaagagcctggggccaccattgccactgtcgatgggggagcgtgtgctcacgtttctcgccggagcctcaaggccatgaagcgagagcttctggccgcggcccctactcatgaggcgacgcgccggacgcggtggtcggaggttgccctcacctttgaccagaccgaccacccaccgtgcgttgcccggggaggacagatcgaaatggtggtttcccccactgtttgcaacgtgaagctggggcgtgtcctcattgatgggggagcagccctcaacatcctttcccccgcagcctttgacgctatcaaggccccggggatggggctccggccgtcccagccgattatcggtgtgacgccgggtcacacttggccgctaggtcctatcgacctcccggtcaccttcggtggatccgccaactttcgcacggagcgggtgaactttgatgtggcggacctcagtctgccctacaatgcggtcctagggaggcccgcgttggtgaagttcatggcggcagtccactacgcctatctccagatgaagatgccgggccccggtggccccatctctgtccatggcgacctcaaagtcgcgcttgcttgtatggagcagcgcgcggaccacctcaccgccgcgtccaagcccgagggaggcgacgagaggcttggcacctccgcccccgccgccccgaggcagcggatagtcacatgcgacgaggtcccggttaaggaggaagacgcgctcgtctctttcctgcgggcaaacgctgacgtcttcgcatggagaccggcggatatgcccggggtccccagggaggtgattgagcaccgtctcgccgtgcggtcgggcgcaatgccggtccggcagaaagtacggcggcaggccccggaacgtcaagccttcatccgcgaggaggtggcgcgacttctggaggccggattcatccgcgaggtcatccatccggagtggctggcgaacccggtggtcgttcccaaggcgaacggcaagcttcggatgtgcatcgactacaccgaccttaacaaggcatgtcctaaggacccttaccccctgcctcgcatagatcagattgtcgactccacagcggggtgcgaccttttgtgttttctagatgcatactctggttaccatcagattcgcatggctagggaggatgaggaaaaaactgcattcattacccccataggaacttattgttatacgacaatgcccttcgggttaaataatgcaggtcctacttttcaacgtactactcggatttctttgggtagccaaataggacgtaatgttgaagcttatgtcgatgacttggttgtaaagacgcgcaaccaagagaccttactctcggatctagcggaaacttttgagagtctccgctccacccgcataaaactgaaccccgataagtgcgtgttcggtgtacctgcgggcaagcttctcgggtttttggtctctacccgaggcatcgaggccaaccccaagaagatacgagctatagagcggatgcgcccccccagcaagcttagggatgtgcaatgcgtcaccggttgcatggccgccctaagtcggttcatatcgaggctgggagagaaggcgctacccttatttaagctcctcaaacgctccgggccatttacttggacggaggaagctgaacgtgccctcactcagttgaaggcgtatctcagctctcccccagttctggtcgcctcggagccaaatgaacccttgctactctacttagcggcgaccccgcaagtggttagtgcggcgttggttgtggagcgcgatgaggacgatcctcattccgcgcacccccaccctgtgctggcttggcccgggagagagcagggaggagaggcccccgagccgaacagtggcccaaggcccccgacgaccggagcaggccctctgcccgcttgtcagacggtgccaggtgcccccgacccccaggatggccagagggccactgcgggaaggccgcacctatcgccctctgaccccgaggataaccctgtgccgactcgacccgggagagagcagggagaagaggcccccgagccaaacggtggcctaaggcccctgacgaccggagttggccctttgcccgcttgtccgacgacgccaggagcccccgacccccaggacggccccgaggccactgtgggaaggccgcccctgtcgtcctccgaccccgaggtcgtcggcacagaagacgagtgcgccccgcgaggccgcttggacaaagagcgccccagggatgtggcccctagcgaagaggatcggccccaccgaaaggtgcagcggcccgtctactttgttagtgaggccctccgggacgccaagacccgataccctcaggcccagaagatgctttacgctattctgatggcttcgaggaaactgcgccattatttccaggcgcatcgggtcacggtggttacgtcttaccccctcggccaaatcttgcataatcgagagggtactggacgggtggtgaaatgggcaatcgaactttctgagtttgatttgcactttgaaccacgccacgctatcaagagccaggccctcgccgattttgtggcagaatggaccccagctctcgagcccgtctcagtccccgaggccagctcgggcccctcgcagctgcctcacaccgcccactgggtgatgcagttcgacggctccctatctcttcagggcgccggtgcgggggtcacgttgacctcgccgagcggagacgtcctcagatatttggttcgccttgactttcgggcgaccaataatatggcagagtacgagggactccttgcgggactcagggtggcagctggactggggatccgccgcctcctggtgttaggcgactcccagctggtcgttaaccaggtctgtaaggagtaccggtgctctgacccgcagatggacgcttacgtgcgccaagtacggcgtatggagcgccattttgacgggattgagcttcggcacgtgcccagacgggataacacggttgccgacgaactctcacggctcgcttcctcgcgagcccagaccccaccgggcgcttttgaagaaaggcttgcccagccgtcggcgcgacccgaccccttagaggagacggacgcgcctgacaggcccccgaggcccgtcggagtccaggcctcgggacccgaggggagcgctcccagctcccttagattgattgcttggatcgctgagatccaagcatacctcacagataagactctacccgaggaccgcgaagggagtgaacgcgtccagcgcatctccaaacgctacgtgctggtagaagggaccctctatcggcgcgcggctaacggaatcctcctgaagtgcattcctcgggaacaaggcgtcgagcttcttgccgatatccatgaaggcgaatgcggagcccactccgcctcgcgcaccttggttggcaaagcctttcgtcaaggtttctattggccaacagctctcaatgatgcggtcgacctggtccggcgatgcagagcgtgtcaattccacgccaagcaaatccatcagccggcccaggccctgcagatcataccactttcgtggccatttgctgtctgggggctcgatatcctgggaccgtttaggcgggccccgggcgggtttgagtatctgtatgtcgcgatcgacaagttcactaagtggcccgaggcttatccggtcgtcaagatcgataagcactccgcacttaaattcattaagggcatcacagcccggtttggagtgcctaaccgtattattacggataacggcacccaattcactagtgaacttttcggcgattactgcgaagacatgggcatcaagctctgcttcgcctcacctgcccaccccagaagcaacggccaagtggagcgcgccaatgcggaaatcctcagaggccttaaaaccaagaccttcaacatcctcaagaagcacggcgattcgtggatcgaggagttgccagcggtgctctgggcgaaccgaaccacgccaagccgagcaaccggggaaacgcctttcttcctcgtctacggcgcggaagcggttctcccatccgagctcaccctgaggtcccctcgggccaccatgtactgcgaggctgatcaagatcagcttcgcagagatgacctcgactacttggaagagcgaaggtggcgcgcggccctccgagccgcgcgctaccagcagagcctacggcgctatcatcagcgccacgtccgggcccgatcactctgcgtcgacgacctcgtcctacgccgcgtccaaacgcgtgctggattgagcaagctctcaccaatgtgggagggtccgtatcgagtgatcggcgtcccccggccgggctccgttcggctggccacgggcgacggcacagagctgcctaacccgtggaacatcgaacaccttcgtcgcttctacccctaa

SEQ ID NO: 66203 - DNA, 4953 bp, Oryza sativa
  Clone ID: PAT_MRT4530_67177C.1
atgacggcacggcagcgcctaggtgctggtgggcggtcctccgccaccaagacctctggcgctgctaccaccggctccgtgtcgtcaaggcggagggcgcggcgagcggcggcggttgctcgccattcggccgccactccttcgtcaacgcctccgacccaggaagatctgcgtggggggccggatgcccgcatcagtatcgagcgccggcgtaatggccgacgtgctgcccacgcaacggagggcgcctcctcgtccggagtgtcacatcaacacggacgcggggatcagccctccgtgcccccggttggtggtgtcggctgtagagcctttgtggcgagccttcggaacgtccgttggcccccaaggttccagcccaccatcgccgaaaaatatgacgggagcgtcaaccccgccgagtttctccaggtctacacgaccgggatcgaggccgccgggggtgacgacagggtcatggcgaatttctttcccatggccctgaagggacaggcacggggttggctaatgaacttgccacccgcgtccgtccactcttgggaggatttgtgccaacagttcaccatgaactttcaaggcacatatccgcgcccaggggggggtgtgcggcacaaccgcatgcttgaaaagatcgcctccaaagagccccagactaccgcggagctttttcagctcgcggaccgagtggctcgtaaggaagaggcatggacctggaacccctccggttccggtgtggcagcttcggccgcccccggatctgatgctcggacagggcggcgtgacaggaggaggaagaagaggtcagcccattccgacgacgagggtcatgtcctcgccgtcgagggcgcttcgcgggccacccgaaaggggaggcctgcgagcgacaaaaaggaggccggcgctcccagtagggagcgcccaaccggcaagtggtgcatcgtccacaacacctcccttcacgacctcgcggactgccgcgcagtcaaaagtttggctgagcggacgaggaagtgggaggaggagagaaggcaggagcgccgagagggcaagtccccggcggttccttccggcaatcggcgaagtgaggctaagcagaaggcccccgccgaggacatcgatgacggcgatgatgacctaggtttccaagagcctggggccaccattgccactgtcgatgggggagcgtgtgctcacgtttctcgccggagcctcaaggccatgaagcgagagcttctggccgcggcccctactcatgaggcgacgcgccgggcgcggtggtcggaggttgccctcaccttcgaccagaccgaccacccaccgtgcgttgcccggggaggacagatcgcaatggtggtttcccccactgtttgcaacgtgaagctggggcgtgtcctcattgatggaggagcagccctcaacatcctttcccccgcagcctttgacgccatcaaggccccggggatggtgctccggccgtcccagccgattatcggtgtgacgccggggcacacttggccgctaggtcatatcaacctcccggtcaccttcggtggatccgccaacttccgcacggagcgggtgaactttgatgtggcggacctcagtctgccctacaacgcggtcttagggaggcccgcgttggtgaagttcatggcggcggtccactacgcctacctccagatgaagatgccgggccccggtggccccatctctgtccatggcgaccttaaagtcgcgcttgcttgtatggagcagcgcacggaccacctcaccgccgcgtccaagcccgagggaggcgacgagaggcttggcacctccgcccccgccgccccgaggcagcggatagtcacatgcgacgaggtcccggaagacgcgctcgtctctttcctgcgggcaaacgctgacgtcttcgcatggagaccggcggatatgcccggggtccccagggagatgattgagcaccgtctcgccgtgcggtcgggcgcaaggccggtccggcagaaagtacggcggcaggccccggaacgtcaagccttcatccgcgaggaggtggcgcgacttctggaggccggattcatccgcgaggtcatccatccggagtggttggcgaacccggtggttgttcccaaggcgaacggcaagcttcggatgtgcatcgactacaccgaccttaacaaggcatgtcctaaggacccttaccccctgcctcgcatagatcagattgtcgactccacagcggggtgcgaccttttgtgttttctagatgcatactctggttaccatcagattcgcatggctagggaggatgaggaaaaaactgcattcattacccccataggaacttattgttatacgacaatgcccttcgggttaaagaatgcaggtcctacttttcaacgtactactcgaatttctttgggtagccaaataggacgtaatgttgaggcttatgtcgatgacttggttgtaaagacgcacaaccaagagaccttactctcggatctagcggaaacttttgagagtctccgctccgcccgcataaaactgaaccccgataagtgcgtgttcggtgtacctgcgggcaagcttctcgggtttttggtctctgcccgaggcatcgaggccaaccccgagaagatacgagctatagagcggatgcgcccccccagcaagcttagggatgtgcaatgcgtcaccggttgcatggccgccctaagtcggttcatatcaaggctgggagagaaggcgctacccttatttaagcttctcaaaagctccgggccgtttacttggacagaggaagctgaacgtgccctcactcagttgaaggcgtatctcagctctcccccagttctggtcgccccagagccaaatgaatccttgctactctacttagcggcgaccccgcaagtggttagtgcggcgttggttgtggagcgcgatgaggacaatcctcattccgcgcacccccaccctgtgctggcttggcccgggagagagcagcgaggagaggcccccgagccgaacggtggcccaaggcccccgacgaccggagcaggccctctgcccgcttgtcagacggtgccaggtgcccccgacccccaggatggcccgagggccactgcgggaaggccgcacctatcgccctctaaccccgaggctaaccctgtgccgactcgacccgggagagagcagggagaagaggcccccgagccgaacggtggcctaaggcccctgacgaccggagttggccctttgcccgcttgtccgacgacgccaggagcccccgacccccaggacggccccgaggccactgtgggaaggccgcccctgtcgtcctccgaccccgaggtcgtcggcacagaagacaagtgcaccccgcgaggccgcttggacaaagagcgccccagggatgtggcccctagcgaagaggatcggccccaccgaaaggtgcagcggcccatctactttgttagtgaggccctccgggacgccaagacccgataccctcaggcccagaagatgctttacgctattctgatggcttcgaggaaactgcgccattatttccaagcgcatcgggtcacggtggttacgtcttaccccctcggccaaatcttgcataatcgagagggtactggacgggtggtgaaatgggcaatcgaactttctgagtttgatttgcactttgaaccacgccacgctatcaagagccaggccctcgccgattttgtggcagagtggaccccagctcccgagcccgtctcagtccccgaggccagctcgggcccctcgcagctgcctcacaccgcccactgggtgatgcagttcgacggctccctgtctcttcagggcgccggtgcgggggtcacgttgacctcgccgagcggagacgtcctcagatatttggttcgccttgactttcgggcgaccaataatatggcagagtacgagggactccttgcgggactcagggtggcagctggactggggatccgccgcctcctggtgttaggcgactcccagctggtcgttaaccaggtttataagactctacccgaggaccgcgaagggagtgaacgcgtccagcgcatctccaaacgctacgtgctggtagaagggaccctctatcggcgcgcggctaacggaatcctcctgaagtgcattcctcgggaacaaggcgtcgagcttcttgccgatatccatgaaggcgaatgcggagcccactccgcctcgcgcaccttggttggcaaagcctttcgacaaggtttctattggccgacagctctcaatgatgcggttgacctggtccggcgatgcagagcgtgtcaattccacgccaagcaaatccatcagccggcccagaccctgcagatcataccactttcatggccatttgctgtctgggggctcgatatcctgggaccgtttaggcgggccccgggcgggtttgagtatctgtatgtcgcaatcgacaagttcactaagtggcccgaggcttatccggtcgtcaagatcgataagcactccgcacttaaattcattaagggcatcacagcccggtttggagtgcctaaccgtattattacggataacggcacccaattcactagtgaacttttcggcgattactgcgaagacatgggcatcaagctctgcttcgcctcacctgcccaccccagaagcaacggccaagtggagcgcgccaatgcggaaatcctcagaggccttaaaaccaagaccttcaacatcctcaagaagcacggcgattcgtggatcgaggagttgccagcggtgctctgggcgaaccgaaccacaccaagccgagcaaccggggaaacgcctttcttcctcgtctatggcgcggaagcggttctcccatccgagctcaccctgaggtcccctcgggccaccatgtactgtgaggctgattaa

SEQ ID NO: 66204 - DNA, 633 bp, Oryza sativa
  Clone ID: PAT_MRT4530_67178C.1
atggcgggttcgtcttcgtcttctccaaagctgctgctgctgcttcttcttcccgtcgtcctcctcgctccgctgctcgaagcacggcgtctgcacgtgctgccgccgctgatgttgccgagcgacggcgtggtcgtcggaggcgccgtcgaggtcgagggcggcaggtcgggtaacgccccgccatcgcctcgtccgcatggccgggtgacgccgctcgccgacggcggcggcggcggcgtgctgaggaggccgccaggacgcggtccgccgccacctggtccaggtggccatgtggggccgctctccggcggcgtgtcgtcgtcggccgggagatcgtcgacgaggccgctgatgatctccgacgacgacggcggcgtgtcggggaggcagtggcctgctcccccgccgccgcctgacccgaacaccccggtgcagccgctctccggcggcgacgggcggccgcggcagctcgcgccgccgccgccgatgggaaacccgccgcccaacacccaccgtcgacgcaccgatcgtcctccccgccggctgccggcggacgacgacatggccggtttgctactccgcgtgatccgcgacgccgtcgaatacatggtcggcgaactcggagcctga

SEQ ID NO: 66205 - DNA, 5973 bp, Oryza sativa
  Clone ID: PAT_MRT4530_67179C.1
atggctgaacaagcaaaggcgcacaacctctctccgagtgttagcggtgacgacggggagccaaacccacgccgtcgagctcgtactccaccgccccctccacgccaaagtcctaggcgggaggaggcgctcgagagggtcgaaggatccgcgacttcgacatccacgggtgatggaggagggcgccgagatggggagcgtcgcctcctcgtctatggcgacggcagcacgccccagggcgcgctccaagctgcgggcgcgctcctacgtcacccgcccgttgtccctgacccggagtctccagcccaacgttggctggacgacgtggccaacttggtcatgacggcacggcagcgcctaggtgctggtgggcggtcctccgccaccaagacctctggcgctgctaccaccggctccgtgtcgtcaaggcggagggcgcggcgagcggcggctgttgctcgccattcggccgccactccttcgtcagcgcctccgacccaggaagatctgcgtggggggccggatgcccgcatcagtatcgagcgccggcgtaatggccgacgtgctgcccacgcaacggagggcgcctcctcgtccggagtgtcacatcaacacggacgcggggatcagccctccgtgcccccggttggtggtgtcggctgtagagcctttgtggcgagccttcggaacgtccgttggcccccaaggttccggcccaccatcgccgaaaaatatgacgggagcgtcaaccccgccgagtttctccaggtctacacgaccgggatcgaggccgccgggggtgacgacagggtcatggcgaatttctttcccatggccctgaagggacaggcacggggttggctaatgaacttgccacccgcgtccgtccactcttgggaggatttgtgccaacagttcaccatgaactttcaaggcacatatccgcgcccaggtgaagaagcggacttacatgcagtccagcgaagggatgatgagtcacttcgctcatacattcagcggttctgtcaagtccgcaacaccataccatgcatccctgcacacgcggtgatctacgcgttcagggggggtgtgcggcacaaccgcatgctcgaaaagatcgcctccaaggagccccagactaccgcggagctttttcagctcgcggaccgagtggctcgtaaggaagaggcatggacctggaacccctccggttccggtgtggcagcttcggccgcccccggatccgctgctcggacagggcggcgtgacaggaggaggaagaagaggtcagcccattccgacgacgagggtcatgtcctcgccgtcgagggcgcttcgcgggccacccgaaaggggaggcctgcgagcgacaaaaagaaggaggccggcgctcccagtagggagcgcccaaccggcaagtggtgcatcgtccacaacacctcccttcacgacctcgcggactgtcgcgcagtcaaaagtttggctgagcggacgaggaagtgggaggaggagaggaggcaggagcgccgagagggcaagtccccggcggttccttctggcaatcggcgaagtgaggccaaacagaaggcccccgccgaggacatcgatgacggcgatgatgacctaggtttccaagagcctggggccaccattgccactgtcgatgggggagcgtgtgctcacgtttctcgccggagcctcaaggccatgaagcgagagcttctggtcgcggcccctactcatgaggcgacgcgccgggcgcggtggtcggaggttgccctcaccttcgaccagaccgaccacccaccgtgcgttgcccgggaaggacagatcgcaatggtggtttcccccactgtttgcaacgtgaagctggggcgtgtcctcattgatgggggagcagccctcaacatcctttcccccgcagcctttgacgctatcaaggccccggggatggtgctccggccgtcccagccgattatcggtgtgacgccgggtcacacttggccgctaggtcatatcgacctcccggtcaccttcggtggatccgccaacttccgcacggagcgggtgaactttgatgtggcggacctcagtctgccctacaacgcggtcctagggaggcccgcgttgcgcgcggaccacctcgccgctgcgtccaagcccgagggtggcgacgagaggcttggcacctccgtccccgccgccccgaggcagcggatagtcacgtgcgacgaggtcccggaagacgcgctcgtctctttcctgcgggcaaacgctgacgtcttcgcatggagaccggcggacatgcccggggtccccagggaagtgattgagcaccgtctcgccgtgcggtcgggcacaaggccggtccggcagaaagtacggcggcaggccccggaacgtcaagccttcatccgcgaggaggtggcgcgacttctggaggccggattcatccgcgaggtcatccatccggagtggctggcgaacccggtggtcgttcccaaggcgaacggcaagcttcggatgtgcatcgactacaccgaccttaacaaggcatgtcctaaagacccttaccccctgcctcgcatagatcagattgtcgactccacagcggggtgcgaccttttgtgttttctagatgcatactctggttaccatcagattcgcatggctagggaggatgaggaaaaaactgcattcattacccccataggaacttattgttatacgacaatgcccttcgggttaaagaatgcaggtcctacttttcaacgtactactcgaatttctttgggtagccaaataggacgtaatgttgaggcttatgtcgatgacttggttgtaaagacgcgcaaccaagagaccttactctcggatctagcggaaacttttgagagtctccgctccgcccgcataaaactgaaccccgataagtgcgtgttcggtgtacctgcgggcaagcttctcgggtatttggtctctgcccgaggtatcgaggccaaccccgagaagatacgagctatagagcggatgcgccccccccccagcaagcttagggatgtgcaatgcgtcaccggttgcatggccgccctaagtcggttcatatcgaggctaggagagaaggcgctacccttatttaagctcctcaaacgctccgggccgtttacttggacggaggaagctgaacgtgccctcactcagttgaaggcgtatctcagctctcccccagttctggtcgccccggagccaaatgaacccttgctactctacttggcggcgaccccgcaagtggttagtgcggcgttggttgtggagcgcgatgagaacaatcctcattccgcgcacccccaccctgtgctggcttggcccgggagagagcagggaggagaggcccccgagccgaacggtggcccaaggcccccgacgaccggagcaggccctctgcccgcttgtcagacggtgccaggtgcccccgacccccaggatggcccgagggccactgcgggaaggccgcacctatcgccctctgaccccgaggctaaccctgtgccgattcgacccgggagagagcagggagaagaggcccccgagccgaacggtggcctaaggcccctgacgaccggagttggccctttgcccgcttgtccgacgacgccaggagcccccgacccacaggacggccccgaggccactgtgggaaggccgcccctgtcgtcctccgaccccgaggtcgtcggcacagaagacgagtgcgccccgcgaggccgcttgggtgaagagcgccccagggatgcggcccctagcgaagaggatcggccccaccgaaaggtgcagcggcccgtctactttgttagtgaggccctccgggatgccaagacccgataccctcaggcccagaaaatgctttacgctattctgatggcctcgaggaaactgcgccattatttccaggcgcatcgggttacggtggttacgtcttaccccctcggccaaatcttgcataatcgagagggtactggacgggtggtgaaatgggcaatcgaactttctgagttcgatttgcactttcaaccacgccacgctatcaagagccaggccctcgccgattttgtggcagagtggaccccagctcccgagcccgtctcagtccccgaggccagctcgggcccctcgcagctgcctcacatcgcccactgggtgatgcagttcgacggctccttgtctcttcagggcgccggtgcgggggtcacgttgacctcgccgagcggagacgtcctcagatatttggttcgccttgactttcgggcgaccaataatatggcagagtacgagggactccttgcgggactcagggtggcagctggactggggatccgccgcctcctggtgttaggcgactcccagctggtcgttaaccaggtctgtaaggagtaccggtgctctgacccgcagatggacgcttacgtgcgccaagtacggcgtatggagcgccattttgacgggatagagcttcggcacgtgcctagacgggataacacggttgccgacgaactctcacggctcgcttcctcgcgagcccagaccccaccgggcgcctttgaagaaagggttgcccagccgtcggcgcgacccgaccccttaggggagacggacgcgcctgacaggcccccgatgcccgtcggagtccaggcctcgggacccgaggggagcgctcccagctcccttagattgattgcttggatcgctgagatccaagcatacctcacagataagactctacccgaggaccgcgaagggagtgaacgcgtccagcgcatctccaaacgctacgtgctggtagaagggaccctctatcggcgcgcggctaacggaatcctcctgaagtgcattcctcgggaacaaggcgtcgagcttcttgccaatatccatgaaggcgaatgcggagcccactccgcctcgcgcaccttggttggcaaagcctttcgacaaggtttctattggccgacagctctcaatgatgcggtcgacctggtccggcgatgcagagcgtgtcaattccacgccaagcaaatccatcagccggcccaggccctgcagatcataccactttcatggccatttgctgtctgggggctcgatatcctgggaccgtttaggcgggccccgggcgggtttgagtatctgtatgtcgcgatcgacaagttcactaagtggcccgaggcttatccggtcgtcaagatcgataagcactccgcacttaaattcattaagggcatcacagcccggtttggagtgcctaaccgtattattacggataacggcacccaattcactagtgaacttttcggcgattactgcgaagacatgggcatcaagctctgcttcgcctcacctgcccaccccagaagcaacggccaagtggagcgcgccaatgcggaaatcctcagaggccttaaaaccaagaccttcaacatcctcaagaagcacgacgattcgtggatcgaggagttgccagcggtgctctgggcgaaccgaaccacgccaagccgagcaaccggggaaacgcctttcttcctcgtctacggcgcggaagcggttctcccatccgagctcaccctgaggtcccctcgggccaccatgtactgcgaggctgatcaagatcagcttcgcagagatgacctcgactatttggaagagcgaaggcggcgcgcggccctccgagccgcgcgctaccagcagagcctgcggcgctaccatcagcgccacgtccgggcccgatcactctgcgtcgacgacctcgtcctataccgcgtccaaacgcgtgctggattgagcaagctctcaccaatgtgggagggtccgtatcgagtgatcggcgtcccccggccgggctccgttcggctggccacgggcgacggcacagagctgcctaacccgtggaacatcgaacaccttcgtcgcttctacccctaa

SEQ ID NO: 66206 - DNA, 978 bp, Oryza sativa
  Clone ID: PAT_MRT4530_6717C.1
atggatgcatcggcttggtttgcaacacctagtggtcagcctgtgcagcatgctgcaaatcaagttgtcccagagcacttggttcatcacgtacaaccagatggcacggtgatacctcaagttattcccgagcatttggagcagtttgggcttaggccgaaagatgctggaaatttataccgacagccatatcctgaatggtttgagagagttcctctacctaaccggtttaaagttccagatttttcaaaattctcagggcaagatagcgcatcaacttatgagcatgttagccgatttttagctcagtgtggtgaagcatcggctgtggatgccttgagggttagccagtgggtgaagaactcagggaaagaggagaggtatgactttgatataaccaaggctgacaaaatttttgacttgctattccgagagaagcagattcaacttcctaccgatcacacaattccatcggctgatgaattgggcaagaaaaggtattgcaagtggcataattctgggtctcatactactaatgattgcaaagtcttcaagcagcagatccaagcggctattaaaggaggcaaaatcaagtttgatgattctaagaggccaatgaaggttgatggcaatcctgtcaatatggtgcatacagcttgccgaacagccgatgggggtcgtgcaaaaggatttcaggtaaattcggctaagattatcaacaaatatcagaggaagtatgacaagcagcaggagaagcattatgaagaagatgatgatggctttgatcctcattggggttgcgagttctttcgattttgttggaatgaaggtatgaggctgccatctattgaggactatcctgggtgcagtgatattgcggagagctcaagccgatcgtttggtaggggcaatcggctaaggcagacaagagttcctgttcatcagagattgggtccagtaaatcaagatcgtggctag

SEQ ID NO: 66207 - DNA, 6047 bp, Oryza sativa
  Clone ID: PAT_MRT4530_67180C.1
atggccgaacaagcaaaggcgcacaacctctctccgagtgttagcggtgacgacggggagctgaacccacgccgtcgagctcgtactccaccgccccctccacgccaaagtcctaggcgggaggaggcgctcgagagggtcgaaggatccgcgacttcgacatccacgggtgatggggaagggcggcgagatggggagcgtcgcctcctcgtctacggcgacggcagcacgccccagggcgcgctccaagctgcgggcgcgctcctacgtcacccgcccattgtccctgacccggagtctccagcccaacgttggctggacgacgtggccaacttggtcatgacggcacggcagcgcctaggtgctggtgggcggtcctccgccaccaagacctctggcgctgctaccaccggctccgtgtcgtcaaggcggagggcgcggcgagcggcggctgttgctcgccattcagccgccactccttcgtcagcgcctccgacccaggaagatctgcgtggggggccggatgcccgcatcagtatcgagcgccggcgtaatggccggcgtgctgcccacgcaacggagggcgcctcctcgtccggagtgtcacatcaacacggacgcggggatcagccctccgtgcccccggttggtggtgtcggctgtagagcctttgtggcgagccttcggaacgtccgttggcccccaaggttccggcccaccatcgccgaaaaatatgacgggagcgtcaaccccgccgagtttctccaggtttacacgaccgggatcgaggccgccgggggtgacgacagggtcatggcgaatttctttcccatggccctgaagggacaggcacggggttggctaatgaacttgccacccgcgtccgtccactcttgggaggatttgtgccaacagttcaccatgaactttcaaggcacatatccgcgcccaggtgaagaagcggacttacatgcagtccagcgaagggatgatgagtcacttcgctcatacattcagcggttctgtcaagtccgcaacaccataccatgcatccctgcacacgcggtgatctacgcgttcagggggggtgtgcggcacaaccgcatactcgaaaagatcgcctccaaagagccccagactaccgcggagctttttcagctcgcggaccgagtggctcgtaaggaagaagcatggacctggaacccctccggttccggtgtggcagcttcggccgcccccggatccgctgctcggacagggcggcgtgacaggaggaggaagaagaggtcagcccattccgacgacgagggtcatgtcctcgccgtcgagggcgcttcgcgggccacccgaaaggggaggcctgcgagcgacaaaaagaaggaggccggcgctcccagtagggagcgcccaaccggcaagtggtgcatcgtccacaacacctcccttcacgacctcgcggactgccgcgcagtcaaaagtttggctaagcggacgaggaagtgggaggaggagaggaggcaggagcgccgagagggcaagtccccggcggttccttccggcaatcggcgaagtgaggccaagcagaaggcctccgccgaggacatcgatgacggcgatgatgacctaggtttccaagagcctggggccaccattgccactgtcgatgggggagcgtgtgctcacgtttctcgccggagcctcaaggccatgaagcgagagcttctggccgcggcccctactcatgaggcgacgcgccgggcgcggtggtcggaggttgccctcaccttcgaccagaccgaccacccaccgtgcgttgcccggggaggacagatcgcaatggtggtttcccccactgtttgcaatgtgaagctggggcgtgtcctcattgatgggggagcagccctcaacatcctttcccccgcagcctttgacgctatcaaggccccggggatggtgctccggccgtcccagccgattatcggtgtgacgccaggtcacaattggccgctaggtcatatcgacctcccggtcaccttcggtggatccgccaacttccgcacggagcgggtgaactttgatgtggtggacctcagtctgccctacaacgcggtcctagggaggcccgcgttagtgaagttcatggcggcagtccactacgcctacctccagatgaagatgccgggccccggtggccccatctctgtccatggcgacctcaaagtcgcgcttgcttgtatggagcagcgcgcggaccacctcaccgccgcgtccaagcccgagggaggcgacgagaggcttggcacctccgcccccgccgccccgaggcagcggatagtcacatgcgacgaggtcccggtcaaggaggttgccctgggcgacggccccgtctctttcctgcgggcaaacgctgacgtcttcgcatggagaccggcggatatgcccggggtccccagggaggtgattgagcaccgtctcgccgtgcggtcgggcgcaaggccggtccggcagaaagtacggcggcaggccccggaacgtcaagccttcatccgcgaggaggtggcgcgacttctggaggccggattcatccacgaggtcatccatccggagtggctggcgaacccggtggtcgttcccaaggcgaacggcaagcttcggatgtgcatcgactacaccgattgtcgactccacagcggggtgcgatcttttgtgttttctagatgcatactctggttaccatcagattcgcatggctagggaggatgaggaaaaaactgcattcattacccccataggaacttattgttatatgacaatgcccttcgggttaaagaatgcaggtcctacttttcaacgtactactcgaatttctttgggtagccaaataggacgtaatgttgaggcttatgtcgatgacttggttgtaaagacgcgcaaccaagagaccttactctcggatctagcggaaacttttgagagtctccgctccgcccgcataaaactgaaccccgataagtgcgtgttcggtgtacctgcgggcaagcttctcgggtttttggtctctgcccgaggcatcgaggccaaccccgagaagatacgagctatagagcggatgcgccccccctagcaagcttagggatgtgcaatgcgtcaccggttgcatggccgccctaagtcggttcatatcgaggctgggagagaaggcgctacccttatttaagctcctcaaacgctccgggccgtttacttggacggaggaagctgaacgtgccctcactcagttgaaggcgtatctcagctctcccccagttctggtcgccccggagccaaatgaacccttgttactctacttagcggcgaccccgcaagtggttagtgcggcgttggttgtggagcgcgatgaggacaatcctcattccgcgcacccccaccctgtgctggcttggcccgggagagagcagggaggagaggcccccgagccgaacggtggcccaaggcccccgacgaccggagcaggccctctgcccgcttgtcagacggtgccaggtgcccccgacccccaggatggcccgagggccactgcgggaaggccgcacctatcgccctctgaccccgaggctaaccctgtgccgactcgacccgggagagagcagggagaagaggcccccgagccgaacggtggcctcaggcccctgacgaccggagttggccctttgcccgcttgtccgatgacgccaggagcccccgacccccaggacggccccgaggccactgtgggaaggccgcccctgtcgtcctccgaccccgaggtcgtcggcacagaagacgagtgcaccccgcgaggccgcttggaccaagagcaccccagggatgtggcccctagcgaagaggatcggccccaccgaaaggtgcagcggcccgtctactttgttagtgaggccctccgggacgccaagacccgataccctcaggcccagaagatgctttacgctattctgatggcttcgaggaaactgcgccattatttccaggcgcatcgggtcacggtggttacgtcttaccccctcggccaaatcttgcataatcgagagggtactggacgggtggtgaaatgggcaatcgaactttctgagtttgatttgcactttgaaccacgccacgctatcaagagccaggccctcgccgattttgtggcagagtggaccccagctcccgagcccgtctcagtccccgaggccagctcgggcccctcacagctgcctcacaccgcccactgggtgatgcagttcgacggctccctgtctcttcagggcgccggtgcgggggtcacgttgacctcgccgagcggagacgtcctcagatatttggttcgccttgactttcgggcgaccaataatatggcagagtacgagggactccttgcgggactcagggtggcagctggactggggatccgccgcctcctggtgttaggcgactcccagctggtcgttaaccaggtctgtaaggagtaccggtgctctgacccgcagatggacgcttacgtgcgccaagtacggcgtatagagcgccattttgacgggatagagcttcggcacgtgcccagacgggataacacggttgccgacgaactctcacggctcgcttcctcgcgagcccaaaccccaccgggcgcctttgaagaaaggcttgcccagccgtcggcgcgacccgaccccttaggggagacggacgcgcctgacaggcccccgatgcccgtcggagtccaggcctcgggacccgaggggagcgctcccagctcccttagattgattgcttggatcgctgagatccaagcatacctcacagataagactctacccgaggaccgcgaagggagtgaacgcgtccaacgcatctccaaacgctacgtgctggtagaacggaccctctatcggcgcgcggctaacggaattctcctgaagtgcattcctcgggaacaaggcgtcgagcttcttgccgatatccatgaaggcgaatgcggatcccactccgcctcgcgcaccttggttggcaaagcctttcgacaaggtttctattggccgacagctctcaatgatgcggtcgacctggtccggcgatgcagagcgtgtcaattccacgccaagcaaatccatcagccggcccaggccctgcagatcataccactttcatggccatttgctgtctgggggctcgatatcctgggaccgtttaggcgggccccgggcgggtttgagtatctgtatgtcgcgatcgacaagttcactaagtggcccgaggcttatccggtcgtcaagatcgataagcactccgcacttaaattcattaagggcatcacagcccggtttggagtgcctaaccgtattattacggataacggcacccaattcactagtgaacttttcggcgactactgcgaagacatgggcatcaagctctgcttcgcctcacctgcccaccccagaagcaacggccaagtggagcgcgccaatgcggaaatcctcagaggccttaaaaccaagaccttcaacatcctcaagaagcacggcgattcgtggatcgaggagttgccagcggtgctctaggcgaaccgaaccacgccaagccgagcaaccggggaaacgcctttcttcctcgtctacggcgcggaagcggttctcccatccgagctcaccctgagctcctctcgggccaccatgtactgcgaggctgatcaagatcagcttcgcagagatgacctcgactacttggaagagcgaaggcggcgcgcggccctccgagtcgcgcgctaccaacagagcctgcggcgctaccatcagcgccacgtccgggcccgatcactctgcgtcgacgacctcgtcctacgccgcgtccaaacgcgtgctggattgagcaagctctcaccaatgtgggagggtccgtatcgagtgatcggcgtcccccggccgggctccgttcggctggccacgggcgacggcacagagttgcctaacgcgtggaacatcgaacaccttcgtcgcttctacccc

SEQ ID NO: 66208 - DNA, 5484 bp, Oryza sativa
  Clone ID: PAT_MRT4530_67181C.1
atgacgacacgacaccgcctaggtgctggtgggcggtcctccgccaccaagacctctggcgctgctaccaccggctacgtgtcgtcaaggcggagggcgcggcgagcggcggcggttgctcgccattcggccgccactccttcgtcagcgcctccgacccaggaagatctgcgtggggggccggatgcccgcatcagtatcgagcgccggcgtaatggccgacgtgctgcccacgcaacggagggcgcctcctcatccggagtgtcacgtcaacacggacgcggggatcagccctccgtgcccccggttggtggtgtcggctgtagagcctttgtggcgagccttcggaacgtccgttggcccccaaggttccggcccaccatcgccgaaaaatatgacgggagcgtcaaccccgccgagtttctccaggtctacacgaccgggatcgaggccgccgggggtgacgacagggtcatggcgaatttctttcccatggccctgaagggacaggcacggggttggctaatgaacttgccacccgcgtccgtccactcttgggaggatttgtgccaacagttcaccatgaactttcaaggcacatatccgcgcccagcggttctgtcaagtccgcaacaccataccatgcatccctgcacacgcggtgatcaacgcgttcaggggggtgtgcggcacaaccgcatgctcgaaaagatcgcctccaaagagccccagactaccgcggagctttttcagctcgcggaccgagtggctcgtaaggaagaggcatggacctggaacccctccggttccggtgtggcagcttcggccgcccccggatccgctgctcggacagggcggcgtgacaggaggaggaagaagaggtcagcccattccgacgacgagggtcatgtcctcgccgtcgagggcgcttcgcgggccacccgaaaggggaggcctgcgagcgacaaaaagaaggaggccggcgctcccagtagggagcgcccaaccggcaagtggtgcatcgtccacaacacctcccttcacgacctcgcggactgccgcgcagtcaaaagtttggctgagcggacgaggaagtgggaggaggagaggaggcaggagcgccgagagggcaagtccccggcggttccttccggcaatcggcgaagtgaggccaagcagaaggcccccgccgaggacatcgatgacggcgatgatgacctaggtttccaagagcctggggccaccattgccactgtcgatgggggagcgtgtgctcacgtttctcgccggagcctcaaggccatgaagcgagagcttcgggccgcggcccctactcatgaggcgacgcgccgggcgcggtggtcggaggtttccctcaccttcgaccagaccgaccacccaccgtgcattgcccggggaggacagatcgcaatggtggtttcccccactgtttgcaacgtgaagctggggcgtgtccttattgatgggggagcagccctcaacatcctttcccccgcagcctttgacgctatcaaggccccggggatggtgctccggccgtcccagccgattatcggtgtgacgccgggtcacacttggccgctaggtcatatcgacctcccggtcaccttcggtggatccgccaacttccgcacggagcggatgaagatgccgggccccggtggccccatctctgtccatggcgacctcaaagtcacgctttcttgtatggagcagcgcgcggaccacctcaccgccgcgtccaagcccgagggaggcgacgagaggcttggcacctccgcccccgccgccccgaggcagcggatagtcacatgcgacgaggtcccggaagacgcgctcgtctctttcctgcgggcaaacgctgacgtctttgcatggagaccggcggatatgcccggggtccccagggaggtgattgagcaccgtctcgccatgcggtcgggcgcaaggccggtccggcagaaagtacggcggcaggtcccggaacgtcaagccttcatccgcgaggaggtggcgcgacttctggaggccggattcatccgcgaggtcatccatccggagtggctggcgaacccggtggtcgttcccaaggcgaacggcaagcttcggatgtgcatcgactacaccgaccttaacaaggcatgtcctaaggacccttaccccctgcttcgcatagatcagattgtcgactccacagcgggggaggatgaggaaaaaactgcattcattacccccataggaacttattgttatacgacaatgcccttcgggttaaagaatgcaggtcctacttttcaacgtactactcgaatttctttgggtagccaaataggacgtaatgttgaggcttatgtcgatgacttggttgtaaagacgcgcaaccaagagaccttactctcggatctagcggaaacttttgagagtctccgctccgcccgcataaaactgaaccccgataagtgcgtgttcggtgtacctgcgggcaagcttctcgggtttttggtctctgcccgaggcatcgaggccaaccccgagaagatacgagctatagagcggatgcgcccccccagcaagcttagggatgtgcaatgcgtcaccggttgcatggccgccctaagtcggttcatatcgaggctgggagagaaggcgctacccttatttaagctcctcaaacgctccgggctgtttacttggacggaggaagctgaacgtgccctcactcagttgaaggcgtatctcagctctcccctagttctggtcgccccggagccaaatgaacccttgctactctacttagcggcgaccccgcaagtggttagtgcggcgttggttgtggagcgcgatgaggacaatcctcattccgcgcacccccaccctgtgctggcttggcccaggagagagcagggaggagaggcccccgagccgaacggtggcccaaggcccccgacgaccggagcaggccctctgcccgcttgtcagacggtgccaggtgcccccgacccccaggatggcccgagggccactgcgggaaggccgcacctatcgccctctgaccccgaggctaaccctgtgccaactcgacccgggagagagcagggagaagaggcccccgagccgaacggtggcctaaggcccctgacgaccggagttggccctttgcccgcttgtccgacgacgccaggagcccccgacccccaggacggccccgaggccactgtgggaaggccacccctgtcgtcctccgaccccgaggtcgtcggcacagaagacgagtgcaccccgcgaggccgcttggacaaagagcgccccagggatgtggcccctagcgaagaggatcggccgcaccgaaaggtgcagtggcccgtctactttgttagtgaggccctccgggacgccaagacccgataccctcaggcccagaagatgctttacgctattctgatggcttcaaggaaactgcgccattatttccaggcgcatcgggtcacggtggttacgtcttaccccctcggccaaatcttgcataatcgagagggtactggacgggtggtgaaatgggcaatcgaactttctgagtttgatttgcactttgaaccatgccacgctatcaagagccaggccctcgccgattttgtggcagagtggaccccagctcccgagcccgtctcagtccccgaggccagctcgggcccctcgcagctgcctcacaccgcccactggggcgccggtgcgggggtcacgttgacctcgccgagcggagacgtcctcagatatttggttcgccttgactttcgggcgaccaataacatggcagagtacgagggactccttgcgggactcagggtggcagctggactggggatccgccgcctcctggtgttaggcgactcccagctggtcgttaaccaggtctgtaaggagtaccggtgctctgacccgcagatggacgcttacgtgcgccaagtacggcgtatggagcgccattttgacgggatagagcttcggcacgtgcccagacgggataacacggttgccgacgaactctcacggctcgcttcctcgcgagcccagaccccaccgggcgcctttgaagaaaggcttgtccagccgtcggcgcgacccgaccccttaggggagacggacgcgcctgacaggcccccgatgcccgtcgaagtccaggcctcgggacccgaggggagcgctcccagctcccttagattgattgcttggatcgctgagatccaagcatacctcacagataagactctacccgaggactgcgaagggagtgaacgcgtccagcgcatctccaaacgctacgtgctggtagaagggaccctctatcggcgcgcggctaacggaatcctcctgaagtgcattcctcgggaacaaggcgtcgagcttcttgccgatatccatgaaggcgaatgcggagcccactccgcctcgcgcaccttggttggcaaagcctttcgacaaggtttctattggccgacagctctcaatgatgcggtcgacctggtccggcgatgcagagcgtgtcaattccacgccaagcaaatacatcagccggcccaggccctgcagatcataccactttcatggccatttgctgtctgggggctcgatatcctgggaccgtttaggcgggccccgggcgggtttgagtatctgtatgtcgcgatcgacaagttcactaagtggcccgaggcttatccggtcgtcaagatcgataagcactccgcacttaaattcattaagggcatcacagcccggtttggagtgcctaaccgtattattacggataacggcacccaattcactagtgaacttttcggcgattactgcgaagacatgggcatcaagctctgcttcgcctcacctgcccaccccagaagcaacggccaagtggagcgcgccaatgcggaaatcctcagaggccttaaaaccaagaccttcaacatcctcaagaagcacggcgattcgtggatcgaggagttgccagcggtgctctgggcgaaccgaaccacgccaagccgagcaaccggggaaacgcctttcttcctcgtctacggcgcggaagcggttctcccatccgagctcaccctgaggtcccctcgggccaccatgtactgcgaggctgatcaagatcagcttcgcagaaatgacctcgactacttggaagagcgaaggcggcgcgcagccctccgagccgcgcgctaccagcagagcctgcggcgctaccatcagcgccacgtccgggcccgatcactctgcgtcgacgacctcgtcctacgccgcgtccaaacgcgtgctggattgagcaagctctcaccaatgtgggagggtccgtatcgagtgatcggcgtcccccggccgggctccgttcagctggccacgggcgacggcacagagctgcctaacccgtggaacatcgaacaccttcgtcgcttctacccctaa

SEQ ID NO: 66209 - DNA, 177 bp, Oryza sativa
  Clone ID: PAT_MRT4530_67182C.1
gggaatcgaccacgtgctgattccttgcgcggagcatggtttgttgaagttgttcgacctgacccccgacctgctccagcggagatgcctagagatgcggacgtggcgccgcgccttcctgcggaggttagtcaatttaataatatcaggtatcagtggcctacctatgatgcttct

SEQ ID NO: 66210 - DNA, 349 bp, Oryza sativa
  Clone ID: PAT_MRT4530_67183C.1
ggcaccggacgggttatatttttcacaagcaaaaaaggggacccagggccatataatcaggattggtacaacttacaaggggggggattggaaaacaaaaggcaacttattatcccaactagcattaacaggggggggggggcctgaagaacccccgccacgttttattttcagcataaacaaagcatcccgggatttccgggtcgggggccatggaataccctggcaagcaaaaggattctactgggtcttggccctgggggggaacagggcgatgacccgggtggtggaaccccccttgttggtgtacccggggacaaggttgacaaagtttttgttaagagcaatt

SEQ ID NO: 66211 - DNA, 2691 bp, Oryza sativa
  Clone ID: PAT_MRT4530_67184C.1
ctgcaggaatcggcacgaggccccccctttttttttttttttttttttttttttttttccaaaattccgcgggtattgcacacagaaccatcagaaaattacatcccagaaagggattaacatttgtgacctaaataaggacaatatttctattctatatggttgtatacaatgtacagcacgtcattttctctgatgttaaattcataccattccacggaaaaaaaaaagagttgctaagctattattatcctgccttgagccgtatctacagtgcaattactgtagtaagatatcgggaccttatgatcttgatcggataggtgctaactcctctaatacacagtactgtcaacctctgcattagaacgtccaatgcagaggatccggattgatgagcaataatggtgcgtactctaacaacgatcttaatcagggatccatcgtgcatacacttgacaaagttgccaagctctgagaagcaaacgtctctctgcaaaaggaatgagggtagctgacggtatgcaaagaacgagacatggtgacggtcaggatcatgcctaggcttcgctgtgtcaaggatctgtgagtacatctcaccatcaagacatggaagagcactctctacacttatagataatccatgatcccatgctgcattcataacctgccatgttaaaccttctggatcagcaaatgcttcattattctcttgaattgtaaattctggtccataacaaacaaactttagaattacggaatgcttcttgagcattctgaacactggagagtatccatctctatttgtagggttgtagaatcctgccgtaagttccgcagcatggcttgcagttctataccaccaatagatagatggaatcttcacaacagtttcgactccatcaaatgcaagagtagcaagtgatagcacctggtccacatgatctatgaggattccagaataccagttaaggaaaaagcgtccatagtagctgtcatagtcacctccgtcacaaaaaaagccagtttcatgaggtcttgaattataatagcccgcattatcaggtccacgggcccaaaacagatgtccccgtgacaatgctgcttgtctaaggttcttttgcatatacctgtcgtaacactgaaactcaccaataccaggatatctccagcccattctttctggacatgaagggtattttagctctccagaaacacccaatccaatttcgatagcagaaataaggccctcttcggtcaggtttctgaattccatatgaaagctcctcatgaaatcaaaatacgccaaggatgacccaatacctcgatgccagttctcccgcgaaggactcgctctttgtcaattccccaggaaagacattccatatttctcctaccttcacgatcagtaaaaaatacatcctggttctcttgtgcaatttccatgacccactttgggagagacacaccaccagatccagtctccccagacccatggaatgacaatacaacctgaacttttagcttgaactctttaatgataccgaaaaggtccctgtaaccagaccactcgtacttgtgaggaatccaggcttccactatcccccaccaacagtcaacgataactccatcaacattcaaagacttcagatgcatcagttctgcacgtatgccctctggatcaatcaattggcaatggctattgataatgcccataggcagagaagcatagactggtatatatggagttctggtgtaatcacctgccagcgctgctgatgctctcgtcagggaaccaatggcggcaataacagcagaaacagcatgggaggaggaagagtgaacggctgcggggactggctcagccccagcggcggcaccggcgcacgccccgaccctgccgtcgccgctcctctctcgctgctcctcttctgggtgtccatcggccgaccctgccatggaaccgcccatgagctggaccaccgtggaaccacacacgagcagcgccgcaagaggaggaggcaagacgacctcaagctccactggctggtgattttccaaacaattcagagagctgacagaatctgaattcccatatttctcattttttatgctttggtctgccaccacaacagagtccaacgatgatggcgataaactatcatctgtttgtagcatagaagcctgcgagtctaatggtgtcccgatggcgtagctgttgagaacactagtaaaagatggggtttcaacagaattaacatgaaaaatccctggcgattggggggtgggagggtggaggggttgcgacgaggcgcggaaggtggtgccgtcgggatgcacggtccaccctgcggcgcgcgcgagggcggcgaggacgtcgttcatgtcggcgcgggcggggagcgggaagttgccgtgctgccgcagcccggacagcatgcggctggtgatggcccggcggtgccgctccctcagcttcgtccgctccttctccctctccctctccctctcgcctccccctccgccgccgccgcgccgccgaggcggaggcgccgcgggggagggggagggggagggggaggtgtcggccgcgacggcgggtgggggtggggtggagacgaggccccgcgggcggcggtgcggcggcgggtccccgtccagcaccggagagtgcgggtgcttcaggctcat

SEQ ID NO: 66212 - DNA, 292 bp, Oryza sativa
  Clone ID: PAT_MRT4530_67185C.1
ataattagtttttttactatttacaagtttgtggaaagaaaacaaagagcaatttaaaaatttaactagcaaaaaccgatggagaggaaactgatgaacactgggcagcccccaaagtgagaatggtcatagcatagcggtatccccccatcggaagacatggaaaaccaagggaggcagaaggattctagcagggccttaggccgagaggaaaaacaagagcctatgacgcggttgaggggaccccaaaggaagacaaaccatgctccaagcgggacaagggggtctttaa

SEQ ID NO: 66213 - DNA, 199 bp, Oryza sativa
  Clone ID: PAT_MRT4530_67186C.1
cccacgcgtccgcccacgcatactaggactcgtatacggacgcgtcatctgccccctatccctccttgtgggttaccttctaatacatgaggtaccacatgctctctacgaggcttaacggactcttctccatcactaacgagacgctaactttcctccccccaactgagttcaatctcaacgaaattacatccagatt

SEQ ID NO: 66214 - DNA, 1350 bp, Oryza sativa
  Clone ID: PAT_MRT4530_67187C.1
atgccgccgccgtcgccgtcgctgcgggatctctccgacgagctcgtcggcgagatcctcgtccgcctcccgcccgacgaccccgcctgcctcctccgcgcctccctcgcctgcaaggtctggcgccgcatcctcgccgaccgcgcactccgccgccgcctccaccgtgctccccccgtcgtcggtttcctccgcatcggcatgggagagggggacatgcgctacggctcccgctacacccccaacaacggcgccgcctcctcccgccgccccgccgccgccggcagccgcgacctcccgctgtggctcgtcctcgactgccgccacggccgcgccctcttcgccacgccatgcccacgccgcgccgccgccgccaccaccagcctaggccacgacctcgtcgtctgggatcccttcacgaacgagcaccgccgcctgccacggccgtcgtcgccactcgcaatcaccggccgcggcttcaacgccgcggtgctctgcgccgccggcggcggcgggggtggttgcgaccaccgcagctgccatggcggcccattcctcgtggccctgatctggagccacagccctagcccgttcctcccgcacctccccggtgccacctccgctcgtgtctactcctccgacacgggggagtggagcgacacgaccaccgtcgaacaccatgacgtgttctactacctcgaggacaggtcgccattgccgtgccgcagcgtcctcgtcggggacacgctctacttcacctggagctccacgcacgccttcgagctccggcttggcggcgggcagcggcggttgtcgatcgtctacggcccgccacgcccgccgccattgatcgaaagcagttcccccattttcatgatgtccatgggtgacgacggcgtgctgcgatgcgtcgaggtggagccggaggacgagaaattgtgcctccgtctccgattacgcctgtggtcgaggaatgtggatgacaacggagtcgcgcagtggatcaggggaagggcaattgagctcgagccgctactccccgatggcgccctccaaactccatggattcccagtagtgtgcagttgctcggcgccgtggagggcaccgatgtcatctttgtgggcacacactcgcctgatcaccctgctgctgtctatatggtccaactcaattcaaggaggtccaggaaggtgtttgacaaatgcacttcagttgttccctacacaagcttctgcattccagctatgagtaattttactattcttgataaggtattgggagataccacattttctagtgtaaaagttggtacctccaagtatatgcggttatttcctcaagtaccataa

SEQ ID NO: 66215 - DNA, 459 bp, Oryza sativa
  unsure (1)..(459): unsure at all n locations
  Clone ID: PAT_MRT4530_67188C.1
gcacgaggcttggccgtgtttcatttctctttccaagtcagcatgattcccaagccccgtgtcagtgcctccgtctcggccgaataaataagcaaagatcggccaaggaagaaatcatcagccctctcttactgctgcctagtccttctccttttctcttgtcctttcttctccttcccttttccccaccgaacgtaacaaggcctgcgtcctgcgtcccccgagagcctccccgtccatacccaatagccagactcgttatgaaatatcgctgatatgcttgaaccgaaacttccaccgtttgacataatctttggatgataccataaatcattctgnccttcccatgccttctccatgtatcccggatgaccgggcactaaccttggtagatcccctcgaccgaatgaaatgccagccatgccacgggaatcccaggatgaacgcgacgaatcgatg

SEQ ID NO: 66216 - DNA, 298 bp, Oryza sativa
  unsure (1)..(298): unsure at all n locations
  Clone ID: PAT_MRT4530_67189C.1
ccaaaacctccngaagagagcaagatgttcggcttcgggcaccacggccaccatggccaagaccanccgccccagcaccacggcggcggcggcgncggcgcgcaccagcccaccttcaagatcttctgccgcgccgacgangggtactgcntcgccgtgcgcgaggggaacgtcgtcctcgccccgaccaacccgcgcgacgagcaccagcnntngtacaaggacatgcgcttcagggcaaagatnaaaggacgaggngggcaacccggcgttcgngctcgttaacaangggcaacgg

SEQ ID NO: 66217 - DNA, 485 bp, Oryza sativa
  Clone ID: PAT_MRT4530_6718C.1
cactcacgagcaacaacggacccaaacaccaaagggacaaaacaaacccctacaaaaataacaggaaagaaaaacgaaccaccagacaaaaccaaacattccttgttctaaaattcatcacataaaaacatacgcacaccgagaaagacaaaagacttgaaactataacaacacgctcggaaaaagcaaagaaaagaaaaaacaagtgagaaagaaaagctacatttatcctgcgtatattccaacgtcaaagcaactatggtatcgagaaaaaagaaaacgaaagaagaccattctccttatcgcagatccgcccgaaggaaagaaaccgtatccccattaaaaaaaccccgatgcgactcatccagcagcggcagctgatgcctgatgatggacatgagcatgggcatgggcgtgaggataaatgcctcgcacgttcgccgacggccgcggatagtctccggccacgccgacgcccgacagca

SEQ ID NO: 66218 - DNA, 354 bp, Oryza sativa
  Clone ID: PAT_MRT4530_67190C.1
atgggtatgggtacccgtttacccatcacttgcgtgggtatgggtatggggaaatttctcacccgacagcaggtgtgggtaatgaaatgggcaagttcactctccatgggtgtgggtacgggggaagagaacccgatgggtacacacctgttgccatctctagtcgccaccgtggacgcggtcgccgacaaatggccaacgccattgccgcaccaacaaccgaggtccaatgcctacgcctacgaaccacaggtggtccagctgccagcaagcgcgcgcatgccgcgttctggttgccgcaccgccacgccacggccaccggtggacgccgccgcgcggttttattacctctag

SEQ ID NO: 66219 - DNA, 470 bp, Oryza sativa
  Clone ID: PAT_MRT4530_67191C.1
aaaaaaaaaacggcccggggggcccaacccgcccattaagggccagaaccccttccccggaaaaggggtcaaccaggtggggcctccccggggggggacccggccgccccgcccaagggccaaactacaactttttaaacggcaacacctaaaaaaccccctttgggggcggaaataaccggggtggggggccccaaactggccctcaaagggaccctggtaaggggattaaaatggacctctttccaatacccaaaccctaaagccccgggtttggtttttaatggcccccccccccccgggaaaggatggggaaattggccccccggcggccttcctgggagggggaacccgtttttaaggctccctttcggaaaaaaaaccttatttttccgtcccccgtcaccacctgggggggcccttttcctaccatcaaaggtggagggggcaaaattttaaaaaatcccccc

SEQ ID NO: 66220 - DNA, 253 bp, Oryza sativa
  Clone ID: PAT_MRT4530_67192C.1
ccggccgtgccgccgggtggcgagacaagtggggcaggggagacctttgctgccgtcgccgccacacggccacagctcacgcctccccgacgaagccccttccatcgccgtcctcttccttgtccccgaccccgcctcagcgtcctccctcgtgcgggagcctccgctgcgctccggcgtggaggtcacggtccgcatcgacgaaaatgactcccatgactccttcgaggtcaacttgtcatggaagaattaa

SEQ ID NO: 66221 - DNA, 447 bp, Oryza sativa
  Clone ID: PAT_MRT4530_67193C.1
atggcctccaagctgtattacgccgtcgccccgctcgtgctggtgcttctcctcctcgcgccgctctcgtccgcgcgcctcgccgccgccgccgccgccgacgacgacgggcagtggccggcgggcggcggccgcgggaggaaggtcggcgggaggacggacgtggaggacgtggaggggaacagggaggtgcaggagctcgggctcttctgcgtcgtggaacacaaccggcgaggggggtcggccacccgcggccgcgggctggtcttctccagggtcgtggcggcgcagacgcaggtggtctccgggatcaagtactacctccgcatcgctgcccaggaggccgacgacgagctggtgttcgacgccgtcgtcgtcgtcaaggcctgggtgccgtcccgcgagatggtctccttcgtgccggcggcggagctgccaggatactga

SEQ ID NO: 66222 - DNA, 522 bp, Oryza sativa
  Clone ID: PAT_MRT4530_67194C.1
cggacgcgtgggcgggactacccgctgagtttaagcatataaataagcggagggcttcatcaaccgggcgcgtggacaaatatttgtatctgcaccaactgcaagtgaattgctgacaaagatggagcaatacactcggttgcaccaggaggtggcccctgcaacaagctgggagatctcagagcttggctatggaagaacaccgggcgctgatcaatcctagcccccctcacttcaaaagtgactagtacaagctctactaatgcctttgcttttgttttcccttgcttcttgtgatcaagtgtcaaattaaactcctcaccatggacatggtctccagttgctgtgttcttgatttccatcgatccggtgacgaaccaaagaagccggtcgtcaccgtctacaaatttatttgaagtttgaactgctgcatgaatgcatgatcatgtagtgggagtaatataatttactagtaatttatgttttaaaaaaaacaaaaaaaaataataaaaataatgggcg

SEQ ID NO: 66223 - DNA, 5136 bp, Oryza sativa
  Clone ID: PAT_MRT4530_67195C.1
atggccgaaccagcaaaggcgcacaacctctctccgagtgttagcggtgacgacggggagccgaacccacgccgtcgagctcgtactccactgccccctccacgccaaagtcctaggcgggagaaggcgctcgagagggccgaaggatccgcgacttcggcatccacgggagatggagaagggcggcgagatggggagcgtcgcctcctcgtctacggcgacggcagcacgccccagggtgcgctccaagctgcaggcgcgctcctacgtcacccgcccgtcgcccatgacccggagtctccagcccaacgttggctggacgatgtggccaaattggtcatgacggcgcggcagcgcctagatgctggtgggcggtcctccgccaccaagacctctggtgctgctaccaccggctccgcgtcgtcaaaacggagggcgcggcgagcggcggccgctgttcgccattcggccgccactccttcgtcagcgcctccgacccggaaagatctgcgtggggggccggatgcccgcatcagtatcgagcgccggcgtaatggccggtgtgctgcccacgcaacggagggcgcctcctcgtccggagtgtcacctcagcacggacgcggggatcggccctccgtgcccccggttggtggtgtcggctgtagagcctttgtggcgagccttcggaacgtccgttggcccccaaggttccggcccaccatcgccgaaaaatatgatggcagcgtcaaccccgccgagtttctccaggtctacacgaccgggatcgaggccgctgggggtgacgacagggtcatggcgaatttctttcccatggccctgaagggacaggcgcggggttggctaatgaacttgccacccgcatctgtccactcttgggaggatttgtgccaacagttcaccatgaactttcaaggcacatatccgcgcccaggtgaagaggcggacttgcacgcagtacagcgaagggatgatgagtcacttcgctcatacattcagcggttctgtcaagtccgcaacaccataccatgcatccttgcacacgcggtgatctacgcgttcagggggggtgtgcggcacaaccgcatgctcgaaaagattacctccaaagagccccatactaccgcggagctttttcagctcgcggaccgagtggctcgtaaggaggaggcatggacctggaacccctccggttccggagtggcagcttcggccgcccccggatccgctgctcagacagggcggcgtgacaggaggaggaagaagaggtcaccccattccgacgacgagggtcatgtcctcgccgtcgagggcgcttcacgggccacccgaaaggggaggcctgcgagcgatagaaagaaggaggccagcgctcccagcagggagcgcccaaccggcaagtggtgcaccgtccacaacacctcccttcatgacctcgcggactgccacgcagtcaaaagtttggctgagcggacgaggaagttggaggaggagaggaggcaggagcgccgagagggcaagtccccggcggttccttccggcaatcggcgaagtgaggccaagcagaaggcccccgccgaggacatcaatggcggcgatgatgacctaggtttccaagagcctggggccgccattgccactgtcgatgggggagcgtgtgctcacgtttctcgccggagcctcaaggccatgaagcgggaacttctggccgcggcccctactcatgaggcgacacgccgggcgcggtggtcggaggttgccctcaccttcgaccagaccgaccacccaccgtgcgttgcccggggaggacagatcgcaatggtggtttcccccactgtttgcaacgtgaagctggggcgtgtcctcattgatggaggagcagccctcaacatcctttcccccgcagcctttgacgccatcaaggccccggggatggtgctccgaccgtcccaaccgattatcggtgtgacgccggggcacacttggccgctaggtcatatcgaccttccagtcaccttcggtggatccgccaacttccgcacggaacgggtgaattttgatgtggcggacctcagtctgccctacaacgcggtcctagggaggcccgcgttggtgaagttcatggcggcggtccactacgcctacctccagatgaagatgccgggccccggtggtcccatctctgtccatggcgacctcaaagtcgcgcttgcttgcatggagcagcgcgcagaccacctcgccgccgcgtccaagcccgagggtggcgacgagaggcttggcacctccgtccccgccgccccgaggcagcggatgatcacatgcgacgaggtcccggaagacgcgctcgtctccttcctgcgggcaaatgctgacgtcttcgcatggagaccggcggatatgcccggggtccccagggaggtgattgagcaccgtctcgccgtgcggccgggcgcaaggccggtccggcagaaagtacggcggcaggccccggaacgtcaagccttcatccgcgaggaggtggcgcaacttctggaggccggattcatccgcgaggtcatccatccggagtggctggcgaacccggtggtcgttcccaaggcgaacggcaagcttcggatgtgcatcgactacaccgaccttaacaaggcatgtcctaaggacccttaccccctgcctcgcatagatcagattgtcgactccaccgcggggtgtgaccttttgtgttttctagatgcatactctggttaccatcagattcgcatggctagggaggatgaggaaaaaactgcattcattacccccataggaacttattgttatacgacaatgcccttcgggttaaagaatgcaggtcctacttttcaacgtactactcgaatttctttgggtagccaaataggacgtaatgttgaggcttatgtcgatgacttggttgtgaagacgcgcaaccgagacaccttactcacagatctagcggaaacttttgagagtctccgctccgcccgcataaaactgaaccccgataagtgcgtgttcggtgtacctgcgggcaagcttctcgggttcttggtctctgcccgaggcatcgaggccaaccccgagaagatacgagctatagagcggatgcgcccccccagcaagcttagggatgtgcaatgcgtcgccggtagcatggccgccctaagtcggttcatatcgaggctgggagagaagacgctacccttatttaagctcctcaaacgctccggaccgtttacttggacggaggaagctgaacgtgccctcactcagttgaaggcgtatctcagctctcccccagttctggtcgcctcggagccaaatgagcccttgctactctacttagcggcgaccccgcaagtggttagtgcggcgttggttgtggagcacgatgaggacaatcctcattccgcgcacccccaccctgtgctgacttggcccgggagagagcagggaggagaggcccccgagccgaacggtggcccaaggcccccgacgaccggagctggccctttgcccacttgtcagacggtgccaggtgcccccgacccccaagatggcccggcggccactgcgggaaggccgcacctattgccctccgaccccgaggctaactctgtgccgactcggcccgggagagagcagggagaagaggcccccgagccgaacggtggcctaaggcccctgacgaccggagttggtccttttcccgcttgtccgacgacgccaggagcccccgacccccaggacggccccgaggccactgtggtaaggccgcccctgtcgtcctccgaccccgaggtcatcggcacagaagacgagtgcgccccacgtggccacttggacgaagagcgccccaaggacgcgacccctagcaaagaggatcggccccaccgaaaggtgcagcggcccgtctactttgttagtgaggccctccgggacgccaagacccgataccctcaggcccagaagatgctttacgctattctgatggcttcaaggaaactgcgccattatttccaggcgcatcgggtcacggtggttacgtcttaccccctcggccaaatcttgcataatcgagagggtactggacgggtggtgaaatgggcaatcgaactttctgagttcgatttgcactttgaaccacgccacgctatcaagagccaggccctcgccgattttgtggcagagtggaccccggctcccgagcccgtctcagtccccgaggccagctcgggcccctcgcagctgcctcacaccgcctactgggtgatgcagtttgacggctccctgtctcttcagggcgccggtgcgggggtcatgttgacctcgccgagtggagacgtcctcagatacctggttcgcctcgactttcgggcaaccaataatatggcagagtacgagggactccttgcgggactcagggtggcagctggactggggatccgccgcctcctggtattaggcgactcccagctggtcgttaaccagataagactctacccgaggaccacgaagggagtgaacgcgtctagcgcatctccaaacgctacgtgctggcgggccccgggcgggtttgagtatctgtatgtcgcgatcgacaagttcactaagtggcccgaggcttatccggtcgtcaagatcgataagcactccgcacttaaattcattaagggcatcacagcccggtttggagtgcctaaccgtattattacggataacggcacccaattcactagtgagcttttcggtgactactgcgaagacatgggcatcaagctctgcttcgcctcacctgcccaccccagaagcaatggccaagtggagcgcgccaatgcggaaatcctaagaggccttaaaaccaagaccttcaacatcctcaagaagcatggcgattcgtggatcgaggagttgccagcggtgctctgggcgaaccgaaccacaccaagccgagcaaccggggaaacgccttttttcctcgtctacggctcggaagtggttctcccatccgagctcaccctgaggtcccctcgggccaccatgtactgcgaggctgatcaagatcagcttcgcagagatgaccttgactacttgtag

SEQ ID NO: 66224 - DNA, 279 bp, Oryza sativa
  Clone ID: PAT_MRT4530_67196C.1
atggccgtgggaggcggtgaggcaccggcggcagcgccgaagctgcgggaatggaggagggcggtgggccggcgttggcggcgcgggcaaatggctaggagacagcggatccggtgtcctaccgatggcgacaccactgtagacacccgcctcgcgaccgagcgggagcagcaggggcggcgcagcgcgcgcggcaaggccggcggagggcgacccgacggcgaccaggggagggagcggcaaggctccggcgtccacctgccggcggtcacggcatag

SEQ ID NO: 66225 - DNA, 4431 bp, Oryza sativa
  Clone ID: PAT_MRT4530_67197C.1
atgtcgtggcacagggccggtgtcctgctgctaggggctcagtcctgcctacctgtcccgggggttccggccgtaggtgggattgggttggtactcttgtctatggctaggatgggttggaaactatgtcacgtcttccgtctgtataccgtggtgttcaccacgaacttccagggcacatatccgcgcccaggcgaagaagcggacttgcaagcggtgcagcgaagggacgatgagtctcttcgctcgtatgttcagcggttctgtcaagtccgcaacaccataccatgcatccccgcacacgcggtgatctacgcgttcagggggggcgtgcggcacaaccgcatgctcgagaagatcgcctccaaggagccccagaccaccgcggagctttttcagctcgcggatcgtgtggctcgcaaggaggaggcctggacctggaactcctccggttctggtgtggcagctccggccgcccccgggtccgctgctcggtcagagtggcgggacaggaggaggaagaagaggtcggcccattccgacgacgagggtcacgtcctcgccgtcgagggcgcttcgcgggccacccgaaaggggaggcctgcgagcgacaaaaagaaggaggccggcgctcccagcagggagcgcccaaccggcaaatggtgttccgtgcacaacacctccctccacgacctcgcggactgccacgcggtcaaaagtttggctgagcggacgaggaagtgggaggaggagaggaggcaggagcgccgtgagggcaaggccccggcggctcccgccagcaaccggcgaggagaggccaagcagaaggccaccgccgaggacgtcgacgatggcgacaatgacctgggattccaggagcccggagccaccgtcgccaccgtcgatgggggagcgtgcgcccacgtttctcgccggagcctcaaggccatgaagcgagagcttctagccgcgtcccctacccatgaggcgacgcgacgggcgcggtggtcggaggttgcccttaccttcgaccagaccgatcacccgccacggggcgcagccctcaacatcctttcctcctcagcctttgacgccatcaaggctccggggatggtgctccggccgtcccagccgatcatcggtgtgacgccgaggcacacttggccgctaggtcatatcgacctcccggtcaccttcggtggttccgccaacttccgcacggagcgggtgaacttcgatgtggcggacctcagtctgccctacaacgcggtcctggggaggcccgcgttggtgaggttcatggcggcggtccactacgcctatctccagatgaagatgccgggccccggtggtcccatcaccgtccatggcgacctcaaagtcgcgcttgcttgtatggagcagcgcgcggatcacctcgccgcagtgtccaagcccgcgggtggcgacgagaggctcagcgcctctgtcccggccgccccgaggcagcggatgatcacgtgcgacgagatcccggaagacgcgctcgtctccttcctgcgggcaaacgccgacgtcttcgcctggagaccggcggacatgcccggggtccccagggaggtgattgagcaccgtctcgccgtgcagccgggcgcaaggccgggccggcagaaagtgcggcggcaggccccggaacgtcaagccttcatccgcgaggaggtggcccgacttctggaggccggattcatccgtgaggtcatccatccggagtggctggcgaacccggtcgtcgttcccaaggcgaacggcaagcttcggatgtgcatcgactacaccgaccttaacaaggcatgtcctaaggacccttaccccctgccacgcatagatcagattgtcgactccaccgcggggtgcgaccttttgtgttttctagatgcatattctggttatcatcagattcgcatggctagggaggatgaggaaaaaactgcattcattacccccataggaacttattgttatatggcaatgcctttcgggttaaagaatgcaggtcctacttttcaacgtactactcgaatttctttgggtagccaaataggacgtaatgttgaggcctatgttgatgacttggttgtgaaaacgcgcaaccaagagaccttactctcggatctagcggaaactttcgaaagtctccgctccgcccgcataaagctgaaccccgataagtgtgtgttcgacgtgcctgcgggcaagcttctcgggttcttggtctctgcccgaggcatcgaggccaaccccgagaagatacgagctatagagcggatgcgcccccccagcaagcttagggatgtgcaatgtgtcactggctgtatggccgccctaagtcggttcatatcaaggctgggagagaaggcgctacccctatttaaactcctcaaacgctccggaccgtttacctggacggaggaggctgagcgggccctcactcagttgaaggtgtacctcagttctcccccagtcctggtcgccccggagcctgatgaaccgttgctactctacctggcggcaaccccgcaggtagttagcgcggcgttggtcgtggagcgcgatgaagacaaccctcattccgcgcatcctcaccctatgtcgacccgacccgagagagagcagggaggagaggcccccgagccgaacggcggcccgaggcccccgacgaccggagttggccctccgcctgcttgtcagacggtgtcaggcgcccccgacccccaggatggccccggggccactgcgcgaaggccgcacctgtcgccctctgaccccgaggttaatcctgtgtcgactcgacccgggagagagcagggaggagaggcccccgagccgaacggcggcccgaggcccctgacggccggagctggccctccgcccgtttgtccgatggtgccaggcgcccccgacccccaggaaggcctcggggccactgcgggaaggccacgcctgacgccctccgaccccgaggtcatcggcacagaagccgagtgcgccctgcgcagcctctcagacgaagaacgccctggagatgtggcccctagcgaagagggtcggccccgccgaaaggtgcagcagcccgtctacttcgttagcgaggccctccgggacgcaaaaacccgataccctcaggcccagaagatgctttacgctattctgatggcttcgaggaagttgcgccattattttcaggcgcatcgggtcacggtggtcacgtcttaccccctcggccaaatcttgcataaccgagaaggtactggacggatggtgaaatgggcaatcgaactctctgagttcgatttgcactttgaaccacgccacgcaatcaagagccaggccctcgccgactttgtggcagagtggaccccagctcccgagcccgtctccgcccccgaggacagctcgggcccctcgcagctgcctcacacagcctactgggtgatgcagttcaacggctccctgtctcttcagggcgccggtgcgggggtcacgttgacctcgccgagcggagacgtcctcagatacttggttcgtctctactttcgggcaaccaataatatggcggagtacgagggactccttgcaggactcagggtggcagctggactggggatccgccgcctcctggtgttaggcgactcccagctggtcgttaaccaggcatacatcgcagataagactctacccgaggactacgaagggagtgaacgcgtccagcgcatctccaagcgctacgtgctggtggaagggaccctctatcggcgcgcggctaacggagtcctcctgaagtgcattcctcgggagcgaggcgtcgagcttcttgccgatatccatgaaggcgaatgcggagcccactccgcctcacgcaccttggttggcaaggcctttcgccagggtttctattggccgacagctctcaacgatgcggttgacctggtccggcgatgcagggtgtgccagttccacgccaagcaaacccatcagccggcccaggccttgcagaccatacctctttcatggccatttgctgtctgggggctcgatatcctgggtccgttcaggcgggctccgggcgggttcgagtatctgtatgtcgctatcgacaagttcactaagtggcccgaggcttatccggtcatcaagatcgataagcactccgcgcttaaattcatcaggggcatcactgctcggtttggggtgcctaaccgtatcattacggataacggcacccagttcactagtgaactcttcggtgactactgtgaagacatgggcatcaagctctgcttcgcctcccccgcccaccccagaagcaatggccaagtggagcgcgccaatgcggaaatccttaagggcctcaaaaccaagaccttcaacatcctcaagaagcacggcgactag

SEQ ID NO: 66226 - DNA, 5295 bp, Oryza sativa
  Clone ID: PAT_MRT4530_67198C.1
atggctgaacaagcaaaggtgcacaacctctctccgagtgttagcggtgacgacggggagccaaacccacgccgtcgagctcgtactccaccgccccctccacaccaaagtcctaggagggaggaggtgctcgagaggatcgaaggatccgcgacttcgacatccacgggtgatggagaagggcgccgagatggggagcgtcgcctcctcgtctacggcgacggcagcacgccccagggcgcgctccaagctgcgggcgcgctcctgcgtcacccgcctgtcgtccctgacccggagtctccagcccaacgttggctggacgacgtggccaacttggtcatgacggcacggcagcgcctaggtgctggtgggcggtcctccgccaccaagacctctggcgctgctaccaccggctccgtgtcgtcaaggcggagggcgcggcgagcggcggctgttgctcgccattcggccgccactccttcgtcagcgcctccgacccaggaagatctgcgtggggggccggatgcccgcatcagtatcgagcgccggcgtaatggccgacgtgctgcccacgcaacggagggcgcctcctcgtccggagtgtcacatcaacacggacgcggggatcagccctccgtgcccccggttggtggtgtcggctgtagagcctttgtggcgagccttcggaacgtccgttggcccccaaggttctggcccaccatcgccgaaaaatatgacgggagcgtcaaccccgccgagtttctccaggtctacacgaccgggatcgaggccgccgggggtgacgacagggtcatggcgaatttctttcccatggccctgaagggacaggcacggggttggctaatgaacttgccacccgcgtccgtccactcttgggaggatttgtgccaacagttcaccatgaactttcaaggcatatatccgcgcccaggtgaagaagcggacttacatgcagtccagcgaagggatgatgagtcacttcgctcatacattcagcggttctgtcaagtccgcaacaccataccatgcatccctgcacacgcggtgatctacgcgttcagggggggtgtgcggcacaactgcatgctcgaaaagatcgcctccaaagagccccagactaccgcggagctttttcagctcgcggaccgagtggctcgtaaggaggaggcatggacctggaacccctccggttccggtgtggcagcttcggccgcccccggatccgctgctcagacagggcggcgtgacaggaggaggaagaagagggcgcttcgcgggccacccgaaaggggaggcctgcgggcgacaaaaagaaggaggccggcgctctgggagcgcccaaccggcaagtggtgcatcgtccacaacacttcccttcacgacctcgcggactgccgcgcagtcaaaagtttggctgagcggacgaggaaatgggaggaggagaggaggcaggagcgccgagagggcaagtccccggcggttccttccggcaatcggcgaagtgaggccaaacagaaggcccccgccgaggacatcgatgacggcgatgatgacctaggtttccaagagcctggggccaccattgccactgtcgatgggggagcgtgtgctcacgtttctcgccggagcctcaaggccatgaagcgagagcttctggccgcggcccctactcatgaggcgacgcgccgggcgcggtggtcggaggttgccctcaccttcgaccagaccgaccacccaccgtgcgttgcccggggaggacagatcgcaatggaggtttcccccactttttgcaacgtgaagctggggcgtgtcctcattgatgggggagcagccctcaacatcctttcccccgcagcctttgacgctatcaaggccccggggatggtgctccggccgtcccagccgattatcggtgtgacgccggatcacacttggccgctaggtcatatcgacctcccggtcaccttcggtggatccgccaacttccgcacggagcgggtgaactttgatgtggcggacctcagtctgccctacaacgcggtcctagggaggcccgcgttggtgaagttcatggcggcagtccactacgcctacctccagatgaagatgccgggccccggtggccccatctctgtccatggcgacctcaaagtcgcgcttgcttgtatggagcagcgcgcggaccacctcaccgccgcgtccaagcccgagggaggcgacgagaggcttggcacctccgcccccgccgccccgaggcagcggatagtcacatgcgacgaggtcccggccggattcatccgcgaggtcatccatccggagtggctggcgaacccggtggtcgttcccaaggcgaacggcaagcttcggatgtgcatcgactacaccgaccttaacaaggcatgtcctaaggacccttaccccctgcctcgcatagatcagattgtcgactccacagcagggtgcgaccttttgtgttttctagatgcatactctggttaccatcagattcgcatggctagggaggatgaggaaaaaactgcattcattacccccataggaacttattgttatacgacaatgcccttcgggttaaagaatgcaggtcctacttttcaacgtactactcgaatttctttgggtagccaaataggacgtaatgttgaggcttatgtcgatgacttggttgtaaagacgcgcaaccaagagaccttactctcggatctagcggaaacttttgagagtctccgctccgcccgcataaaactgaaccccgataagtgcgtgttcggtgtacctgcgggcaagcttctcgggtttttggtctctgcccgaggcatcgaggccaaccccgagaagatacgagctatagagcggatacgcccccccagcaagcttagggatgtgcaatgcgtcaccggttgcatggccgccctaagtcggttcatatcgaggctgggagagaaggcgctacccttatttaagctcctcaaacgctccgggccgtttacttggacggaggaagctgaacgtgccctcactcagttgaaggcgtatctcagctctcccccagttctggtcgccccggagccaaatgaacccttgctactctacttagcggcgaccccgcaagtggttagtgtggcgttggttgtggagcgcgatgaggacaatcctcattccgcgcacccccaccctgtgttggcttggcccgagagaaagcagggaggagaggcccccgagtcgaacggtggcccaaggcccccgacgaccggagcaggccctctgcccgcttgtcagacggtgccaggtgcccccgagccccaggacggccccgaggccactgcgggaaggccgcacctatcgccctctgaccccgaggctaaccctgtgccgattcgacccgggagagagcagggagaagaggcccccgagccgaacggtggcctaaggcccctgacgactggagttggccctttgcccgcttgtccgacgacgccaggagcccccgacccccaggacggccccgaggccactgtgggaaggccgcccctgtcgtcctccgaccccgaggtcgtcggcacagaagacgagtgcaccccgcgaggccgcttggacaaagagcgccccagggatgtggcccctagcgaagaggatcggccccaccgaaaggtgcagcggcccgtctactttgttagtgaggcccgccgggacgccaagacccgataccctcaggcccagaagatgctttacgctattctgatggcttcgaggaaactgcgccattatttccaggcgcatcgggtcacggtggttacgtcttaccccctcggccaaatcttgcataatcgagagggtactggatgggtggtgaaattggcaatcgaactttctgagtttgatttgcactttgaaccacgccacgctatcaagagccaggccctcgccgattttgtggcagagtggaccccagctcccgagcccgtctcagtccccgaggccagctcgggcccctcgcagctgcctcacaccgcccactgggtgatgcagttcgacggctccctgtctcttcagggcgccggtgcgggggtcacgttgacctcgccgagtggagacgtcctcagatatttggttcgccttgactttcgggcgaccaataatatggcagagtacgagggactccttgcgggactcagggtggcagctggactggggatccgccgcctcctggtgttaggcgactcccagctggtcgttaaccaggtctataagactctacccgaggaccgcgaagggagtgaacgcgtccagcgcatctccaaacgctacgtgctggtagaagggaccctctatcggcgcgcggctaacggaatcctcctgaagtgcattcctcgggaacaaggcgtcgagcttcttgccgatatccatgaaggcgaatgcggagcccactccgcctcgcgcaccttggttggcaaagcctttcgacaaggtttctattggccgacagctctcaatgttgcggtcgacctggtccggcgatgcagagcgtgtcaattccacgccaagcaaatccatcagtcggcccaggccctgcagatcatactactttcatggccatttgctgtctgggggctcgatatcctgggaccgtttaggcgggccccgggcgggtttgagtatctgtatgtcgcgatcgacaagttcactaattggcccgaggcttatccggtcgtcaagatcgataagcactccgcacttaaattcattaagggcatcacagcccggtttggagtgcctagccgtattattacggataacggcacccaattcactagtgaacttttcggcgattactgcgaagacatgggcatcaagctctgcttcgcctcacctgcccaccccagaagcaacggccaagtggagcgcgccaatgcggaaatcctcagaggccttaaaaccaagaccttcaacatcctcaagaagcacgacgattcgtggatcgaggagttgccagcggtgctctgggcgaaccgaaccacaccaagccgagcaaccggggaaacgcctttcttcctcgtctacggcgcggaagcggttctcccatccgagctcaccctgaggtcctctcgggccaccatgtactgtgaggctgatcaagatcagcttcacagagatgacctcgactacctggaggagcgaaggcggcgcgcggccctccgagccgcgcgctaccagcagagcctgcggcgctaccatcagcgccacgtccgggcctga

SEQ ID NO: 66227 - DNA, 504 bp, Oryza sativa
  unsure (1)..(504): unsure at all n locations
  Clone ID: PAT_MRT4530_67199C.1
ggagagcagccggcattggggtgcggccgggcgccgtcgctaagcgcgtgtatcgggtggagctcggaagcaggcgcagccttcaccttagcatagcggggttgccgggacacgcctgggcaagacacccgggctcgaggttgtggtggggtcgtgtggcacgcgatcctcctgcgcgccagccatgaaatcataggaaggtcgtntgttctcggacgaagctactccggagccgcgaggaccaaggcagaaagcagcgaagaggctgcagtcgagcccctcgccttcggaagggtatatattcttacttttacttctgccctctttccccacattgtattttgtggtgccctcttgctctttcttcttctcgcgggattcgtatggctacttagtagcttttgtcttccggatccctaccgataagctccgtgctttgttttgctcgcgcgttttgcttgatgtaaccctaggcattctgaacatacggaaatggtgctgaca

SEQ ID NO: 66228 - DNA, 1407 bp, Oryza sativa
  Clone ID: PAT_MRT4530_6719C.1
attgtaggactaattgataaggtgaatatgagaagtcgagcacctaatatctcgatgtacgccgatgacgcggtcatcttcctcaagtcgatacaaggcgaaaactgtgctgatcaaagcagcacttgacctatttaggattgctactaggctacacgccaacttgtcgagaagcgccatcacacatatccaattctcggaagaacagagaaacttgttcagaatgtgctaattacatatctgggcttgccattatgtgtacgtgaaccaacaaaacttgaattacaacccatcctagaccggttggcaaagaaagtggctgttgggaagttgaagttactcttgccagatggtggcatgtgcctgatcaagtaggtactgatggcaatccctatgcatgtattgtcaatcatgcaactaccaaagtgggctattaaggatgttgagggaatatgtagggtttttctgtgcaaggggcaagaggaagtcaatggtggctctttttggaaaagctcttagcttaaagttggaagtcaaacgaactgagcagaaggggaggccgtggaggatggtaggatggaaacgaaataaggatctccaagacatatttaactcaacagtgatacatgtggtgggcaacggccaagatacaaacttctatgtcgagaactggctaccgagaggtaacatcgttggtaacatgcctacgctcttcagctttgtcagtaggtcaagactgatagtgggacaaggaatagttggctacagatgggggagagatctccaaggatcgctctctaacagagccttggcagagtatttattcctttgggatgaactctagaatgttcacatccaataggggatggaggattcaataatttggaagctgacaagtaatggctagttcattgtctacgctgcttacaacctattctttatggcgacgatgaaatgtccttatggtgaactattttggaagattagagtgctagcgagggtcagattctttatgtggttggctgtaaaaggatgatgcttgatggctaacaatcttctcaagagaggatggctgttcgttgtgccaatctgagatggaagattgtgaccatatgttcatcaagtgtcgtacaccaacagagtatggacaatgctacgagattggatcaatgtggcctttgacccacctagtcagcaaggtcttctatgtggcataatggtgacagcaaacgcaatcttgttttcgagcgagctacatgaacatgctcgatatgcttttcatgatggtgtgctggctcatttggaaggaacgcaacgggatagttttcgagcagaggttaaaacaattgcagagaagctctggagatattaaagaggaaatagcccgaccccgcgaaaataactcca

SEQ ID NO: 66229 - DNA, 210 bp, Oryza sativa
  Clone ID: PAT_MRT4530_671C.1
caggcgctcggcccagcccagcccagcccagcccagcctgaaaagcagcggccgcttgtccagaccgccgacacaagcgctacctgctgctggcgctccgctcctcgggtccccagaaaaaccctaaagcgttcgtccagcatgcatctcaacggaaagcccaagctcgtcgccgccgtcgatccctcctctctcagccgagctatttaa

SEQ ID NO: 66230 - DNA, 5676 bp, Oryza sativa
  Clone ID: PAT_MRT4530_67200C.1
atggccgagcaagcaaaggcgcacgacctctctccgagtgtgagtggcgacgacggggagccgaacccacgccgtcgagctcgtactccaccgccccctccacgccaaagtcctaagcggggggaggcgctcgagagggtcgaaagatccgcgacttcaccgatcgcgggcgatggaaaagaacggcgagatggggagcgtcgcctcctcgtctacggcgacggcagcacgccccagggcgcgctccaagctgcgggcgcgctcttacgccacccgcctgtcgtccctgacccggagtctccagcccaacgatggctggacgacgtggccaaattggtcatgacggcgcggcagtgtcacgcccggaaattcactagatgtgacaggcagcgcctagatgctggtggacggtcctccgccaccaaggcctctggtgctgctaccaccggctccgcgtcgtcaagacggagggcacgacgagcggcagccgctgttcgccgttcggctgccactccttcgtcgactccttcgacccgggaagatctgcgtggggagcaggacgcccacaccagcatcgagcgccggcgtaatgaccgaagtgctgcccacgcaacggagggcgcttcctcgtccagagtgtcacctcgacacggacgtgggaatcagccctccgtgcccccggttggtggtgtcggctgtagagcctttgtggcgagtcttcggaatgtccgttggcccccaaggttccggcccaccatcgctgaaaaatatgatggcagcatcaaccccgccgagtttctccaggtctacacgaccgggattgaggccgccgggggtgatgacagggtcatggcgaatttctttcccatggccctgaaggggcaagcgcggggttggctaatgaacttgccacccgcgtctgtccactcctgggaggatttgtgccagcagttcactatgaactttcagggcacatatccgcgcccaggggggggcgtgcggcacaaccgcatgctcgaaaagatcgcctccaaggagccccagactaccgcggagctttttcagctcgcggaccgagtggctcgcaaggaggaggcctggacttggaacccctccggttccggtgtggcagcttcggccgcccccggatccgctgctcaaacagggcggcgtgacaggaggaggaaaaagaggtcagtccattccgacgacgagggtcatgtcctcgccgtcgagggcgcttcgtgggccacccgaaaggggaggcctgcgagcgacaaaaagaaggaggccagcgctcccagcagggagcgccccaccggcaagtggtgcaccgtccacaacacctccctccatgaccttgcggactgtcgcgcagtcaaaagcttggctgagcggacaaggaagtgggaggaggagaggaggcaggggcgccgggaaggcaagtccccggcggttccttccggcaatcggcgaagtgaggccaagcagagggcccccgccgaggacatcgatgatggcgatgatgacctaggtttccaagagcctggggccaccattgccaccgtcgatgggggagcgtgtgctcacgtttctcgccggagcttcaaggctatgaagcgagagcttctggccgcggcccctactcatgaggcgacgcgtcgggcgcggtggtcggaggttgccctcacctttgaccagaccgaccacccaccgtgcgttgcccggggagggcagattgcgatggtggtttcccccaccgtttgcaatgtgaagttggggcgagtcctcattgatggaggagcagccctcaacatcctttcccccgcgacctttgacgccatcaaggccccggggatggtgctccggccgtcccagccgattatcggtgtgacgtcgggacacacttggccgctaggtcatatcgacctcccggtcaccttcggtggatccgccaatttccgtacggagcgggtgaacttcgatgtggcggacctcagtctgccctacaacgcggtcctggggaggcccgcgttggtgaagttcatggcggcggtccactacgcctacctacagatgaagatgccgggccccggtggccccatctctgtccatggtgacctcaaagtcgcgcttgcttgcatggagcagcgcgtagaccatctcgccgccgcgtccaagcccgagggtggcgatgagaggcttggcgcctccgcccccgctaccccgaggcagcggatgatcacatgcgacgaggtcccggaagacgcgctcgtctccttcctgcgggcaaatgctgacgtcttcgcatggagaccggcggatatgcccggggtccccagggaagtgattgagcaccgtctcgccgtacggccgggcgcaaggccggtccggcagaaagtgcggcgacaggccccggaacgtcaagccttcatccgcgaggaggtggcgcgacttctggaggccggattcatccgagaggtcatccatccggactggctggcgaacccggtggtcgttcccaaggtgaacggcaagcttcggatgtgcatcgactacaccgaccttaacaaggcatgtcctaaggatccttaccccctgcctcgcatagatcagattgtcgactccactgcggggtgcgaccttttgtgttttctagatgcatactctggttaccatcagattcgcatggctagggaggatgaggaaaaaactgcgttcattacccccataggaacctattgttatacgacaatgcccttcgggttaaagaatgcaggtcctacttttcagcgtactactcgaatttctttgggtagccaattaggacgtaatgttgaggcttatgtcgatgacttggttgtaaagacgcgcaaccaagaaacgttactctcagatctagcggaaacctttgagggtctccgctccgcccgcataaaactgaaccccgataagtgtgtgttcggtgtacctgcgggcaagcttctcgggttcttggtctctgcccgaggcattgaggctaaccccgagaagatacgagctatagagcggatgcgcccccccagcaaacttagggatgtgcaatgcgtcaccggttgcatggccgccctaagtcggttcatatcgaggctgggagagaaggcgctacccttatttaagctcctcaaacgctccgggccgtttacttggacggaggaagctgaacgtgccctcactcagttgaaggcgtatctcagctctcccccagttctagtcgccccggagccaaatgagcccttgctactctacttagcggcgaccccgcaagtagttagtgcagcattggttgtggagcgcgatgaggacaatcctcactccacgcatcccaaccctgtgctgactcagcccgggagagggcagggaggagaggcccccgagccgaacggtggcccaaggcccccgacgaccggagttggctctctgcccgcttgtcagatggtgctaggagcccccgacccacaggaaggccctgaggccactatgggaaggccgcacctatcaccctttgaccccgaggctcaccctgtgctgactcaacccgggaaagagcagggagaagaggcccccgagccgaacggaggcctaaggcccctgacgaccggagttggccctttgcccgcttgtccgacgacaacaggagcccccgacccccaggatggccccgaagccactgaggtaaggccgcccctgttatcctccgaccccgaggtcatcagcaccgaagacaagtgtgccccgcgaggctgcttggacgaagagtgccccagggatgcggcccctagcgaagaggatcggccccaccgaaaggtgcagcggcccgtctactttgttaagtggaccccggctcccgagcccgtctcgatccctgaggccagcacggacccctcgcagttgcctcacaccgcccattgggtgatgcagttcgatggctccctgtctcttcagggcgccggtgcgggggtcacattgacctctccgagcagagacgtcctcagatacttggtccgcctcgactttcgagcgaccaataatatggcagagtacgagggactccttgccggactcagagtggcagctggactggggatccgccgcctcctggtattaggcgactcccagctggtcgttaaccaagtctgtaaggagtaccggtgctctgatccgcagatggacgcctacgtgcgccaagtacggcgcatggagcgccattttgacgggatagagcttcggcacgtgcccagacgggataatatgatagccgacgaactctcacgactcgcgtcctcgcgagcccagaccccaccgggcgtctttgaagaaaggcttgcccagccgtcggcgcgacccgaccccttaggggagatggacgcgcctgatcggcccccgaggcccgtcggagcccaggcctcgggacccgaggggagcgctcctagctcccttagattgattgcttggatcgctgagattcaagcatacctcacagataagactctacccgaggaccgcgaagggagtgaacgcgtccaacgtatctccaaacgctatgtgctggtagaagggaccctctatcggcgcgcggctaatggagttctcctgaagtgcattcctcgggaacaaggcgttgtgcttcttgccgatatccatgaaggcgaatgcggagcacactccgcctcgcgcaccttggttggtaaagcttttcgccagggtttctattggccgacagctctcagtgatgcggtcgacctggtccggcgatgtagagcgtgtcaattccacgccaagcaaatccatcagccggcccaggctctgcagaccataccactttcgtggccatttgctgtctgggggctcgatatcctgggaccgtttaggcgggccccgggcgggtttgagtatctgtatgtcgcgatcgacaagttcactaagtggcccgaggcttatccggtcatcaagatcgataagtactccgcacttaaattcattaagggcatcacggcccgtgaactcttcggcgactactgcgaagacatgggcatcaagctctgcttcgcctcacctgcccaccccagaagcaatggccaagtggagcgcgccaatttggaaatcctcaaaggccttaaaaccaagacttacaacatactcaagaagcacggcgattcatgggtcgaggagttgccagcggtgctctgggcaaaccgaactacaccaagccgagcgactggagaaacgcctttcttcctcgtctacggcgcggaagcagttctcccatccgagctcaccctgaggtctcctcgggccaccatgtactgcgaggctgatcaagatcagcttcgtagagatgacctcgactacttggaagaacgaaggcggcgcgcggccctccgagccgcgcgttaccagcagagcctgcggcgctaccatcagcgccaagtccgggcccgatcactctgcgtcgacgaccttgtcctacgccgcgtccaaacgcgtgctggattgagcaagctctcaccaatgtgggagggtccgtatcgagtgatcggtgtcccccggccgggttccgtgcggctggccacgggcgacggcacagagctgcctaacccgtggaacatcgaacaccttcgtcgcttctacccctga

SEQ ID NO: 66231 - DNA, 5832 bp, Oryza sativa
  Clone ID: PAT_MRT4530_67201C.1
atggctgaacaagcaaaggcgcacaacctctctccgagtgttagcggtgacgacggggagccgaacccacgccgtcgagctcgtactccaccgccccctccacgccaaagtcctaggcgggagaaggcgctcgagagggccgaaggatccgcgacttcgacatccacgggagatggagaagggcggcgagatggggagcgtcgcctcctcgtctacggcgacggcagcacgccccagggcgcgctccaagctgcgggcgcgctcctacgtcacccgcccgtcgcccatgacccggagtctccagcccaacgttggctggacgacgtggccaaattggtcatgacggcacggcagcgcctagatgctggtgggcggtcctccgccgccaagacctctggtactgctaccaccggctccgcgtcgtcaagacgaagggcgcggcgagcggcggccgctgttcgccattcggccgccactccttcgtcagcgcctccgacccgggaagatctgcgtggggggtcggatgcccgcaccagtatcgagcgccggcgtaatggccgacgtgctgcccacgcaacggagggcgcctcctcgtccggggtgtcacctcaacatggacgcggggatcagccctccgtgcccccggttggtggtgtcggctgtagagcctttgtggcgagccttcggaacgtccgttggcccccaaggttccggcccaccatcgccgaaaaatatgacgggagcgtcaaccccgccgagtttctccaagtctacacgaccgggatcgaggccgccgggggtgacgacagggtcatggcgaatttctttcccatggccctgaagggacaggcgcgagcggttctgtcaagtccgcaacaccataccatgcatccctgcacacgcggtgatctacgcgttcaggggggggtgcggcacaaccgcatgctcgaaaagatcgcctccaaagagccccagactaccgcggagctttttcagctcgcggaccgagtggctcgtaaggaggaggcgtggacctggaacccctccggttccggtgtggcagcttcggccgcccccggatccgctgctcagacagggcggcgtgacaggaggaggaagaagaggtcagcccattccgacgacgagggtcatgtcctcgccgtcgaaggcgcttcgcgggccacccgaaaggggaggcctgcgagcgacagaaagaaggaggccggcgctcccggcagggagcgcccaaccggcaagtggtgcatcgtccacaatacctcccttcacgacctcacggactgccgcgcagtcaaaagtttggctgagcggacgaggaagtgggaggaggagaggaggcaggagcgccgagagggtaagtccccggcggttccttccggcaatcggcgaagtgaggccaagcagaaggcccccgccgaggacatcaatgacggcgatgatgacctaggtttccaagagcctggggccaccattgccactgttgatgggggagcgtgtgctcacgtttctcgccggagcctcaaggccatgaagcgagagcttctggccgcggcccctactcatgaggcgacgcgccgggcgcggtggtcggaggttgccctcaccttcgaccagaccgaccacccaccgtgcgttgcccggggaggacagatcgcaatggtggtttcccccactgtttgcaacgtgaagctggggcgtgtcctcattgataggggagcagccctcaacatcctttcccccgcagcctttgacgccataaaggccccggggatggtgctccggccgtcccagccgattatcggtgtgacgccggggcacacttggccgctaggtcatatcgacctcccggtcaccttcggtggatccgccaacttccgcacggagcgggtgaactttgatgtggcggacttcagtctgccctacaacgcggtcctagggaggcccgcgttggtgaagttcatggcggcggtccactatgcctacctccagatgaagatgccgggccccggtggccccatctctgtccatggcgacctcaaagtcgcgctcgcttgtatggagcagcgcgcggaccacctctccgccgcgtccaagcccgagggtggcgacgagaggcttggcacctccgtccccgccgccccgaggcagcggatgatcacatgcgacgaggtcccggaagacgcgctcgtctccttcctgcgggcaaacgctgacgtcttcgcatggagaccggcggatatgcccggggtccccagggaggtgattgagcaccgtctcgccgtgcggccgggcgcaaggccggtccggcagaaagtgcggcggcaggccccggaacgtcaagccttcatccgcgaggaggtggcgcgacctctggaggccggattcatccgcgaggtcatccatccggagtggctggcgaacccggtggtcgttcccaaggcgaacggcaagcttcggatgtgcatcgactacaccgaccttaacaaggcatgtcctaaggacccttaccccctgcctcgcatagatcagattgtcgactccaccgcggggtgcgaccttttgtgttttctagatgcatactctggttaccatcagattcgcatggctagggaggatgaggaaaaaactgcattcattacccccataggaacttattgttatacgacaatgcccttcgggttaaagaatgcaggacgtaacgttgaggcttatgtcgatgacttggttgtaaagacgcgcaaccaagagaccttactctcggatcttgcggaaacttttgagagtctccgctccgcccgcataaaactgaaccccgataagtgcgtgttcggtgtacctgcgagcaagcttctcgggttcttggtctctgcccgaggcatcgaggccaaccccgagaagatacgagctatagagcggatgcgcccccccaacaaacttagggatgtgcaatgcgtcaccggttgcatggctgccctaagtcggttcatatcgaggctgggagagaaggcgctacccttattcaagctcctcaaacgctccgggccgtttacttggacggaggaagctgaacgtgccctcactcagttgaaggcgtatctcagctctcccccagttctggtcgccccggagccaaatgaacccttgctactctacttagcggcgaccccgcaagtggttagtgcggcgttggttgtggagcgcgatgaggacaatcctcattccgcgcatccccaccctgtgctagcttggcccgggagagagcagggaggagaggccaccgagccgaacggtggcccaaggcccccgacgaccggagctggctctctgcccgcttgtcagacggtgccaggtgcccccgacccccaggatggcccggcggccactgcgggaaggccgcacctatcgccctctgaccccgagcctaaccctgtgccgactcgacccgggagagagcagggagaagaggcccccgagccgaacggtggcctaaggcccctgaggaccggagttggccctttgcccgcttgtccgacgacgccaggagcccccgacccccaggacggccccgaggccactgtgggaaggccgcccctgtcgtcctccgaccccgaggtcgtcggcacagaagacgagtgcgccccgcgaggccgcttggacgaagagcgccccaaggatgcggcccctagcgaagaggatcggccccaccgaaaggtgcagcggcccgtctactttgttagtgaggccctccgggacgccaagacccgataccctcagacccagaagatgctttacgctatcctgatggcttcgaggaaactgcgccattatttccaagcgcatcgggtcacggtggttacgtcttaccccctcagccaaatcttgcataatcgagagggtactggacgggtggtaaaatgggcaatcgaactttctgagtttgatttgcactttgaaccacgccacgctatcaagagccaggccctcgccgattttgtggcagagtggaccccagctcccgagcccgtctcagtccccgaggccagctccgacccctcgcaactgcctcacaccgcctactgggtgatgcagtttgacggctccctgtctcttcagggcgccggtgctggggtcacgttgacctcgccgagcggagacgtcctcagatacctggttcgccttgactttcgggcgaccaataatatggcagagtacgagggactcctggcgggactcagggtggcagctggactggggatccgccgcctcctggtattaggcgactcacagctggtcgttaaccaggtctgtaaggagtaccggtgctctgacccgcagatggacacttacgtgcgccaggtacggcgtatgaagcgccattttgacgggatagagcttcggcacgtgcccagacgggataacacgattgccgacgaactctcacggctcgcttcctcgcgagcccagaccccaccgggcgcctttgaagaaaggcttacccagccgtcggcgcgacccgaccccttaggggagacggacgcgcctgaccggcccccgaggcccatcggagtccaggcctcgggacccgaggggagcgctcccagctcccttagattgattgcctggatcgctgagatccaagcatacctcacagataagactctacccgaggaccgcgaagggaaagggaccctctatcggcgcacggctaatggagtcctcctgaagtgcattcctcgggaacaaggcgtcgaacttctcgccgatatccatgaaggcgaatgcggagcccactccgcctcgcgcaccttggttggcaaggcctttcgccagggtttctattggccgacggctctcaatgatgcggtcgacctggtccggcgatgcagagcgtgtcaattccacgcaaagcaaatccatcagccggcccaggccctgcagatcataccactttcatggccatttgctgtctgggggctcgatatcctgggaccatttaggcaggccccgggcgggtttgagtatctgtatgtcgcgatcgacaagttcactaagtggcccgaggcttatccggtcgtcaagatcgataagcactccgcacttaaattcattaagggcatcacagcccggtttggagtgcctaaccgtattattacggataacgacacccaattcactagtgaacttttcggcgattactgtgaagacatgggcatcaagctctgcttcgcctcacctgcccaccccagaagcaacggccaagtggagcgcgccaatgcggaaatcctcagaggccttaaaaccaagaccttcaacatcctcaagaagcacggcgatttgtggatcgaggagttgccagcggtgctctgggcgaaccgaaccacgccaagccgagcaaccggggaaacgcctttcttcctcgtctacggcgcggaagcggttctcccatccgagctcaccctgaggtcccctcgggccaccatgtactgcgaggctgatcaagatcagcttcgcagagatgacctcgactacttggaagagcgaaggcggcgcgtggccctccgagccgcgcgctaccagcagagcctgcggcgctaccatcagcgccacgtccgggcccgatcactctgcgtcgacgacctcgtcctacgccgcgtccaaacgcgtgctggattgagcaagctctcaccaatgtgggagggtccatatcgagtgatcggcgtcccccggccgggctccgttcggctggccacgggcgacggcacagagctgcctaacccgtggaacatcgaacaccttcgtcgcttctacccctaa

SEQ ID NO: 66232 - DNA, 179 bp, Oryza sativa
  unsure (1)..(179): unsure at all n locations
  Clone ID: PAT_MRT4530_67202C.1
aagatgaagaacacatttaaatgtacatatatgctcggaaacattaaatgtttcgttctcacatttctgatcctgcatgctttgcattgctactattaattaacttgatctcgatatgatattccatgtcatgtcttttacagtagnaaggacggataaattacgtatgcctttcttaa

SEQ ID NO: 66233 - DNA, 5811 bp, Oryza sativa
  Clone ID: PAT_MRT4530_67203C.1
atggacaccgcagctggatgggtagtagaggcgggcgcgctcttacgccacccgcctgtcgtccctgacccggagtctccagcccaacgatggctggacgacgtggccaaattggtcatgacggcacggcagcgcctagatgctggtaggcggtcctccgccaccaaggcctctggtgctgctaccaccggctccgcgtcgtcaagacggagggcacgacgagcggcagccgctgttcgccattcggccgccactccttcgtcgactccttcgacccgggaagatctgcgtggggggccggacgcccgcaccagcgtcgagcgccggcgtaatgaccgaagtgctccccacgcaacggagggcgcttcctcgtccagagtgtcacctcaacacggacgcgggaatcagccctccgtgcccccggttggtggtgtcggctgtagagcctttgtggcgagtcttcggaatgtccgttggcccccaaggttccggcccaccatcgccgaaaaatatgatggcagcgtcaaccccgccgagtttctccaggtctacacgaccgggattgaggccgccgggggtgacgacagagtcatggcgaatttctttcccatggctctgaaggggcaggcgcggggttggctaatgaacttgccacccgcgtcagtccactcctgggaggatttgtgccaacagttcactatgaactttcagggcacatatccgcgcccaggtgaagaagcggacttacacgcagtacagcgaagggacgatgagtcacttcgctcgtacattcagcggttctgtcaagtccgcaacaccataccatgcatccctgcacacgcggtaatctacgcgttcagggggggcgtgcggcacaaccgcatgctcgaaaagatcgcctccaaggagccccagactacagcggagctttttcagctcgcggaccgagtggctcgtaaagaggaggcatggacctggaatccctccggttccggtgtggcagcttcggccgcccccggatccgctgctcagacagggcggcgtgacaggaggaggaagaagaggtcagtccattccgacgacgagggtcatgtcctcgccgtcgagggcgcttcgcgggccacccgaaaggggaggcctgcgagcgacaaaaagaaggaggccagcgctcccagcagggagcgcccaaccggcaagtggtgcaccgtccacaacacctccctccatgacctcgcagactgtcgcgcagtcaaaagcttggctgagcggacaaggaagtgggaggaggagaggaggcaggagcgtcgggaaggcaagtccccggcggttccttccggcaatcggcgaagtgaggccaagcagaaggcccccgccgaggacatcgatgatggcgatgatgacctaggtttccaagagcctggggccaccattgccaccatcgatgggggagcgtgtgctcacgtttctcgccggagcttcaagactatgaagcgagagcttctggccgcggcccctactcatgaggcgacgcgtcgggcgcggtggtcggaggttgccctcaccttcgaccaaaccgaccacccaccgtgcgttgcccagggagggcagattgcaatggtggtttcccccactgtttgcaacgtgaagctggggcgtgtcctcattgatggaggagcagccctcaacatcctttcccccgcggcctttgacgccatcaaggccccggggatggtgctccggccgtcccagccgattatcggtgtgacgccgggacacacttggccgctaggtcatatcgacctcccggtcaccttcggtggatccgccaatttccgcacggagcgggtgaacttcgatgtggcggacctcagtctgccctacaacgcggtcctggggaggcccgcgttggtgaagttcatggcggcggtccactacgcctacctacagatgaagatgccgggccccggtggccccatctctgtccatggtgacctcaaagtcgcgcttgcttgcatggagcagcgcgcagaccatctcgccgccgcgtccaagcccgagggtggcgatgagaggcttggcgcctccgcccccgccaccccgaggcagcggatgatcacatgcgacgaggtcccggaagacgcgctcgtctccttcctgcgggcaaatgctgacgtcttcgcatggagaccggcggatatgcccggggtccccaggaaggtgattgagcaccgtctcgccgtacggccgagcgcaaggccggtccggcagaaagtgcggcggcaggccccggaacgtcaagccttcatccgcgaggaggtggcgcgacttctggaggccggattcatccgtgaggtcatccatccggagtggctggcgaacccggtggtcgttcccaaggcgaacggcaagcttcggatgtgcatcgactacaccgaccttaacaaggcatgtcctaaggatccttaccccctgcctcgcatagatcagattgtcgactccactgcggggtgcgaccttttgtgttttctagatgcatactctggttaccatcagattcgcatggctagggaggatgaggaaaaaactgcgttcattacccccataggaacctattgttatacgacaatgcccttcgggttaaagaatgcaggtcctacttttcaacgtactactcgaatttctttgggtagtcaattagggcgtaatgttgaggcttatgtcgatgacttggttgtaaagacgcgcaaccaagaaacgttactctcagatctagcggaaacttttgagagtctccgctctgcccgcataaaactgaaccccgataagtgcgtgttcggtgtacctgcgggcaagcttctcgggttcttggtctctgcccgaggcatcgaggccaaccccgaaaagatacgagctatagagcggatgcgccccccagcatacttagggatgctgggagagaaggcgctacccttattcaagctcctcaaacgctccgggccgtttacttggacggaggaagctgaacgtgccctcactcagttgaaggcgtatctcagctctcccccagttctggtcgccccggagccaaatgagcccttgctactctacttagcggcgaccccgcaagtagttagtgcagcattggttgtggagcgcgatgaggacaatcctcattccacgcatcctcaccctgtgctggcttggcccgggagagagcagggaggagaggcccccgagccgaacggtggcccaaggcccccgacgaccggagttggccctctgcccgcttgtcagacggtgctaggagcccccgacccccaggaaggccccgaggccactgtgggaaggccgcacctatcgccctttgaccctgaggctaaccctgtgctgactcgacccgggaaaaagcagggagaagaggcccccgagccgaacggaggcctaaggcccctgacgaccggagttggccctttgcccgcttgtccgacgacaacaggagcccccgacccccaggacggccccgaagccactgtggtaaggccgcccctgttatcctccgaccccgaggtcatcagcacagaagacaagtgcgccccgcgaggctgcttggacgaagagtgccccagggatgcggcccctagcgaagagaatcggccccaccgaaaggtgcagcggcccgtctactttgttagtgaggccctccgggacgccaaaacccgataccctcaggcccagaagatgctttacgctattctgatggcctcgaggaaactgcgccattatttccaggcgcatcgggtcactgtggttacgtcttaccccctcggtcaaatcttgcataatcgagagggtacaggacgggtggtgaaatgggcaatcgaactttctgagttcgatttgcactttgaaccacgccacgctatcaagagccaggccctcgccgattttgtggcagagtggaccccggctcccgagcccgtctcaatccccgaggccagcacggacccctcgcagctgcctcacaccgcccactgggtaatgcagttcgacggctccctatctcttcagggcgccggtgcgggggtcacgttgacctctccgagcggagacgtcctcaaatatttggtccgcctcgactttcgagcgaccaataatatggcagagtacgagagactccttgccggactcagagtggcagctggactggggatccgccgcctcctggtgttaggcgactcccagctggtcgttaaccaagtctgtaaggagtaccggtgctctgacctgcagatggacgcctacgtgcgccaagtacggcgtatggagcgccattttgacgggattgagcttcggcatgtgcccagacgggataacatgattgccgacgaactctcacggctcgcgtcctcgcgagcccagaccccaccgggcgcctttgaagaaaggcttgtccagccgtcggcgcgacccgaccccttaggtgagacggacgcgcctgaccggcccccgaggcccgtcggagcccaggcctcgggacccgaggggagcgctcccagctcccttagattgattgtttggatcgccgagatccaagcatacctcacagataagactctacccgaggaccgcgaagggagtgaacgcgtccatcgcatctccaaacgctacgtgctggtagaagggaccctctatcggcgcgcggctaatggaatcctcctgaagtgcattcctcgggaacaaggcgttgtgcttcttgccgatatccatgaaggcgaatgcggagcccactccgcctcgcgcaccttggttggtaaagcttttcgccagggtttctattggccgacagctctcaatgatgcggtcgacctggtccggcgatgtagagcgtgtcaattccacgccaagcaaatccatcagccggcccaggccctgcagaccataccactttcgtggccatttgctgtctgggggctcgatatcctgggaccgtttaggcgggccccgggcgggtttgagtatctgtatgtcgcgatcgacaagttcactaagtggcccgaggcttatccggtcgtcaagatcgataagcactccgcacttaaattcattaagggcatcacggcccggtttggagtgcctaaccgtattattacggataatgacacccaattcactagtgaactcttcggcgactactgcgaagacatgggcatcaagctctgcttcgcctcacctgcccaccccagaagcaatggccaagtggagcgcgccaattcggaaatcctcaaaggccttaaaaccaagaccttcaacatactcaagaagcacggcgattcatggatcgaggagttgccagcggtgctctgggcaaaccgaactacaccaagccgagcaaccggggaaacacctttcttcctcgtctacggcgcggaagcggttctcccatccgagctcaccctgaggtctcctcgggccaccatgtactgcgaggctgatcaagatcagcttcgcagagatgacctcgactacttggaagagcgaaggcggcgcgcggccctccgagccgcgcgctaccagcagagcctgcggcgctaccatcagcgtcacgtccgggcccgatcactctgcgtcgacgacctcatcctacgccgcgtccaaacgcgtgctggattgagcaagctctcaccaatgtgggagggtccgtatcgagtggtcggcgtcccccggctgggctccatacggctggccacgggcgacggcactgagctgcctaacccgtggaacatcgaacaccttcgtcgcttctacccctga

SEQ ID NO: 66234 - DNA, 290 bp, Oryza sativa
  Clone ID: PAT_MRT4530_67204C.1
atataactggacacaatataattgccaattccaaaaaaaatataacacaaagaatcaatttcgcgtgatgttactaacttagatcactgtcttaaggctatacggcactagtttgtgttacaacatatgctgtggccgcctcagcattgccctatatcgcaggtatgatttccatattagcatgcgctatatggattcaggacagcttcaagtagcttcagaaacagcctgctgtttctaagctcgtcacaagcagtctcaagggtctcaaaggacttcttcaggtaatt

SEQ ID NO: 66235 - DNA, 5937 bp, Oryza sativa
  Clone ID: PAT_MRT4530_67205C.1
ttaggggtagaagcgacgaaggtgctcaatgttccatgggttaggcagctctgcgccgtcacccgtggccagccgaacggagcccggccgggggacgccgatcactcgatacggaccctcccacattggtgagagcttgctcaatccagcacgcgtttggacgcggcgtaggacgaggtcgtcgacgcagagtgatcgagcccggacgtggcgctgatggtagcgccgcaggctctgctggtagcgtgcggctcggagggccgcgcgccgccttcgctcttccaagtagtcgaggtcatctctgcgaagctgatcttgatcagcctcgcagtacatggtggcccgagaggacttcagggtgagctcggatgggagaaccgcctctgcgccgtagacgagaaagaaaggcgtttccccggttgctcggcttggtgtggttcggtttgcccagagcactgctggcaactcctcgatccacgaatcgccgtgcttcttgaggatgttgaaggtcttggttttaaggcctttgaggatttccgcattggcgcgctccacttggccattgcttctggggtgggcgggtgaggcgaagcagagtttaatgcccatgtcttcgcagtagtcaccgaaaagctcactagtgaattgggtgccgttatccgtaataatacggttaggcaccccaaaccgggctgtgatgcccttaatgaatttaagtgcggagtgcttatcgatcttgacgaccggataagcctcgggccacttagtgaacttgtcgatcgcgacatacagatactcaaacccgcccggggcccgcctaaacggtcccaggatatcgagcccccagacagcaaacggccatgaaagtggtatgatctgcagtgcctgggccggctgatggatttgcttggcgtggaactgacacgctctgcatcgccggaccaggtcgaccgcatcattgagagctgtcggccaatagaaaccttgacgaaaggctttgccaaccaaggtgcgcgaggcggagtgggctccgcattcgccttcatggatatcagcaagaagctcgacgccttgttcccgaggaatgcacttcaggaggatttcgttagccgcgcgccgatagagggtcccttctatcagcacgtagcgtttggagatgcgctggacgcgttcacttccttcgcggtcctcgggtagagtcttatctgtgaggtatgcttggatctcaacgatccaagcgatcaatctaagggagctgggagcactcccctcgggtcccgaggcctggactccgacgggcctcgggggccggtcaggcgcgtccgtttcccctaaggggtcaggtcgcaccgacggctgggcaagcctttcttcaaaggcgcccggtggggtctgggctcgcgaggaagcgagccgtgagagttcgtcggcaatcgtgttatcccgtctgggcacgtgccgaagctctatcccgttgaaatggtgctccatacgccgtacttggcgtacgtaagcatccatctgcgggtcagagcaccggtattccttacagacctggttaacaaccagctgggagtcgcctaacaccaggaggcggcggatccccagtccagctgccaccctgagtcccgcaaggagtccctcgtactctgccatattattggtcgcccgaaagtcaaggcgaaccaggtatctgaggacgtctccgctcggcgaggtcaatgtgacccccgctccggcgccctgaagagatagggagccgtcgaactgcatcacccagtgggcggtgtgaggcagctgcgaggggcccgagctggcctcggggactgagacgggctcgggagccggggtccactctgccacaaaatcggcgagggcctggctcttgataacgtgacgtggttcaaagtgcaaatcgaactcagaaagttcaattgcccatttcaccacccgtcctgtaccctctcgattatgcaatatttgggcgagggggtaagacgtaaccaccgtgacccgatgcgcctggaaataatggcgcagtttcctcgaagccatcagaatagcgtaaagcatcttctgggcctgagggtatcgggtcttggcgtcccggagggcctcactaacaaagtagacgggccgctgcacctttcggtggggccgatcctcttcgccaggggccgcatccctggggcgctcttcgtccaagcggcctcgcggggcgcacttgtcttctgtgccgacgacctcggggtcggaggacgacaggtgcggccttcccacagtggcctcagggccgtcctgggggtcgggggctcctggcgtcgtcggacaagcgggcaaagggccaactccggtcgtcaggggccttaggccaccgttcggctcgggggcctcttctccctgctctctcccgggtcgagtcggcacagggttaacctcggggtcagagggcgataggtgcggccttcctgcagtggcccccgggccatccttggggtcgggggcacctggcaccgtctgacaagcgggcagagggccagccccggtcgtcgggggccttgggccaccgttcggctcgggagcctctcctccctgtgtcacgctcggaaattcactagtaatttccgaacttatttgtgcataaaatcctcgtccaggaatcagccgaggtacacaaacttcgcaacgacggaaacgacaagctaacacgcaaaacgaagaaaaagactgcggggtcgccgctaagtagagtagcaagggttcacctggctccggggcgaccagaactgggggagagctaagatacgccttcaactgagtgagggcacgttcagcttcctccgtccaggtaaacggcccggagcgtttgaggagcataaataagggtagcgccttctctcccagctggggggggcgcatccattctatagctcgtatcttctcggggttggcctcaatgcctcgggtagagaccaagaacccgagaagcttgcccgcaggtacaccgaacacgcacttatcggggttcagctttatgcgggtggagcggagactctcgaaagtttctgccagatctgaaagtaaagtttctcggtcgcgcgtcttcacaaccaagtcatcgacataagcctcaacattacgtcctatttggctacccaaagaaattcgagtagtacgttgaaaagtaggacctgcattctttaacccgaatggcattgtcgtataacaataagttcctatgggggtaatgaacgcagttttttcctcatcctccctagccacgcgaatctgatggtaaccagagtatgcatctagaaaacacaaaaggtcgcaccccgctgtggagtcgacaatctgatctatgcgaggaagggggtaagggtccttaggacatgccttgttaaggtcggtgtagtcgatgcacatccgaagcttgccattcgccttgggaacgaccaccgggttcgccagccactccggatggatgacctcgcggatgaatccggcctccagaagtcgcgccacctcctcgcggatgaaagcttgacgttccggggcctgccggcgcactttctgccggaccggctttgcgcccggccgcacggcgagacggtgctcaatcacctccctggggaccccgggcatatccgccggtctccatgcgaagacgtcagcgtttgcccgcaggaaggagacgagcgcgtcttcaagtgagcgcgactttgagatcccatggacagagatggggccaccggggcccggcatcttcatctggaggtaggcgtaatggaccgccgccatgaacttcaccaacgcgggcctccctaggaccacgttgtagggcagactgaggtccgccacatcaaagttcacccgttccgtgcggaagttggcggatccaccgaaggtgaccgggaggtcgatatgacctagcggccaagtgtgccccggcgtcacaccgataatcggctgggacagccggagcaccatccccggggccttgatggcgtcaaaggctgcgggggaaaggatgttgagggctgctcccccatcaatgaggacacgccccagcttcacgttgcaaacagtgggggaaaccaccattgcgacctgtcctccccgggcaacgcacggtgggtggtcggtctggtcgaaggtgagggcaacctccgaccaccgcgcccggcgcgttgcctcatgagtaggggccgcggctagaagctctcgcttcatggccttgaggctccagcgagaaacgtgagcacacgctcccccatcgacagtggcaatggtggccccaggctcttggaaacctaggtcatcatcgccgtcatcgatgtcctcggcgggggccttctgtttggcctctcttcgccgattgccggaaggaaccgccggggacttgccctctcggcgctcctgcctcctctcctcctcccacttcctcgtccgctcagccaaacttttgactgcgcggcagtccgtgaggtcgtgaagggaggtgttgtggatggtgcaccacttgccggttgggcgctccctgctgggagcgctggcctcctttttgtcgctcgcaggcctcccctttcgggtggcccgcgaagcaccctcgacggcgaggacatgaccctcgtcgtcggaatgggctgaccttttcttcctcctcctgtcacgccgccctatccgagcagcggatccgggggcggccgaagctgccacaccggaaccggaggggttccaggtccatgactcctccttacgagccactcggtctgcgagctgaaaaagctccgcggtagtctggggctccttggaggcgatcttttcgagcatgcggttgtgccgcacaccccccctgaacgcgtagatcacctcatgtgcagggatgcatggtatggtgttgcggacttgacagaaccgctgaatgtatgagcgaagtgactcatcatcccttcgctgtactgcgtgcaagtccgcttcctcacctgggcgcggatatgtgccttgaaagttcatggtgaactgttggcacaaatcctcccaagagtggacggacgcgggtggcaagttcattagccaaccccgcgcctgtcccttcagggccatgggaaagaaattcgccatgaccctgtcgtcacccccggcggcctcgatcccggtcgtgtagacctggagaaactcggcggggttgacgctcccgtcatatttttcggcgatggtgggccggaaccttgggggccaacggacattccgaaggctcgccacaaaggctctacagccgacaccaccaaccgggggcacggagggctgatccccgcgtccgtgtcgaggtgacactccggacgaggaggcgccctccgttgcgtgggcagcacgtcggccattacgccggtgctcgatactgatgcgggcatccggccccccacgcagatcttcccgggtcggaggcgctgacgaaggagtggcggccgaatggcgaacagcggccgccgctcgccgcgccctccgtcttgacgacgcggagctggtggtagcagtaccagaggtcttggtggcggaggaccgcccaccagcatctaggcgctgccgcgccgtcatgaccaagttggccacgtcgtccagccaacgttgggctggagactccgggtcggggacaatgggcgggtgacgtaggagcgcgcccgtagcttggagcgcgccctggggcgtgctcccgtcgccgtagacgaggaggcgacgctccccatctcgctgcccttctccatcacccgtggatgtcgaagtcgcagatccttcgaccctctcgagcgcctcctcccgcctaggactttggcgtggagggggcggtggagtacgagctcgacggcgtgggttcggctccccgtcgtcaccgctaacactcggagagaggttgtgcgcctttgcttgttcggccat

SEQ ID NO: 66236 - DNA, 345 bp, Oryza sativa
  Clone ID: PAT_MRT4530_67206C.1
aaaatcgaacacggcggcctgggagatctgcttaactccagtgcaggtccaaaactcgccttgggatgtatgagcgtgccagttgatttgatcctgcgatcaacaagaaataaagacaagaaaaccgtagttaatcctataaatgatagccgatcggctaggactctatccttgcgtggcaatcactgtaaagcacatcaactcaactcgataacgtataccgagtcatattatcggaatcggctgtatcggctatcctcatctaactcggactcagccgatctggtcgtagccgatctggactctagccgattcttactctgtttccgcaacgatctccgtctt

SEQ ID NO: 66237 - DNA, 3243 bp, Oryza sativa
  Clone ID: PAT_MRT4530_67207C.1
atggtgctccggccgtcccagccgattatcggtgtgacgccgggtcacacttggccgctaggtcatatcgacctcccggtcaccttcggtggatccgccaacttccgcacggagcgggtgaactttgatgtggcggacctcagtcttccctacaacgcggtcctagggaggcccgcgttggtgaagttcatggcggcagtccactacgcctacctccagatgaagatgccgggccccggtggccccatctctgtccatggcgaccttaaagaacacgcgctcgtctctttcctgcgggcaaacgctgacgtcttcgcatggagaccggcggatatgcccggggtccccagggaggtgattgagcaccgtctcgccgtgcggtcgggcgcaaggccggtccggcagaaagtacggcggcaggccccggaacgtcaagccttcatccgcgaggaggtggcgcgacttctggaggccggattcatccgcgaggtcatccatccggagtggctggcgaacccggtggtcgttcccaaggcgaacggcaagcttcggatgtgcatcgactacaccgaccttaacaaggcatgtcctaaggacccttaccccctgcctcgcatagatcagattgtcgactccacagcggggtgcgaccttttgtgttttctagatgcatactctggttaccatcagattcgcatggctagggaggatgaggaaaaaactgcattaattacccccataggaacttattgttatacgacaatgcccttcgggttaaagaatgcaggtcctacttttcaacgtactactcgaatttctttgggtagccaaataggacgtaatgttgaggcttatgtcaatgacttggttgtaaagacgcgcaaccaagagaccttactctcggatctagcggaaacttttgagagtctccgctccgcccgcataaaactgaaccccgataagtgcgtgttcggtgtacctgcgggcaagcttctcgggtttttggtctctgcccgaggcatcgaggccaaccccgagaagatacgagctatagagcggatgcgcccccccagcaagcttagggatgtgcaatgcgtcaccggttgcatggccgccctaagtcggttcatatcgaggctgggagagaaggcgctacccttatttaagctcctcaaacgctccgggccgtttacttggacggaggaagctgaacgtgccctcactcagttgaaggcgtatctcagctctcccccagttctggtcgccccggagccaaatgaacccttgctactctacttagcggcgaccccgcaagtggttagtgcggcgttggttgtggagcgcgatgaggacaatcctcattccgcgcacccccaccctgtgctgacttggcccgggagagagcagggaggagaggcccccgagccgaacggtggcccaaggcccccgacgaccggagcaggccctctgcccgcttgtcagacggtgccaggtgcccccgacccccaggatggcccgagggccactgcgggaaggccgcacctatcgccctctgaccccgaggctaaccctgtgccgactcgacccgggagagagcagggagaagaggcccccgagccgaacggtggcctaaggcccctgacgaccggagttggccctttgcccgcttgtccgacgacaccaggagcccccgacccccaggacagccccgaggccactgtgggaaggccgcccctgtcgtcctccgaccccgaggtcgtcggcacagaagacgagtgcaccctgcgaggccgcttggacaaagagcgccccagggatgtggcccctagcgaagaggatcggccgcaccgaaaggtgcagcggcccgtctactttgttagtgaggccctccgagacgccaagacccgataccctcaggcccagaagatgctttacgctattctaatggcttcgaggaaactgcgccattatttccaggcgcatcgggtcacggtggttacgtcttaccccctcggccaaatcttgcataatcgagagggtactggacgggtggtgaaatgggcaatcgaactttctgagtttgatttgcactttgaaccacgccacgctatcaagagccaggccctcgccgattttgtggcagagtggaccccagctcccgagcccgtctcagtccccaaggccagctcgggcccctcgcagctgcctcacaccgcccactgggtgatgcagttcgacggctccctgtcttttcagggcgccgagtacgagggactccttgcgggactcagggtgacagctggactgaggatccgccgcctcctggtgttagcagactcccagctggtcgttacccagataagactctacccgaggaccgcgaagggagtgaacgcgtccagcgcatctccaaacgttacgtgctggcgggccccgggcggttttgagtatctgtatgtcgcgatcgacaagttcactaagtggcccgaggcttatccggtcgtcaagatcgataagcactccgcacttaaattcattaagggcatcacagcccggtttggagtgcctaaccgtattattacggataacggcacccaattcactagtgaacttttcggcgattactgcgaagacatgggcatcaagctctgcttcgcctcacctgcccaccccagaagcaacggccaagtggagcgcgccaatgcggaaatcctcagaggccttaaaaccaagaccttcaacatcctcaagaagcacggcgattcgtggatcgaggagttgccagcggtgctctgggcgaaccgaaccacgccaagccgagcaaccggggaaacgcctttctttctcgtctacggcgcggaagcggttctcccatccgagttcaccctgaggtcccctcgggccaccatgtactgcgaggctgatcaagatcagcttcgcagagatgacctcgactacttggaagagcgaaggcggcgcgcggccctccgagccgcgcgctaccagcagagcctgcggcgctaccatcagcgccacgtccgggcccgatcactctgcgtcgacgacctcgtcctacgccgcgtccaaacgcgtgctggattgagcaagctctcaccaatgtgggagggtccgtatcgagtgatcggcgtcccccggccgggctccgttcggctggccacgggcgatggcacagagctgcctaacccgtggaacatcgaacaccttcgtcgcttctacccctaa

SEQ ID NO: 66238 - DNA, 5649 bp, Oryza sativa
  Clone ID: PAT_MRT4530_67208C.1
atggccgaacaagcaaaggcgcacaacctctctccgagtgttagcggtgatgacggggagccgaacccacgccgtcgagctcgtactccaccgccccctccacgccaaagtcctaggcgggaggaggcgctcgagagggtcgaaggatccgcgacttcgacatccacgggtgatggagaagggcgccgagatggggagcgtcgcctcctcgtctacggcgacggcagcacgccccagggcgcgctccaagctgcgggcgcgctcctacgtcacccgcccgtcgtccctgacccggagtctccagcccaacgttggctggacgacgtggccaacttggtcatgacggcacggcagcgcctaggtgctggtgggcggtcctccgccaccaagacctctggcgctgctaccaccggctccgtgtcgtcaaggcggagggcgcggcgagcggcggctgttgctcgccattcggccgccactccttcgtcagcgcctccgacccgggaagatctgcgtggggggccggatgcccgcatcagtatcgagcgccggcgtaatggccgacgtgctgcccacgcaacggagggcgcctcctcgtccggagtgtcacctcaacacggacgcggggatcagccctccgtgcccccggttggtggtgtcggctgtagagcctttgtggcgagccttcggaacgtccgttggcccccaaggttccggcccaccatcgccgaaaaatatgacgggagcgtcaaccccgccgagtttctccaggtctacacgaccgggatcgaggccgccgggggtgacgacagggtcatggcgaatttctttcccatggctctgaagggacaggcgcggggttggctaatgaacttgccacccgcgtcagtccactcttgggaggatctgtgccaacagttcaccatgaactttcaaggcacatatccgcgcccaggtgaagaagcggacttacatgcagtccagcgaagggatgatgagtcacttcgctcatacattcagcggttctgtcaagtccgcaacaccataccatgcatccctgcacacgcggtgatctacgcgttcaggggggggcggcgtgacaggaggaggaagaaaaggtcaacccattccgacgacgagggtcatgtcctcgccgtcgagggtgcttcgcgggccacccgaaaggggaggcctgcgagcgacaaaaagaaggaggccagcgctcccagcagggagcgcccaaccggcaagtggtgcaccgtccacaacacctcccttcacgacctcgcggactgccgcgcagtcaaaagtttggctgagcggacgaggaagtgggaggaggagaggaggcaggagcgccgagagggcaagtccccggcggttccttccggcaatcggcgaagtgaggctaagcagaaggcccccgccgaggacatcgatgacggcgatgatgacctaggtttccaagagcctggggccaccattgccactgtcgatgggggagcgtgtgctcacgtttctcgccggagcctcaaggccatgaagcgagagcttctggccgcggcccctgctcatgaggcgacgcgccgggcgcggtggtcggagtttgccctcaccttcgaccagactgaccacccaccgtgcgttgcccggggaggacagatcgcaatggtggtttcccccactgtttgcaacgtgaagctagggcgtgtcctcattgatgggggagcagccctcaacatcctttcccccgcagcctttgacgccatcaaggccccggggatggtgctccggccgtcccagccgattatcggtgtgacgccggggcacacatggccgttaggtcatatcgacctaccggtcaccttcggtggatccgccaacttccgcacggagcgggtaaacttcgatgtggcggacctaagtctgccctacaacgcggtcctagggaggcccgcgttggtgaagttcatgccggcggtccattacgcctacctccagatgaagatgccgggccccggtggccccatctctgtccatggcgacctcaaagtcgcgcttgcttgtatggagcagcgcgcgggccacctcgccgctgcgtccaagcccgagggtggcgacgagaggcttggcacctccgtccccgccgccccgaggcagcggatgatcacatgcgacgaggtcccggcaaacgctgacgtcttcgcatggagaccggcggatatgcccggggtccccagggaggtgattgagcaccgtctcgccgtgcggccgggcgcaaagccggtccggcagaaagtgcggcggcaggccccggaacgtcaagctttcatccgcgaggaggtggcgcgacttctggaggccggattcatccgcgaggtcatccatccggagtggctggcgaacccggtggtcgttcccaaggcgaacggcaagcttcagatgtgcatcgactacaccgaccttaacaaggcatgtcctaaggacccttaccccctgcctcgcatagatcagattgtcgactccacagcggggtgcgaccttttgtgttttctagatgcatactctggttaccatcagattcgcatggctagggaggatgaggaaaaaactgcgttcattacccccatagcaacttattgttatacgacaatgcccttcgggttaaagaatgcaggtcctacttttcaacgtactactcgaatttctttgggtagccaaataggacgtaatgttgaggcttatgtcgatgacttggttgtgaagacgcgcgaccgagaaactttactttcagatctggcggaaactttcgagagtctccgctccgcccgcataaagctgaaccccgataagtgcgtgttcggtgtacctgcgggcaagcttctcggcaagcttagggatgtgcaatgcgtcaccggttgcatggccgccctaaatcggttcatatcgaggctgggagagaaggcgctacccttatttaagctcctcaaacgctccgggccgttcacttggacggaggaagctgaacgtgccctcactcagctgaaggcgtatctcagctctcccccagttctgatcgccccggagccagatgaacccttgctactctacttagcggcgaccccgcaagtagttagtgcggcgttggttgtggagcgcgatgaggacaatcctcattccgcgcatccccaccctgtgctggcttggcccgggagagagcagggaggagaggcccccgagccaaacggtggcccaaggcccccgacgaccggagctggccctctgcccgcttgtcagacggtgccaggtgcccccgacccccaggatggcccgggggccactgcgggaaggccgcacctatcgccctctgaccccgaggttaaccctgtgccgactcgacccgggagagagcagggagaagaggcccccgagccgaacggtggcctaaggctcccgacgaccggagttggccctttgcccgcttgtccgacgacgccaggagcccccgacccccaggacggccctgaggccactgtgggaaggccgcacctgtcgtcctccgaccccgaggtcgtcggcacagaagacaagtgcgccccgcgaggccgcttggacaaagagcgccccagggatgcggcccctggcgaagaggatcggccccaccgaaaggtgcagcggcccgtctactttgttagtgaggccctccgggacgccaagacccgataccctcaggcccagaagatgctttacgctattctgatggcttcgaggaaactgcgacattatttccaggcgcatcgggtcacggtggttacgtcttaccccctcgcccaaatcttgcataatcgagagggtacaggacgggtggtgaaatgggcaattgaactttctgagttcgatttgcactttgaaccacatcacgctatcaagagccaggccctcgccgattttgtggcagagtggaccccggctcccgagcccgtctcagtccccgaggccagctcgggcccctcgcagctgcctcacaccgcccactgggtgatgcagttcgacggctccctgtctcttcagggcgccggtgcgggggtcacgttgacctcgccgagcggagacatcctcagatacctggttcgcctcgattttcgggcaaccaataatatggcagagtacgagggactccttgcgggactcagggtggcagctggactggggatccgccgcctcctggtgttaggcgactcccagctggttgttaaccagaccccaccgggcgcctttgaagaaaggcttgcccagccgtcggcgcgacctgaccccttaggggagacggacgcgcctgaccggcccccgaggcccgtcagagtccaggcctcgggacccgaggggagcgctcccagctcccttagattgattgcttggatcgctgagatccaagcatacctcacagataagactctacccgaggaccgcgaagggagtgaacgcgtccagcgcatctccaaacgctacgtgctgatagaagggaccctctatcggcgcgcggctaacggaatcctcctgaagtgcattcctcgggaacaaggcatcgagcttcttgctgatatccatgaaggcgaatgcggagcccactccgcctcgcgcaccttggttggcaaagcctttcgtcaaggtttctattggccgacagctctcaatgatgcggtcgacctggtccggcgatgcagagcgtgtcaattccacgccaagcaaatccatcagccggcccaggccctgcagatcataccactttcatggccatttgctgtctgggggctcgatatcctgggaccgtttaggcgggccccgggcgggtttgagtatctgtatgtcgcgatcgacaagttcactaagtggcccgaggcttatccggtcgtcaagatcgataagcactccgcacttaagttcattaagggcattacagcccggtttggggtgcctaaccgtattattacggataatggcacccaattcattagtgaacttttcggcgattactgcgaagacatgggcatcaagctctgcttcgcctcccccgcccaccccagaagcaatggccaagtggagcgcgccaatgcggaaatcctcagaggccttaaaaccaagaccttcaacatcctcaagaagcacggcgattcatggatcgaggagttgccagcggtgctctgggcgaaccgaaccacaccaagccgagcaaccggggaaacgcctttcttcctcgtctacggcgcggaagcggttctcccatccgagctcaccctgaggtcccctcgggccaccatgtactgcgaggctgatcaagatcagcttcgcagagatgacctcgactacttggaggagcgaaggcggcgcgcggccctccgagccgcacgctaccagcagagcctgcggcgctaccatcagcgccacgtccgggcccgatcactctgcgtcgacgacctcgtcctacgctgcgtccaaacgtgtgctggattgagcaagctctcaccaatgtgggagggtccgtatcgagtgatcggcgtcccccggccgggctccgttcggctggccacgggtgacggcatagagctgcctaacccatggaacattgagcaccttcgtcgcttctacccctaa

SEQ ID NO: 66239 - DNA, 171 bp, Oryza sativa
  Clone ID: PAT_MRT4530_67209C.1
atgggcaagctcggtcttttgaaggcgaggcgccttttccaagacaatgagaaggccgctctgcctcccgccgagcggaaattgcagaggaattgggcaccaaggtggttcggccgaacccatgctggccccaatccctctcaatttccacagatgaacttgtatttgtga

SEQ ID NO: 66240 - DNA, 4346 bp, Oryza sativa
  Clone ID: PAT_MRT4530_6720C.1
atgggggaaaatcaaggaattgaacaggtgatgggaaaattggtagatatgcttgcaaagaaactcagtgagacctctactactatcaatgcaattgttcctcatgctgaatcagtacaaaaaattgagttgatgcaaaatgatattaagttggagggtgtcaaaaattatttgagttggacaaggagagcaatgttgattttaaagacaaaggggttagaaggatatgtcataggagaagtgaaggagcctgagagcacaagtgtagaatggaaaacttgaagtactaccaactctttagtggtagcgtggtagttgacctcactaatccctgctattgctacaactgttgagaccatctctagtgcgagtgagatgtggaaaactctcactaatctatactcagaagaaggtaatatgatgctaatgatggtggcacaagagaagataagtgctttgaaacagggggagcgcctatggcagaatatgtcgcagagttgaagtgtttgtgatttgatttagattattatgatcctcttgggttagagcattctaattacatagcaaaaatgaagaaatgggtagagcgtaaaagggtccttgagtttttgaagggcttaaatccggagttcaaaggaagaagagatgcaatgtttcaccaaaccactcttcctaccttagatgtggctattgcaactatggcacaagaggagcttaagaagaaactatttcctatgccacatcgtcttcatcaagtcccacctatgcaattgtacaaggtaataaaactagagagtgctttaattgtggtgaaatggggcatcttatgtgtgattgtcgtgcttctcacaagcctagttatggaagaggaagaaatggtgatagaggaggagcaagaggtggaagaggttatgaaagtagagataacagaggtagaggctatgagtacagaggtgatcacaaagctaatgtggtcactcttgaagggggttcttctgaacctataaatgttgatgttaccaactttgttcattccacctcagataattcaaatcaagcatttatgtccatcaatggttcttatccaaattggatattagactctagtgcattacacatgtaacgagtatgcgtggggcatttgcatcatataaaccatacccatttacacgtaaagaaacaattcaaattgccgatggaacatcatgcccacttaagggagagggtacagtgcagtgtactccttcaatcactttatcatcagtgttatatatttcttcctttccagtgaatttggtttcaaaaagttttcttgttgatcatatggactgtcaagtctcccttgatcgtgagaattgtttaattcaggagaggcaaacagggaagaaacttgggattggtgtcaggcatgatggactttcgtatttggatcggggaaggactaatgaagccatgtgtctagctttgatggcttccacaagtgaagaagagctaaggtgttatttttgcactgtcgattgggacatatatcttttgaaattataagtaaaatatttccagtagagttcagtagagtggataaacataagttagtatgtgatgcttgtgagtatgggaaacatacaaaaatgtcatatgtgagtagaggactccgaagtatgttgccctttatgctaattcactcagatatttggacctcacctgtggtttctatgagtggaatgaagtattttgtcacctttattgattgctactctcgcatgacatggatatatcttatgaggcacaaggacgaggtgcttaaatgcttccagaatttttatgcttacattaaaaatcattttaatgctcgggtttagtttattagaactgacaatggaggggagtatataaataagaatttagtaactttctttcatcagaaggaatattacatcaaacttcttgtcctgatactcctccacaaaatggggtggctgagaagaaaaatcatcatcatttggagacagctcgttcattgatgtatactatgaatgtacctaaattcttgtggagtgtggctgtaatggcagcaacatatcttatcaatcgtacaccatcgggaatacttgggatgaagacaccatatgagatgatatttcacaagaatgtatttgttcttccaccaaaggtgtttggttgcacatgctttgtcagaaacaacagaccttctgttgcaaaacttgatcttcataggttattcctctggccagaaggggtataagtgttggagtccatcagaacaatgaacatttgtaagtacggatgttacttttagagaatttgttccattttatgatgagaaaatagatttaagttcttttttttgttgatcttgataattcaactagtgtaatcatgataaacaaagggaggataaaataatgggttccaaggaagatgaacaagcgaaggagaaaaaagttgtgattggccaaatcccagttgatatgaatgatcctatataagagcaagagttgagaaagccacatgaagaggaaaatcttcaagtttacaaaaggagggcaagatttccagtgatccaataagttgtagaggataattaagtagtgggagatgcaagtcatgtgcaagtgcctttggagttagggggagaagaggatgaagttagagaagaagaatctaacttaccaattgccgtcagaaagggtgtaaaaagcaatgtaggtaaacctccctaagatatggttttgaagctcaagatgagggtaatgatgagaataacatatccaactatatttcttatgactctttgtcatctacatataaggcctttgtagcatcggtagatttagtgggaattctaaagaattggagagaagcaaagcaagatccaaaatgacatcaaactatgctggatgatctagaggctcttgagaagaacaaaacatggaatcttgtaccatttcctgaagggaagaaagttgtcaactgtaagtgggtatatacaataaagcaaaaccttaatggaaagaaggaaaggtagaaagcaaggcttgttgctaaggggtatagtcaaacatatggaattgattatgatgaaacttgtacaactaattttgattggtcactgcatcaattagatgtcaaaaatgcatttttacatggagaccttcaagaagtggtgtatatggatatcccacctggatttagcacttcacaaactgaaggaaaaaagtgttgaggttgaagaaatctttatatggtctcaaacaatcaccaggagaatggtttgattgttttcaacgtgtaatgtgtggcatgggttataagcaatgtaatggggatcatacatcattctatcatcataagggatgtcacgctactatctttgccgtgtatgtggatgacatgattatcattggggatgattctatagagatagcaagattaaaagaaaatctaagtaaggaatttgaacttaagaatttgggtcagctgaaatacttaggcattgagattgcaagatctcctagagggatagtactttcacaatgaaagtatgcgttagatctactcagtgacacaggtatgcttggttgtcgaccagcctctacacaaattgaacaaaaccataagttgtgtgctgaattaggagacccagtaaataaagagagttatcaaagacttgtgggacaggtgatatacttgtgtcatacaagacctgatataacccatgctgtaagtgtgataagtcagtatatgcataatcctagaagtggtcacatggatgctgtgtatagaattttgagatatttgaagggaagcctaggtaagggcttatggttcaagaaaattgacatcttgatgtggagggatactgtgatgcagatcagggcaactgtcttgatgatagaaggtcaatatcaggctattgtgtatttgttcgtggcaatttagtatcttggagaagcaagaaacaattggtggtgtctcgttcaactgctgaggcagaatacaagtcaatgtcgattagtttgagcgagttgttatgggtaagagatcttctaactgaattgaagttgatgataaacattcccatgaagttatggtgcgacagcaaatcagccattaatattgctaacaattcagtccaacatgatcgaacaaaacatgtggagaccgatcgcttctttattaaagaaaggatagatgacaaaaccttgaagttaaactttgtgaattctagagaacaagtggttgattgtttaacgaaggctttaggtgttaaatagtgtatgtcgtcatgtagcgagatgggcatgatagatatttatcgcccatct

SEQ ID NO: 66241 - DNA, 3360 bp, Oryza sativa
  Clone ID: PAT_MRT4530_67210C.1
accggcgaataggcccagggtccccagggaggtgattgagccccgtctccccgtgcggccgggcgcaaggccggtccggcagaaagtgcggcggcaggccccggaacgtcaagccttcatccgcgaggaggtggcgcgacttctggaggccagattcatccgcgaggtcatccatccggagtggctggcgaacccggtggtcgttcccaaggcgaacggcaagcttcggatgtgcatcgactacaccgaccttaacaaggcatgtcctaaggacccttaccccctgcctcgcatagatcaaattgtcgactccaccgcggggtgcgaccttttgtgttttctagatgcatactctggttaccatcagattcgcatggctagggaggatgaggaaaaaactgcattcattacccccataggaacctattgttatacgacaatgcccttcgggttaaagaatgcaggtcctacttttcaacgtactactcgaatttctttgggtagccaaataggacgtaatgttgaggcttatgtcgatgacttggttgtgaagacgcgcaaccaagagaccttactctcggatctagcggaaacttttgaaagtctccgctccgcccgcataaagctgaaccccgataagtgcgtgttcggtgtacctgcgggcaagcttctcgggttcttggtctctgcccgaggcatcgaggccaaccccgagaagatacgagctatagagcggatgcgcccccccagcaaacttagggatgtgcaatgcgtcaccggttgcatggccgccctaagttggttcgtatcgaggctgggagagaaggcgctacccttatttaagctcctcaaacgctccgggccgtttacttggacggaggaagctgaacgtgccctcactcagttgaaggcgtatctcagctctcccccggttctggtcgccccggagccagatgagcccttgctactctacttagcggcgaccccgcaagtagttagtgcagcgttggttgtggagcgcgatgaggacaatcctcattccgcgcatctccaccctgtgccgacttggcccgggagagagcagggagaagaggcccccgagccgaacggtggcctaaggcccctgacgaccggagttggccctttgcccgcttgtccgacgacgccaggagcccccgacccccaggacggccccgaggccactgtgggaaggccgcccttgtcgtcctccgaccccgaggtcgtcggcacagaagacaagtgcgccccgcgaggccgcttggacgaagagcgccccagggatgcgacccctggcgaagaggatcggccccaccgaaaggtgcagcggcccgtctactttgttagtgaggccctccgggacgccaagacccgataccctcaggcccagaagatgctttacgctattctgatggcttcgaggaaactgcgccattatttccaggcgcatcgggtcacggtggttacgtcttaccccctcgtccaaatcttgcataatcgagagggtacaggacgggtggtgaaatgggcaattgaactttctgagttcgatttgcactttgaaccacgtcacgctatcaagagccaggccctcgccgattttgtggcagagtggaccccggctcccgagcccgtctcagtccccgaggccagctcgggcccctcgcagctgcctcacaccgcccactgggtgatgcagttcgacggctccctgtctcttcagggcgccggtgcgggggtcacgttgacctcgccgagcggagacgtcctcagatacctggttcgccttgactttcgggcgaccaataatatggcagagtatgagggactccttgcgggactcagggtggcagctggactggggatccgtcgcctcctggtattaggcgactcccagctggtcgttaatcagataagactctacccgaggatcgcgaagggagtgaacgcgtccagcgcatctccaaacgctacgtgctggcgggccccgggcgggtttgagtatctgtatgtcgcgatcgacaagttcactaagtggcccgaggcttatccggtcgtcaagatcgataagcactccacacttaaattcattaagggcatcacagcccggtttggagtgcctaaccgtattattacggataacggcacccaattcactagtgagcttttcggtgactactgcgaagacatgggcatcaagctctgcttcgcctcacccgcccaccccagaagcaatggccaagtggaacgcgccaatgcggaaatcctcaaaggccttaaaaccaagaccttcagcatcctcaagaagcacggcgattcgtggatcgaggagttgccagcggtgctctgggcgaaccgaaccacaccaagccgagcaaccggggaaacgcctttctttctcgtatacggcgcggaagcggttctcccatccgagctcaccctgaggtcccctcgggccaccatgtactgcgaggctgatcaagatcagctgcgcagagatgacctcgactacttggaggagcgaaggcggcgcgcggccctccgagccgcgcgctaccagcagagcctgcggcgctaccatcagcgccacgtccgggcccgatcactctgcgtcgacgaccttcgtcttacgccgcgtccaaacgcgtgctggattgagcaagctctcaccaatgtgggagggtccgtatcgagtgatcggcgtcccccggccgggctccgttcggctggccacgggcgacggcacagagctgcctaacccgtggaacattgagcaccttcgtcgcttctacccctaatggggttcgggctcgggtcggctaaaatcgccaaaaggggcccagaaccgagccgtgccccggggcgtggtgaactccgggggggaatcggcaaaaacccacaatcgggtcacccataaccctcggtcaccacgctcccggcctggccagtctcgacacgtggatctccccaggcactagcctcgacccgcgccatctgaggctgggacctgggcacgagcccggagttggccctttgcccgcttgtccgacgacgccaggagcccccgacccccaggacggccccgaggccactgtgggaaggccgctcctgccatcctccgaccccgaggtcatcggcacagaagacgagtgcgccccgagaggccacttggacgaagaacgccccggggatgcggcccctggcgaagaggatcggccccgccgaaaggtgcagcggcctgtctactttgttagtgaggccctccgggacgccaagacccgataccctcaggcccagaggatgctttacgctattctgatggcctcgaggaaactgcgccat

SEQ ID NO: 66242 - DNA, 357 bp, Oryza sativa
  unsure (1)..(357): unsure at all n locations
  Clone ID: PAT_MRT4530_67211C.1
ccaaccgccaagccttggttcctggaatatttgtttccaacttggaagggaaccacctgttttctttaaccttttccaattaaaatttttttggaacccaattttaataccggaaaccaatttccaaaataaatgnagtatgaatggtaccacttccttgcccacttgccccttccccaatccctaagaattttcctgtttttcnttccactcttgcntgccaaaaccattttctttcaatggggaccacctccaattttggtcaaggttacccggaatggtaccagcaagcttctaccagaactggtccagttcataaatctttatgttttgaactgtgcacaaaaaaaaaaaaaa

SEQ ID NO: 66243 - DNA, 159 bp, Oryza sativa
  unsure (1)..(159): unsure at all n locations
  Clone ID: PAT_MRT4530_67212C.1
gctgcttgcttcagtatcggcttctctatcatcggccttacattgaaattgaaaaattttgntcgtgaattttgttccattgttgtgcatatgattgtggatgtactgtttggctttgcagtcattcttcattgttcttgagaatgcatggagtgtaca

SEQ ID NO: 66244 - DNA, 648 bp, Oryza sativa
  Clone ID: PAT_MRT4530_67213C.1
ttacatctgtatatagtgaaataagtttttctcatgtgagaaatgacttcatgtaatataaaaaaaatgaacttatgatatttacatatttctatttaaatcataccaaatttgtccatatgatcacaaatgatctaccatgcattgttgtaaccgactcaatactgatatattagtatttatgagttattatattttaagtgtatatgacagctcaatttctcagaaatacttggtaggttgcgtgtatgtgatcataagctctgtgtgtacacatgagattctatactgtatttggggaaaaaactgtctaaagataatttcctttatttggatttacaaaaataaagaaaacgtttcactacatatatattaccatgccatccagaaaaccactcttgtgtgagttcttataaacttttcatattcttcgtaagcacgcttctaactattaaacgatatgtttaatgtaaaatttttctatggagtatctttaaaaatcaaataaataatttttttcaagtttaaaaaaattaatgctactagattagttactctagtggtttttcaataattagcatagagtatatgctaacggtttttcacgtttcacgcccgtgtcgaaaatctaagcctaatcgttgaaac

SEQ ID NO: 66245 - DNA, 1005 bp, Oryza sativa
  Clone ID: PAT_MRT4530_67214C.1
atggatcgcaacaagctaaggtcatttaatcaagatgacttcagtcttgatctccgaactttgcagacagcaacaaataacttcgacgagcgaaataggctcagggaaggtggttttggtatggtttataagggaactcttttagatggtcaagagatagcagtgaagagactatcacattgttcaaagcaagggttaaatgagctgaaaaatgagctagttttggttggcaagcttcaacacaaaaaccttgtacgagtactgggtgtttgcgtggaaaagcaagaaaagttgcttgtgtatgagtacatgcccaatagaagcttggacaccttcatttttgatcgagacaaaagcaaagaattaggttgggagaaaagattcaagatcataattgaaatcgctcgaggtttagagtacctgcatgaagagtctagattgaagataatccaccgtgatctcaaagcaaacaacattctgttagactctgatttaactccggagatttcagactttggattggcaaagttgtttggagaagatcaatcacatgttgtcacaaatcgagttgctgggacatattttggtgttcttattcttgagatcatcacgggaagaagaagcatgggttccttcaacgaccatgagcaatcttttagccttctggaccttatatggcagcactggaacagcgggacaattctaaatctggtggatccttcgctgtccagagacgccggcggccagctgatccagagagaccagctgctggggtgcatccatgtcgccctgctgtgcgtgcaggagaaccccgccgaccggccgaagctgtcggcggtgaccatgatgatcggcggcggcagcaacagcacggcgtcgctcaaccctccgtcgaggccggcgttctgcatgcacccggcggatgccacgcggacggcctccggcggcgagacggcggccgcgtcggccaaccgtgtgtccctcaccgaactccagccaagatag

SEQ ID NO: 66246 - DNA, 240 bp, Oryza sativa
  Clone ID: PAT_MRT4530_67215C.1
atggctgagctgatgctgcgcctcgtcgcgcaccacagctgcgccgcctcgcttgtcacgttctccggcctcgcctcgccaacatcagtgtcctccgtcgccgctgtcgtggacctcgacgaagcgtggttgagacgggtgggtgccgcagacctcaatgagtcacttaaacaagatggtggagctagatgtgcaattttcaagattatagacctaagtgacacccgcgctcaactttaa

SEQ ID NO: 66247 - DNA, 249 bp, Oryza sativa
  Clone ID: PAT_MRT4530_67216C.1
atggtggcggcgtcgccaggcttgcagacgggggccaagagccggctttgcagcggcgtcttcttcggcgaggtcgaccttggtggcaaggctgcgccggggagaaaggtgtcaggatcatgcgtatgtcagtacagctttcgaatcaatggttcagtttggcttatgccttatggagttatggtaatcaatggttcagtatgtcagtacggctttcgaatcaatggttcagtttggcttatgccttag

SEQ ID NO: 66248 - DNA, 380 bp, Oryza sativa
  unsure (1)..(380): unsure at all n locations
  Clone ID: PAT_MRT4530_67217C.1
caagagctgatggtgctggccgagaagaggcactcaagcaggtagctgatattggttgagtagaagctcttcagctggagctataacggtgcaggagatctacgctgatgacgtctctaaccgggagctgttctacatcgcacaagagatggccgttcgctacaagcttgtggaaggcctctatggtcgaagagatggctatggtgacattggttgcgtgatggataggggtgccacaggataaatggctatcggaagtgctaagctgaaggaccaaagcgccaacggcaagaagttcaagtgatggttacatgagtctagatggtcagncagtcagacgagtacattgactcagctgtgagacacgtgtttctaagaca

SEQ ID NO: 66249 - DNA, 264 bp, Oryza sativa
  Clone ID: PAT_MRT4530_67218C.1
atggctgagctgatgctgcgcctcgtcgcgcaccacagctgcgccgcctcgcttgtcacgttctccggcctcgcctcgccaacatcagtgtcctccgtcgccgctgtcgtggacctcgacgaagcgtggttgagacgggtgggtgccgcagtcaacccggttagaggtcctttagacctcaatgagtcacttaaacaagatggtggagctagatgtgcaattttcaagattatagacctaagtgacacccgcgctcaactttaa

SEQ ID NO: 66250 - DNA, 487 bp, Oryza sativa
  Clone ID: PAT_MRT4530_67219C.1
gctaaaatcgctattttatccgggcttacatgtcgtatatagattacatacacataatagtagaaaatatcctaaaaagcatcgaaatggagaacacgggtacacgcttcacccttgtcaaaagttcacatgatacatcacctgtaatgtaaataaagtgtattgctcagatatacaagtcagatatataaggtatagctgagataagaaaaggagaagctctttcgataagaggcaagcataaaatcgatgcaaaaaggaattgcttgtatggaatataactatatagttcaaacaaattcgattccctactggtcaaacagaaatgcattagtatcgagcactacaagctcaatgagtactacaaatactgaagactaacttagcttccatgtgacagggggatttcacttgtagttaaagttgtagttacaaggcaaaaacttgcaatagttcccaatgctcacattctaaatcttgcactatc

SEQ ID NO: 66251 - DNA, 517 bp, Oryza sativa
  Clone ID: PAT_MRT4530_6721C.1
cccgggctgcaggaattcggcacgcgcgtggcaaacccgcgctctctctctctctctctctctctccccctccctgccgctgctgccgccaccgccgcggcggcgccccgattcggtgatcccccgctcgcccatctccgccgtgacgtatcggcgacgcggagggagccccccaccccccacctccggatctagggtttcgaggcccaggtggcgttgcgctgcgcccccgctcctccgcctctcctccgccgccgagggttcgcgtgaggtttctgcgtattaccagctctgtacttaatttactagtgagaagcaaaatgaagtgcaatgcttgctggcgggagttggaagggcaagctgtatcaacaacctgcggtcatcttttatgtacagaggatgctaagaaaatactgagcaatgatgctgcatgcccgatttgtgatcaagtgctctaaaaagccatatgagacctggtgatacaaattcaaatgatgattggacacatatgtcaatg

SEQ ID NO: 66252 - DNA, 654 bp, Oryza sativa
  Clone ID: PAT_MRT4530_67220C.1
tttttcgcggtggcggcgctcttgtcgcggggaccccccggctgcagggggctttatcagctgcatgagggatactaggcgcctgtttaccagacgatgtaggtttatcggtacagaggaccgcattgtcaaaagagcaaaaaaaaaaacatcgaactgctaccaggtagaaggtaactcgcattacaaatccaaaagtccgccctttaagctactcggagagaataaaacaccatggcatcatccttgtggtctcaaccttcttaataatcaaaacagtggtgcatcaaacattttcctcttccacttcgtctccatcttcatcgtcgtcttcttcttcataagggtctccataagagtcttcattttcgtcttcgtcttcatgagagtcctcatcttcatcttcctccacttcgtcctggtcattgtcatatccttccaaaatctcgatttccttaaaactaaaaagtgcccaaaatacaaacaggtacttcacagcttgtattacgaggtgctccaccgtttcaaactggatttcaactatctcaagatgtgctgatattacaagtgaactatccattgaatggcagtttcctttgattttcattctatgtataggtcccttggaacagatctgaagaatgagattctcta

SEQ ID NO: 66253 - DNA, 486 bp, Oryza sativa
  Clone ID: PAT_MRT4530_67221C.1
atgccaagattcgtgcatcggcttctctcctccaactccggcgggctcctcttcttctccggcgccggcgacaccccaactccggcgggttagggaccgtgggcagcggaggaccgcggtgggcggtggactccagcgggcagcgaggcggcggcggcgccgaagccgtggggatggaggagggcggtgggccggcgtcggcggcgagggcaaatcaagggtgggattaggaggcggcggccggtggtggcggatccggcggcggggagctgccggagacggggaagacggcggggcgggggcacctcgtcgttgcgccatgaggagaaagtgaggggggaaggggagggggaagggggagggggaggggctcgccgggggggcctcaccggcgccgttgaccttttccggccagccagcgaggcgggcggcggcgcggtggggcggtggcggtggtggcggcagcggatcgcgcgtgggacggga

SEQ ID NO: 66254 - DNA, 350 bp, Oryza sativa
  Clone ID: PAT_MRT4530_67222C.1
gatccgatacactgggcatcgttttataacactgactgggactcttgcaagcctaacctgccctttacacagtagcaacgtccactggcgctctcgtgaaaagagcaagtgccctaatttaagatggtaaaccggcattgttggcatttcaacacatcgcctgacaaacgccataaactgcaactaaatttgaggctcaacgagattcgatcgcactacgagaacgtgagccaccacggctgcccaacgaaccatttacatctttatgacttgcgcataccgtactaccattggtataggactttgattgcttcttgagcttgggctgagcccggtggctatgacagggc

SEQ ID NO: 66255 - DNA, 425 bp, Oryza sativa
  Clone ID: PAT_MRT4530_67223C.1
attttatatgctgagagagagagagagagggagagaggtgaataatatacacaaacgagccagccgagctcgatcatgggcaccgtccttggggagttgacggacgacagcgccggcggcttatacacaccatgtgcgagcgctgccaaggaggagaagccagcggtggtgctgccaccagcggctgcgcacaggggaggcaccctccgcggacgcggcagcggttgtccggtgctgctgagacaccgccctgcaggccgaccgctacggatacaatcatgctaagagcatttcctaccctacgctgcctttttcgagggcaaccaggctatggtcgccaaggtggccgccaccattctgagcaccaacctttgggtgtacggccaccaattgcgcaaggtccagggaggggccggcaaggggga

SEQ ID NO: 66256 - DNA, 560 bp, Oryza sativa
  Clone ID: PAT_MRT4530_67224C.1
gcacgaggccctacttccttgggcaatgcttcgtggctcaatcagatagatttttccaataatagctggtcactggtcaagttcctagttcgttcggcaagctaaaaaaacctgcgttctctgaaccttgagagaaatagtcttgaagccaatgacagccaaagctgggacttcctttatgcgatgacaaactgtagtagtttacgagtactgtcggtatctttaaatcagttacgcggatatataccaaattcgataggcaacttatctagtgttcttgtgcaaataactatgagtggaaacatgatttcaggggtagttcccccaagcatagggaaccttcaatcgttaattcagctgtcactagatgagaacaatttaagtggtacaatcgaagaatgggttggaaaactaacccaattacaaaatcttaatctccaactaaataacttcactgggccaattccatcatctatcggaaaccttactcaggtaacgaaggtcttattagggagcaatcaatttgaaggtcccatcccatcaaccttgggaaatcttga

SEQ ID NO: 66257 - DNA, 221 bp, Oryza sativa
  Clone ID: PAT_MRT4530_67225C.1
aagcttcgggtaatgattgggtggagagtattgtattcgaagtggggtagatgtgtttaggtttaaaaaatggggatcttattattattgtttgttatttgtttcaccttttcgattgatgagatgtgatgtgagggaggcctggtcatagatatgcttcgcgttgttgcagacaatatagtttaatactgaaattgaccattacgaaaaaaaaaaagctt

SEQ ID NO: 66258 - DNA, 285 bp, Oryza sativa
  Clone ID: PAT_MRT4530_67226C.1
atggctttatacgaattagcggtttttgatccctctaatcctgttctggatccaatgtggagacaaggaataaccaattcgtggggtggttggagtgtttcagaaggaactgcaacgaatccaggggtggcttgctttggctttggcgcatttcatgtaacgggtttgtatggtcttgggatacgggaaagcgacgataactggaacatcagaagctattcaggcagcagagtctatgataacgcagaggatggagattgtcaagttaggagaaaagaagtctga

SEQ ID NO: 66259 - DNA, 234 bp, Oryza sativa
  Clone ID: PAT_MRT4530_67227C.1
gccacagctagggttgacaacccaaatatggggttggtgacaaccatgagaaataggaacgatgaagccagcaccaatatggaggagtgtgcggagatgagccatgtgggtggtgacatgcctgatgggcaggtggatcaatggggcaccgagcaagatggagtgatcccacaaggagactcttaggcagcggcacacggagagctcagggctgtgttggtgcttcacaaccat

SEQ ID NO: 66260 - DNA, 740 bp, Oryza sativa
  Clone ID: PAT_MRT4530_67228C.1
atggcaaggccccggccacctcctccgccgtccctgctgctgctgctgctgcgcccgccgcggctcccgcggtggcgccacgcaaggttcttcttggtggcgaacgcgatcgtggcagggtacctggtgctgtccctccctttctccgccgtcctcgtgataaggcctcagaccatcggcctcaggcttctcctgctcgtctgcgacatgatcatggcggcgatgctgacggcggcggcgtctgcggcggcggcgatcgtggacctggcgcacaacggcaacctgcgggcgaactgggtggccatatgcatgcagttccacggcttctgccagcgaaccagcggatccgtcgttgcctccttcctcaccgtcgtcatcctcatgttcctcgtcatcttggccgcctgctctatccgcaagcgctagcttaatcatcttgctagctaattaaaaaagattgtgcttaattatacatgcatataatatttacgtttgatttctatctgcatgcgcgagcgagtgcgtttttattttcgaattgtaatcctcttctgtactacatgcatttctttacttgtgagcattggcattggcgagtgatcgagcagtagtgcattgtaaaagttcacctgtgcatctatcgtttcactttctttctttcttgtaaaagatcaacgttgtgtgatcatcgtgctctgtaatctgaattgaacagcttgtttacaaacaaacattctgtt

SEQ ID NO: 66261 - DNA, 416 bp, Oryza sativa
  Clone ID: PAT_MRT4530_67229C.1
ggccattctgtcgcttattttggattttacagccttgttatgaaaaaactggaatcccattttgatggccaacacaacccaaaatgcctggaaacgttttcttacacagagctttttcgtgtttttggaaaaactttaaagcaaaaacctccccctttgaaaatactcctcttgatccaaggccagaaaaatctcttattttggccggctacttagaaaaagggccaccaattcgggtgcacttgatgcatctttgacgttggacgcgcatgtagctccacaaatcatatggttgcccatgatcttctagaaaaaaacattgaaaatgcactctgccccaaaggacttaaaaaccttccaattataaaggcccttttcaacccgatctttggcacaaaattctttttggtccactt

SEQ ID NO: 66262 - DNA, 486 bp, Oryza sativa
  Clone ID: PAT_MRT4530_6722C.1
atggcgctagctcgtagggaggtcgaggcaagccgccaccaccgccagactccccaagctcctgggagttcaccaacaacggcgaccgcccctcttgcacattccttggcgagaaaatggggatggccggtcgagctcggtgacgacgccgcccgcggccgcgcgcaccagcctgctggccctcctccccacagcgtcgcccgtcgccgtcttgagggcgctggcgcgagatctgcggccatggacgacgacggcggcagtgtcctcgctctccccgtcggcgccatcttcctctcccacaacgtgcctgcccactgcccgtctgctctgtcggctggccgctccccgcgctgtcgcccggtcctccggcaggcctgtgcagcaggtggggtccacgtggggcccacgctgactcatcccgccacgtcagacaaaaccgggctcaaaaccgccagaggatctcaagcgaacggttttgttagttga

SEQ ID NO: 66263 - DNA, 672 bp, Oryza sativa
  Clone ID: PAT_MRT4530_67230C.1
atggcgccgcagaagaggacgacgctggtctacagcttcgtggcgcgcggcgcccccccgctggccgaccacgccgaggtctccggcaacttcgcctccgtcgccgcgcagtgcctccagaagctcccctccaccaacaaccgccacagctacaactgcgacggccacaccttcaactaccatgtccacgacggattcacatactgtgttgttgctaccgagtctgctggtcggcaacttccagttggcttcattgagagagtaaaggaagatttttccaagaaatatagtggaggaaaagcaaagaatgctaccgcgaatagcctcaagcgagaatatgggcctaaacttaaagaacacatgaagtactgtgatgcgcaccctgaggagattgacaagcttgccaaagtgaaggctcaggttacagaggtcaaaggagttatgatgcaaaacattgaaaaggttttagatcgtggtgagaaaattgagctgcttgtcgacaagacagaggatctccgctcacaggcacaagactttagaaaagcgggaacaaagattcggcgaaagatgtggtgggagaatatgaagatgaagctcattgttttcggcattgtagttgcattgatcctcgtcatcatcttgacggtttgccgtgacttgaactgctggtaa

SEQ ID NO: 66264 - DNA, 4881 bp, Oryza sativa
  Clone ID: PAT_MRT4530_67231C.1
atggacaagaatgaccgatttgtgaccggtcagacactggtcatgtcgtcagcagacagccatgatcccacgtcgcgcctgcctccggcggaagtggaggtaggggaagcggacttgcacgcagtacagcgaagggatgatgagtcacttcgctcgtacattcagcggttctgccaagtccgcaacaccataccatgcatccctgcacacgcggtgatctacgcgttcagggggggtgtgcggcacaaccgcatgctcgaaaagatcgcctccaaagagcccccgactaccgcggagctttttcagctcgcggaccgagtggctcgtaaggaggaggcatggacctggaacccctccggttccggtgtggcagcttcggccgcccccggatccgctgctcagacagggcggcgtgacaggaggaggaagaagaggtcagcccattccgacgacgagggtcatgtcctcgccgtcgagggcgcttcgcgggccacccgaaaggggaggcctgcgagcgacaaaaagaagaaggccagcgctcctagcagggagcgcccaaccggcaagcggtgcaccgtccacaacacctcccttcacgacctcgcggactgccgcgcagtcaaaagtttggctgagcggacgaggaatgaggccaagcagaaggcccccgccgaggacattgatgacggcgatgatgacctaggcttccaagagcctggggccaccattgccaccgtcgatgggggagcgtgtgctcacgtttctcgccggagcctcaaggccatgaagcgagagcttctggccgcggcccctactcatgaggcgacgcgccgggcgcggtggtcagaggttaccctcaccttcgaccagaccgaccacccaccgtgcgttgcccggggaggacagattgcaatggtggtttcccccactgtttgcaacgcgaagctggggcgtgtcctcattgatggaggagcagccctcaacatcctttcccccgcagcctttgacaccatcaaggccccggggatggtgctccggccgtcccagccgattatcggtgtgacgccaggtcacacttggctgctaggtcatatcgacctcccggtcaccttcggtggatccgccaacttccgcacggaacgggtgaactttgatgtggcggacctcagtctgccctacaacgcggtcctggggaggcccgcgttggtgaagttcatggcggcggtccactatgcctacctccagatgaagatgccgggccccggtggccccatctctgtccatggcgacctcaaagtcgcgctcgcttgtatggagcagcgcgcggaccacctctccgccgcgtccaagcccgagggtggcgacgagaggcttggcacctccgtccccgccgccccgaggcagcgaatgatcacatgcgacgaggtcccgaaagtgcggcggcaagccccggaacgtcaagccttcatccgcgaggaggtggcgcgacttctggaggccggattcatccgcgaggtcatccatccggagtggctggcgaacccggtggtcgttcccaaggcgaacggcaagcttcggatgtgcatcgactacaccgaccttaacaaggcatgtcctaaggacccttacctcctgcctcgcatagatcagattgtcgactccaccgcggggtgcgaccttttgtgttttctagatacatactctggttaccatcagattcgcatggctagggaggatgaggaaaaaactgcgttcattacccccataggaacttattgttatacgacaatgccctttgggttaaagaatgcaggtcctacttttcaacgtactactcaaatttctttgggtagccaaataggacgtaatgttgaggcttatgtcgatgacttggttgtaaagacgcgcaaccaagagaccttactctcagatctagcggaaacttttgagagtctccgctccgcccgcataaaactgaaccccgataagcatcgaggccaaccccgagaagatacgagctatagagcggatgcgccccccagcaatcttagggatgtgcaatgcgtcaccggttgcatggccgccctaagtcggttcatatcaaggctgggagagaaggcgctacccttattcaagctcctcaaacgctccgggccgtttacttggacggaggaagctgaacgtgccctcactcagttgaaggcgtatctcagctctcccccagttctggtcgccccggagccaaatgagcccttgctactctacttagcggcgactccgcaagtagttagtgcagcattggttgtggagcgcgatgaggataatcctcattccgcgcatccccaccctgtgctggcttggcccgggagagagcagggaggagaggcccccgagccgaacggtggcccaaggcccccgacgaccggagctggccctctgcccgcttgtcagacggtgccaggtgcccccgacccccaggatggcccggcggccactgcgggaaggccgcacctatcaccctctgaccccgaggctaatcctgtgccgactcgacccgggagagagcagggagaagaggcccctgagccgaacggtggcctaaggcccctgacgaccggagttggccctttgcccgcttgtccgacgacgctaggagcccccgacccccaggacggccccgaggccactgtgggaaggccgcccctgtcgtcctccgaccccgaggtcgtcggcacagaagacgagtgcgtcccgcgaggccgcttggacgaagagcgccccagggatgcggcccctagcaaagaggattggccccaccgaaaggtgcagcggcccgtctactttgttagtgaggccctccgggacgccaagacccgataccctcaggcccaaaagatgctttacgctatcctgatggcttcgagaaaactgcgccattatttccaggcgcatcgggtcacggtggttacgtcttaccccctcggtcaaatcttgcataatcgagagggtactggacgggtggtaaaatgggcaatcgaactttctgagtttgatttgcactttgaaccacgccacgctatcaagagccaggcccttgccgattttgtggcagagtggaccccagctcccgagcccgtctcagtccccgaggccagctccgacccctcgcagctgcctcacaccgcccactgggtgatgcagttcgacggctccctgtctcttcagggcgccgagtacgagggactccttgcgggactcagggtggcagctggactggggatccgccgcctcctggtgttaggcgactcccagctggtcgttaaccaggtctgtaaggagtaccggtgctctgacccgcagatggacgcttacgtgcgccaggtacggcgtatggagcgccattttgacgggatagagcttcggcacgtgcccaggcgggataacacgattgccgacgaactctcacggctcgcttcctcgcgagcccagaccccaccgggcgcctttgaagaaaggcttacccagccgtcggcgcgacccgaccccttaggggagacggacgcgcctgaccggcccccgaggcccgtcggagtccaggcctcgggacccgaggggagcgctcccagctcccttagattgattgcttggatcgctgagatccaagcatacctcacagataagactctacccgaggaccgcgaagggagtgaacgcgtccagcgcatctccaaacgctacgtgctggtagaagggaccctctatcggcgcgcggctaacggaatcctcctgaagtgcattcctcgggaacaaggcgtcgagcttctcgccgatatccatgaaggcgaatgcggagcccactccgcctcgcgcaccttggttggcaaagcctttcgccagggtttctattggccgacagctctcaatgatgcggtcgacctggtccgacagtgcagagcgtgtcaattccacgccaagcaaatccatcagtcggcccaggccctgcagatcataccactttcatggccatttgctgtctgggggctcgatatcctcgggccgtttaggcgggccccgggcgggtttgagtatctgtatgtcgcgatcgacaagttcactaagtggcccgaggcttatccggtcgtcaagatcgataagcactccgcacttaaattcattaagggcatcacagcccggtttggagtgcctaaccgtattattacggataacggcacccaatttactagtgaacttttcggtgactactgcgaagacatgggcatcaagctctgcttcgcctcacctgcccaccccagaagcaatggccaagtggagcgcgccaatgcagaaatcctcagaggccttaaaaccaagaccttcaacatcctcaagaagcacggcgattcgtggattgaggagttgccagcggtgctctgggcaaaccgaaccacaccaagccgagcgaccggggaaacgcctttcttcctcgtctacggcgcggaagcggttctcccatccgagctcaccttgaggtctcctcgggccaccatgtactgcgaggctgatcaagatcagcttcgcagagatgacctcgactacttggaagagcgaaggcggcgcgcggcccttcgagccgcgcgctaccagcagagcctgcggcgctaccatcagcgccacgtccgggcccgatcactctacgtcgacgacctcgtcctacgccgcgtccaaacgcgtgctggattgagcaagctctcaccaatgtgggagggtccgtatcgagtgatcggcgtcccccggccgggctccgttcggctggccacgggcgacggcacagagctgcctaacccgtggaacatcgaacaccttcgtcgcttctacccctaa

SEQ ID NO: 66265 - DNA, 5211 bp, Oryza sativa
  Clone ID: PAT_MRT4530_67232C.1
atgacggcgcagcagcgcctaggcgccggtgggcggtcctccgccaccaaggcctctggcgctgctaccgccggctccgtgtcgtcgaggcgaagggcgcggcgagcggcggccgttacccgccgttcgtctgccattccctcgtcaacgcctccgacccaagaagatgtgcgtacggggccggatgcccgcctcagtatcgagtgccggcgcaatggtcgtcgtgctgcccacgcaacggaaggcgcttcctcgtccggagcgccacttcggttcgggcgcgggggccagccccccgtgcccccggttggtggtgtcggctgtcgagcctttgtggcgagccttcggaacgtccgttggcccccaaggttccggcccaccatcactgaaaaatatgacggaagcgtcaaccccgccgagtttctccaggtctacacgaccgggatcgaggccgccgggggtgacgacagggtcatggcgaatttcttccccatggccctgaagggacaggcgcggggttggctaatgaacttgccgcccacgtcggtccactcttgggaggatctgtgccagcaattcaccatgaacttccaaggcacatatccgcgcccaggtgaagaagcggacttgcatgcggtacagcgaagggacgatgagtctcttcgctcgtacattcagcggttctgtcaagttcgcaacaccataccatgcatccccgcacacgcggtaatctacgcgttcagggggggcgtgcggcacaaccgcatgctcgaaaagatcgcctccaaggagccccagaccaccgcggaactttttcagctcgcggaccgtatggctcgcaaggaggaggcctggacctggaactccaccggttccggtgtggcagcttcggccgcccccggatccaccgctcggtcagggctgcgggacaggaggaggaagaagaggtcggcccattccggcgacgagggtcacgtcctcgccgtcgagggcgcttcgcgggccacccgaaaggggaggcctgcgagcgacaaaaagaaggaggccggcgctcccagcagggagcgcccgaccggcaagtggtgcaccgtgcacaacacctctctccacgacctcgcggactgccgcgcggtcaaaagtttggctgagcggacgaggaagtgggaggaggagaggaggcaggagcaccgtgagggcaaggccccggcggctccctccggcaaccggcgaagtgaggccaagcagaaagcccccgccgaggacatcgacgatggcgacgatgacctagggttccaggagcctggggccaccatcgccactgtcgatgggggagcgtgcgctcacgcttctcgtcggagcctcaaggccatgaagcgagagcttctggccgcggcccctacccatgaggcgacgcggcgggcgcggtggtcggaggttgccctcaccttcgaccagaccgaccacccgccgtgcgttgcccggggaggacagatcgcgatggtggtttcccccaccgtttgcaatgtaaagttggggcgtgtcctcatagacgggggtcatatcgacctcccggtcaccttcggtggatccgccaacttccgcacggagcgggtgaacttcgatgtggcggacctcagtctgccctacaacgcggtcctggggaggcccgcgttggtgaagttcatggcggcggtccactacgcctacctccagatgaagatgccgggccccggtggccccatctctgtccatggcgaccttaaagtcgcgcttgcttgtatggagcagcgcgcggaccacctcgccgccgcgtccaagcccgaggatggcaacgagaggctcagcacctccgtcccagccgccccgaggcagcggatgatcacgtgcgacgaggtcccggaagacgcgctcgtctccttcctgcgggcaaacgccgacgtcttcgcctggagaccggcggacatgcccggggtccccagggaggtgattgagcaccgtctcgccgtgcggccgggcgcaaggccggtccggcagaaagtgcggcggcaggccccggaacgtcaagccttcatccgcgaggaggtggcgcgacttttcgaggccggattcatccgagaggttatccatccggagtggctggcgaacccggtcgtcgttcccaaggcgaacggcaagcttcggatgtgcatcgactacaccgaccttaacaaggcatgtcctaaggacccttaccccctgccacgcatagatcagattgtcgactccaccgcggggtgcgaccttttgtgttttctagatgcatactctggttatcatcagattcgcatggctagggaggatgaggaaaaaactgctttcattacccccataggaacttattgttatacgacaatgcctttcgggttaaagaatgcaggtcctacttttcagcgtactactcgaatttctttgggtagccaaataggacgtaatgttgaggcctatgttgatgacttggttgtgaagacgcgcaaccaagagaccttactctcggatctagcggaaactttcgaaagtctccgctccgcccgcataaaactgaaccccgacaagtgcgtgttcggtgtgcctgcgggcaagcttctcgggttcttggtctctgcccgaggcatcgaggccaaccccgagaagatacgagctatagagcggatgcgcccccccagcaagcttagggatgtgcaatgtgtcaccggctgcatggccaccctaagtcgattcatatcgaggctgggagagaaggcgctacccctatttaagctcctcaaacgttccgggccgtttatctggacggaggaggctgagcgggccttcactcagttgaaggcgtacctcagttctcccccagtcctggtcgccccggagccagatgagccgctgctactttacctggcggcaaccccgcaggtggatggccccggggccactgcgggaaggccgcgcctgccgccctccgaccccgaggtcgtcggcacagaagccgagtgcgccccgcgcggcctctcggatgaagagcgccctggagatgcggcccctagcgaagaggatcggccccgccgaaaggtgcagcggcccgtctacttcgttagcgaggccctccaggacgctaagacccgataccctcaggcccagaagatgctttacgctattctgatggcttcgaggaagttgcgccattattttcaggcgcatcgggtcacggtggttacgtcttaccccctcggccaaatcttgcataaccgagagggtactggacgggtggtgaaatgggcaatcgaactctctgagttcgatttgcactttgaaccacgccacgcgatcaagagccaggccctcgccgactttgtggcagagtggaccccggcccctgagcccatctccgtccccgaggccagctcgggcccctcgcagctgcctcacaccgcctactgggtgatgcagttcgacggctccctatctcttcagggcgtcggtgcgggggtcacgttgacctcgccaaacggagacgtcctcagatacctggttcgcctcgactttcgggcgaccaataatatggcggagtacgagggactccttgcgggactcagggtggcagctggactggggatccgtcgcctcctggtctgtaaggagtaccggtgctctgacccgcagatggacgcttacgtgcgccaagtgcggcgtatggagcgccattttgacgggatagagcttcggcacgtgcccagacgggataacgcggtcgccgatgaactctcgaggctcgcttcctcgcgagcccagaccccaccgggcgcctttgaagaaaggcttgcccagccgtcggcgcggcccgaccccctaggggagacggacgcgcctgaacggcccccgaggcccgtcggagtccaggcctcgggacccgaggggagcgctcccagctcccttagattggttgcttggatcgctgagatccaggcatacctcacagataagactctacccgaggaccgcgaagggagtgaacgcgtccagcgcatctccaagcgctacgtgctggtggaagggaccctctatcggcgcgcggctaacggagtcctcctgaggtgcattcctcgggaacaaggcgtcgagcttcttgccgatatccatgaaggcgagtgcggagcccactccgcctcacgcaccttggttggcaaggcctttcgccaaggtttctattggccgacggctctcaacgatgcggttgacctggtccggcagtgcagggcgtgccagttccacgccaagcaaacccatcagccggcccaggccctgcagaccatacctctttcatggccgtttgctgtctgggggctcgatatcctgggtccgtttaggcgggccccgggcgggttcgagtatctgtatgtcgctgtcgacaagttcactaagtggcccgaggcttacccggtcatcaagatcgataagcactccgcgcttaaattcatcaggggcatcactgctcggtttggggtgcctaatcgtatcattacggataacggcacccagttcactagtgaactctacggtgactactgcgaagatatgggcatcaagctctgcttcgcctctcccgcccaccccagaagcaatggacaagtggagcgcgccaacgcagaaatcctcaagggcctcaaaaccaaaaccttcaacatcctcaagaagcacggcgactcgtggatcgaggagttgccagcggtgctctgggcgaaccgaaccacgccaagccgagcaaccggggaaacgcctttcttcctcgtctacggcgcggaggcggttctcccatccgagctcaccctgaggtcccctcgggccaccatgtactgcgaggctgttcaagatcagcctcgcagagatgacctcgactacttggaagagcgaaggcggcgcgcggccctccgagccgcgcgctaccagcagagcctgcggcgctaccatcagcgccacgtccgggcccgatcactctgcgtcgatgacctcgtcctatgccgcgtccaaacgcgtgctggactgagcaagctctcaccaatatgggagggtccgtatcgagtgatcggcgtcccccggccgggctctgttcggctggccacgggcgacggcatagagctgcctaatccgtggaacatcgaacaccttcgtcgcttctacccctag

SEQ ID NO: 66266 - DNA, 4725 bp, Oryza sativa
  Clone ID: PAT_MRT4530_67233C.1
atggagaaggacggcgagacggggagcgtcgccttctcgtctacggcgatgcatcgcctaggcaccggtgggcggtcctccgccaccaaggcctctggcgctgctaccgccggctccgtgtcgtcgaggcggagggcgcggcgagcggcggccgttacccgccgttcgtcagccattccctcgtcaacgcctccgacccaagaagatgtgcgtagggggccggatgcccgcctcagtatcgagcgccggcgcaatggtcgtcgtgctgcccacgcaacggaaggcgcttcctcgtccggagcgccacttcggttcgggcgcgggggccagcctcctgtgcccccggttggtggtgtcggctgtcgagcctttgtggcgagccttcggaacgtccgttggcccccaaggttccggcccaccatcaccgagaaatatgacggaagcgtcaaccccgccgagtttctccaggtctacacgaccgggatcgaggccgctgggggtgacgacaggcggttctgtcaagtccgcaacaccataccatgcatccccgcacacgcggtaatctacgcgttcagggggggcgtgcggcacaaccgcatgctcgaaaagatcgcctccaaggagccccagaccaccgcggagctttttcagctcgcggaccgtgtggctcgcaaggaggaggcctggacctggaactccaccggttccggtgtggcagcttcggccgcccccggatccgccgctcggtcagggcggcgggacaggaggaggaagaagaggtcggcccattccgacgacaagggtcacgtcctcgccgtcgagggcgcttcgcgggccacccgaaaggggaggcctgcgagcgacaaaaagaaggaggccggcgcttccagcagggagcgcccgaccggcaagtggtgcaccgtgcacaacacctccctccacgacctcgcggactgccgcgcggtcaaaagtttggctgagcggatgaggaagtgggaggaggagaggaggcaggagcgccgtgagggcaaggccccggcggctccctccggcaaccggcgaagtgaggccaagcagaaggcccccgccgaggacatcgacgatggcgacgatgacctagggttccaggagcctggggccaccatcgccaccgtcgatgggggagcatgcgctcacgcttctcgtcggagcctcaaggccatgaagcgagagcttctggccgcggcccctacccatgaggcgacgcggcgggcgcggtggtcggaggttgccctcaccttcgaccagaccgaccacccgccgtgcattgcccggggaggacagatcgcgatggtggtttcccccaccgtttgcaacgtgaagttggggcgtgtcctcatagacgggggtgcagccctcaacatcctttcccccgcagcctttgacgccatcaaggccctggggatggtgcttcggtcgtcccagccgattataggtgtgacgccggggcacacttggccgctaggtcatatcgacctcccggtcaccttcggtggatccgccaacttccgcacggagcgggtgaacttcgatgtggcggacctcagtctgccctacaacgcggtcctggggaggcccgcgttggtgaagttcatggcggcggtccactacgcctacctccagatgaagatgccaggccccggtggccccatctctgtccatggcgacctcaaagtcgcgcttgcttgtatggagcagcgcgcggaccacctcgccgccgcgtccaagcccgagggtggcaacgagaggctcagcacctccgtcccagccgccccgaggcagcggatgatcacgtgcgacgaggtcccggtcaaggaggaagacgcgctcgtctccttcctgcgggcaaacgccaacgttttcgcctggagaccggcggacatgcccggggtccccagggaggccccggaacatcaagccttcatccgcgaggaggtggcgcgacttctggaggccggattcatccgtgaggtcatccatccggagtggctggcgaacccggtcatcgttcccaaggcgaacggcaagcttcggatgtgcatcgactacaccgaccttaacaaggcatgtcctaaggacccttaccccctgccacgcatagatcagattgtcgactccaccgcgggccaaataggacgtaatgttgaggcctatgttgatgacttggttgtgaagacgcgcaaccaagagaccttactctcggatctagcggaaactttcgaaagtctccgctccgcccgcataaagctgaaccccgataagtgcgtgttcggcgtgcctgcgggcaagcttctcggggatgtgcaatgcgtcaccggctgcatggccgccctaagtcggttcatatcgaggctgggagagaaggcgctacccctatttaagctcctcaaacgctccgggccgtttatctggacggaggaggctgagcgggccttcactcagttgaaggcgtacctcagttctcccccagtcctggtcgccccggagccagatgagccgctgctactttacctggcggcaaccccgcaggtggtcagcgcggcgttggttgtggagcacgacgaggacaaccctcaccccgcgcatccccaccctgtgtcgactcgacccgggagagagcagggaggagaggcccccgagccgaacggcggcccgaggcccccgacggccggagctggccctccgcctgcttgtcagacggtgccaggcgcccccgacccccaggatggccccggggccactgcgggaaggccgcgcctgtcgccctccgaccccgaggtcgtcggcacagaagccgagtgcgccccgcacgacctctcggacgaagagcgccctggagatgcggcccctagcgaagaggatcggccccgccgaaaggtgcagcggcccgtctacttcgttagcgaggccctccgggacgctaagacccgataccctcaggcccagaagatgctttacgctattctgatggcttcgaggaagttgcgccattattttcaggcgcatcgggtcacggtggttacgtcttatcccctcggccaaatcttgcataaccgagagggtactggacgggtggtgaaatgggcaatcgaactctctgagtttgatttgcactttgaaccacgccacgcgatcaagagccaggccctcgccaactttgtggcagagtggaccccggcccctgagcccatctccgtccccgagaccagctcgggcccctcgcagctgcctcccaccgcctactgggtgatgcagttcgacggctccctatctcttcagggcgccggtgcgggggtcacgttaacctcgccaaacggagacgtcctcagatacctggttcgcctcgacttccgggcgaccaataatatggcggagtacgagggactccttgcgggactcagggtggcagctggactggggatccgccgcctcctggtgttaggcgactcccagctggtcgttaaccaggcgtacctcacagataagactctacccgaggaccgcgaagggagtgaacgcgtccagcgcatctccaagcgctacgtgctggtggaagggaccctctatcggcgcgcggctaacggagtcctcctgaagtgcattcctcaggaacaaggcgtcgagcttcttgccgatatccatgaaggcgagtgcggagcccactccgcctcacgcaccttggctggcaaggcctttcgccagggtttctattggccgacggctctcaacgatgcggttgacctggtccggcggtgcagggcgtgccagttccacgccaagcaaacccatcagccggcccaggccctgcagaccatacctctttcatggccgtttgctgtctgggggctcgatatcctgggtccgtttaggcgggccccgggcggtttcgagtatctgtatgtcgctgtcgacaagttcactaagtggcccgaggcttacccggtcatcaagatcgataagcacaccgcgcttaaattcatcaggggcattactgctcggtttggggtgcctaatcgtatcattacggataacggcacccagttcactagtgaactcttcggtgactactgcgaagatatgggcatcaagctctgcttcgcctctcccgcccaccccagaagcaatggccaagtggagcgcgccaacgcagaaatcctcaagggcctcaaaaccaaaaccttcaatatcctcaagaagcacggcgactcgtggatcgaggagttaccagcggtgctctgggcgaaccgaaccacgccaagccgagcaaccggggaaacgcctttcttcctcgtctacggcgcggaggcagttctcccattcgagctcaccctgaggtcccctcgggccaccatgtactgcgaggccgatcaagatcagctttgcagagatgacctcgactacttggaagagcgaaggcggcgcgcggccctccgagccgcgcgctaccagcagagcctgcggcgctaccatcagcgccacgtccgggcccgatcactctgcgtcgacgacctcgtactacgccgcgtccaaacgcgtgctggactgagcaaactctcaccaatgtgggagggtccgtatcgagtgatcggcgtcccccggccgggctccgttcggctggccacggccgacggcacagagctgcctaatccgtggaacatcgaacaccttcgtcgcttctacccctag

SEQ ID NO: 66267 - DNA, 6176 bp, Oryza sativa
  Clone ID: PAT_MRT4530_67234C.1
atggaacatatcgtgcgcgcgttaattacgctcgccgaccgaagcgccatcatcatatctctaggaaaaacgaaccggcttgtcccgatttttagaccggcccagatgagagtctctaggcactcgtccctagccggagccagcgtgctagctcctggagatggcacgttggtcctggtcagatatatgccaggctttatcccaaccattataagcaagacgttgtatgaagaagggcgaacatgcagattgctaaactgacacgtggtggacaaaggcgggaggaggcgctcgagagggtcgaaggatccgcgacttcgacatccacgggtgatggggaagggcggcgagatggggagcgtcgcctcctcgtctacggcgacggcagcacgccccagggcgcgctccaagctgcgggcgcgctcctacgtcacccgcccattgtccctgacccggagtctccagcccaacgttggctggacgacgtggccaacttggtcatgacggcgcggcagcgcctaaatgctggtgggcggtcctccgccaccaagacctctggtactgctaccaccggctccgcgtcgtcaagacggagggcgcggcgagcggcggccgctgttcgccattcggccgccactccttcgtcagcgcctccgacccgggaagatctgcgtggggagccggatgcccgcatcagtatcgagcgccggcgtaatggccgacgtgctgcccacgcaacggagggcgcctcctcgtccggagtgtcacctcaacacggacgcggggatcagccctccgtgcccccggttggtggtgtcggctgtagagcctttgtggtgagccttcggaacgtccgttggcccccaaggttccggcccaccatcgccgaaaaatatgacgggagcgtcaaccccgccgagtttctccaggtctacacgaccgggatcgaggccgccgggggtgacgacagggtcatggcgaatttctttcccatggccctgaagggacaggcgcggggttggctaatgaacttgccacccgcgtccgtccactcttgggaggacttgtgccaacagttcaccatgaactttcaaggcacatatccgcgtccaggtgaggaagcggacttgcacgcagtacagcgaagggatgatgagtcacttcgctcatacattcagcggttctgtcaagtccgcaacaccataccatgcatccctgcacacgcggtgatctacgcgtttagggggggtgtgcggcacaaccgcatgctcgaaaagatcgcctccaaggagccccagactaccgcggagctttttcagctcgcggaccgagtggctcgtaaggaggagtcatggacctggaacccctccggttccggtgtggcagcttcggccgcccccggatccgctgctcggacagggcggcgtgacaggaggaggaagaaaaggtcagcccattccgacgacgagggtcatgtcctcgccgtcgagggtgcttcacgggccacccgaaaggggaggcctgcgagcgacaaaaaggaggccagcgctcccagcagggagcgcccaaccggcaagtggtgcaccgtccacaacacctcccttcacgacctcgcggactgccgtgcagtcaaaagtttggctgagcggacgaggaagtgggaggaggagaggaggcaggagcgccgagagggcaagtccccggcggttccttccggcaatcggcgaagagaggccaaacagaaggcccccgccgaggacatcgatgacggcgatgatgacctgggtttccaagagcctggggccaccattgccactgtcgatgggggagcgtgtgctcacgtttctcgccggagcctcaaggcgatgaagcgagagcttctggccgcggcccctactcatgaggcgatgcgccgggcgcggtggtcggaggttgccctcaccttcgaccagaccgaccacccaccgtgcattgcccggggaggacaggtcgcaatggtggtttcccccactgtttgcaacgtgaagctggggcgtgtcctcattgatgggggagcagccctcaacatcctttcccccgcagcctttgacgccatcaaggcctcggggatggtgctccggccgtcccagccgattatcggtgtgacgccggggcacacttggccgctaggtcatatcgacctcccggtcaccttcggtggatgcgccaacttccgcacggaacgggtgaactttgatgtggcggacctcagtctgccctacaacgcggtcctagggaggcccgcgttggtgaagttcatggcggcggtccattacgtctacctccagatgaagatgccgggccccggtggccccatctctgtccatagcgacctcaaagtcgcgctcgcttgtatggagcagcgcgcggaccacctcgccgctgcgtccaagcccgagggtggcgacgagaggcttggcacctccgtccccgccgccccgaggcagcggatagtcacgtgcgacgaggtcccggaagacgcgctcgtctccttcctgcgagcaaacgctgacgtcttcgcatggagaccggcggatatgcccggggtccccagggaggtgattgagcaccgtctcgccgtgcggccgggcgcaaagccggtccggcagaaagtgcgccggcaggccccggaacgtcaagctttcatccgcgaggaggtggcgcgacttctggaggccggattcatccgcgaggtcatccatccggagtggctggcgaacccggtggtcgttcccaaggcgaacggcaagcttcggatgtgcatcgactacaccgaccttaacaaggcatgtcctaaggacccttacccccttcctcgcatagatcagattgtcgactccacagcggggtgcgaccttttgtgttttctagatgcatactctggttaccatcagattcgcatggctagggaggatgaggaaaaaactacgttcattacccccataggaacttattgttatacgacaatgccattcgggttaaagaatgcaggtcctacttttcaacgtactactcgaatttctttgggtagccaaataggacgtaatgttgaggcttatgtcgatgacttggttgtgaagacccgcgaccgagaaactttactttcagatctggcggaaactttcgagagtctccgctccacctgcataaagctgaaccccgataagtgcgtgttcggtgtacctgcgggcaagcttctcgggttcttggtctctgcccgaggcattgaggccaaccccgagaagatacgagctatagaacggatgcgcccccccagcaagcttagggatgtgcaatgcgtcaccggttgcatggccgccctaagtcggttcatatcgaggctgggagagaaggcgctacccttatttaagctcctcaaacgcttcgggccgtttacctggacggaggaagctgaacgtgccctcgctcagttgaaggcgtatcttagctctcccctagttctggtcgccccggagccaggtgaacccttgctactctacttagcggcgaccccgcaggtagttagtgcggcgttagttgtggagcgcgatgaggacaaccctcattccgcgaatccccaccctgtgttggcttggcccgggagagagcagggaggagaggctcccgagccgaacggtggcccaaggcccccgacgaccggagctggccctctgcccgcttgtcagacggtgccaggtgcccccgacccccaggatggcccgggggccactgcgggaaggccgcacctatcgccctctgaccccgaggttaaccctgtgccgactcgacccgggagagagcagggagaagaggcccccgagccgaacggtggcctaaggctcccgatgaccggggttgaccctttgcccgcttgtccgacgacgccaggagcccccgacccccaggacggccctgaggccactgtgggaaggccgcacctgtcgtcctccgaccccgaggtcgtcagcacagaagacaagtgcgccccgcgaggccgcttggacgaagagcgccccagggatgcggcccctggcgaagaggatcggccccatcgaaaggtgcagcggcccgtctactttgttagtgaggccctccgggacgccaagacccgataccctcaggcccagaagatgctttacgctattctgatggcttcgaggaaactgcgccattatttccaggcgcatcgggtcacggtggttacgtcttaccccctcgcccaaatcttgcataatcgagagggtacaggacgggtggtgaaatggacaattgaactttctgagttcgatttgcactttgaaccacgtcacgctatcaagagccaggccctcgccgattttgtggcagagtggaccccggctcccgagcccgtctcagtccccgaggccagctcgggcccctcgcagctgcctcacaccgcccactgggtgaagcagttcgacggctccctgtctcttcagggcgccggtgcgggggtcatattgacctcgccgagcggagacgtccttagatacctggttcgccttgactttcgggcgaccaataatatggcagagtacgagggactccttgcgggactcagggtggcagctggactggggatccgccgcctcctgatggatgcttacgtacgccaagtacagcgtatggagcgccatttcgacgggatagagcttcggcacgtgcccagacgggataacacgattgccgacgaactctcacggctcgcttcctcgcgagcccagaccccaccgggcgcctttgaagaaaggcttgcccagccgtcggcgcgacctgaccccttaggggagacggacgcgcctgaccggcccccgaggcccgtcggagtccaggcctcgggacccgaggggagcgctcccagctcccttagattgattgcttggatcgttgagatccaagcatacctcacagataagactctacccgaggaccgcgaaggaagtgaacgcgtccagcgcatctccaaacgctacgtgctgatagaagggaccctctatcggcgcgcggctaacggaatcctcctgaagtgcattcctcgggaacaaggcgtcgagcttcttgctgatatccatgaaggcgaatgcggagcccactccgcctcgcgcaccttggttggcaaagcctttcgtcaaggtttctattggccaacagctctcaatgatgcggtcgacctggtccggcgatgcagagcgtgtcagttccatgccaagcaaatccatcagccggcccaggcactgcagatcataccactttcatggccgtttgctgtctgggggctcgatatcctgggaccgtttaggcgggccccgggcgggtttgagtatctgtatgtcgcgatcgacaagttcactaagtggcccgaggcttatccggtcgtcaagatcgataagcactccgcacttaaattcattaagggcatcacagcccggtttggggtgcctaaccgtattattacggataacggcacccaattcactagtgagcttttcggtgactactgcgaagacatgggcattaaactctgcttcgcctcacccgcccaccccagaagcaatggccaagtggagcgcgccaatgcggaaatcctcaaaggccttaaaaccaagaccttcaacatcctcaagaagcacggcgattcgtggatcgaggagttgccagcagtgctctgggcaaaccgaaccacaccaagccgagcaaccggggaaacgcctttcttcctcgtctacggcgcggaggcggttctcccatccgagctcaccctgaagtcccctcgggccaccatgtactgcgaggttgatcaagatcagcttcgcagagatgacctcgactacttggaagagcgaaggcggcgcgcggccctccgagccgcacgctaccagcagagcctgcggcgctaccatcagcgccacgtccgggcacgatcactctgcgtcgacgacctcgtcctacgccgcgtccaaacgcgtgctggattgagcaagctctcaccaatgtgggagggtccgtatcgagtgatcggcgtcccccggccgggctccgttcggctggccacgggcgacggcacagagctgcctaacccgtggaacatcgaacaccttcgtcgcttctacccctaa

SEQ ID NO: 66268 - DNA, 4386 bp, Oryza sativa
  Clone ID: PAT_MRT4530_67235C.1
atgaagcgagagcttctggccgcggcccctactcatgaggcgacgcgccaggcgcggtggtcggaggttgccctcactttcgaccagaccgaccacccaccgtgcgttgcccggggaggacagatcgcaatggtggtttcccccactgtttgcaacgtgaagctggggcgtgtcctcattgatggaggagcagccctcaacatcctttcccccgcagcctttgacgccatcaaggccccggggatgatgctccggccgtcccagccgatcattggtgtgacgccggggcacacttgggcgctaggtcatatcgacctcccggtcaccttcggtggacccgccaacttccgcacggagcgggtgaacttcgatgtggcggacctcagtctgccctacaacgcggtcctggggaggcccgcgttggtgaagttcatggcggcggtccactacgcctatctccagatgaagatgccgggtcccggtggccccatctccgtccatggcgaccacaaagtcgcgctcgcttgtatggagcagcgcgcggaccgcctcgccgtcgtgtccaagcccgagggtggcgacgagaggcttggcacatccgcccccgccgccccgaggcagcggatagtcacgtgcgatgaggtcccggtcaagaaggaagacgcgctcgtctctttcctgcgggcaaacgctgacgtcttcgcatggagaccggcggatatgcccggggtccccagggaggtgattgagcaccgtctcgccgtacggccgggcgcgaggccggtccggcagaaagtgcggcgccaggcctcggaacgtcaagccttcatccgcgaggaggtggcacgacttctggaggccggattcatccgcgaggtcatccatctggagtggctggcgaacccggtggtcgttcccaaggcgaacggcaagcttcggatgtgcatcgactacaccgaccttaacaaggcatgtcctaaggatccttaccccctgcctcgcatagatcagattgtcgactccacagcggggtgcgaccttttgtgttttctagatgcatactctggttaccatcagattcgcatggctagggaggatgaggaaaacactgcgttcattacccccataggaacttattgttatacaacaatgcccttcgggttaaagaatgcaggtcctacttttcaacgtactactcgaatttctttgggtagccaattaggacgtaatgttgaggcttatgtcgatgacttggttgtaaagacgcgcaaccaggaaacgttactttcagatctagcgaaaacttttgagagcctccgctccgcccgcataaaactgaaccccgataagtgcgtgttcggtgtacctgcgggcaagcttctcgggttcttggtctctgcccgaggcatcgaagccaaccccgagaagatacgagctatagatcggatgcgcccccccagcaagcttagggatgtgcaatgtgtcgccggttgcatggctgccctaagtaggttcatatcgaggctgggggagaaggcgctacccttatttaagctcctcaaacgctccgggccgtttacttggacggaggaagctgagtgtgccctcactcagttgaaggcgtatctcagctctcccccggttctggtcgccccggagccaaatgaacccttactactctacttagcggcgaccccgcaagtggttagtgcggcgttggtcgtggagcgcgatgaggacaatcctcattccgcgcacccccaccttgtgcagacttggcccgggagagagcagggaggagaggcccccgagccgaacggtggcccaaggcccccgacgaccggagttggccctctgcccgcttgtcagacggtgctaggagcccccgacccccaggaaggccccgaggccactgtgggaaggccgcacctatcgccctttgaccccgaggctaaccctgtgctgattcgacccgggaaagagcagggagaagaggcccccgagccgaacggaggcctaaggcccctaacgaccggagttggccctttgcccgcttgtccgacgatgccaggagcccccgacccccaggacggccccgaagccactgtgggaaggccgcccctgttatcctccgaccccgaggtcatcagcacagaagacaagtgcgccccgcgaggctgcttggacgaagagtgccccagggatgtggcccctggcgaagaggatcggccccaccgaaaggtgcagcggcccgtctacttcattagtgaggccctccgggacgccaagacccgataccctcaggcccagaagatgctttatgctattctgatggcctcaaggaaattgcgccattatttccaggcgcatcgggtcacggtggttacatcttaccccctcggccaaatcttgcataaccgagagggtactggacgggtggtgaaatgggcaatcgaactctctgagttcgatttgcactttgaaccacaccacgcgatcaagagccaggccctcgctgactttgtggcagagtggaccccagctcctgagcccgtctccgtccccgaggccagctcggacccctcgcagctgcctcacaccgcctactgggtgatgcagtccgacggctccctgtctcttcagggcgccggtgcgggggtcacgttgacctcgccgagcggagacgtcctcagatacatgatccgcctcgactttcgagcgaccaataatatggcagagtacgagggactccttgccggactcagagtggcagctggactggggatccgccgcctcctggtgttaggcgactcccagctggtcgttaaccaagtctgtaaagagtaccggtgctctgacccgcaaatggacgcctacgtgcgccaagtacggcgtatggagcgccattttgacgggattgagcttcggcacgtgcccaggcgggataacatgatggccgacgaactctcacggctcgcgtcctcgcgagcccagaccccaccgggcgcctttgaagaaaggcttgcccagccgtcggcgcgacccgaccccttaggggagacggaagcgcctgaccggcccccgaggcccgtcggagtccaggcctcgggacccgaggggagtgctcccagctcccttagattgattgcttggatcgccgagatccaagcatacctcacagataagactctacccgaggaccgcgaagggagtgaacgcgtccatcgcatctccaaacgctacatgctggtagaagggatcctctatcggcgcgcggctaatggaatcctcctgaagtgcattcctcgggaacgaggcgttgtgcttcttgccgatatccatgaaggcgaatgcggagcccactccgcctcgcgcaccttggttggtaaagctttccgccagggtttctattggccgacagctctcaatgatgcggtcgaccttgtccggcgatgtagagcgtgtcaattccacgccaagcaaatccatcagccggcccaggccctgcagaccataccactttcgtggccatttgctgtctggggactcgatatcctgggaccgtttaggcgggccccgggcgggtttgagtatctgtatgtcgcgatcgacaagttcactaagtggcccgaggcttatccggtcgtcaagatcgataagcactccgcacttaaattcattaagggcatcacggcccggtttggagtggctaaccgtattattacggataatggcacacaattcactagtgaactcttcggcgactactgcgaagacatgggcatcaagctctgcttcgcctcacctgcccaccccagaagcaatggccaagtggagcgcgccaatgcggaaatcctcaaaggccttaaaaccaagaccttcaacatactcaagaagcacggcgattcatggatcgaggagttgccagcggtgctctgggcaaaccgaactacaccaagccgagcaaccggggaaacgcctttcttcctcgtctacggcgcggaagcggttctcccatctgagctcaccctgaagtctcctcgggccaccatgtactgcgaggctgatcaagatcagcttcgcagagatgacctcgactacttggaagagcgaaggcggcgcgcggccctccgagccgcgcgctaccagcagagcctgcggcgctaccatcagcgtcacgtccgggcccgatcactctgcgtcgacgacctcgtcctacgctgcgtccaaacgcgtgctggattgagcaagctctcaccaatgtgggagggtccgtatcgagtggtcggcgtcccccggccgggctccatacggctggccacgggcgacggcactgagctgcctaacccgtggaacatcgaacaccttcgtcgcttctacccctga

SEQ ID NO: 66269 - DNA, 5888 bp, Oryza sativa
  Clone ID: PAT_MRT4530_67236C.1
atggccgaacgagcaaaagcgcacaacctctctccgagtgctagcggtgacgacggggagccgaacccgcgccgtcgagctcgtactccaccgcccccctctcgccaaaatcctaggcgggaggaggcgctcgagagggtcgaaggatccgcgacttcgatacccacgggtgatggagaagaacggcgagacggggcgcgtcgcctcctcgtctatggcgatggcagcacgccccagggcgcgctccaagctgcgggcgcgctcctgcgtcacccgcccgtcgtccccgatccggagtctccagcccaacgttggctggacgacgtggccaacttggtcatgacggcgcagcagcgcctaggtgccggtgggcggtcctccgccaccaaggcctctggcgccgctaccgccggctccgtgtcgtcaaggcggagggcgcggcgagtggcggccgttgcccgccattcggccgccattccctcgtcaacgcctccgacccaggaagatgtgtgtggggggccggatgcctgcctcggcttcgagctccggcgcaacggtcgacgtgctgcccacgcaacggagggtgcctcctcgtccggagcgtcacttcagtacgggcgcgggggtcgaccctccgtgcccccgtttggtggtgtcggctgtagagcctttgtggcgagccttcggaacgtccgttggcccccaaggttccggcccaccatcgccgaaaaatatgacgggagcgtcaatcccgccgagtttctccaggtctacacgaccgggatcgaggccgccgggggtgacgacagggtcatggcgaatttctttcccatggccctgaagggacaggcgcggggttggctaatgaacttgccacccgcgtcggtccactcttgggaggatttgtgccagcagttcaccatgaactttcaaggcacatatccgcacccaggtgaagaagcggacttgcacgcggtacagcgaagggatgatgagtcacttcgctcgtacattcagcggttctgtcaagtccgcaacaccataccatgcatccctgcacacgcggtgatctatgcgttcagggggggcgtgcggcacaaccgcatgctcgaaaagatcgcttccaaggagccccagactaccgcggagctttttcagcttgcggaccgagtggctcgcaaggaggaggcctggacctggaattcctccggctccggtgtggcagtttcggccgcccccgggtccgctgctcagtcagggcggcgagacaagaggaggaagaagaggtcagcccattccgacgacgagggtcatgtcctcgccgtcgagggcgcttcgcgggccacccgaaaggggaggcctgcgagcgacaaaaagaaggaggccggcgctcccagcagggagcgtccgaccggcaagtggtgttccgtgcacaacacctctctccacgacctcgtggactgccgcgcggtcaaaagtttggctgagcggacgaggaagtgggaggaggagaggaggcaggagcgccgtgagggcaagtccccggcggctcccgccggcaaccggcgaagtgaggccaagcagaaggcccccgccgaggacatcgacgatggcgacgatggcctggggttccaggagcctggggccaccattgccactgtcgatgggggagcgtgcgctcacgtctctcgccggagcctcaaggccatgaagcgagagcttctggccgcggcccctacccatgaggcgatgcggcgggcgcggtggtcggaggttgccctcaccttcaaccagaccgaccacccgccgtgcgttgcccggggaggacagatcgcgatggtggtttcccccaccgtttgcaacgtgaagttggggcgtgtcctcatagacgggggagcagccctcaacatcctttcccccacagcctttgacgccatcaaggccccggggatggtgctccggccgtcccagccgattatcggtgtgacgccgggacacacttggccgctaggtcatatcgacctcccggtcaccttcggtggatccgccaacttccgcacggagcgggtgaacttcgatgtggcggacctcagtctgccctacaacgcggtcctggggaggcccgcgtttgtgaagttcatagcggcggtccactacgcctacctccagatgaagatgccgggccctggtggccccatctctgtccatggcgacatcaaagtcgcgcttgcttgtatggagcagcgcgcggagcacctcgccgccgcgtccaagcccgagggtggcgacgagaggctcggcacctccgtccccgccgccccgaggcaacggatgatcacgtgcgacgaggtcccggaagacgcgctcgtctccttcctgcgggcaaacgctgatgtcttcacatggagaccggcggacatgcctggggtccccagggaggtgattgagcaccgtctcgccgtacggccgggcgcaaggccggtccgtcagaaagtgcggcggcaggccccggaacgtcaagccttcatccgcgaggaggtggcgcgacttctggaggccggattcatctgagaggttatccatccggagtggctggcgaacccggtcgtcgttcccaaggcgaatggcaagcttcggatgtgcatcgactacactgaccttaacaaggcatgtcctaaggacccttaccccctgcctcgcatagatcagattgtcgactccaccgcggggtgcgaccttttgtgttttctagatgtgtactctggttaccatcagattcgcatggctagggaggatgaggaaaaaactgcattcattacccccataggaacttattgttatacgacaatgcccttcgggttaaagaatgcaggtcctacttttcaacatactactcgaatttctttgggtagccaaataggacataatgtagaggcctatgtcgatgacttggttgtgaagacgtgcaaccaagagaccttactctcggatctagcggaaactttcgaaagtctccgctccacccgcataaagctgaaccccgacaagtgcgtgttcggtgtacctgcgggcaagcttctcgggttcttggtctctgcccgaggcattgaggccaaccccgagaagatacgagctatagagcggatgtgcccccccagcaagcttagggatgtgcaatgcgtcaccggctgcatggccgccctaagtcggttcataacgaggctaggagagaaggcactacccctatttaagctcatcaaacgctccaggccgtttacctggacggaggaggctgagcgggccctcactcagttgaaggcatacctcagttctccccctgtcctggtcgacccggagccaaatgagccgttgctactctacctggcggcgaccccgcaggtggtcagcgcagcgttggtcgtggagcgcgacgaggacaaacctcactccacgcgtccccaccctgcgtcgactcgacccgggagagagcagggaggagaggcccccgagtcgaacggcggcccgaggcccccgacggccggagctggccctccgcccgcttgtccgaaggtgccaggtgcccccgacccccaggatggccacggggccactgcgggaaggccgcgcctgtcgccctccgaccccgaggtcatcggcacagaagccgagtgcgccccgcgcggcctctcggacgaagagcgccctggagatgcggcccctagtgaagaagatcggccccgccgaaaggtgcagcggcccgtctacttcgttagcgaggccctccgagacgctaagacccaataccctcaggcccagaagatgctttacgctattcttatggcttcgaggaagttgcgccattattttcaggcgcatcgggtcacggtggttacgtcttaccccctcggccaaatcttgcataaccgagagggtactggatgggtggtgaaatgggcaatcgaactctctgagttcgatttgcactttgaaccacgccacgcagtcaagagccaggccctcgccgactttgtggcagagtggaccccggcccctgagcccatctccgtccccgaggccagctcgggcccctcacagctgcctcacaccgcctattgggtgatgcagttcgacggctccctgtctcttcagggcgccggtgcgggggtcacgttaacctcgccgagcggagatgtcctcaaatacttggtccgcctcgactttcgggcaaccaacaatatggcagaatacgagggactccttgcgggactcagagtggcggctggactggggatccgccgcctcctggtgttaggcgactctcagttggtcgttaaccaggtctccaaggagtaccagtgctctgacccgcagatggatgcttacgtgcgccaggtgcggcgtatggagcgccattttgacgggatagagctttggcacgtgcccagacgggataacacggtcgccgacgaactctcaaggctcgcttcctcgcgagcccagaccccaccgggcgcctttgaagaaaggcttgcccagccgtcggcgcgacccgaccccctaggggagacggacgcgtctgaacggcccccgaggcccgtcggagtccaggcctcgggacccgaggggagcgctcccagctcccttagattgattgcttggatcgctgagatccaggcgtacctcacagataagactctacccgaggaccgcgaagggagtgaacgcgtccagcgcatctccaagcgctacgtgctggtggaagggaccctctatcggcgcgcggctaacggagtcctcctgaagtgcatccctcgggaacaaggcgtcgagcttcttgccgatatccatgaaggcgaatgcggagcccactccgcctcgcgcaccttggttggcaaggcctttcaccagggtttctattggccgacggctctcaatgatgcagtcgacctggtccggcggtgcagggcgtgtcaattccacgccaagcaaatccatcagccggcccaggccctgcagaccatacctctttcatggccatttgctgtctgggggctcgatatcctgggaccgtttaggtgggccccgggcgggttcgagtatctgtatgtcgctgtcgacaagttcactaagtggcctgaggcttatccggtcgtcaagatcgataagcactccgcacttaaattcatcaagggcatcacagcccggtttggggtgcctaaccgtattattacggataacggcacccaattcactagtgagcttttcggtgactactgcgaagacatgggcatcaagctctgcttcgcctcccccgcccaccccagaagcaatggccaagtggagcgtgccaacgcggaaatcctcaagggccttaaaaccaagaccttcaacatactcaagaagcacggcgactcgtggatcgaggagttgccagcggtgctctgggcgaaccgaatcaccccaagccgagcaaccggggaaacgcctttcttcctcgtctacggagcggaggcggttctcccatccgagctcaccctgaggtcccctcgggccaccatgtactgcaaggtgatcaagatcagcttcgcagagatgacctcgactacttggaagaacgaaggcggcgtgcggcccttcgagccgcgcagtaccagcagagcctgcggcgctaccatcagcgccacgtccgggcccgatcactctgcgtcgacgacctcgtcctacgccgcgtccaaacgcgtgctggatagagcaagctctcaccaatgtgggagggtccgtatcgagtgatcggcgtcccccggccgggctccgttcggctggccacgggtgacggcacggagctgcctaacccgtggaacatcgaacatcttcatcgcttctacccc

SEQ ID NO: 66270 - DNA, 2205 bp, Oryza sativa
  Clone ID: PAT_MRT4530_67237C.1
atggctgaacaagcaaaggtgcacaacctctctccgagtgttagcggtgacgacggggagccaaacccacgccgtcgagctcgtactccaccgccccctccacaccaaagtcctaggagggaggaggtgctcgagaggatcgaaggatccgcgacttcgacatccacgggtgatggagaagggcgccgagatggggagcgtcgcctcctcgtctacggcgacggcagcacgccccagggcgcgctccaagctgcgggcgcgctcctgcgtcacccgcctgtcgtccctgacccggagtctccagcccaacgttggctggacgacgtggccaacttggtcatgacggcacggcagcgcctaggtgctggtgggcggtcctccgccaccaagacctctggcgctgctaccaccggctccgtgtcgtcaaggcggagggcgcggcgagcggcggctgttgctcgccattcggccgccactccttcgtcagcgcctccgacccaggaagatctgcgtggggggccggatgcccgcatcagtatcgagcgccggcgtaatggccgacgtgctgcccacgcaacggagggcgcctcctcgtccggagtgtcacatcaacacggacgcggggatcagccctccgtgcccccggttggtggtgtcggctgtagagcctttgtggcgagccttcggaacgtccgttggcccccaaggttctggcccaccatcgccgaaaaatatgacgggagcgtcaaccccgccgagtttctccaggtctacacgaccgggatcgaggccgccgggggtgacgacagggcatatatccgcgcccaggtgaagaagcggacttacatgcagtccagcgaagggatgatgagtcacttcgctcatacattcagcggttctgtcaagtccgcaacaccataccatgcatccctgcacacgcgctcgcggaccgagtggctcgtaaggaggaggcatggacctggaacccctccggttccggtgtggcagcttcggccgcccccggatccgctgctcagacagggcggcgtgacaggaggaggaagaagaggtcagcccataccgacgacgagggtcatgtcctcgccgtcgagggcgcttcgcgggccacccgaaaggggaggcctgcgggcgacaaaaagaaggaggccggcgctctgggagcgcccaaccggcaagtggtgcatcgtccacaacacttcccttcacgacctcgcggactgccgcgcagtcaaaagtttggctgagcggacgaggaaatgggaggaggagaggaggcaggagcgccgagagggcaagtccccggcggttccttccggcaatcggcgaagtgaggccaaacagaaggcccccgccgaggacatcgatgacggcgatgatgacctaggtttccaagagcctggggccaccattgccactgtcgatgggggagcgtgtgctcacgtttctcgccggagcctcaaggccatgaagcgagagcttctggccgcggcccctactcatgaggcgacgcgccgggcgcggtggtcggaggttgccctcaccttcgaccagaccgaccacccaccgtgcgttgcccggggaggacagatcgcaatggaggtttcccccactttttgcaacgtgaagctggggcgtgtcctcattgatgggggagcagccctcaacatcctttcccccgcagcctttgacgctatcaaggccccggggatggtgctccggccgtcccagccgattatcggtgtgacgccggatcacacttggccgctaggtcatatcgacctcccggtcaccttcggtggatccgccaacttccgcacggagcgggtgaactttgatgtggcggacctcagtctgccctacaacgcggtcctagggaggcccgcgttggtgaagttcatggcggcagtccactacgcctacctccagatgaagatgccgggccccggtggccccatctctgtccatggcgacctcaaagtcgcgcttgcttgtatggagcagcgcgcggaccacctcaccgccgcgtccaagcccgagggaggcgacgagaggcttggcacctccgcccccgccgccccgaggcagcggatagtcacatgcgacgaggtcccggtcaaggaggttgccctgggcgacggcccgtccaagaccacacggatcggtggtcttctggacggcaaatag

SEQ ID NO: 66271 - DNA, 948 bp, Oryza sativa
  Clone ID: PAT_MRT4530_67238C.1
atggacgagcagcggggacgcggggggttcgacgaactggtgctcttgcatcagcagcaggagcagcggaggcggagggagcagcagcaggaggaggaggaggaagaggaggtgcggcgccagatgttcggcgcggtggtcggtgggctagccgcgttccctgcggcggcggcggctctgggacagcagcaggtggactgcggcggggagctgggcgggttctgcgacagcgaggcgggcgggtcgtcggagccggaggcggcggcgggggcgcgcccgcgcgggggatccggcagcaagcggagccgcgccgccgaggtgcacaacctctccgagaagaggaggaggagcaagatcaacgagaagatgaaggcattgcagagcctgataccgaattccaacaagactgacaaggcatccatgcttgacgaagccatcgagtacctgaagcaactgcagctccaagtgcagatgctctcaatgagaaacggtgtttacttgaacccatcttatttatctggagcacttgagcctgcgcaagcatcacagatgtttgcagcccttggtggtaacaacgtcacagtggtgcaccccgggacagtgatgccaccagtgaaccaaagctcaggagctcatcatttgtttgatccattgaactctcctccacaaaatcaaccacaatctctaatcctaccaagtgttcctagcacagccattcctgagcctccatttcacctggagtcatcacagtcccaccttcgacaatttcagttgcctggatcctctgagtttcacaagattttgtttttacatgtacttttatctgtaaaagatggtgtttcatggagagataatgccaaagcaccacctatcatcacatcaagaaagtctgccaggaaacgagatgaactccatcaggaaagaatcatccatgttgaacaccaataa

SEQ ID NO: 66272 - DNA, 5913 bp, Oryza sativa
  Clone ID: PAT_MRT4530_67239C.1
atggccgaacgggcagtggcgcacaacctctctccgagcgctagcggtgacgacggggagcagaacccgcgccgtcgagttcgtactccaccgtccccctctcgccgaagtcttgggcgggaggaggcgttcgaaggggtcgaaagatccgcgacttcaccgcccgcgggcgatggagaaggacggcgagacggggagcgtcgcctcctcgtctacggcgatggtagcacgccccagggcgcgctccaggctgcgggcgcgctcctacgtcacccgcccatcgtccccgatccagagactccagcccgacgttggctggatgacgtggccgacttggtcatgacggcgcagcagcgcctaggcgccggtgggcggtcctccgccaccaagacctctggtgctgctaccaccggctccgtgtcgtcgaggcggagggcgcggcgagcggcggccgtttcccgccgttcgtccgccattccctcgtcaacgcctccgacccaagaagatgtgcgtggggggccggatacccgccccagtatcgagcgccggcgcaatggtcgtcgtgctgcccacgcaatggagggcgcctcctcgtccggagcgccacttcggttcgggcacaggggccagccccccgtgtccccggttggcggtgccggctgtcgagcctttgtggcgagccttcggaacgtccgttggcccccaaggttccggcccaccatcaccgaaaaatacgacggaagcgtcaaccccgccgagtttcttcagatctatacgactgggatcgaggccgccgggggtgacgatagggtcatggcgaatttctttcccatggccctgaaaggtcaggcgcggggttggctaatgaacttgccacccgcgtcggtccactcttgggaggatctgtgccagcagttcaccacgaacttccagggcacatatccgcgcccaggcgaaaaagcggacttgcatgcggtgcagcgaagggacgatgagtctcttcgctcgtatgttcagcggttctgtcaagtccgcaacaccataccatgcatccctgcacacgcggtgatctacgcgttcagggggggcgtgcggcacaaccgcatgctcgagaagatcgcctccaaggagccccagaccaccgcggagctttttcagctcgcggaccgtgtggctcgcaaggaggaggcctggacctggaactcctccggttccggtgtggcagctccggccgcctccgggaccgccgctcggtcagggcggcgggacaggaggaagaagaagaggtcggcccattccgacgacgagggtcacgtcctcgccgtcgagggcgcttcgcgggccacccgaaaggggaggcctgcgagcgacaaaaagaaggaggccggtcaaaagtttggcaagtggtgttccgtgcacaacacctccctccacgacctcgcggattgccgcgcggtcaaaagtttggctgagcggacgaggaagtgggaggaggagaggaggcaggagcgccgtgagggcaaggccccggcggctcccgccggcaaccggcgaggtgaggccaagcagaaggccaccaccggtgatgagcccggggccatcgtcgccaccgtcgatgggggagcgtgcgctcacgtttctcgccggagcctcaaggccatgaagcgagagcttctggccgtggcccctacccatgaggcgacgcggcgggcgcggtggtcggaggttgccctcactttcgaccagaccgaccacccgccgtgcgttgcccggggaggacagatcgcgatggtggtttcccccaccgtttgcaatgtgaagttggggcgcgtcctcatagacgggggcgcagccctcaacatcctttcccccgcagcctttgatgccatcaaggccccggggatggtgctccggccgtcccagccgatcatcggtgtgacgccggggcacacttggccgttaggtcatatcgacctcccggtcaccttcggtggatccgccaacttccgcacggagcgggtgaacttcgatgtggcggacctcagtctgccctacaacgcggtcctggggaggcccgcgttggtgaagttcatggcggcggtccactacgcctatctccagatgaagatgccgggccccggtggccccatcaccgtccatggcgagctcaaagtcgcgcttgcttgcatgagcagcgcgcggaccacctcgccgcggcatcaaagcccgagggaagacgcgctcgtctccttcctgcgggcaaacgctgacgtcttcgcatggagaccagcggacatgcccggggtccccagggaggtgattgagcactgtctcgccgtgcggccgggcgcaaggccagtccggcagaaagtgcggcggcaggccccggaacgtcaagccttcatccgcgaggaggtggcgcgacttctggaggccggattcatccgtgaggtcatccatccggagtggctggcgaatccggtcgtcgttcccaaggcgaacggcaagcttcggatgtgcatcgactacaccgaccttaacaaggcatgtcctaaggacccttaccccctgccacgcatagatcagattgtcaactccaccgcggggtgcgaccttttgtgttttttagatgcatactctggttatcatcagattcgcatggctagggaggatgaggaaaaaactgcattcattacccctgtaggaacttattgttatacgacaatgcctttcgggttaaagaatgcaggtcctacttttcaacgtactactcgaatttctttgggtagccaaataggacgtaatgttgaggcctatgttgatgacttggttgtgaagacgcgcaaccaagagaccttactctcggatctagcggaaactttcgaaagtctccgctccgcccgcataaagctgaaccccgacaagtgcgtgttcggcgtacctgcgggcaagcttctcgggttcttggtctctgcccgaggcatcgaggccaaccccgagaagatacgagctatagagcggatgcgcccccccagcaagcttagggatatgctgggagagaaggcgctacccctatttaagctcctcaaacgctccgggccgtttacctggacggaggaagctgagcgggccctcactcagttgaaggcgtatctcagctctcccccagtcctggtcgccccggagctagatgaaccgttgctactctacctggcggcagccccgcaggtggtcagtgcggcgttggttgtggagcgcgatgaggacaaccctcattccgcgcatccccaccctgtgccgactcgacccgggagagagcagggaggagaggctcccgagccgaacggcggcccgaggcccccgacgaccggagctggccctccgcctgcttgtcagacggtgtcaggcgcccccgacccccaggatggccccggggccactgcgggaaggccgcacctgccgctctctgaccccgaggttaatcctgtatcaactcgacccgggagagagcagggaggagaggcccccgagctgaacggtggcccaaggcccccgacggccggagatggccctccgcctgcttgtccgacggtgccaggtacccccgacccccaggatggcctcggggccactgcgggaaggccgcgcctgtcgccctccgaccccgaggtcgttggcacagaagccgagtgcgccccctgcggcctctcggacgaagagcgccctggagatgcggcccctagcgaagagggttggccccgccgaaaggtgcaacgacccgtctacttcgttagcgaggccctccgggacgctaagacccgataccctcaggcccagaagatgctttacgctattctgatggcttcgaggaaattgcgccattatttccaggcgcatcgggtcacggtggttacgtcttaccccctcggccaaatcttgcataaccgagagggtactggacgggtggtgaaatgggcaatcgaactctctgagttcgatttgcactttgaaccacgccacgcgatcaagagccaggccctcaccgactttgtggcagagtggaccccagctcccgagcccgtctctgtccccgaggccagctcgggcccctcgcatctgcctcacaccgcctactgggtgatgcagttcgacggctccctgtctcttcagggcgccggtgcgggggtcacgttgacctcgccgagcggagacgttctcagatacttggttcgcctcgactttcgggcgaccaataatatggcggaatacgagggactccttgcgggactcagggtggcagctggactggggatccgctgcctcctggtgttaggcgactcccagctagttgttaaccaggtctgtaaggagtaccggtgctccgacccgcagatggacgcttacgtgcgccaggtgcgacgtatggaacgccatttcgacgggatagagcttcggcacgtgcccagacgggataacgcggtcgccgatggactctcaaggctcgcttcctcgcgagcccagaccccaccgggcgcctttgaagaaaggcttgcccagccgtcggcgcgacccgaccccctaggggagacggatgcacctgaacggcccccgaggcccgtcggagtccaggcctcgggacccgaggggagcgctcccagctcccctagattgattgcttggatcactgagatccaggtgtacctcgcagataagactctacccgaggaccgcgaagggagtgaacgcgtccagtgtatctccaagcgctacgtgctggtggaagggaccctctatcggcgcgcggctaacggagtcctcctgaagtgcattcctcgggaacaaggcgtcgagcttcttgccgatatccatgaaggcgagtgcggagcccactccgcctcacgcaccttggtcggaaaggcctttcgccagggtttctattggccgacggcactcaacgatgcggtcgacctggtccggcggtgcaaggcgtgccagttccacgccaggcaaccccatcagctggcccaggccctgcagaccatacctctttcatggccgtttgctgtctgggggctcgatatcctgggtccgtttaggcaggccccgggcgggttcgagtatctgtatgtcgctgtcgacaagttcactaagtggcccgaggcttacccggtcatcaagatcgataagcactccgcgcttaaattcatcaggggcattactgctcggtttggggtgcctaaccgtatcattacggataacggcacccagttcactagtgagctctttggtgactactgcgaagacatgggcatcaagctctgcttcgcctcccccgcccaccccagaagcaatggccaagtggagcgtgccaacgcagaaatcctcaagagcctcaaaaccaagaccttcaacatcctcaagaagcacggcgactcgtggatcgaggagctgccagcggtgctctgggcgaaccgaaccacgccaagccgagcaaccggggaaacgcctttcttcctcgtctacggcgtggaggcggtcctcccatctgagctcaccctgaggtcccctcgggccaccatgtattgcgaggctgatcaagatcagcttcgcagagacgacctcgactacttggaagagcgaaggcggcgcgcggccctccgagccgcgcgctatcagcagagcctgcggcgctaccatcagcgccacgtccgggcccgatcactctgcgtcgacgacctcgtcctacgccgcgtccaaacgcgtgctggactgagcaagctctcaccaatgtgggagggtccgtatcgagtgatcggtgtcccccggccgggctccgttcggctggccacgggcgacggcacggagctgcctaacccgtggaacatcgaacaccttcgtcgtttctacccctag

SEQ ID NO: 66273 - DNA, 840 bp, Oryza sativa
  Clone ID: PAT_MRT4530_6723C.1
accaccaccgcggcctccgacgcctccctcccacacgctcccctgtggccgtacgtgcagccggctgcaccaccagctagcggcggcgggcgccggccggcggcgaggggatggcgtgcgaccagcaggcggagctccggcgggtgttcgagctgttcgaccgtgacggcgacggccggatcacccgggaggagctgacggagtcgctggagaggctcgggatgcccgtgcacagggaggagctcgccgccaccatcgcccgcatcgacgccaacggcgacgggtgcgtcgacatggatgagttcacccagctgtacgagaccgtcatgcgcgtcgacggcggcggcggcggcggcgcctgcgacgtggatgaggcgagcatgcgcgaggcgttcgacgtgttcgaccggaacggcgacgggttcatcaccgtggacgagctgggcgccgtgctggcgtcgctggggatcaagcagggccggacagcggaggactgcggccgcatgatcggccaggtcgacagggacggcgacggccgcgtcgacttcctcgagttcaagcagatgatgcgcggcggcgcgttcgccacgctccggtgatcggcggcgtcatccacgcgagcgtcgttgtatcgtctatatacccaacgtacggtcgattgtttgttttaacatagcttgtgcatgacagtttgtatgagtgtactacgatccacacacgcgatcgaatttcgcagaaaatgtattgtgatcataagctgataagtttcggaggtggtaaaagcataaagcagccgctataattaagaaatttaaaaaaaaaaaaaaaaaaagggcggcc

SEQ ID NO: 66274 - DNA, 347 bp, Oryza sativa
  Clone ID: PAT_MRT4530_67240C.1
gtttctttcaaggaattggcagccacagagaaatgtgcggggaaagattcaatctgtccagtttgcttggaatgcccacataatgctgcccttctactttgttcggctcatgataaaggctgtcgttcatatatatgcgcaaccaattaccaccattcaaactgtcttgatcaactcatagattcgcggagaagctcaaaagattgtgaggacctagactccatagagcttacatgccccctttgccgtggcgaggttaagggatatacattggttgaacctgcttgggaacagttgaaccaaaacaagaggagctgtctgcaagatggctgctcatacatgggtag

SEQ ID NO: 66275 - DNA, 5619 bp, Oryza sativa
  Clone ID: PAT_MRT4530_67241C.1
atggccgaacaagcaaaggcgcacaacctctctccgagtgttagcggtgacgacggggagccgaacccacgccgtcgagctcgtactccaccgccccctccacgccaaagtcctaggcaggaggaggcgctcgagagggtcgaaggatccgcgacttcgacatccacgggtgatggggaagggcggcgagatggggagcgtcgcctccttgtctacggcgacggcagcacgccccagggcgcgctcctacgtcacccgcccattgtccctgacccggagtctccagcccaacgttggttggacgacgtggccaacttggtcatgacggcacggcagcgcctaggtgctggtgggcggtcctccgccaccaagacctctggcgctgctaccaccggctccgtgtcgtcaaggcggagggcgcggcgagcggcggctgttgctcgccattcagccgccactccttcgtcagcgcctccgacccaggaagatctgcgtggggggccggatgcccgcatcagtatcgagcgccggcgtaatggccgacgtgctgcccacgcaacggagggcgcctcctcgtccggagtgtcacatcaacacggacgcggggatcagccctccgtgcccccggttccggcccacatcgccgaaaaatatgacgggagcgtcaaccccgccgagtttctccaggtctacacgaccgggatcgaggccgccaggggtgacgacagggtcatggcgaatttctttcccatggccctgaagggacaggcacggggttggctaatgaacttgccacccgcgtccgtccactcttgggaggatttgtgccaacagttcaccatgaactttcaaggcacatatccgcgcccagcggttctgtcaagtccgcaacaccataccatgcatccctgcacacgcggtgatctacgcgttcaggggggtgtgcggcacaaccgcatgctcgaaaagatcgcctccaaagagccccagactaccgcggagctttttcagctcgcggaccgagtggctcgtaaggaagaggcatggacctggaacccctccggttccggtgtggcagcttcggccgcccccggatccgctgctcggacagggcggcgtgacaggaggaggaagaagaggtcagcccattctgacgacgagggtcatgtcctcgccgtcgagggcgctccgtgggccacccgaaaggggaggcctgcgagcgaccaaaagaaggaggccggcgctctcagtagggagcgcccaaccggcatgtggtgcatcgtccacaacacctcccttcatgacctcgcggactgccgcgcagtcaaaagtttggctgagcggacgaggaagtgggaggaggagaggaggcaggagcgccgagagggcaagtccccggcggttccttccggcaatcggcgaagtgaggccaagcagaaggcccccgccgaggacatcgatgacggcgatgatgacctaggtttccaagagcctggggccaccattgccactgtcgatgggggagcgtgtgctcacgtttctcgccggagcctcaaggccatgaagcgagagcttctggccgcggcccctactcatgaggcgacgcgccgggggcggtggtcggaggttgccctcaccttcgaccagaccgaccacccaccgtgcgttgcccggggaggacagatcgcaatggtggtttcccccactgtttgcaacgtgaagctggggcgtgtcctcattgatgggggagcagccctcaacatcctttcccccgcagcctttgacgctatcaaggccccggggatggtgctccggccgtcccagccgattatcggtgtgacgccgggtcacacttggccgctaggtcatatcgacctcccggttaccttcggtggatccgccaacttccgcacggagcgggtgaactttgatgtggcggacctcagtctgccctacaacgcggtcctagggaggcccgcgttggtgaagttcatggcggcagtccactacgcctacctccagatgaagatgccgggccccggtggccccatctctgtccatggcgacctcaaagtcgcgcttgcttgtatggagcagcgcgcggaccacctcgccgccgcgtccaagcccaagggaggcgacgagaggcttggcacctccgcccccgccgtcccgaggcagcggatagtcacatgcgacgaggtcccggaagacgcgctcgtctctttcctgtgggcaaacgctgacgtcttcgcatggagaccggcggatatgcccggggtccccagggaggtgattgagcaccgtctcgcagtgcggtcgggcgcaaggccggtccggcagaaagtacggcggcaggccccggaacgtcaagccttcatccgcgaggaggtggcgcgacttctggaggccggattcatccgcgaggtcatccatccggagtggctggcgaacccggtggtcgttcccaaggcgaacggcaagcttcggatgtgcatcgactacaccgaccttaacaaggcatgtcctaaggacccttaccccctgcctcgcatagatcagattgtcgactccacagcggggtgcgaccttttgtgttttctagatgcatactctggttaccatcagattcgcatggctagggaggatgaggaaaaaactgcattcattacccccataggaacttattgttatacgacaatgcccttcgagttaaagaatgcaggtcctacttttcaacgtactactcgaatttctttaggtagccaaataggacgtaatgttgaggcttatgtcgatgacttggttgtaaagacgcgcaaccaagagaccttactctcggatctagcagaaacttttgagagtctccgctccgcccgcataaaactgaaccccgataagtgcgtgttcggtgtacctgcgggcaagcttctcgggtttttggtctctgcccgaggcatcgaggccaaccccgagaagatacgagctatagagcggatgcgcccccccagcaaacttagggatgtgcaatgcgtcaccggttgcatggccgccctaagtcggttcatatcgaggctgggagagaaggctctacccttatttaagctcctcaaacgctccgggccgtttacttggacggaggaagctgaacgtgccctcactcagttgaaggcgtatctcagctctcccccagttctggtcgccccggagccaaatgaacccttgctactctacttagcggcgaccccgcaagtggttagtgtggcgttggttgtggagcgcgatgaggacaatcctcattccgcgcacccccaccctgtgctggcttggcccgggagagagccgggaggagaggcccccgagccgaacggtggcccaaggcccccgacgaccggagcaggccctctgcccgcttgtcagacggtgccaggtgcccccgacccccaggatggcccgagggccactgcgggaaggccgcacctatcgccctctgaccccgaggctaaccctgtgccgactcgacccgggagagagcagggagaagaggcccccgagccgaacggtggcctaaggcccctgaccaccggagttggccctttgcccgcttgtccgacgacgccaggagcccccgacccccaggacggccccgaggccactgtgggaaggccgcccctgtcgtcctccgaccccgaggtcgtcggcacagaggacgagtgcacccctgaggccctccgggacgccaagacccgataccctcaggcccagaagatgctttacgctattctgatggcttcgaggaaactgcgccattatttccaggcacatcgggtcacggtggttacgtcttaccccctcggccaaatcttgcataatcgagagggaactggacgggtggtgaaatgggcaatcgaactttctgagtttgatttgcactttgaaccacgccacgctatcaagagccaggccctcgccgattttgtggcagagtggaccccagctcccgagcccgtctcagtccccgaggccagctcgggcccctcgcagctgcctcacaccgcccactgggtgatgcagttcaacggctccctgtctcttcagggcgccggtgcgggggtcacgttgacctcgccgagcggagaggtcctcagatatttggttcgctttgactttcgggcgaccaataatatggcagagtacgagggactccttgcgggactcagggtggcagctggactggggatccgccgcctcctggtgttaggcgactcccagctggtcgttaaccaggtctgtaaggagtaccggtgctctgacccgcagatggacgcttacgtgcgccaagtacggcgtatggagcgccattttgacgggatagagcttcggcacgtgcccagacgggataacacggttgccgacgaactctcacggctcgcttcctcgcgagcccaaaccccaccgggcgcctttgaagaaaggcttgcccagccgtcggcgcgacccgaccccttaggggagacggacgcgcctgacaggcccccgatgcccgtcggagtccaggcctcgggacccgaggggagcgctcccagctcccttagattgattgcttggatcgctgagatccaagcatacctcacagataagactctacccgaggaccgcgaagggagtgaacgcgtccaacgcatctccaaacgctacgtgctggcgaatgcggagcccactccgccttgcgcaccttggttggcaaagcctctcgtcaaggtttctattggccaacagctctcaatgatgcagtcgacctggcgggccccgggcgggtttgagtatctgtatgtcgcgatcgacaagttcactaagtggcccgaggcttatccggtcgtcaagatcaataagcactccgcacttaaattcattaagggcatcacagcccggtttggagtgcctaaccgtattattacggataacggcacccaattcactagtgaacttttcggcgattactgcgaagacatgggcatcaagctctgcttcgcctcacctgcccaccccagaagcaacggccaagtggagcgcgccaatgcggaaatcctcagaggccttaaaaccaagaccttcaacatcctcgagaagcacggcgattcgtggatcgaggagttgccagcggtgctctgggcgaaccgaaccacgccaagccgagcaaccggggaaacgcctttcttcctcgtctacggcgcggaagcggttctcccatccgagctcaccctgaggtcccctcgggccaccatgtactgcgaggctgatgaagatcagcttcgcagagatgacctcgactacttggaagagcgaaggcggcgcgcggccctccgagccgcgcgctaccagcagagcctgcggcgctaccatcagcgccacgtccgggcccgagcactctgcgtcgacgacctcgtcctgcgccgcgtccaaacgcgtgctggattgagcaagctctcaccaatgtgggagggtctgtatcgagtgatcggcgtcccccggccgggctccgttcggctggccacgggcgacggcacagagttgcctaacccgtggaacatcgaacaccttcgtcgcttctacccctaa

SEQ ID NO: 66276 - DNA, 1698 bp, Oryza sativa
  Clone ID: PAT_MRT4530_67242C.1
atgtcatggcacagggccggtgtcctgctgctaggggctcagtcctgcctgcctgtcccgggggttccggccgtaggtgggattgggtcggtactcttgtctatggctaggatgggttggaaactatgtcacgtctttcgtctgtataccgtggtgtgccggttggaggagaccatgctcggcatcatccgtcacgacaacatcgtcgtcctccggggttccatccagagtgacgacgacgacggcacggtccagctcgtgtacgaggacatggagaacggctgctgcctccacgaatggctgcacggcaaccgccgatcccagctggaggccggcgagaggcagcggcggcggcggctgagatggcgggcgcggcggtccatcgccgtcgacgtggccagagcaatctgctacctgcaccacgattgcaaaagccccatcatccaccgcgacatcaagccgaccaacattttgctcgacggcaacctcaaagccaagatagctggtttcggtcttgcacggatcaatgttgctgggctcaaccaaccgttactcaacgtagaaattcctagcgaggcctttgggtatactgctccagagtatgcaaccgcgcagctcgtcacgggaagattgggtaacgagccaggcgtaaataatgggcacttggctatgtgggcgcatagagggtacggtcgacatctcagcaaggacgtcgttgataaggagatcgtccctgatatggcacgatacttgaaggagatgaaggccatgttcaagctcggaattggttgtagaaatggccaggttacatccctctccttccacaacttccaaatagccaatctaatcccagcttctatttgtagcctcaagaacctgaagtacttagacctctctttcaacaatctcaccggtgagttccctacggcgctctacagttgctcagctttgcagttccttgacctgtccaacaatgagttcactggcaaacttccggaacatgttgacaagctgtccttggggatgcagcacctcaacctgtcaagaaattctttcatcggcgacctgccatcggctattggtcggttttccaagctcaagtcgctggtgcttgacagtaacaatttcaatgggacctatcagggtgctgccattggaggtctcgtggagcttgagatgctaacattggcatataatccgttcaaggctagtctaattccaaacgagtttggcaagctgactaagctgacatatctgtggctatcatggatgaacctgattggtaacatccctaatgttctgtcagcattgacagagctcgagctattggacatatcaataaataagttggaaggaaaaaatcccaaagagcttgatttgtccatcaacaagctcaccggatcaataccagaagatattgtgaacttgaagaacttgaaaattctatacttgtactacaacaacctcgttggacaaatcccaagtggtgttggaatgctgccgaatcttaccgaccttcggctattcacgtgccatggagtgtttccggtgagcctcggggactgcgacaccatccacattatcaaggcatccaacaaccactttgttggggacttcccagagaaaatatggtcgtgtgcgatgcttaccatagttatgattggaggaaacaacttcaccggtactctgccaagttag

SEQ ID NO: 66277 - DNA, 5914 bp, Oryza sativa
  Clone ID: PAT_MRT4530_67243C.1
atggccgaacaagcaaaggcgcacaacctctctccgagtgttagcggtgacgacggggagccgaacccacgccgtcgagctcgtactccaccgccccctccacgccaaagtcctaggggggaggaggcgctcgagagggtcgaaggatccgcgacttcgacatccacgggtgatggggaagggcggcgagatggggagcgtcgcctcctcgtctatggcgacggcagcacgccccagggcgcgctccaagctgcgggcgcgctcctacatcacccgcccattgtccctgacccggagtctccagcccaacgttggctggacgatgtggccaacttggtcatgacggcacggcagcgcctaggtgctggtgggcggtcctccgccaccaagacctctggcgctgctaccaccggctccgtgtcgtcaaggcggagggcgcggcgagcggcggctgttgcttgccattcagccgccactccttcgttagcgcctccgacccaggaagatctgcgtggggggccggatgcccgcatcagtatcgagcgccggcgtaatggccggcgttctgcccacgcaacggagggcgcctcctcgtccggagtgtcacatcaacacggacgcggggatcagccctccgtgcccccggttggtggtgtcggctgtagagcctttgtggcgagccttcggaacgtctgttggcccctaaggttccggcccactatcgccgaaaaatatgacgggagcgtcaaccccgccgagtttctccaggtctacacgaccgggatcgaggccgccgggggtgacgacagggtcatggcgaatttctttgccatggccctgaagggacaggcacggggttggctaatgaacttgccacccgcgtccgtccactcttgggaggatttgtgccaacagttcaccatgaactttcaaggcacatatccgcgcccaggtgaagaagcggacttacatgcagtccagcgaagggatgatgagtcacttcgctcatacattcagcggttctgtcaagtccgcaacaccataccatgcatccctgcacacgcggtgatctacgcgttcaggggggggcggcgtgacaggaggaggaagaagaggtcagcccattccgacgacgagggtcatgtcctcgccgtcgagggcgcttcgcgggccacccgaaaggggaggcctgcgagcgacaaaaagaaggaggccggcactcccagtagggagcgcccaaccggcaagtggtgcatcgtccacaacacctcccttcacgacctcgcggactgccgcgcagtcaaaagtttggctgagcggacgaggaagtgggaggaggagaggaggcaggagcgccgagagggcaagtccccggcggttccttccggcaatcgacgaagtgaggccaagcagaaggcccccgccgaggacatcgatgatggcgatgatgacctaggtttccaagagcctggggccaccattgccactgtcgatgggggagcgtgtgctcacgtttctcgccggagcctcaaggccatgaagcgagagcttctggccgcggcccctactcatgaggcgacgcgccgggcgcggtggtcggaggttgccctcaccttcgaccagaccgaccacccaccatgcgttgcccggggaggacagatcgcaatggtggtttcccccactgtttgcaacgtgaagctggggcatgtcctcattgatgggggagcagccctcaacatcctttcccccgcagcctttgacgctatcaaggccccggggatggtgctccggccgtcccagccgattatcggtgtgacgccgggtcacacttggccgctaggtcatatcgacctcccggtcaccttcggtggatccgccaacttccgcacggagcgggtgaactttgatgtggcggacctcagtctgccctacaacgcggtcctagggaggcccgcgttggtgaagttcatggcggcagtccactacgcctacctccagatgaagatgccgggccccggtggccccatctctgtccatggcgacctcaaagtcgcgcttgcttgtatggagcagcgcgcggaacaccctccaccgtgcgtccaagcccgagggtggtgatgagaggcttggcacctccgtccccgccgccccgaggcagcggatgatcacatgtgacgaggtcccggaagacgcgctcgtctccttcctgcgggcaaacgctgacgtcttcgcatggagaccggcggatatgcccggggtccccagggaggtgattgagcaccgtctcgccgtgcggccgggcgcaaggccggtccggcagaaagtgcggcggcaggcctcggaacgtcaagccttcatccgcgaggaggtggcgcgacttctggaggccggatttatccgcgaggtcatccatccggagtggctggcgaacccggtggtcgttcccaaggcgaacggcaaacttcggatgtgcatcgactacaccgaccttaacaaggcatgtcctaaggacccttaccccctgcctcgcatagatcagattgtcgactccacagcggggtgcgaccttttgtgttttctagatgcatactctggttaccatcagattcgcatggctagggaggatgaggaaaaaactgcattcattacccccataggaacttattgttatacgacaatgcccttcgggttaaagaatgcaggtcctacttttcaacgtactactcgaatttctttgggtagccaaataggacgtaatattgaggcttatgtcgatgacttggttgtgaagacgcgcaaccaagaaactttactttcggatctggcggaaactttcgggagtctccgctccgcccgcataaagctgaaccccgataagtgtgtgttcggtgtacctgcgggcaagcttctcgggttcttggtctctgcccgaggcatcgaggccaaccccgagaagatacgagctatagagcggatgcgcccccccagcaagcttagggatgtgcaatgcgtcaccggttgcatggccgccctaagtcggttcatatcgaggctgggagagaaggcgctacccttatttaagctcctcaaatgctccaggccgtttacttggacggaggaagctgaacatgccctcactcagttgaaggcgtatctcagctctcccccagttctggtcgccccggagccagatgaacccttgctcctctacttagcggcgaccccgcaagtagttagtgcggcgttggttgtggagcgcgatgaggacaatcctcattccgcgcatccccaccctgtgctggcttggcccgggagagagcagggaggagaggcccccgagccgaacggtggcccaaggcccccgacgaccggagctggccctctgcccgcttgtcagacggtgccaggtgcccccgacccccaggatggcctgagggccactgcgggaaggccgcacctatcgccctctgaccccgaggttaaccctgtgccgattcgacccgggagagagcagggaggagaggcccccgagccgaacggtggcccaaggcccccgacgaccggagttggccctttgcccgcttgtccgacgacgccaggagcccccgacccccaggacggccccgaggccactgtggaaaggccgcgcctattgtcctccgaccccgaggtcgtcggcacagaagacgagtgcgccccgcgaggccgcttggacgaagagcgccctagggatgcggcccctagcgaagagggtcggccccaccgaaaggtgcagcggcccgtctactttgttagtgaggccctccgggacgccaagacccgataccctcaggcccagaagatgctttacgctattctgatggcttcgaggaaactgcgccattatttccaggcgcatcgggtcacggtggttacgtcttaccccctcggacaaatcttgcataatcgagagggtacaggacgggtggtgaaatgggcaattgaactttctgagttcgatttgcactttgaaccacgtcacgctatcaagagccaggccctcgccgattttgtggcagagtggaccccggctcccgagcccctctcagtccccgaggccagctccggcccctcgcagctgcctcacaccgcccactgggtgatgcagttcgacggctccctgtctcttcagggcgccggtgcgggggtcacgttgacctcgccgagcggagacatcctcagatacctggttcgcctcgactttcgggcgaccaataatatggcagagtacgagggactccttgcgggactcagcgtggcagctggactggggatccgccgcctcctggtgttaggcgactcccagctggttgttaaccaggtctgtaaggagtaccggtgctctgacccgcagatggatgcttacgtacgccaagtacggcgtatggagcgccatttcgacaggatagagcttcggcatgtgcccagacgggataacacgattgccgacgaactctcacggctcgcttcctcacgagcccagaccccaccgggcgcctttgaagaaaggcttgcccagccgtcggcgcgacccgaccccttaggggagacggacgcgcctgaccggcccccgaggcccgtcggagtccagacctcgggacccgaggggagcgctcccagctcccttatattgattgcttggatcgatgagatccaagcatacctcacagataagactctacccgaggaccgcgaagggagtgaacgcgtccagcgcatctcaaaacgctacgtgctggcagaagggaccctctatcggcgcgcggctaacggaatcctcctgaagtgcattcctcgggaacaaggcgtcgagcttcttgccgatattcatgaaggcgaatgcggagcccactccgcctcgcgcaccttggttggcaaagcctttcgtcaaggtttctattggccgacagctctcaatgatgcggtcgacctggtccggcgatgcagagcgtgtcaattccacgccaagcaaatccatcagccggcccaggccctgcagatcataccacttttatggccatttgctgtctgggggcttgatatcctgggaccatttaggcgggccccgggcgggtttgagtatctatatgtcatgatcgacaagttcactaagtggcccgaggcttatccggtcgtcaagatcgataagcacttcgcacttaagttcattaagggcattacagcccggtttggggtgcctaaccgtattattacggataatggcacccaattcactagtgaacttttcggcgattactgcgaagacatgggcatcaagctctgcttcgcctcccccgcccaccccagaagcaatggccaagtggagcgcgccaatgcggaaatcctcagaggccttaaaaccaagaccttcaacatcctcaagaagcacggcgattcgtgggtcgaggagttgccagcggtgctctgggcgaaccgaaccacaccaagccgagcaaccggggaaacgtctttcttcctcgtctacggcgcggaagcggttctcccatccgagctcaccctgaggtcccctcgggccaccatgtactgcgaggctaatcaagatcagcttcgcagagatgacctcgactacttgaaggagcgaaggcggcgcgcggccctccgagccgcgcgctaccagcagagcctgcggcgctaccatcagcgccgcgtccgggcccgatcactctgcgtcgacgacctcgtcctacgccgcgtccaaacgcgtgctggattgagcaagctctcaccaatgtgggagggtccgtatcgagtgatcggcgtcccccggccgggctccgttcggctggccacgggcgacggcacagagctgcctaacccgtggaacatcgaacaccttcgtcgcttctacccctaa

SEQ ID NO: 66278 - DNA, 585 bp, Oryza sativa
  Clone ID: PAT_MRT4530_67244C.1
gagcgttgttggctgccaattttctggtgacataccaaaagaactcagccaactcccaaagctgcggttcctgtccttgaacaacaacaggtttactggaagtatacctccatcaattggcaacctttcaaatatgtactggcttgacttgggtgaaaatcgtctgactggatcacttccagtatctgatggaaccaatactggattggacaatttgacaaacgctctgcatttgttgcttgataacaacaatttcactggcggcattcctcccacattgacccttttaactaaacttgaagtcctgcatctagaaaacaataaattgacaggccctctgccagacttgacaggaatggattcactatatgttgtgaaccttgagaacctacacatcactggggagcttccgcagcctcttttcaaactcccggctatccagacactgggtcttaagggcaataatttcaacggcacactaaccatcggatcagactacagcagcacgctctcactgattgatttgcaggacaaccagatcaccactctcgccgtgagcggggctcagtacaacaagaaactcat

SEQ ID NO: 66279 - DNA, 1425 bp, Oryza sativa
  Clone ID: PAT_MRT4530_67245C.1
gtcgccgcccctcccccgctgcccgcgcgccgccccttcccccgccgccgcgtcgccgctccgccctcagccgcccgcgcgccgccccttcctccgccgccgcgtcgccggtcgccgacgccctcctcctctcccacctccgccgcaaccgcaacgtaagccgccgccgcctcctccgccgccgtgcacaccccgcgccccgcctccatccgctcctcctccgcctccgcccggccatccgtcggctcctcctccacccccaggccgccgatccccgccgccgccaactccaaggtaaccaaacctccccgcccttcacctcctcctcgatcgcccaccgctaaaccttgtcctctccctttcgatcaaccaaccaccagggggtcgccaagtgcctggccttccacgacggcgacttcaccttccccgacgacctcgcgccgctgctcgacctccccgaccccgccgactcctcctcctccaccaccaccaccgccgccctcatctccgccgccccggacccggatgacgccatcaccgcttccgccgactccgccccctcccggaccagatcagcctcgcgctcgccgagctgcgcggcggccgcggcctcagcccccgctccaagcgcctcgttgccgcgctcgtcgaggccgccgccgccgagctccgccccaatgccgccaccctccgcctgcgccgcgccgccttctgggggaaggtgcgcgtctggatcctcgccgcgacggtcgccaccgtgttcgccatcgacgtcgtgctcgccgtcgccctcgtctcccgccgcggcaacgacctctacgacgcgctgccccctacctgagcagccgccatctcctcatacttgattatctcctcgtgccgcgtcgcctccaccgtcgccctcttctcctccgccgccttgtggatcgccgctacctggttcctcatcttctccgcgtactccgccttcttcctctccagcttctcctgcaattccgccgtcgccggcgccgccgccacatctgctctcttcgcctcctgggtctccatctccagtccctcctctcccccctccaccgcctctcggatcccgccgccgcccgccgtcgccgcctccgccgccgcagactctatctctctgtgtatccatcccttctcgacctcgcgcaaatcccatccttttcgccccttctttccctgcgaaagatcgggtttttttttctgcccgtctctttccttttagcagtcaaagattgccatatccatggtcaaacttgcaatgtaggaccatacaagggtccatagctcagtggtagagcaattgactgcagatcaataggtctccggttcgaacccggatgggcccttccctttttttaattttgtttcaatctaaatttttttatttcaatatattttttacat

SEQ ID NO: 66280 - DNA, 228 bp, Oryza sativa
  Clone ID: PAT_MRT4530_67246C.1
atgtcgtcaggggaggagagtcgcaaaccagagtggcgtgtgccgcagcgggtcctgggaaagggcataccacctcggcgccgtcgggcagggctccggcggaaaggggaaccacccggcgctggcgggggctccggcggaaaggagatccacctggcgctggtggggcagggcgtggtggtgtgcggcggcgacgggaagaagcgagcagtgcggagcgaggtatag

SEQ ID NO: 66281 - DNA, 3312 bp, Oryza sativa
  Clone ID: PAT_MRT4530_67247C.1
atggagctagtgacaggggcaatggggagccttctccccaagctgggtcagctcctcaatgagtatggcctgcaagcaggcttgcagaagaagatcgagtctctctcgtgggagcttgagagcgtccatgtcgtcctccgcatggttggccaggtgccaccagagcagcttgaccagctggtcaagctctgggcgtgggatctcagggaggcgtcctatgacatggaggacatcatcgacgctttcatggtgcatattgatggccgcgaggatcctgccgacccccacatcctccgccgcctcaggaagaagatcagcatactgttcaagaagaccaaggctcgccgagagatcgctggagccatccaagacatcaacgagaaacttgaggaggtggctgcaaggcgtgggaggtacacggtcaataacatcgtcaccaagcctgtagtcccagaagacattgatcctcggctcctgaatctgtacaaaagggcaactgagcttgtcggcatcgaagggcaaatggacaatctcataaagatgctgtctcttgggaatgatatagatttgttcgacaagacggtgagggtggtctctgttgtcgggattggagggctgggcaagacaactcttgtcaaagcagtctatgaaaagcttaaaccaggttttgattgtggggcttttgttccagtcggtcagaaccctgacatgaagaaagtccttagggatattatcattgatcttgacaagaagacctatacagattttaatatcaccttgttcgatgaaaggcagctcatcaataaactccaggaaatcctccaggaaaagagtttagtttctagctcatggggctctttcactgtcatgcggatctataggtgtttcattgtcattgatgacatgtgggataagaaatcatgggggttgatcagatgtgctctacaagacagtaatcacagaagtagagtagttgtaactactcgtgtttttgaagttgccacatatgtgggtgatgtttacaaaacgcagccactttcccgtaatgactctgaaaagttattgtatacaagaatagttcagggtgaagggaaatgtcttgatagttcgttggttgaagtatgtgacaaatttttgaagaaatgtggcggtgtgccattggctatcattacaatagctagtctattggccaataaacctcaggaggattggtctgaagtgtacagcactattgtcttggggcatggaggcaatgatgatgtggaaaacactagaaggatattatctttgagttactatgatctgcctttgcatctgaagccttgcttactgtatctaagcatatttccagaagattattatattgagaaaaatttgttgatatggaagtggatagctgagggtttcgtacatgagaaacaagcacctggtgtagggttatttgaactcggggagggatacttcaatgagctcataaacagaagcatgatccagccagtggaggctgaagacaaagggtatgtagatggttgccgtgttcatgatatggtgcttgatatgatctgtttattgtcatttgaagaaaactttgtcactgtgttggacggcagtgagaaacaggaatctccaaggatcaagactcgcaggttagccctgcagcataggaattttgaagagaacagacatcagttgggtaatgtgggggtggaccaactgaggtcctttgttgtgagtgaatgcgatggtattactgtggaatctccaagctttcatgtcttacgtgtattagctctagaaaatcatttttctcggaactattactgtaaacatattttgcagcaccttggaaatttacatcaccttaggtaccttgggctacaaaatgttcgaaccagcgaactcccggatgaagtaggagatttaaaatttttacaggtactggatctatcggggactggaattcaagagttgccagagtcagtgggcttgctgacaaaactgttgtccctacgagctaatgagggtacaagggtgtcggctggttcgatcgtgaagttgacatccctgcaggaaatgtggatatgtcccgctgatataagtcagtttgtgaaggtgctaggcaagctgagagaactaagggtgcttcatactagcctttttactcatggacaggatgagagaacagatagagatttgctggagtccctacaaaatctacacaagatccatactattgacattgggggctcatcaagaatgaagagtgtcatgtgggaagcaggattcacttcccctcgacgcctccgacacctgcgattgcgatccttggtgttctatagaatgcctgtggggattaacccgttacttcttccaaacctctgctatctagatttgcaagtgcagatcgtgaaggaacaggacatggaaactcttgggaggttgccagagctccgccacctaaaactgtgttcgtgtaaaacccatgtggtcagcgttgagaaggctgctggtgacggctactttcggaagttgagatatttcagcacaccctgttcatttctccggtttgatctacatggtgtcatttgcagcacaaagactatcatgccaaggcttgaatccctcgagttttttgtccgtgtgctgttcctaagagatgccaacctacttggttttgacaagctgcttggctttgggaaccatggaagaacttcactaagaagagttgaagctaccatggcatgttcgggtgcccgtgtcacggaggtggaggaagcggaggcagcgctggcacaagtggctgctgtccatcccaaccgccctacccttaaaaccacaagactgggtgacagtaagatacattcaccttacaaagagcctacaagtgtcaatcctaaagttgttttccaaaatgtcaatgtgcgggagatgaaggatgacgacggttactttgacttccattggttgctgcgtaacccatgggtcaagaaattcggtgtctccatcttctgtgaggatctacgcttcaggagctttgcttacttgaaattggtgtcccactctcagcctgaagttgttcaccgtgatgtcaatgtacggaagatcaaggataaaggtcgtaacattaaattctcttggctgttgaggaaccaatatgtcgagaaattcaggatctccataaactgtgagaatgctagtctcagggaggtcaaggaagcagaggagactgcaagggaggtgacatggatccatccaaacagtcccagagttgaaattgtgagatatggtgaagataagatggtgtcggactaa

SEQ ID NO: 66282 - DNA, 682 bp, Oryza sativa
  Clone ID: PAT_MRT4530_67248C.1
ctctcctctctctccctcttcatcttccacacttatcctctcctctccctctccttctccggttctccctctcctatctctctctcaccggtcggcatggagcagcggtaactccacgaaaaggcccggcggcggtgactgcaaagcgagcatggctcgcggcaactcaacaaagcggcccaccagcgacggctgcaaagcgggaaggaggggcgtagcggcggctcagtgaaggggtttggcgcatctcctcctctgctcccgcccgcctctaccaactaagcccatagtcgacgagcctcgagaggccgcatcagaagccaacagccttgggtggtgacgacgacctcgatgatgtgacgatttctaggaacaagctcgggggaggtggatccatcgccggtgagcttgggggaggccgacgatccgttgccaacaagctcaggggaggtggatcatcgtctgcgggctcaggggaggccgattattcatcagcttgtttgtaacctattgtttgttctagtggatctaattatagctgtgttcgatgttgttcttgtttatacttgtcttttcttgtttgtctatggatctgattctaatttgaatatgatgcttgcatgcaatgaaaattgaacatttcccccttttttttttgccccaaaaaaaaaaaaaaaaaaaa

SEQ ID NO: 66283 - DNA, 333 bp, Oryza sativa
  Clone ID: PAT_MRT4530_67249C.1
atggtgttcccgaacgatgcgcatccggggaagtcggtggttggcaaagggagtgaaggagatggccggaacggcgcaggcaagagtatagctctggcaacaagaggaggtggctgtggtggcggtgagaggcggtggcgaatgacggttgcgaaggcagtcggcgacttggccacggtgacggtggcgtggagaagaggagcacggcgtcggcggcggcacatctggaaggggcgagacggcgacgacgctgtggttgcagacggcggcggcggcaggcccacagggaagaggaaggaggcggctcagctggggctgggtcgcttgggctga

SEQ ID NO: 66284 - DNA, 1552 bp, Oryza sativa
  Clone ID: PAT_MRT4530_6724C.1
cgatccccgggctccatcccttcgcccgccgggttgctcaaagaagcagctcagctcgccgtgccctgcagctctaccggcagcatcatcatcacctgtatccccgaaaggcagcttcttccggttgtagctaccgagctaccagtaccacccaccctgagagccaagaaatggcggcctgattgggcccccccgtgagctccgaatccgccggcggccaactgccggatctcctcgcagccagcgcgccgccgggagggacggagattggcggcggaggaggggaggtgtccaggccaggtcaggtgggatctccgcttgcttcgccggcttagaaatcggcatctttgtcttgcagatgtgagcttgcaagtgtggggtctccgcgtctttttccaggtggcaggcatggaggtgaggctgctgcttctagtgttcatatgtctgcatgctcttctttgggcggcttcggctcagcagccagaggaggcgacggtcatagttaagggatcgacaaaaatcgctgaaacgaataaaaattatatatgtgctacaatcgattggtggccaccttagaagtgcaactccctatagtcattgaacatgggcttctgcctgggtcagcgaaagcggaggtgtattcaacaatggtgaacttcaaacactcatcaatagcatctggtatcttgatcagcttggaatggcatctaagtacaatacaaaaatattctgcaggcagactctgattggtggccactatggtctacttgacacccaaacttttttgccaaatcctgattactatagtgctctactatggcatcggcttatgggcagggaagttctttcagttgatatcaatgcgccgcgtaaactgcgtgcttatgctcattgcaggaaacagcagcaaggaatcaccctcctgttgatcaacctgagcaataccaccggatacaacgtcaccctccagaatgacatcaatgtcagccttgacaaaacagccagccttcataagcacaattctttctcacacagcctcagaagagcggtttcatggctggggcgcaagccgtcaagcgacgtcgcgaggagggaggagtaccacctgacggccaaggacggcgacctccagagcaagacgatgctgctcaacggcgcaccgctggaactctcggacgacggcggcgttccggccatgagccctgcgctcgttgctgtcaactcgccggtgtacctggcaccgacatcgatcgcctttgtagttcttccaatgtttgaggccaaggcctgttcttgagtgatcaatcttgccttcttgttgagtattacgcccttagaatgttccatttgttcttttctggtttaaatagcaaaacccttggaatgtaagcctttagaatgtaaaagaatggagtgttccatttgttcgttttctggtttgaataacaaagcctttagaatgtaaaagaatgtaccaaaacccttcgaatacaagaaggatcacaagaatttaccttagaatgcatagaacgattacaagaaaaaaaacaaa

SEQ ID NO: 66285 - DNA, 2203 bp, Oryza sativa
  Clone ID: PAT_MRT4530_67250C.1
gcacgaggcttctcttctcctctcctctcgtctcctcgccctcgccgccgacgagctcgccgccgcgttcccgactccagcgacgttgtggtgggtatctgagggctgagacatgggccccgcgccgaaggcggagcccatgaagcagcgggtgaaccggtgcctgctccggctgtccgaccgcgacacggaggccatggcggccgccgagctggacgggatcgcgcgcgggctggaggccgacgagctccctgcgttcctcgccgcggtgctcgtggccgccgcgctgcggcgcgtcagggacccggactcgtccgtgcgcgccgcgctcgtcgacgccgcgcgggccgccgcggcggccgcgggggcggcggacgcggcgctcgcgccgctcgtcggggcgctgctccacgagcaggaccagtgcgcgcagctcgcctccgcgctcgcggcggccgcggccgtcgaggcgtccgcccccagcgcggacctcgccgcctacctccaggccctcctcccgcgcctcctcaagcttctccgcagctccgcgttcaaggccaagccggcgctcatctccctcatcggcgccgcctcggccgcctccggcggcggcgccgcggccaccgcggtgccctcgctacgcgacgcgctcaccggcgaagactgggcggcgaggaaggccgccgccgaggcgctcgcgctgttggcgctggagcacggagacaacctcgtcgaacagaagccatcctgcattgccgtcttcgaggccaagagattcgataaggtgaagattgttcgggagtcgatgaaccggatgattgaggcgtggaaggagatcccagacatggacgaggaagtatgctcctccgacgtgccgccatctccgcagtcgcagacgagatcttctagcacagactctgcaagtgatggacgatacccagctgattcccttggctccaactctgtccagtcagttaggaggaggaacttatcaccgacaaaaaaatcacccccaagggaagcattgcacaatgtcagcaacagaaggaccagcagttcttccatcggaaacaagaagaactcaccgccgtcacgccacaattcaggccaagccaagaactttgagtgtaaggttaatgtgactgatgctccggatgcgaccccgatcaaaaccgtgaccgaggagaagcttctgaaagatggcaatgttagagcaaggcttgaggcgcggagggtactgttccagaagaatggtgaggagaggtacaacaaggttcctgggctcaagtcagggtctagagttgttccatacaatggggacgatgactcggaagagattgcggagtctgaggatgtgcatgaggagtttcagtcaggtcacaaggaagaggacctgtcaaagatcaggatgcagcttgttcagattgagaatcagcagaccagcttgctcaatcttctccagaaatttatggggagctctcagaatgggatccgttccttggagacacgggtgaacggactggagatggcactggatgagatctcccgtgatttggctgcttcttcaggaaggatgccaagcagtgaacctgatatgaactgctgcatccttagcccgaaattctggagaagacatgatggcagtagatactcatccaagtactccatctccgacatagcaaactactccgaggagagcagaacttcttacaagtgggagaggcagaagtttggagttcagggtgttgtcaccaacccattagcagagccaaacgcttcattcgcaggaaacacggttgttgctcaggaagccaggagacagaattcagctcaatataagtcaaggaggtggtgccatggtgaccacccgagggctgcgaggacagcgagtagcgggaggcaatggatgacatcttcgcacttctgcaaatccgcgctatgagctcttttcttcttttctccaagttgaaaaaaaacagagatgtacatgagatatgaagttctgtttgagttcagactcgtgagaaacagcctaaagccctagactctaaagcaagaccctctctgcgagcttggcattccatttgtgttatacaccaggccttgagattgagacaaccagttagctaatgcaggcttgctgagggcaaagcatatgtagagtttaaaatgagaaatcgagttcacagcaaaaaaaaaaaaa

SEQ ID NO: 66286 - DNA, 480 bp, Oryza sativa
  Clone ID: PAT_MRT4530_67251C.1
atggcgcaaaccgacaaaaccaaggtgacgtcgggcggaagaagagccggagacagcggctacatcgtcgacgaggaagacgacgaggaggccaaggccaggggtggcgcggtagaggggagcacgctgacgaagatgacggagagggatacgacagggcgggggacaccatgggatcacccggaggaaggactcggcaaggaaggcagcggttgtgggagtgggggcacgcagggctcgagaaacacgagcttcagctctagggaggagcagaggtctagtgcgatcgggataccatgtgagaagctgcacgtgtgctgcagcagcagcggctcggttggtgggcaaagccgagtcggcccaggaagcagcagggaacggcccacgcgggtgctcggctccgaggcggatgtgtccgatgccgcgaaggacgaaggaaatcgagtgccgtggagtccgactgggattgtggccggttga

SEQ ID NO: 66287 - DNA, 657 bp, Oryza sativa
  Clone ID: PAT_MRT4530_67252C.1
atgcagaatcagcagcagcaggaggaggaggaaaactgggggaaccagtacgccaatttcaagtggtacgacgtggtgctgagcgtggtcgccgtcctggtagccgtgctcgccatggcggtgctggtggaggccgtgctggtgatgcgctccaaccagtacgacctcgagctgaaggtccgccaaggcgccgtcaaggtgaagctcctgcaaccaccgtcatggatgaggatgaacttcaccctggccgccaccaacccgatcaccaacacggccgcaacggacgtcaacatctccctctccgtcaccgacatcaccgtcaccagcggcaacaagaccctcatgactgaattccatgtggatcgcggcaatgtctctgtcgggccggggcacaccgaatatgtgatctggttgcaggacgcgagcgacagctccttcttcgatcagctcgaaaacaatcggaaagtcacgatcgaactgaaggtccgtggcgacaccgacacgcggattaccccgttgaacgaggacgccttcgatccaccctcccggcacgtcgtattcgattgcgctggcgtctccctgaccgtagtcgacgatttgagcatgatcgaccatggcggcaacaaggacgacgacgtttcttgcagttatgtatga

SEQ ID NO: 66288 - DNA, 546 bp, Oryza sativa
  Clone ID: PAT_MRT4530_67253C.1
gcacgaggccgtgaatcaccacaccgaacaccgccgccgccgcccatgtcgtcccacgaccccagcagcgccaccgcggcggacgccgtcgccggcgggagctaccgcgtgtgcgacacggtggtgctcgtctgcctcgccttcgcctcctccatcatcgtcttcaccgtggccgtctgcttccgccgcgccgtcaccctgcagggctacgcggcctcggcgtcggcgtcgccgtccggccgtggcggcggcgccgccgccgcacccgccgctgtcggcggcctgcgcgggctggcgccgtccgcgctcgccgcgatccccaagttcgcgtaccggaggggcgccgcgggcggcggcggcgggtgggcgcagtgcgcgatctgcctcggcgtggtgcgcgacggcgaggccgtgcggcggctgccggagtgcaagcacctgttccacgtggagtgcgtcgacatgtggctgtactcgcacgccacgtgcccgctctgccggcgagacgtcggcgccgccgccgccgcggccggcgacaaagtctag

SEQ ID NO: 66289 - DNA, 408 bp, Oryza sativa
  Clone ID: PAT_MRT4530_67254C.1
gacaaaccaaacttattcaaatgtaagtcagggagagaaaccatccagtcccttgcgcttgatctggcatgtatacaagacaggagtttaccataattcctgaactgaaccgatatctcgagtatacaaaggcccattaactcctatcgcgtatttgggagtgacgtatacatccgtcaagtgttcgccatgctgtacgaacagattcacaagaacctcacggacaactaaggcataagactttcaactcaaaacactactcctccacaacaacactccatgctggcccttcttgagcatgtcctataacgatctactctcactctgaacgtttcagggatgcatcttgcagagaccaccaactaccctcccaagggtgagccccatgcagatctcctcctcttgtcc

SEQ ID NO: 66290 - DNA, 297 bp, Oryza sativa
  Clone ID: PAT_MRT4530_67255C.1
ccccccccgcaccctttataaaaacaaaggaaaattaaaaatatttggttcccaccggcaaaaaaaataagctaacaaattttcctttgggaccggcataaaaaccgggaggaaaaaaaggttccttccctaccatacaaaaaaggctatttcggcccccccaaaccagggaggttttggggctaaaaaaagggcctggccccatcccaccttagggggaaacagaagttgaagggccttctcctaacccaaaaggtggggaacccaaggaaacaccacccggaccctcgggggttt

SEQ ID NO: 66291 - DNA, 2392 bp, Oryza sativa
  Clone ID: PAT_MRT4530_67256C.1
gttttaccaatattaaatacttggtgcagatacaactatcagccacctcctgggaagccgaatcatacttgtggtggtgctgatagatgggcagatgttgttagcaccgatgatactagcaactcctcctcctcttcaccttctgcctccacctccacctccaagatggagctcaagatgtccaagaagatttccttcagtaggatccccaggaacctcaaggacctgctcgccactggcttgctcgagggccaccccgtcaagtacatcatgaggaaaggcaaggttgtttccccttattatttcgaggtgcatgctgggagtactaaaaagcacccctccgactacattttcctagaaaatggaaacaatctgcatgatatattgagggcgtgttctgatgctaccttagacatgctgcaatctgcaatacagaatgcgattggcccagctcctaagaagaggacattcagatgccaaacttgcaaaagtgagctgtcctcttgttgcactgggaaatttgctttgttatgtgattcatgtcttgagtccaagggatctcaaaacagtaccaggtaagctttgtcacagttccacattttgccagcgacagaaaatttggaggacatcaaagattggccggaatcctacttcctctgctaggagatccaagaatgaatccccaggttcaaagtattgcaattcatctgctaggggatccaagaatgcattcccaggagtgaagactactagcacgggaaggattacaagaaaggataagggattgcataagttggctttcatgagtggtgttctgccagagggtaccgatgttggctactatgttggtggaaaggttagcccttcgcagtttgaagcccatgctggccgtgctgctcgacgcaaaccgtaccacaacatatatatgtcaaatggtgtttcattacatgaactgtcagtttcactttcaaaaggtcgaaatatgtcaaacagacaaagtgatgacttgtgcagcatttgttcagatggtgagtgtgttggctttactactatcccaaggggaacttggtgttgtcggtattgtgagaatagacaacagagagaaagttctttggcatataaccacaatgcaatagctgctgggaggattgacggaattgatccaatggaacaaatatttacaaggtccatacgcattgccacaacaccagtgactggatttggtggctgtgcacttttgtgcaggctccatgatttcagcaaaaagaaattcagtgcgagaactgtgctgctctgtgaccaatgtgggagggaattccatattggttgcctgaaggaacacaatatggctgatttgacggccttgcctgagggagcatggtattgtactgcggactgcgttaggatcagcgagacactgaaggacttacttagccgtggagcagagcctatttcttctgtagatgtagaaattataaagaggaaatatgaacagaaagctctaaataaagatggagatcttgatgttagatggagggttttgaaggacaaaagttcagcagacagtaaattggttctctccaaagcagttgcaattttccatgaatcatttgatcccattatccaaattgctactgggcgagaccttattccagccatggtttacgggaggagtgtaagggatcaagattacacaggaatgcattgtgctgtattaactgttggcaacactgtagtatctgcgggtcttttccgtgttatgggtagtgaaattgcggagctacccttggttgctacaagtagagatagtcaaggcttggggtatttccaagcgctgtttggctgcatagaacgattgttggcatctctgaaggtgaaacattttgtgctgccagctgcagatgaagcggagtctatctggacacagcggtttggattcgtgaagataacccaagacgagctgcgtgagtacctcaagggtgggcgaacaaccgtgttccagggaacatcaaccctgcacaagctggtcccaaaattggatggctagctctgtgaatatatgcattggaatgtgcagggagcgttgaggcaggtccttgccaccctgatatgaagcgtggtgaagatagggacgggacgggacgggaaccctaagataaaaaatcccttctgtgaaaattaatgggtgcgtccctttttgatattttttatttgtcagtggtggaaaagaatatcgggaggatgtgttttcttgtttgtttgtttttttacatttgcggcaggagttgtctgatgtcgtgtgagtgtgtggttagtctagctagctattcatcatacttcatgcagttggtacttgttttgtggataaatcccctgttttgcataaaaccaa

SEQ ID NO: 66292 - DNA, 351 bp, Oryza sativa
  Clone ID: PAT_MRT4530_67257C.1
atgccgcgtggacagaagtctaatcgaacgcttgccatgaatatgcccagagaggacgttcgcgacggctcggctctcgttcgactccgtggaaaggcgcgcgcttggctcggcgcgttcgagtaggtgtttcgacatattatttcgataccctagatcacgcggggacgcggagagagacgacgtctcgccagatcgcggccaaaatcgccggcaaccgctgccgccatgacagaagcttcatggatgacgcaaccaccatggcaagaggagggcaagggaagggatccagccgccgggtttcttgtgaccggacctctctacaccaatgtgttgatgggggtcgacggc

SEQ ID NO: 66293 - DNA, 5688 bp, Oryza sativa
  Clone ID: PAT_MRT4530_67258C.1
atggccgaacaagcaaaggcgcacaacctctctccgagcgttagcggtgacgatggggagccaaacccacgccgtcgagctcgtactccaccgccccctccacgccaaagtcctaggcgggaggaggcgctcgagagggtcgaaggatccgcgacttcgacatccacgggtgatggggaagggcggcgagatggggagcgtcgcctcctcgtctacggcgacggcagcacgccccagggcgcgctccaagctgcgggcgcgctcctacgtcacccgcccattgtccctgacccggagtctccagcccaacgttggctggacgacgtggccaacttggtcatgacggcacggcagcgcctaggtgctggtgggtggtcctctgccaccaagacctctggcgctgctaccaccggctccgtgtcgtcaaggcggagggcgcggcgagcggcggctgttgctcgccattcagccgccactccttcgttagcgcctccgacccaggaagatctgcgtggggggccggatgcccgcatcagtatcgagcgccggcgtaatggccggcgtgctgcccgcgcaacggaaggcgcctcctcgtccggagtgtcacatcaacacggacgcggggatcagccctccgtgcccccggttggtggtgtcggctgtagagcctttgtggcgagccttcggaacgtctgttggcccccaaggttccggcccaccatcgccgaaaagtatgacgggagcgtcaaccccgccgagtttctccaggtctacacgaccgggatcgaggccgccgggggtgacgacagggtcatggcgaatttctttcccatggccctgaagggacaggcgcggggttggctaatgaacttgccacccgcgtcggtccactcctgggaggatttgtgccaacagttcaccatgaactttcaaggcacatatccgcgcccaggggggggtgtgcggcacaaccgcatgctcgaaaagatcgcctccaaagagccccagactaccgcggagctctttcagctcgcggaccgagtggctcgtaaggaggaggcatggacctggaaccccttcggttccggtgtggcagctccggccgcccccggatccgctgctcagacagggcggcgtgacaggaggaggaagaagaggtcagcccattccgacgacgagggtcatgtcctcaccgtcgagggcgcttcgcgggccacccgaaaggggaggcctgcgagcgacaaaaagaaggaggccggcgctcccagtagggagcgcccaaccagcaagtggtgcatcgtccacaacacctcccttcacgacctcgcggactgccgcgcagtcaaaagtttggctgagcggacgaggaagtgggaggaggagaggaggcaggagcgccgagagggcaagtccccggcggttccttctagcaatcggcgaagtgaggccaagcagaaggcccccgccgaggacatcgatgacggcgatgatgacctaggtttccaagagcccggggccaccattgccactgtcgatgggggagcgtgtgctcacgtttctcgccggagcctcaaggccatgaagcgagagcttctggccgcggcccctactcatgaggcgacgcgccgggcgcggtggtcggaggttgccctcaccttcgaccagaccgaccacccatcgtgcgttgcccggggaggacagatcgcaatggtggtttcccccactgtttgcaacgtaaagctggggcgtgtcctcattgatgggggagcagccctcaacatcctttcccccgcagcctttgacgctatcaaggccccggggatggtgctccggccgtcccagccaattatcggtgtgacgccgggtcacacttggccgctaggtcatatcgacctcccggtcaccttcggtggatccgccaacttccgcacggagcgggtgaactttgatgtggcggacctcagtctgccctacaacgcggtcctagggaggcccgcgttggtgaagttcatggcggcagtccactacgcctacctccagatgaagatgccgggccccggtggccccatctctgtccatggcgacctcaaagtcgcgcttgcttgtatggagcagcgcgcggaccacctcaccgccgtgtccaagcccgagggaggcgacgagaggcttggcacctccgcccccgccgccccgaggcagcggatagtcacatgcgacgaggtcccggaagacgcgctcgtctctttcctacgggcaaacgctgacgtcttcgcatggagaccggcggatatgcccggggtccccagggaggtgattgagcaccgtctcgccgtgcggtcgggcgcaaggccggtccggcagaaagtacggcggcaggccccggaacgtcaagccttcatccgcgaggaggtggcgcgacttctggaggccggattcatccgcgaggtcatccatccggagtggctggcgaacccggtggtcgttcccaaggcgaacggcaagcttcggatgtgcatcgactacaccgaccttaacaaggcatgtcctaaggacccttaccccctgcctcgcatagatcagattgtcgactccacagcggggtgcgaccttttgtgttttctagatgcatactctggttaccatcagattcgcatggctagggaggatgaggaaaaaactgcattcattacccccataggaacttattgttatacgacaatgcccttcgggttaaagaatgcaggtcctacttttcaacgtactactcgaatttctttgggtagccaaataggacgtaatgttgaggcttatgtcgatgacttggttgtaaagacgcgcaaccaagagaccttactctcggatctagcggaaacttttgagagtctccgctccgcccgcataaaactgaaccccgataagtgcgtgttcggtgtacctgcgggcaagcttctcggcaagcttagggatgtgcaatgcgtcaccggttgcatggccgccctaagtcggttcatatcgaggctgggagagaaggcgctacccttatttaagctcctcaaacgctccgggccgtttacttggacggaggaagctgaacgtgccctcactcagttgaaggcgtatctcagctctcccccagttctggtcgccccggagccaaatgaacccttgctactctacttagcggcgaccccgcaagtggatggcccgagggccactgcgggaaggccgcacctatcgccctctgaccccgaggctaaccctgtgccgactcgacccgggagagagcagggagaagaggcccccgagccgaacggtggcctaaggcccctgacgaccggagttggccctttgcccgcttgtccgacgacgccaggagcccccgacccccaggacggccccgaggccactatgggaaggccgcccctgtcatcctccgaccccgaggtcgtcggcacagaagacgagtgcaccccgcgaggccgcttggacaaagagcgccccagggatgtggcccctagcgaagaggatcggccccaccgaaaggtgcagcggcccgtctactttgttagtgaggccctccgggacgccaagacccgataccctcaggcccagaagatgctttacgctattctgatggcttcgaggaaactgcgccattatttccaggcgcatcgggtcacggtggttacgtcttaccccctcggccaaatcttgcataatcgagagggtactggacgggtggtgaaatgggcaatcgaactttctgagtttgatttacactttgaaccacgccacgctatcaagagccaggccctcgccgattttgtggcagagtggaccccagctcccgagcccgtctcagtccccaaggccagctcgggcccctcgcagctgcctcacaccgcccactgggtgatgcagttcgacggctccctgtctcttcagggcgccggtgcgggggtcacgttgacctcgccgagcggagacgtcctcagatatttggttcgccttgactttcgggcgaccaataatatggcagagtacgagggactccttgcgggactcagggtggcagctggactggggatccgccgcctcctggtgttaggcgactcccagctggtcgttaaccaggtctgtaaggagtaccggtgctctgacccgcagatggacgcttacgtgcgccaagtacggcgtatggagcgccattttgacgggatagagcatcggcacgtgtccagacgggataacacggttgccgacgaactctcacggctcgcttcctcgcgagcccagaccccaccgggcgcctttgaagaaaggcttgcccagccgtcggcgcgacccgaccccttaggggagacggacgcgcctgataggcccccgatgcccgtcggagtccaggcctcgggacccgaggggagcgctcccagctcccttagattgattgcttggatcactgagatccaagcatacctcacatataagactctacccgaggactgcgaagggagtgaacgcgtccagcgcatctccaaacgctacgtgctggtagaagggaccctctatcggcgcgcggctaacggaatcctcctgaagtgcattcctcgggaacaaggcgtcgagcttcttgccgatatccatgaaggcgaatgcggagcccactccgcctcgcgcaccttggttggcaaagcctttcgacaaggtttctattggccgacagctctcaatgatgcggtcgacctggtccggcgatgcagagcgtgtcaattccacgccaagcaaatccatcagccggcccaagccctgcagatcataccactttcatggccatttgctgtctgggggctcgatatcctgggaccgtttaggcgggccccgggcgggtttgagtatctgtatgttgcgatcgacaagttcactaagtggcccgaggcttatccggtcgtcaagatcgataagcactccgcacttaaattcattaagggcatcacagcccggtttggagtgcctaaccgtattattacggataacggcacccaattcactagtgaacttttcggcgattactgcgaagacatgggcatcaagctctgcttcgcctcacctgcccaccccagaagcaacggccaagtggagcgcgccaatgcggaaatcctcagaggccttaaaaccaagaccttcaacatcctcaagaagcacggtgattcgtggatcgaggagttgccagcggtgctctgggcgaaccgaaccacgccaagccgagcaaccggggaaacgcctttcttcctcgtctacggtgcggaagcggttctcccatccaagctcaccctgaggtcccctcgggccaccatgtactgcgaggctgatcaagatcagcttcgcagagatgacctcgactacttggaagagcggaggcggcgcgcggccctccgagccgcgcgctaccagcagagcctgcggcgctaccatcagcgccacgtccgggcccgatcactctgcgtcgacgacctcgtcctacgccgcgtccaaacgcgtgctggattgagcaagctctcaccaatgtgggagggtccgtatcgagtgatcggcgtcccccggccgggctccgttcggctggccacgggcgacggcacagagctgcctaacccgtggaacatcgaacaccttcgtcgcttctacccctaa

SEQ ID NO: 66294 - DNA, 1432 bp, Oryza sativa
  Clone ID: PAT_MRT4530_67259C.1
gacatcaaagattggccggaatcctacttcctctgctaggagatccaagaatgaatccccaggttcaaagtattgcaattcatctgctaggggatccaagaatgcattcccaggagtgaagactactagcacgggaaggattacaagaaaggataagggattgcataagttggctttcatgagtggtgttctgccagagggtaccgatgttggctactatgttggtggaaaggttagcccttcgcagtttgaagcccatgctggccgtgctgctcgacgcaaaccgtaccacaacatatatatgtcaaatggtgtttcattacatgaactgtcagtttcactttcaaaaggtcgaaatatgtcaaacagacaaagtgatgacttgtgcagcatttgttcagatggtggggagcttctcctttgtgattcctgcccaagagcttttcacagagagtgtgttggctttactactatcccaaggggaacttggtgttgtcggtattgtgagaatagacaacagagagaaagttctttggcatataaccacaatgcaatagctgctgggaggattgacggaattgatccaatggaacaaatatttacaaggtccatacgcattgccacaacaccagtgactggatttggtggctgtgcactgtgcagtatgtcaggattcatggacaagcagagtgtattaagtcgaagtaggccagattatgatgatgagctggcagtactagaccagctccatgatttcagcaaaaagaaattcagtgcgagaactgtgctgctctgtgaccaagccttgcctgagggagcatggtattgtactgcggactgcgttaggatcagcgagacactgaaggacttacttagccgtggagcagagcctatttcttctgtagatgtagaaattataaagaggaaatatgaacagaaagctctaaataaagatggagatcttgatgttagatggagggttttgaaggacaaaagttcagcagacagtaaattggttctctccaaagcagttgcaattttccatgaatcatttgatcccattatccaaattgctactgggcgagaccttattccagccatggtttacggcaacactgtagtatctgcgggtcttttccgtgttatgggtagtgaaattgcggagctacccttggttgctacaagtagagatagtcaaggcttggggtatttccaagcgctgtttggctgcatagaacgattgttggcatctctgaaggtgaaacattttgtgctgccagctgcagatgaagcggagtctatctggacacagcggtttggattcgtgaagataacccaagacgagctgcgtgagtacctcaagggtgggcgaacaaccgtgttccagggaacatcaaccctgcacaagctggtcccaaaattggatggctag

SEQ ID NO: 66295 - DNA, 192 bp, Oryza sativa
  Clone ID: PAT_MRT4530_6725C.1
atgattagtggtgacggatccaacggcgaggagctgccgaagacggggaagacaacgagacagggacacttgcgccgccgacttgggaagagaggtgggagggggagaaggcccgggatgaagggggagttgccggcacagttgacttcattcggccaaccggcaaggccgggctgcggcacatggggctga

SEQ ID NO: 66296 - DNA, 1290 bp, Oryza sativa
  Clone ID: PAT_MRT4530_67260C.1
atggcgtttaggcggattcgaggcgacgaacaagaggaggatagggatgatggtgggtggcctgaggccaagaggaagagacagacggtgccatctttcatatcagttatgagaggagcaatggctgccgaaaagattcagaaactcggcctggatctggaaccattttttcggaaggcggttcaggaggaactggaaagaagcctttctaaacatggacacctactgtacagatctcctccaatgcttgtcaactccgtcgattcttcgctgaagctcgccttcgcgaagcggctccagctcccaatcttcaccaacaacaagctcgtcgacgtcgacaacaaccctctccaagtccacctccttcacatgagctccaccaccacctctcatcatcatctccccatgatcaagaagctggaggtgctagtcctggatggagatttcagtcatggtgatgagggatggagcagcgacgagttcagcggcgccatcgtgagggagagggaaggcaggaggccactgctcgtcggcacgctcaatgtggccatggccgatgatcatcttggcgttgcattcattgatgacgtggcgttcaccgacaactcgagctggaccaggagcaggaggttcaggatcggcgtgcgcgccgtggcggtggcgggtagcggcgatggcggcgagctgaggatccgggaggcggtgagcgagagcttcatggtgaaagatcaccggggagaatcgtacaagaagcatttccctccgaggccagatgatgaggtgtggaggctgaagaacatacggaaagatgggccaatccacaagaggctggaatctgaacgtgtcaggaatgtgcagggttttctgaacctgcatgccaccaaccctgaaaagctcaggaagctcgttgtcatgtccgatcggctctggaaggcaacactgcaccacgcgaaaacatgcgattttagagctgcagaaatgatgcaagtgaagcaatcttcaatcgaggcataccagaattgggatcagctggacgaagctgagactaacaagacagcctcaggcaatcttggtcaggcacatgaaggatcactacaggcagatgagataggcaccgtatcagggcctcatttccagagcagaaaccagatggattctgaagattcattgtctgctgctgctgtaactgaagatgcagatgatgcactgtggagcccttgcatgacaagtgatggccatggcttgatcatgtggaaaaacaacacttcagtgtgggaccaaacgaactaa

SEQ ID NO: 66297 - DNA, 5220 bp, Oryza sativa
  Clone ID: PAT_MRT4530_67261C.1
atggccgaacaagcaaaggcgcacaacctctctccgagcgttagcggtgacgatggggagccaaacccacgccgtcgagctcgtactccaccgccccctccacgccaaagtcctaggagggaggaggtgctcgagagggtcgaaggatccgcgacttcgacatccacgggtgatggagaagggcgccgagatggggagcgtcgcctcctcgtctacggcgacggcagcacgccccagggcgcgctccaagctgcgggcgcgctcctgcgtcacccgcctgtcgtccctgacccggagtctccagcccaacgatggctggatgacgtggccaacttggtcatgacggcacggcagcgcttaggtgctggtgggcggtcctccgccaccaagacctctggcgctgctaccaccggctccgtgtcgtcaaggcggagggcgcgacgagcggcggctgttgctcgccattcggctgccactccctcgtcagcgcctccgacccgggaagatcagcgtggggggccagatgcccgcatcgatatcgagcaccggcgtaatggtgaagaagcggacttacatgcagtccagcgaagggatgatgagtcacttcgctcatacattcagcggttctgtcaagtccgcaacaccataccatgcatccctgcacacgcggtgatctacgcgttcagggggggtgtgcggcacaaccgcatgctcgaaaagatcgcctccaaagagccccagactaccgcggagttttttcagctcacggaccgagtggctcgtaaggaagaggcatggacctggaacccctccggttccggtgtggcagcttcggccgcccccggatccgctgctcggacagggcggcgtgacaggaggaggaagaagaggtcagcccattccgacgacgagggtcatgtcctcgccgtcgagggcgcttcgcgggccacccgaaaggggaggcctgcgagcgacaaaaagaaggagggcggcgctcccagtagggagcgcccaaccggcaagtggtgcatcgtccacaacacctcccttcacgacctcgcggactgccgcgcagtcaaaagtttggctgagcggacgaggaagtgggaggaggagaggaggcaggagcgccgagagagcaagtccccggcggttccttccggcaatcggcgaagtaaggccaagcagaaggcccccgccgaggacatcgatgacggcgatgatgacctaggtttccaagagcctggggccaccattgccattgtcgatgggggagcgtgtgctcacgtttctcgccggagcctcaaggccatgaagcgagagcttctggccgcggcccctactcatgaggcgacgcgccgggcgcggtggtcggaggttgccctcaccttcgaccagaccgaccacccaccatgcgttgcccggggaggacagatcgcaatggtggtttcccccactgtttgcaacgtgaagctggggcgtgtcctcattgatggaggagcagccctcaacatcctttcccccgcagcctttgacgccatcaaggccccggggatggtgctccggccgtcccagccgattatcggtgtgacaccggggcacacttggccgctaggtcatatcgacctcccggtcaccttcggtggatccgccaacttccgcacggagcgggtgaactttgatgtggcggacctcagtctgccctacaacgcggtcttagggaggcccgcgttggtgaagttcatggcggcggtccactacgcctacctccagatgaagatgccgggccccggtggccccatctctgtccatggcgacctcaaagtcgcgcttgcttgtatggagcagcgcgcggaccacctcaccgccgcgtccaagcccgagggaggcgacgagaggcttggcacctccgcccccgccgccccgaggcagcggatagtcacatgcgacgaggtcccggaagacacgctcgtctctttcctgcgggcaaacgctgacgtcttcgcatggagaccggcggatatgcccggggtccccagggaggtgattgagcaccgtctcgccgtgcggtcgggcgcaaggccggtccggcagaaagtacggcggcaggccccggaacgtcaagccttcatccgcgaggaggtggcgcgacttctggaggccggattcatccgcgaggtcatccatccggagtggctggcgaacccggtggtcgttcccaaggcgaacggcaagcttcggatgtgcatcgactacaccgaccttaacaaggcatgtcctaaggacccttaccccctgcctcgcatagatcagattgtcgactccacagcggggtgcgaccttttgtgttttctagatgcatactctggttaccatcagattcgcatggctagggaggatgaggaaaaaactgcattcattacccccataggaacttattgttatacgacaatgcccttcgggttaaagaatgcagttctggtcgccccggagccaaatgaacccttgctactttacttagcggcgaccctgcaagtggttagtgcggcgttggttgtggagcacgatgaggacaatcctcattccgcgcacccccaccctgtgctggcttggcccgggagagagcagggaggagaggcccccgagccgaacggtggcccaaggcccccgacgaccggagcaggccctctgcccgcttgtcagacggtgccaggtgcccccgacccccaggatggcccgagggccactacgggaaggccgcacctatcgccctctgaccccgaggctaaccctgtgccgactcgacccgggagagagcagggagaagaggccctcgagccgaacggtggcctaaggcccctgacgaccggagttggccctttgcccgcttgttcgacgacgccaggagcccccgacccccaggacggccccgaggccactgtgggaaggccgcccctgtcgtcctccgaccccgaggtcgtcggcacagaagacgagtgcaccccgcgaggccgcttggacaaggagcgccccagggatgtggcccctagcgaagaggatcggccccaccgaaaggtgcagcggcccgtctactttgttagtgaggccctccgggacgccaagacccgataccctcaggcccagaagatgctttacgctattctgatggcttcaaggaaactgcgccattatttccaggcgcatcgggtcacggtggttacgtcttaccccctcggccaaatcttgcataatcgagagggtactggacgggtggtgaaatgggcaatcgaactttctgagtttgatttgcactttgaaccacgccacgctatcaagagccaggccctcgccgattttgtggcagagtggaccccagctcccgagcccgtctcagtccccgaggccagctcgggcccctcgcagctgcctcacaccgcccactgggtgatgcagttcgacggctccctgtctcttcagggcgccggtgcgggggtcacgttgacctcgccgagcggagacgtcctcagatatttggttcgccttgactttcgggcgaccaataatatggcagagtacgagggactccttgcgggactcagggtggcagctggactggggatccgccgcctcctggtgttaggcgactcccagctggtcgttaaccaggtctgtaaggagtaccggtgctctgacccgcagatggacgcttacgtgcgccaagtacagcgtatggagcgccattttgacgggatagagcttcggcacgtgcccagacgggataacacggttgccgacgaactctcacggctcgcttcctcgcgagcccagaccccaccgggcgcctttgaagaaaggcttgcccagccgtcggcgcgacccgaccccttaggggagacggacgcacctgacaggcccccgatgcccgtcggagtccaggcctcgggacccgaggggagcgctcccagctcccttagattgattgcttggatcgctgagatccaagcatacctcacagataagactctacccgaggaccgcgaagggagtgaacgcgtccagcgcatctccaaacgctacgtgctggtagaagggaccctctatcggcgcgcggctaatggaatcctcctgaagtgcattcctcgggaacaaggcgtcgagcttcttgccgatatccatgaaggcgaatgcggagcccactccgcctcgcgcaccttggttggcaaagcctttcgacaaggtttctattggccgacagctctcaatgatgcggtcgacctggtccggcgatgcagagcgtgtcaattccacgccaagcaaatccatcagccggcccaggccctgcagatcataccactttcatggccatttgctgtctgggggctcgatatcctgggaccgtttaggcgggccccgggcgggtttgagtatctgtatgtcgcgatcgacaagttcactaagtggcccgaggcttatccggtcgtcaagatcgataagcactccgcacttaaattcattaagggcatcacagcccggtttggagtgcctaaccgtattattacggataacgacacccaattcactagtgaacttttcggcgattactgcgaagacatgggcatcaagctccgcttcgcctcacctgcccaccccagaagcaacggccaagtggagcacgccaatgcggaaatcctcagaggccttaaaaccaagaccttcaacatccttaagaagcacggcgattcgtggattgaggagttgccagcggtgctccaggcgaaccgaaccacgccaagccgagcaaccggggaaacgcctttcttcctcgtctacgacgcggaagcggttctcccatccgagctcaccctgaggtcccctcgggccaccatgtactgcgaggctaatcaagatcagcttcgcagagatgacctcgactacttggaagagcgaaggcggcgcgcggccctccgagccgcgcgctaccagcagagcctgcggcgctaccatcagcgccacgtccgggcccgatcactctgcgttgacgacctcgtcctacgccgcgtccaaacgcgtgctggattgagcaagctctcaccaatgtgggagggtccgtatcgagtgatcggcgtcccccggccgggctccgttcggctggccacgggcgacggcacagagctgcctaacccgtggaacatcgaacaccttcgtcgcttctacccctaa

SEQ ID NO: 66298 - DNA, 4917 bp, Oryza sativa
  Clone ID: PAT_MRT4530_67262C.1
atggccacggcggcggcggcggcggatcgatcatcggctcccggcgcccgggggaatccccgcacccagccctcaggcgcgccggccgccggccgccgggatgagacggagcaggtgttggtggccgcggcggcgcggcggggggcgaggcgaacggcggccgcgcgctcggtgggcgtgcgagtggggaagggaaggaaaatggaagagaatgttcgctttgcttgtgggaggggggtggaggatattgttgaggttgctgatgccgatggcaatggcaatgccaattgcaatggtggtgatggccctggtggtgatggcagtggtggtgatgactctggtgttgatgtcaacggtggtgatggcaatgatggtgatggcagtggtgctgatggagatggcaatgtagttgtagatcctgaagatgaaccaattggggtgaatgaagaacacttatatggagttgtagatcttgaatctcagaaggaagggactagtggaaagaagacagataaagagaggtcaagtgggaatgaggtagctactcaggatgttccaaatgattttgacccgcagcatgtccctgaagaggaagtacctattgatgagattggcaatgttgtgcccttgtttgtgcacaacagggagaatcctacatttgttgtagatgcaacattcccaaatggagaggcttttaaacttgcaatgagacagtttgcaataaaaggagaatttgaggtcgatgttagccatagatggattgcagatagggctaaggaaataatgaccacagagcctaacattggccccaaggcacttcaagataggttggagaagaaatataatgtaactcttaggtatggcagaacttgggaaggcctccaaaaggcaaaggatgacatccatggatcatgggaggctagctttcagcttctgtggagttttaaggctgaggtagaaagatcaatgccaggtagcattgttgacatcgatgtgaatgcaatgggggaaaaggttttctttaggaggaaatatacatggcaaatagcagcagcagttggagttgatggtcacaattggctttttccaatggcatatgcaatttttgacaaggaaaactatgaaaattgggaatggttcatgcaaaggttgaaacaagcagtagagggccccatcggcctgaccggtcagaccgacatggggtggccggtcagaccggcctcgactcggtcagaccgccatcagctcggtctgaccgactacggctccgtcggctctgtatcggccatcccgagcagcatcatctcggcctccagggggccggaagaccaaacctgcagtggtagttgtctcaaagccccagacaaggacgagagcctccaagcactcgtccctagccggagccggcgtgttagctcctggagatggcacgttggttccgacagccatgttcccacgtcgcgcctgcttccggtggaagtggaggtaggtatgggccgtcccatcagaagggggctctgcgagagatcttctgagctctcgcactctttcgtgtgcgccaagcttttcctgttcagcccaatggctgaacaagcaaaggcgcacaacctctctccgagtgttagcggtgacgacggggagccaaacccacgccgtcgagctcgtactccaccgccccctccacgccaaagtcctaggcgggaggaggcgctcgagagggtcgaaggatccgcgacttcgacatccacgggtgatggggaagggcggcgagatggggagcgtcgcctcctcgtctacggcgacggcagcacgccccagggcgcgctccaagctgcgggcgcgctcctacgtcacccgcccattgtccctgacccggagtctccagcccaacgttggctggacgacgtggccaacttggtcatgacggcacggcagcgcctaggtgctggtgggcggtcctccgccaccaagacctctggcgctgctaccaccggctccgtatcgtcaaggcggagggcgcggcgagcggtggctgttgctcgccattcggccgccactccttcgtcagcgcctccgacccaggaagatctgcgtggggggccggatgcccgcatcagtatcgagcgccggcgtaatggccgacgtgctgcctacgcaacggagggcgcctcctcgtccggagtgtcacatcaacacggacgcggggatcagccctccgtgcccccggttggtggtgtcggctgtagagcctttgtggcgagccttcggaacgtccgttggcccccaaggttccggcctaccatcgccgaaaaatatgacgggagcgtcaaccccgccgagtttctccaggtctacacgactgggatcgaggccgccgggggtgacgacagggtcatggtgaatttctttcccatggccctgaagggacaggcacggggttggctaatgaacttgccacccgcgtccgtccactcttgggaggatttgtgccaacagttcaccatgaactttcaaggcacatatccgcgcccaggtgaagaagcggacttacatgcagtccagcgaagggatgatgagtcacttcgctcatacattcagcggttctgtcaagtccgcaacaccataccatgcatccctgcacacgcggtgatctacgcgttcagggggggtgtgcggcacaaccgcatgctcgaaaagatcgcctccaaagagccccagactaccgcggagctttttcagctcgcggaccgagtggctcgtaaggaagaggcatggacctggaacccctccggttccggtgtggcagcttcggccgcccccggatctactgctcggacagggcgggatttaatacacaaaatagtctggaaattttgggctaaatttctgggcgtgacacatcgggtcacggtggttacgtcttaccccctcggccaaatcttgcataatcgagagggtactggacgggtggtgaaatgggcaatcgaactttctgagtttgatttgcactttgaaccacgccacgctatcaagagccaggccctcgccgattttgtggcagagtggaccccagctcccgagcccgtctcagtccccgaggccagctcgggcccctcgcagctgcctcacaccgcccattgggtgatgcagttcgacggctccctgtctcttcagggcgccggtgcgggggtcacgttgacctcgccgagcggagacgtcctcagatatttggttcgccttgactttcgggcgaccaataatatggcagagtacgagggactccttgcgggactcagggtggcagctggactggggatccgccgcctcctggtgttaggcgactcccagctggtcgttaaccaggtctgtaaggagtaccggtgctctgacccgcagatggacgcttacgtgcgccaagtacggcgtatggagcgccattttgacgggatagagcttcggcacgtgcccagacgggataacacggttgccgacgaactctcacggctcgcttcctcgcgagcccagaccccaccgggcgcctttgaagaaaggcttgcccagccgtcggcgcgacccgaccccttaggggagacggacgcgcctgacaggcccccgatgcccgtcggagtccaggcctcgggacccgaggggagcgctcccagctcccttagattgattgcttggatcgctgagatccaagcatacctcacagataagactctacccgaggaccgcgaagggagtgaacgcgtccagcgcatctccaaacgctacgtgctggtagaagggaccctctatcggcgcgcggctaacggaatcctcctgaagtgcattcctcgggaacaaggcgtcgagcttcttgccggtatccatgaaggcgaatgcggagcccactccgcctcgcgcaccttggttggcaaagcctttcgacaaggtttctattggccgacagctctcaatgatgcggtcgacctggtccggcgatgcagagcgtgtcaattccacgccaagcaaatccatcagccggcccaggccctgcagatcataccactttcatggccatttgctgtctgggggctcgatatcctgggaccgtttaggcgggccccgggcaggtttgagtatctgtatgtcgcgatcgacaagttcactaagtggcccgaggcttatccggtcgtcaagatcgataagcactctgcacttaaattcattaagggcatcacagcccggtttggagtgcctaaccgtattattacggataacggcacccaattcactagtgaacttttcggcgattactgcgaagacatgggcatcaagctctgcttcgcctcacctgctcaccccagaagcaacggccaagtggagcgcgccaatgcggaaatcctcagaggccttaaaaccaagaccttcaacatcctcaagaagcacggcgattcgtggatcgaggagttgccagcggtgctctgggcgaaccgaaccacgccaagccgagcaaccggggaaacgcctttcttcctcgtctacggcgcggaagcggttctcccatccgagctcaccctgaggtcccctcgagccaccatgtactgcgaggctgatcaagatcaacttcgcagagatgacctcgactacttggaagagcgaaggcggcgcgcggccctccgagccgcgcgctaccagcagagcctgcggcgctaccatcagcgccacgtccgggcccgatcactctgcgtcgacgacctcgtcctacgccgcgtccaaacgcgtgctggattgagcaagctctcaccaatgtgggagggtccgtatcgagtgatcggcgtcccccggccgggctccgttcggctggccacgggcgacggcacagagctgcctaacccgtggaacatcgaacaccttcgtcgcttctacccctaa

SEQ ID NO: 66299 - DNA, 6589 bp, Oryza sativa
  Clone ID: PAT_MRT4530_67263C.1
atggccgaacaagcaaaggcgcacaacctctctccgagtattagcggtgacgacggggagccgaacccacgccgtcgagctcgtactccaccgccccctccacgccaaagtcctaggcgggaggaggcgctcgagagggtcgaaggatccgcgacttcgacatccacgggtgatggagaagggcgccgagatggggagcgtcgcctcctcgtctacggcgacggcagcacgcctcagggcgcgctccaagctgcgggcgcgctcctacgtcacccgcccgtcgtccctgacccggagtctccagcccaacgttggctggacgacgtggccaacttggtcatgacggcacggcagcgccttggtgctggtgggcggtcctccgccaccaaaacctctggcgctgctaccaccggctccgtgtcgtcaaggcggagggcgcggcgagcggcggctgttgctcgccattcggccgctactccttcgtcagcgcctccgacccgggaagatcagcgtggggggccaaatgcccgcatcggtatcgagcgccggcgtaatggtcgacgtactgcccacgcaacggagggcgcctccttgtccggagtgtcaactcaacacggacgcggggatcagccctccgtgcccctggttggtggtgtcggctgtagagcctttgtggcgaggcttcaaaacgtccgttggcccccaaggttccggcccaccatcgccgaaaaatatgacggaagcgtcaaccccgccgagtttctccaggtctacacgaccgggatcgaggccgccgggggtgacgacagggtcatggcgaatttctttcccatggccctgaagggacaggcgcggggttggctaatgaacttgccacccgcgtcggtccactcttgggaggatctgtgccaacagttcaccatgaactttcaaggcacatatccgcgcccagcggttctgtcaagtccgcaacaccataccatgcatccctgcacacgcggtgatctacgcgttcaggggggtgtgcggcacaaccgcatgctcgaaaagatcgcctccaaagagccccagactaccgcggagctttttcagctcgcggaccgagtggctcgcaaggaggaggcatggacctggaacccctccggttccggtgtggcagcttcggccgcccccggatccgctgctcggacagggcggcgtgacaggaggaggaagaagaggtcagcccattccgacgacgagggtcatgtcctcgccgtcgagggcgcttcgcgggccacccgaaaggggaggcctgcgagcgacaaaaagaaggaggccagcgctcccagcagggagcgcccaaccggcaagtggtgcaccgtccacaacacctcccttcacgacctcgcggactgccgcgcagtcaaaagtttggccgagcggacgaggaagtgggaggaggagaggaggcaggagcgccgagagggcaagtccccggcggttccttccggcaatcggcgaagtgaggccaagcagaaggcccccgccgaggacatcgatgacggcgatgatgacctaggtttccaagagcctggggccaccattgccactgtcgatgggggagcgtgtgctcacgtttctcgccggagcctcaaggccatgaagcgagagcttctggccgcggcccctactcatgaggcgacgcgccgagcgcggtggtcggaggttgccctcaccttcgaccagaccgaccacccaccgtgcgttgcccggggaggacagatcgcaatggtggtttcccccactgtttgcaacgtgaagctggggcgtgtcctcattgatgggggagcagccctcaacatcctttcccccgcagcctttgacgccatcaaggccccggggatggtgctccggccgtcccagccgattatcggtgtgacgctggggcacacttggccgctaggtcatatcgacctcccggtcaccttcggtggatccgccaacttccgcacggagcgggtgaactttgatgtggcggacctcagtctgtcctacaacgcggtcctagggaggcccgcgttggtgaagttcatggcggcggtccactacgcctacctccagatgaagatgccgggccccggtggccccatctctgtccatggcgacctcaaagtcgcgcttgcttgtatggagcagcgcgcggaccacctcgccgctgcgtccaagcccgagggtggcgacgagaggcttggcacctccgtccccgccgccccgaggcagcggatagtcacatgcgacgaggtcccggaagacgcgctcgtctccttcctgcgggcaaacgctgatgtcttcgcatggagaccggcggatatgcccggggtccccagggaggtgattgagcaccgtctcgccgtgcggccgggcgcaaagccggtccggcagaaagtgcggcggcaggccccggaacgtcaagctttcatccgcgaggaggtggcgcgacttctggaggccggattcatccgcgaggtcatccatccggagtggctggcgaacccggtggtcgttcccaaggcgaacggcaagcttcggatgtgcatcgactacatcgaccttaacaaggcatgtcctaaggacccttaccccctgcctcgcatagatcagattgtcgactccacagcggggtgcgaccttttgtgttttctagatgcatactctggttaccatcagattcgcatggctagggaggatgaggaaaaaactgcgttcattacccccataggaacttattgttatacgacaatgcccttcgggttaaagaatgcaggtcctacttttcaacgtactactcgaatttctttgggtagccaaataggacgtaatgttgaggcttatgtcgatgacttggttgtaaagacgcgcaaccaagagaccttactctcggatctagcggaaacttttgaaagtctccgctccgcccgcataaagttgaatcccgacgagtgcgtgttcggcgtacctgcgggcaagcttctcgggttcttggtctctgcccgaggcatcgaggccaaccccgagaagatacgagctatagagcggatgcgcccccccagcaaacttagggatgtgcaatgcgtcaccggttgcatggccgccctaagtcggttcatatcgaggctgggagagaaggcgctacccttatttaagctcctcaaacgctccgggccgtttacctggacggaggaagctgaacgtgccctcactcagttgaaggcgtatctcagctctcccccagttctggtcgccccggagccaggtgaacccttgctactctacttagcggcgaccccgcaggtagttagtgcggcgttggttgtggagcgcgatgaggacaaccctcattccgcgcacccccaccctgtgttggcttggcccgggagagagcagggtggagaggcccccgagccgaacggtggcccaaggctcccgacgaccggagttggccctctgcccgcttgtcagacggtgccaggtgcccccgacccccaggatggcccgggggccactgcgggaaggccgcacctatcgccctcagaccccgaggttaatcctgtgctgactcgacccgggagagagcagggaggaaaggcccccgagccgaacggtggcccaaggcccccgacgaccggagttggccttctgcccgcttgtccgacgacgccaggagcccccgacccccaggatggccccaaggccactgtgggaaggccgcccctgtcgtcctctgaccccgaggtcatcgacacagaagctgagagtgccctgcgtggcctcttggacgaagagcgccctagagatgtggcccctagcgaagagagccggccccgccaaaaggtgcagcggcccgtctactttgttagtgaggccctccgggacgccaagacccgataccctcaggcccaaaagatgctttacgctattctgatggccttgaggaaactgcgccattatttccaggcgcatcgggtcacggtggttacgtcttaccccctcggccaaatcttgcataatcgagagggtacaggacgggtggtgaaatgggcaattgaactttctgagttcgatttgcactttgaaccacgccacgctatcaagagccaggccctcgccgactttgtggcagagtggaccccagctcccgagcccgtctccattcccgaggccagctcgggcccctcgcagccgccgcacaccgcctactgggtaatgcagttcgacggctccctgtctcttcagggcgccggtgcgggggtcacgttgacctcgccaagcggagacgtcctcagatacctggtacgccttgactttcgggcgaccaataatatggcagagtacgagggactccttgcgggactcagggtggcagctggactggggatccgccgcctcttggtgttaggcgactcccagctggtcgttaaccaggtctgtaaggaataccggtgctctgacccgcagatggacgcttacgtgcgccaggtacggcgtatggagcgccattttgacgggatagagcttcggcacgtgcccagacgggataacacgattgccgacgaactctcacggctcgcttcctcgcgagcccagtccccaccgggcgcctttgaagaaaggcttgcccagccgtcggcgcgacccgaccccataggggagacggacgcgcctgaccggcccccgaggcccgtcggagtccaggcctcgggacccgaggggagcgctcccagctcccttagattgattgcttggatcgctgagatccaagcatacctcacagataagactctacccgaggaccgcgaagggagtgaacgcgtccagcgcatctccaaacgctacgtgctggtagaagggaccctctatcgacgcgcggctaacggaatcctcctgaagtgcattcctcgggaacaaggcgtcgagcttcttgccgatatccatgaaggcgaatgcggagcccactccgcctcgcgcaccttggttggcaaagcctttcgtcaaggtttctattggccgacagctctcaatgatgcggtcgacctggtccggcgatgcagagcgtgtcaattccacgccaagcaaatccatcagccggcccaggccctgcagatcataccactttcatggccatttgctgtctgggggctcgatatcctgggaccgtttaggcgggccccgggcggatttgagtatctgtatgtcgcgatcgacaagttcactaagtggcccgaggcttatccggtcgtcaagatcgataagcactccgcacttaaattcattaagggcatcacagcccggtttggagtgcctaaccgtattattacggataacggcacccaattcactagtgaacttttcggcgattactgcgaagacatgggcatcaagctctgcttcgcctcacctgcccaccccagaagcaatggccaagtggagcgcgccaatgcggaaatccttagaggccttaaaaccaagaccttcaacatcctcaagaagcacggcgattcgtgggtcgaggagttgccagcggtgctctgggcgaaccgaaccacaccaagccgagcaaccggggaaacgcctttcttcctcgtctacggcgcggaagcggttctcccatccgagctcaccctgaggtcccctcgggccaccatgtactgcgaggctgatcaagatcagcgtcgcagagatgacctcgactacttggaggagcgaaggcggcgcgcggccctccgagccgcgcgctaccagcagagcctgcggcgctaccatcagcgccacgtccgggcccgatcactctgcgtcgacgacctcgtcctacgccgcgtccaaacgcgtgctggattgagcaagctctcaccgatgtgggagggtccgtatcgagtgatcggcgtcccccggctgggctccgttcgactggccacgggcgacggcacagagctgcctaacccgtggaacatcgaacaccttcgtcgcttctacccctaagggggatcgggttcgggccggctaaaatcgccaaacggggcccagaaccgagccgtgccccggggcgtggtgaactccgggggggaatcggcaaaaacccacaatcgggtcacccataaccctcggtcaccacgctcccggcctggccagtctcgacatgtggatctccccaggcactagccttgacccgcgccgtttgaggctgggacctgggcacgagccccgggtcgccggcctcgtcgccactatcgcccactccgctggcatcgccctcctcgtcggagttgagggcgaacgcgagccgaggattccccaggatggccccgaggccactgcgggaaggccgcgcctgtcgccctctaaccccgaggtcgtcggcacagaagccgagtgcgccccgcgctgcctctcggatgaagagcgccctggagatgcggcccctagcgaagaagatcggccccgccgaaaggcgcagcggcccgtcatcaccatatctccaggcgaagcaaatcggctcacccagattcgtacgtcgctcaagtaatgtggcagtcttgaagagaccgcccat

SEQ ID NO: 66300 - DNA, 238 bp, Oryza sativa
  Clone ID: PAT_MRT4530_67264C.1
atctggacttttttcagacggtggttttggctcgcattcagttcagtcagaagggatttttggaaattttcttcattgctgcttggcacatttggaagaaaggaatgggaaaatctttcgaaatgagcttccctcattcagttcttggagggctttattcaaagccgatgttcttctgcatttgtgcagaatgaaggatcccctaaaacagatagtttttgattggttacaaactgtg

SEQ ID NO: 66301 - DNA, 5169 bp, Oryza sativa
  Clone ID: PAT_MRT4530_67265C.1
atggcacgttggtcctggtcagcccaatggccgaacaagcaaaggcgcacaacctctctccgagtgttagcggtgacgacggggagccgaacccacgccgtcgagctcgtactccaccctccacgccaaagtcctaggcaggaggaggcgctcgagagggtcaaaggatccgcgacttcgacatccacgggtgatggggaagggcggcgagatggggagcgtcgcctcctcgtctacggcgacggcagcacgccccagggcgcgctccaagctgcgggcgcgctcctacgtcacccgcctattgtccctgacccggagtctccagcccaacgttggctggacgacgtggccaacttggtcatgacggcacggcagcgcctaggtgctggtgggcggtcctccgccaccaagacctctggcgctgctaccaccggctccgtatcgtcaaggcggagggcgcggcgagcggcggctgttgctcgccattcggccgccactccttcgtcagcgcctccgacccaggaagatctgcgtggggggccggatgcccgcatcagtatcgagcgccggcgtaatggccgacgtgctgcccacgcaacggagggcgcctcctcgtccggagtgtcacatcaacacggacgcggggatcagccctccgtgcccccggttggtggtgtcggctgtagagcctttgtggcgagccttcggaacgtccgttggcccccaaggttccggcccaccagcgccgaaaaatatgacgggagcgtcaaccccgccgagtttctccaggtctacacgaccgggattgaggccgccgggggtgacgacagggtcatgcggttctgtcaagtccgcaacaccataccatgcatccctgcacacgcggtgatctacgcgttcagggggggtgtgcggcacaaccgcatgctcgaaaagatcgcctccaaagagccccagactaccgtggagctttttcagctcgcggaccgagtggctcgtaaggaagaggcatggaactggaacccctccggttccgatgtggcagcttcggccgcccccggatccgctgctcggacagggcggcgtgacaggaggaggaagaagaggtcagcccattccgatgacgagggtcatgtcctcgccgtcgagggcgcttcgcgggccacccgaaaggggaggcctgcgagcgacaaaaagaaggaggccggcgctcccagtagggagcgcccaaccggcaagtggtgcatcgtccacaacacctcccttcatgacctcgcggactgccgcgcagtcaaaagtttggctgagcggacgaggaagtgggaggagaggaggcaggagcgccgagagggcaagtccccggcggttccttccggcaatcggcgaagtgaggccaagcagaaggaccccgccgaggacatcgatgacggcgatgatgacctaggtttccaagagcctggggccaccattgccactgtcgatgggggagcgtgtgctcacgtttctcaccggagcctcaaggccatgaagcgagagcttctggccgcggcccctactcatgaggcgacgcgccgggcgcggtggtcggaggttgccctcaccttcgaccagaccgaccacccaccgtgcgttgcccggggaggacagatcgcaatggtggtttcccccactgtttgcaacgtgaagctggggcgtgtcctcattgatgggggagcagccctcaacatcctttcccccgcagcctttgacgctatcaaggccccggggatggtgccccggccgtcccagccgattatcggtgtgacgccgggtcacacttggccgctaggtcatatcgacctcccggtcaccttcggtggatccgccaacttccgcacggaacgggtgaactttgatgtggcggacctcagtctgccctacaacgcggtcctagggaggcccgcgttggtgaagttcatggcggcggtccattacgcctacctccagatgaagatgccgggccccggtggccccatctctgtccatggcgacctcaaagtcgcgcttgcttgtatggagcagcgcgcggaccacctcaccgccgcgtccaagcccgagggaggcgacgagaggcttggcacctccgcccccgccgccccgaggcagcggatagtcacatgcgacgaggtcccggaagacgcgctcgtctctttcctgcgggcaaacgctgacgtcttcgcatggagaccggcggatatgcccggggtccccagggaggtgattgagcaccgtctcgccgtgcggtcgggcgcaaggccggtccggcagaaagtacggcggcaggccccggaacgtcaagccttcatccgcgaggaggtggcgcgacttctggaggccggattcatccgcgaggtcatccatccggagtggctggcgaacccggtggtcgttcccaaggcgaacggcaagcttcggatgtgcatcgactacaccgaccttaacaaggcatgtcctaaggacccttaccccctgcctcgcatagatcagattgtcgactccacagcgggccaagagaccttactctcggatctagcggaaacttttgagagtctccgctccgcccgcataaaactgaaccccgataagtgcgtgttcggtgtacctgcgggcaagcttctcgggtttttggtctctgcccgaggcatcgaggccaaccccgagaagatacgagctatagagcggatgcgcccccccagcaagcttagggatgtgcaatgcgtcatcggttgcatggccgccctaagtcggttcatatcgaggctgggagagaaggcgctacccttatttaagctcctcaaacgctccgggccgtttacttggacggaggaagctgaacgtgccctcactcagttgaaggcgtatctcagctctcccccagttctggtcgccccggagccaaatgaacccttgctactctacttagcggcgaccccgcaagtggttagtgcggcgttggttgtggagcgcgatgaggacaatcctcattccgcgcacccccaccctgtgctggcttggcctgggagagagcagggaggagaggcccccgagccgaacggtggcccaaggcccccgacgaccggagcaggccctctgcccgcttgtcagacggtgccaggtgcccccgacccccaggatggcccgagggccactgcgggaaggccgcacctatcgccctctgaccccgaggctaaccctgtgccgactcgacccgggagagagcagggagaagaggcccccgagccgaacggtggcctaaggcccctgacgaccggagttggccctttgcccgcttgtccgacgacgccaggagcccccgacccccaggacggccccgaggccactgtgggaaggccgcccctgtcgtcctccgacctcgaggtcgtcggcacagaagacgagtgcaccccgaaactgcgccattatttccaggcgcatcgggtcacggtggttacgtcttaccccctcggccaaatcttgcataatcgagagggtaatggacgggtggtgaaatgggcaatcgaactttctgagtttgatttgcactttgaaccacgccacgctatcaagagccaggccctcgccgattttgtggcagagtggaccccagctcccgagcccgtctcagtccccgaggccagctcgggcccctcgcagctgccttacaccgcccactgggtgatgcagttcgacggctccctgtctcttcagggcgccggtgcgggggtcacgttgacctcgccgagcggagacgtcctcagatatttggttcgccttgactttcgggcgaccaataatatggcagagtacgagggactccttgcgggactcagggtggcagctggactggggatccgccgcctcctggtgttaggcgactcccagctggtcgttaaccaggtctgtaaggagtaccggtgctctgacccgcagatggacgcttacgtgcgccaagtacggtgtatggagcgccattttgacgggatagagcttcggcacgtgcccagacgggataacacggttgccgacgaactctcacggctcgcttcctcgcgggcccagaccccaccgggcgcctttgaagaaaggcttgcccagccgtcggcgcgaccccaccccttaggggagacggacgcgcctgacaggcccccgatgcccgtcggagtccaggcctcgggacccgaggggagcgctcccagctcccttagattgattgcttggatcgctgagatccaagcatacctcacagataagactctacccaggaccgcgaagggagtgaacgcgtccagcgcatctccaaatgctacgtgctggcgggccccgggcgggtttgagtatctgtatgtcgcgatcgacaagttcactaagtggcccgaggcttatccggtcgtcaagatcgataagcactccgcacttaaattcattaagggcatcacagcccggtttggagtgcctaaccgtattattacggataacggcacccaattcactagtgaacttttcggcgattactgcgaagacatgggcatcaagctctgcttcgcctcacctgcccaccccagaagcaacggccaagtggagcgcgccaatgcggaaatcctcagaggccttaaaaccaagaccttcaacatcctcaagaagcacggcgattcgtggatcgaggagttgccagcggtgctctgggcgaaccgaaccacgccaagccgagcaaccggggaaacgcctttcttcctcgtctacggcgcggaagcggttctcccatccgagctcaccctgaggtcccctcgggccaccatgtactgcgaggctgatcaagatcagcttcgcagagatgacctcgactacttggaagagcgaaggcggcgcgcggccctccgagccgcgcgctaccagcagagcctgcggcgctaccatcagcgccacgtccgggcccgatcactctgcgtcgatgacctcgtcctacgccgcgtccaaacgcgtgctggattgagcaagctctcaccaatgtgggagggtccgtatcgagtgatcggcgtcccccgggcgggctctgttcggctggccacgggcgacggcacagagctgcctaacccgtggaacatcgaacaccttcgtcgcttctacccctaa

SEQ ID NO: 66302 - DNA, 1446 bp, Oryza sativa
  Clone ID: PAT_MRT4530_67266C.1
atgtgctggtgtgcgcctatcgccaccgcgcccgtcgccggcggccggttccctccgccctctctccgctgccgccgtcgtcgagggagatcggtccgcgcggacgcctccccggagcccgtcgacacgcagcggaagaaggtcgccgtcgccggggccggctgggcaggcctcgccgccgcgcatcacctcgtcaaacagggatacgaggtcacgcttctgggggccgagagcggcccaaccgaggagattggtctcagagggttttggtacccataccgtaacattttctcgttggtggatgagctcgggatctcgcctttcacagggtggactaaagctgcatactactcttcacaagggcttgcagtggaatttcccatttttcatgaccagccccgattaccagctccctttggaatgttaacatatccagaattcccaagtcttcctttaattgataggttgacatcgattcctgtcatggctgcagtcattgacttcaacaacacagacactgcttggatgaaatatgatgcaatgagtgcaagagatctgtttaagatgttcggttgctctcaaaaactctacaaggaaatttttcaaccagcaattcaggccgccctgtttgctccaggcttaaaattccatggaaacagagtgccaacaagtttggccataaataaggacactgcatgtatctctggaattgtctgtggagaggaggtacatgaggcagatgcatttgttttggctaatggactctcttcgctacaatatatcatcaagaacagtccgtttctacagtctcggcaagaatttgttaatcttcttcatctgtccacgattgatgtggtctctataaagttatggtttgataagaagatcacaattccaaaggttgccaatgtttgttctggttttgatgatccatctaggtggacattctttgaccttacttcaatatatgatgattatgctgacaaatcaacaacaattgtggaggctgaattttacaatgctagccatttgctgccactgaatgatgagcagatcgtttctgaggcttcatcacaccttatcaaatgcatacaggattttgaggaggctaccgtgatccaacaattggtcagaagatctcctaaatctacaatgcacttccttccaggttcttacaagtacacagtgcgaggatcaactaccttaccaaatttgtttattgctggtgattggatagtgaaccgacatgggtccttttcaaaggaaaaggcatatgtgactggactcgaagctgctaatagggtggtggactattttggtgatggcgactttgcgaaaataattgcagttgaagaagacgagcctcatatagagacagcacggaatctcaatagaagagccaacgaattaaagactcagattcctttctcggagttctttctctaa

SEQ ID NO: 66303 - DNA, 5961 bp, Oryza sativa
  Clone ID: PAT_MRT4530_67267C.1
atggccgaacaagcaaaggcgcacaacctctctccgagcgttagcggtgacgatggggagccaaacccacgccgtcgagctcgtactccaccgccccctccacgccaaagtcctaggagggaggaggtgctcgagagggtcgaaggatccgcgacttcgacatccacgggtgatggagaagggcgccgagatggggagcgtcgcctcctcgtctacggcgacggcagcacgccccagggcgcgctccaagctgcgggcgcgctcctacgtcacccgcccattgtccctgacccggagtctccagcccaacgttggctggacgacgtggccaacttggtcatgacggcacggcagcgcctaggtgctggtgggcggtcctccgccaccaagacctctggcgctgctaccaccggctccgtgtcgtcaaggcggagggcgcggcgagcggcggctgttgctcgccattcggccgccactccttcgtcagcgcctccgacccaggaagatctgcgtggggggccggatgcctgcatcgatatcgagcgccggcgtaatggccgacgtgctgcccacgcaacggagggcgcctcctcgtccggagtgtctcatcaacacggacgcggggatcagccctccgtgcccccggttggtggtgtcggctgtagagcctttgtggcgagccttcggaacgtccgttggcccccaaggttccggcccaccatcgccgaaaaatatgacgggagcgtcaaccccgccgagtttctccaggtctacacgaccgggatcgaggccgccgggggtgacgacagggtcatggcgaatttctttcccatggccgtgaagggacaggcgcggggttggctaatgaacttgccacccgcgtcggtccactcctgggaggatttgtgccaacagttcaccatgaactttcaaggcacatatccgcgcccaggtgaagaagcggacctgcacgcagtacagcgaagggatgacgagtcacttcgctcatacattcagcggttctgtcaagtccgcaacaccataccatgcatccctgcacacgcggtgatctacgcgttcagggggggtgtgcggcacaaccgcatgctcgaaaagatcgcctccaaagagccccagactaccgcggagctttttcagctcgcggaccgagtggctcgtaaggaggaggcatggacctggaacccctccggttccggtgtggcagcttcggccgtccccggatctgctgctcagacagggcggcgtgacaggaggaggaagaagaggtcagcccataccgacgacgagggtcatgtcctcgccgtcgagggcgcttcgcgggccacccgaaaggggaggcctgcgggcgacaaaaagaaggaggccggcgctcccagcagggagcgcccaaccggcaagtggtgcatcgtccacaacacttcccttcacgacctcgcggactgccgcgcagtcaaaagtttggctgagcggacgaggaagtgggaggaggagaggaggcaggagcgccgagagggcaagtccccggcggttccttccggcaaccggcgaagtgaggccaagcagaaggaccccgccgaggacatcgatgacggcgatgatgacctaggtttccaagagcctggggccaccattgccactgtcgatgagggagcgtgtgctcacgtttctcgccggagcctcaaggccatgaagcgagagtttctggccgcggcccctactcatgaggcgacgcgccgggcacggtggtcggaggttgccctcaccttcgaccagaccgaccacccaccgtgcgttgcccggggaggacagatcgcaatggtggtttcccccactgtttgcaacgtgaagctggggcgtgtcctcattgatggaggagcagccctcaacatcctttcccccgcagccttttacgccatcaaggccccggggatggtgctccggccgtcccagccgattatcggtgtgacgccgggtcacacttggccgctaggtcatatcgacctcccggtcaccttcggtggatccgccaacttccgcacggagcaggtgaactttgatgtggcggacctcagtctgccctacaacgcggtcctagggaggcccgcgttggtgaagttcatggcggcagtccactacgcctacctccagatgaagatgccgggccccggtggccccatctctgtccatggcaacctcaaagtcgcgcttgcttgtatggagcagcgcgcggaccacctcgccgccgcgtccaagcccgagggtggcgacgagatgcttggcacctccgcccccgccgccccgaggcagcggatagtcacatgcgacgaggtcccggaagacgcgctcgtctctttcctgcgggcaaacgctgacgtcttcgcatggagaccggcggatatgcccggggtccccagggaggtgattgagcatcgtctcgccgtgcggccgggcgcaaggccagtccggcagaaagtgcgacgccaggccccggaatgtcaagccttcatccgcgaggaggtggcgcgacttctggaggccggattcatccgcgaggtcatccatccggagtggctggcgaacccggtggtcgttcccaaggcgaacggcaagcttcggatgtgcatcgactacaccgaccttaacaaggcatgtcctaaggacccttaccccctgcctcgcatagatcagattgtcgactccacagcggggtgcgaccttttgtgttttctagatgcatactctggttaccatcagattcgcatggctagggaggatgaggaaaaaactgcattcattacccccataggaacttattgttatacgacaatgcccttcgggttaaagaatgcaggtcctacttttcaacgtactactcgaatttctttgggtagccaaataggacgtaatgttgaggcttatgtcgatgacttggttgtaaagacgcgcaaccaagagaccttactctcgaatctagcggaaacttttgaaagtctccgctccgcccgcataaaactgaaccccgataagtgcgtgttcggtgtacctgcgggcaagcttctcgggtttttggtctctgcccgaggcatcgaggccaaccccgagaagatacgagctatagagcggatgcgcccccccagcaagcttagggatgtgcaatgcgtcaccggttgcatggccgccctaagtcggttcatatcgaggctgggagagaaggcgctacccttatttaagctcctcaaacgctccgggccgtttacttggacggaggaagctgaacgtgccctcactcagttgaaggcgtatctcagctctcccccagttctggtcgtcccggagccaaatgaacccttgctactctacttagcggcgaccccacaagtggttagtgcggtgttggttgtggagcgcgatgaggacaatcctcattccgcgcacccccaccctgtgctggcttggctcgggagagagcagggaggagaggcccccgagccgaacggtggcccaaggcccctgacgaccggagctggtcctctgcctgcttgtcagacggtgccaggtgcccccgacccccaggatggcccgagggccactgcgggaaggccgcacctatcgccctctgaccccgaggctaaccctgtgccgactcgacccgggagagagcagggagaagaggcccccgagccgaacggtggcctaaggcccctgacgaccggagttggccctttgcccgcttgtccgacgacgccaggagcccccgacccccaggacggccccgaggccactgtgggaaggccgcccctgttgtcctccgaccccgaggtcgtcggcacagaagacaagtgcgccccgcgaggccgcttggacaaagagcgcccaagggatgtggcccctagcgaagaggatcggccccaccgaaaggcgcatcgggtcacggtggttacgtcttaccccctcggccaaatcttgcataatcgagagggtactggacgggtggtgaaatgggcagtcgaactttctgagtttgatttgcactttgaaccacgccacgctatcaagagccaggccctcgccgattttgtggcagagtggaccccagctcccgagcccgtctcagtccccgaggccagctcgggtccctcgcagctgcctcacaccgcccactgggtgatgcagttcgacggctccctgtctcttcagggcgccggtgcgggggtcacgttgacctcgccgagcggagacgtcctcagatatttggttcgccttgactttcgggcgaccaataatatggcagagtacgagggactccttgcgggactcagggtggcagctggactggggatccgccgcctcctggtgttaggcgactcccagctggtcgttaaccaattctgtaaggagtaccggtgctctgacccgcagatggacgcttacgtgcgccaagtacggcgtatggagcgccattttgacgggatagagcttcggcacgtgcccagacgggataacacggttgccgacgaactctcacggctcgcttcctcgcgagcccagaccccaccgggcgcctttgaagaaaggcttgcccagccgtcggcgcgacccgaccccttaggggagacggacgcgcctgacaggcccccgatgcccgtcggagtccaggcctcgggacccgaggggagcgctcctagctcccttagattgattgcttggatcgctgagatccaagcatacctcacagataagactctacccgaggaccgcgaagggagtgaatgcgtccagcgcatctccaaacgctacgtgctggtagaagggaccctctatcggcgcgcggctaacggaatcctcctgaagagcattcctcgggaacaaggcgtcgagcttcttgccgatatccatgaaggcgaatgcggagcccactccgcctcgcgcaccttggttggcaaagcctttcgacaaggtttctattggccgacagctctcaatgatgcggtcgacctggtccggcgatgcagagcgtgtcaattccacgccaagcaaatccatcagccggcccaggccctgcagatcataccactttcatggccatttgctgtctgggggctcgatatcctgggaccgtttaggcgggccccgggcgggtttgagtatctgtatgtcgcgatcgacaagttcactaagtggcccgaggcttatccggtcgtcaagatcgataaccactccgcacttaaattcattaagggcatcatagcccggtttggagtgcctaaccgtattattacggataacggcacccaattcactagtgaactttttggcgattactgcgaagacatgggcatcaagctctgcttcgcctcacctgcccaccccagaagcaacggccaagtggagcgcgccaatgcggaaatcctcagaggccttaaaaccaagaccttcaacatcctcaagaagcacggcgattcgtggatcgaggagttgccagcggtgctctgggcgaaccaaaccacgccaagccgagcaaccggggaaacgcctttcttcctcgtctacggcgcggaagcggttctcccatccgagctcaccctgaggtcccctcgggccaccatatactgtgaggctgatcaagatcagcttcgcagagatgacctcgactacttggaagagcgaaggcggcgcgcggccctccgagccgcgcgctaccagcagagcctgcggcgctaccatcagcgccacgtccgggcccgatcactctgcgtcgacgacctcgtcctacgccgcgtccaaacgcgtgctggattgagcaagctctcaccaatgtgggagggtccatatcgagtgatcggcgtcccccggccgggctccgttcggatggccacgggcgacggcacagagctgcctaacccgtggaacatcgaacaccttcgtcgcttctacccctaa

SEQ ID NO: 66304 - DNA, 5799 bp, Oryza sativa
  Clone ID: PAT_MRT4530_67268C.1
atggccgaacaagcaaaggcgcacaacctctctccgagcgttagcggtgacgatggggagccaaacccacgccgtcgagctcgtactccaccgccccctccacgccaaagtcctaggcgggaggaggcgctcgagagggtccaaggatccgcgacttcgacgtccacgggtgatggggaagggcggccagatggggagcgtcgcctcctcgtctacggcgacggcagcacgccccagggcgcgctccaagctgcgggcgtgctcctacgtcacccgcccgttgtccctgacccggagtctccagcccaacgttggctggacgacgtggccaacttggtcatgacggcacggcagcgcctaggtgctggtgggcggtcctccgccaccaagacctctcgcgctgctaccaccggctccgtgtcgtcaaggcggagggcgcggcgagcggcggctgttgctcgccattcggccgccactccttcgtcagcgccttcgacccaggaagatctgcgtggggggccggatgcccgcatcagtatcgagcgccggcgtaatggccgacgtgctgcccacgcaacggagggcgcctcctcgtccggagtgtcacatcaacacggacgcggggatcagccctccgtgcccccggttggtggtgtcggctgtagagcatttgtggcgagccttcggaacgtccgttggcccccaaggttctggcccaccatcgccgaaaaatatgacgggagcgtcaaccccgccgagtttctccaggtctacacgaccgggatcgaggccgccgggggtgacgacagggtcatggcgaatttctttcccatggccctgaagggacagacacggggttggctaatgaacttgccacccgcgtccgtccactcttgggaggatttgtgccaacagttcaccatgaactttcaaggcacatatccgcgcccaggtgaagaagcggacctgcacgcagtacagcgaagggatgatgagtcacttcgctcgtacattcagcggttctgtcaagtccgcaacaccataccatgcatccctgcacacgcggtgatctacgcgttcagggggggtgtgcggcacaaccgcatgctcgaaaagatcgcctccaaagagccccagactaccgcggagctttttcagctcgcggaccgagtggctcgtaaggaggaggcatggacctggaacccctccggttccggtgtggcagcttcggccgcccccggatccgctgctcagacagggcggcgtgacaggaggaggaagaagaggtcagcccataccgacgacgagggtcatgtcctcgccgtcgagggcgcttcgcgggccacccgaaaggggaggcctgcgggcgacaaaaagaaggaggccggcgctcccagcagggagcgcccaaccggcaagtggtgcatcgtccacaacacttcccttcacgacctcgcggactgccgcgcagtcaaaagtttggctgagcggacgaggaagtgggaggaggagaggaggcaggagcgccgagagggcaagtccccggcggttccttccggcaatcggcgaagtgaggccaaacagaaggcccccgccgaggacatcgatgacggcaatgatgacctaggtttccaagagcctggggccaccattgccactgtcgatgggggagcgtgtgctcacgtttctcgccggagcctcaaggccatgaagcgagagcttctggccgcggcccctactcatgaggcgacgcgccgggcgtggtggtcggaggttgccctcaccttcaaccagaccgaccacccatcgtgcgttgcccggggaggacagatcgcaatggtggtttcccccactgtttgcaacgtgaagctggggcgtgtcctcattgatgggggagcagccctcaacatcctttcccccgcagcctttgacgctatcaaggccccggggatggtgctccggccgtcccagccgattatcggtgtgacgccgggtcacacttggccgctaggtcatatcgacctcccggtcaccttcggtggatccgccaacttccgcacggagcgggtgaactttgatgtggcggacctcagtcttccctacaacgcggtcctagggaggcccgcgttggtgaagttcatggcggcagtccactacgcctacctccagatgaagatgccgggccccggtggccccatctctgtccatggcgaccttaaagtcgcgcttgcttgtatggagcagcgcgcggaccacctcaccgccgcgtccaagcccgagggaggcgacgagaggcttggcacctccgcccccgcccccccgaggcagcggatagtcacatgcgacgaggtcccggaagacgcgctcgtctctttcctgcgggcaaacgctgacgtcttcgcatggagaccggcggatatgcccggggtccccagggaggtgattgagcaccgtctcgccgtgcggccgggcgcaaggccggtccggcagaaagtgcggcgccaggccccggaacgtcaagccttcatccgcgaggaggtggcgcgacttctggaggccggattcatccgcgaggtcatccatccggagtggctggcgaatccggtggtcgttcccaaggcgaacggcaagcttcggatgtgcatcgactacaccgaccttaacaaggcatgtcctaaggacccttaccccctgcctcgcatagatcagattgtcgactccacagcggggtgcgaccttttgtgttttctagatgcatactctagttaccatcagattcgcatggctagggaggatgaggaaaaaactgcattcattacccccataggaacttattgttatacgacaatgcccttcgggttaaagaatgcaggtcctacttttcaatgtactactcgaatttctttgggtagccaaataggacgtaatgttgaggcttatgtcgatgacttgattgtaaagacgcgcaaccaagagaccttactctcggatctagcggaaacttttgagagtctccgctccgcccgcataaaactgaaccccgataagtgcgtgttcggtgtacctgcgggcaagcttctcgggtttttggtctctgcccgaggcattgaggccaaccccgagaatatacgagctatagagcggatgcccccccccagcaagcttagggatgtgcaatgcgtcaccggttgcatggccgccctaagtcggttcatatcgaggctgggagagaaggcgctacccttatttaagctcctcaaacgctccgggccgtttacttggacggaggaagctgaacgtgccctcactcagttgaaagcgtatctcagctctcccccagttctggtcgccccggagccaaatgaacccttgctactctatttagcggcgaccccgcaagtggttagtgcggcgttggttgtggagcgcgatgaggacaatcctcattccgcgcacccccaccctgtgctggcttggcccgggagagagcagggaggagaggcccccgagccgaacggtggcccaaggcccccgacgaccggagcaggccctctgcccgcttgtcagacggtgccaggtgtccccgacacccaggatggcccgagggccactgcgggaaggccgcacctatcgccctctgaccccgaggctaaccctgtgccgactcgacccgggagagagcagggagaagaggcccccgagccgaacggtggcctaaggcccctgacgaccggagttggccctttgcccgcttgtcgaacgacgccaggagcccccgacccccaggacggccccgaggccactgtgggaagaccgcccctgtcatcctccgaccccgaggtcgtcggcacagaagacaagtgcgccccgcgaggccgcttggacgaagagtgccccagggacgtggcccctagcgaagaggatcggccccaccgaaaggtgcagcggcccgtctactttgttagtgaggccctccgggatgccaagacccgataccctcaggcccagaaaatgctttacgctattctgatggcctcgaggaaactgcgccattatttccaggcgcatcgggttatggtggttacgtcttaccccctcggccaaatcttgcataatcgagatggtactggacgggtggtgaaatgggcaatcgaactttctgagttcgatttacactttcaaccacgccacgctatcaagagccagaccctcgccgactttgtggcagagtggaccccggctcccgagcccgtctcagtccccgaagccagctcgggcccctcgcagctgcctcacaccgcccactgggtgatgcagttcgacggttccctgtctcttcagggcgccggtgcgggggtcacgttgacctcgccgagcggagacgtcctcagatatttggttcgccttgactttcgagcgaccaataatatggcagagtacgagggactccttgcgggactcagggtggcagctggactggggatccgccgcctcctgatggacgcttacgtgcgccaagtacggcgtatggagcgtcattttgacgggatagagcttcggcacgtgcccagacgggataacacggttgccgacgaactctcacggctcgcttcctcgcgagcccagaccccaccgggcgcctttgaagaaaggcttgcccagccgtcggcgcgacccgaccccttaggggagacggacacgcatgacaggcccccgatgcccgtcggagtccaggcctcgggacccgaggggagcgctcccagctcccttagattgattgcttggatcgctgagatccaagcatacctcacagataagactctacccgaggaccgcgaagggagtgaacgcgtccagcgcatctccaaacgctacgtgctggtagaagggaccctctatcggcgcgtggctaacggaatcctcctgaagtgcattcctcgggaacaaggcgtcgagcttcttgccgatatccatcaaggcgaatgcggatcccactccgcctcacgcaccttggttggcaaagcctttcgacaaggtttctattggccgacagctctcaatgatgcggtcgacctggtccggcgatgcagagcgtgtcaattccacgccaagcaaatccatcagccggcccaggccctgcagatcataccactttcatggccatttgctgtctgggggctcgatatcctgggaccgtttaggcgggccccgggcgggtttgagtatctgtatgtcgcgatcgacaagttcactaagtggcccgaggcttatccggtcgtcaagatcgataagcactccgcacttaaattcattaagggcatcacagcccggtttggagtgcctaaccgtattattacggataacggcacccaattcactagtgaacttttcagcgattactgcgaagacatgggcatcaagctctgcttcgcctcacctgcccaccccagaagcaacggccaagtggagcgcgcaaatgcggaaatcgtcagaggccttaaaaccaagaccttcaacatcctcaagaagcacggcgattcgtggatcgaggagttgccagcggtgctctgggcgaaccgaaccacgccaagccgagcaaccggggaaacgcctttcttcctcgtctacggcgcggaagcggttctcccatccgagctcaccctgaggtcccctcgggccaccatgtactgcgaggctgatcaagatcagcttcgcagagatgacctcgactacttggaagagcgaaggcggcgcgcggccctccgagccgcgcgctaccagcagagcctgcggcgctag

SEQ ID NO: 66305 - DNA, 1623 bp, Oryza sativa
  Clone ID: PAT_MRT4530_67269C.1
atggccagcgaccgccgctactactacttcgaagaagacgatggcgatggcgaggaggaggtggagtggctggcgatggaggccgacgaggacgacgtcggcctgctcgaggaggacgaccttcacctgcggcttcccgacgaccgccccgcggattgctgggccatcacacaagagtcacttcctgctgcccagcaacaagacctgtctatggtaatgaacttgctcaacataaagcagcaccttgcacgcacactccttatccaccaccggtggaagatgcattgcatttatgatcaccttgacagaaaggggcgggaccgcatgctcagtgaggcatgcattattttgccgaagaatagcatgtcagcagctagctcaacaagtgttacctgcaatgtgtgttttgaggacttctcaatgactgatgtctcgaccatggactgtgggcattgcttctgcaatgactgttggacagagcacttctttgcatccattaatactggcaacaagcagattcggtgcatggaggttaagtgcaaggccatttgtgatgaggacattgtgcgccgcctcctcagtctgaagtaccctgctgcatctaagcgcttcgatctcctcctacttgagtcttaccttgaggacaatgactcagtgaagtggtgccccagtgccccacactgtggccgcgcaatccaggtaggcaccggcgagaggtactgcgaggtcgcttgcccctgtggtgtcagcttctgcttcaactgtgcagggcaggtgcactcgccttgcccatgtgccatatgggagaagtggaaagctaagggccatggagactcggatagcgtcaagtggattcttgccaacaccaagagctgccccaagtgctccaagcccatcgagaagaacggtggctgcaaccttgtccattgcaagtgcggccagtgtctatgctggctctgtggtgggcctaccgggagggagcacacttgggatagcatctccggccacagctgcaaccgctacaaggaggaaaacggcgacaaggtggacaccagcagacagcagatgcagcggtacacgcactactgggaccgttacaacatccacgccggctcgtacaaggtggagcagaaggatcttgggcctgccgtcgaggagcaggtgaagaagctggagtcgaacctaacaggtccgaagatgaactgggacggtagctggctcgccatggcgtaccaatccctgctcgcatcgcggcaggtgctgtcgcggtcgtacgccttcgcctactacatgtttggcggcggcgaggtgaagacgcacccgtcggagcgggcgagcctcgccgtggcgcagaacctcttcgaggaccggcaggagcagctggagcgccacgttgagcatctctccaaggagctcgccacggacttgctggggctgccggaggaggagatcgtcctgaagaaggtggagattgccaacctcgccaagatcgtccaggcaatctgcgggcagttgtacaggtgcatccaggacgaactcctgccactgctcgtccagcccatgaacattgccgcgtaccagccggacggccctgacaaggccaaggagttcatcggggcttga

SEQ ID NO: 66306 - DNA, 452 bp, Oryza sativa
  Clone ID: PAT_MRT4530_6726C.1
gcagattactcagttagagcatcacttgggttcctcgccgccgctgccgccgccgccgaccggagagatgccttgagccgctattgcgctcgtttcagcgtcgtctagccgatgtggcccgtgttctgtcttgcctgttggatatggacttttggtggatactcatatgcgttcactcctttcgcgggggggagcgcgtgccccattgtctcaaactccagcctgacggcgaggctctgaccttcgatgaccgcgatgcgccgctcgcccagctcgggaagatcatagtgcacattgcggacactgccgagatccaggggatcccggacctgatcgggatgggggcgttggacaggtcgtcgatcgagcagcggctgcacaccgaggcgcatatcttcgacgtgcccatcgccgacgtggtctacaggctcgcctacctgccggcggcgacg

SEQ ID NO: 66307 - DNA, 6033 bp, Oryza sativa
  Clone ID: PAT_MRT4530_67270C.1
atggccgaacaagcaaaggcgcacaacctctctccgagtgttagcggtgacgacggggagccaaacccacgccgtcgagctcgtactccaccgccccctccacgccaaagtcctaggcgggaggaggtgctcgagagggtcgaaggatccgcgacttcgacatccacgggtgatggggaagggcggcgagatggggagcgtcgcctcctcgtctacggcgacggcagcacgccccagggcgcgctccaagctgcgggcgcgctcctacgtcacccgcccattgtccctgacccggagtctccagcccaacgttggctggacgacgtggccaacttggtcatgacggcacggcagcgcctaggtgctggtgggcggtcctccgccaccaagacctctggcgctgctaccaccggctccgtatcgtcaaggcggagggcgcggcgagcggcggctgttgctcgccattcggccgccactccttcgtcagcgcctccgacccaggaagatctgcgtggggggccggatgcccgcatcagtatcgagcgccggcgtaatggccgacgtgctgcccacgcaacggagggcgcctcctcgtccggagtgtcacatcaacacggacgcggggatcagccctccgtgcccccggttggtggtgtcggctgtagagcctttgtggcgagccttcggaacgtccgttggcccccaaggttccggcccaccatcgccgaaaaatatgacgggagcgtcaaccccgccgagtttctccaggtctacacgaccgggatcgaggccgccgggggtgacgacagggtcatggcgaatttctttcccatggccctgaagggacaggcacggggttggctaatgaacttgccacccgcgtccgtccactcttgggaggatttgtgccaacagttcaccatgaactttcaaggcacatatccgcgcccaggtgaagaagcggacttacatgcagtccagcgaagggatgatgagtcacttcgctcatacattcagcggttctgtcaagtccgcaacaccataccatgcatccctgcacacgcggtgatctacgcgttcagggggggtgtgcggcacaaccgcatgctcgaaaagatcgcctccaaagagccccagactaccgcggagctttttcagctcgcggaccgagtggctcgtaaagaggaggcatggacctggaacccctccggttccggtgtggcagcttcggccgcccccggatccgctgctcagacagggcggcgtgacaggaggaggaagaagaggtcagcccattccgacgacgagggtcatgtcctcgccgtcgagggcgcttcgcgggccacccgaaaggggaggcctgcgagcgacaaaaagaaggaggccggcgctccctactgggagcgcccaaccggcaagtggtgcatcgtccacaacacctcccttcacgacctcgcggactgccgcgcagtcaaaagtttggctgagcggacgaggaagtgggaggaggagaggaggcaggagcgccgagagggcaagtcctcggcggttccttccggcaatcggcgaagtgaggccaagcagaaggcccccgccgaggacatcgatgacggcgatgatgacctaggcttccaagagcctggggccaccattgccactgtcgatgggggagcgtgtgctcacgtttctcgccggagcctcaaggccatgaagcgagagcttctggccgcggcccctactcatgaggcgacgtgccgggcgcggtggtcggaggttgccctcaccttcgaccagaccgaccacccaccgtgcgttgcccggggaggacagatcgcaatggtggtttcccccaccgtttgcaacgtgaagctggggcgtgtcctcattgatgggggagcagccctcaacatcctttcccccgcagcctttgacgctatcaaggccccggggatggtgctccggccgtcccagccgattatcggtgtgacgccgggtcacacttggccgctaggtcatatcgacctcccggtcaccttcggtggatccgccaacttccgcacggagcgggtgaactttgatgtggcggacctcagtctgccctacaacgcggtcctagggaggcccgcgttggtgaaattcatggcggcagtccactacgcctacctccagatgaagatgccgggccccggtggccccatctctgtccatggcgacctcaaagtcgcgcttgcttgtatggagcagcgcgcggaccacctcaccgccgcgtccaagcccgagggaggcgacgagaggcttggcacctccgcccccgccgccccgaggcagcggatagtcacatgcgacgaggtcccggaagacgcgctcgtctctttcctgcgggcaaacgctgacgtcttcgcatggagaccggcggatatgcccggggtccccagggaggtgattgagcaccgtctcgccgtgcggtcgggcgcaaggccggtccggcagaaagtacggcggcaggccccggaacgtcaagccttcatccgcgaggaggtggcgcgacttctggaggccggattcatccgcgaggtcatccatccggagtggctggcgaacccggtggtcgttcccaaggcgaacggcaagcttcggatgtgcatcgactacaccgaccttaacaaggcatgtcctaaggacccttaccccctgcctcgcatagatcagattgtcgactccacagcggggtgcgaccttttgtgttttctagatgcatactctggttaccatcagattcgcatggctagggaggatgaggaaaaaactgcattcattacccccataggaacttattgttatacgacaatgcccttcgggttaaagaatgcaggtcctacttttcaacgtactactcgaatttctttgggtagccaaataggacgtaatgttgaggcttatgtcgatgacttggttgtaaagacgcgcaaccaagagaccttactctcggatcaagcggaaacttttgagagtctccgctccgcccgcataaaactgaaccccgataagtgcgtgttcggtgtacctgcgggcaagcttctcgggtttttggtctctgcccgaggcatcgaggccaaccccgagaagatacgagctatagagcggatgcgccccccagcaagcttagggatgctgggagagaaggcgctacccttatttaagctcctcaaacgctccgggccgtttacttggacggaggaagctgaacgtgccctcactcagttgaaggcgtatctcagctctcccccagttctggtcgccccggagccaaatgaacccttgctactctacttagcggcgaccccgcaagtggttagtgcggcgttggttgtggagcgcgatgaggacaatcctcattccgcgcacccccaccctatgctggcttggcccgggagagagcagggaggagaggcccccgagccgaacggtggcccaaggcccccgacgaccggagcaggccctctgcccgcttgtcagacggtgccaggtgcccccgacccccaggatggcccgagggccactgcgggaaggccgcacctatcgccctctgaccccgaggctaaccctgtgccgactcgacccgggagagagcagggagaagaggcccccgagccgaacggtggcctaaggcccctgacgaccggagttggccctttgcccgcttgtccgacgacgccaggagcccccgacccccaggacggccccgaggccactgtgggaaggctgcccctgtcgtcctccgaccccgaggtcgtcggcacagaagatgagtgcaccccgcgaggccgcttggacaaagagcgccccagggatgtggcccctagcgaagaggatcggcctcaccgaaaggtgcagcggcccgtctactttgttagtgaggccctctgggacgccaagacccgataccctcaggcccagaagatgctttacgctattctgatggcttcgaggaaactgcgccattatttccaggcgcatcgggtcacggtggttacgtcttaccccctcggccaaatcttgcataatcgagagggtactggacgggtggtgaaatgggcaatcgaactttctgagtttgatttgcactttgaaccacgccacgctatcaagagccaggccctcgccgattttgtggcagagtggaccccagctcctgagcccgtctcagtccccgaggccagctcgggcccctcgcagctgcctcacaccgcccactgggtgatgcagttcgacggctccctgtctcttcagggcgccggtgcgggggtcacgttgacctcgccgagcggagacgtcctcagatatttggttcgccttgactttcgggcgaccaataatatggcagagtatgagggactccttgcgggactcagggtggcagctggactggggatccgccgcctcctggtgttaggcgactcccagctggtcgttaaccaggtctgtaaggagtaccggtgctctgacccgcagatggacgcttacgtgcgccaagtacggcgtatggagcgccattttgacgggatagagcttcggcacgtgcccagacgggataacacggttgccgacgaactctcacggctcgcttcctcgcgagcccagaccccaccgggcgcctttgaagaaaggcttgcccagccgtcggcgcgacccgaccccttaggggagacggacgcgcctgacaggcccccgatgcccgtcggagtccaggcctcgggacccaaggggagcgctcccagctcccttagattgattgcttggatcgctgagatccaagcatacctcacagataagactctacccgaggaccgcgaagggagtgaacgcgtccaacgcatctccaaacgctacgtgctggtagaagggaccctctatcggcgcgcggctaacggaatcctcctgaagtgcattcctcgggaacaaggcgtcgagcttcttgccgatatccatgaaggcgaatgcggatcccactccgcctcgcgcaccttggttggcaaagcctttcgacaaggtttctattggccgacagctctcaatgatgcggtcgacctggtccggcgatgcagagcgtgtcaattccacgccaagcaaatccatcagccggcccaggccctgcagatcataccactttcatggccatttgctgtctgggggctcgatatcctgggaccgtttaggcgggccccgggcgggtttgagtatctgtatgtcgcgatcgacaagttcactaagtggcccgaggcttatccggtcgtcaagatcgataagcactccgcacttaaattcattaagggcatcacagcccggtttggagtgcctaaccgtattattacggataacggcacccaattcactagtgaacttttcggcgactactgcgaagacatgggcatcaagctctgcttcgcctcacctgcccaccccagaagcaacggccaagtggagcgcgccaatgtggaaatcctcagaggccttaaaaccaagaccttcaacatcctcaagaagcacggcgattcgtggatcgaggagttgccagcggtgctctgggcgaaccgaaccacgccaaaccgagcaaccggggaaacgcctttcttcctcgtctacggcgcggaagcggttctcccatccgagctcaccctgaggtcccctcgggccaccatgtactgcgaggctgatcaagatcagattcgcagagatgacctcgactacttggaagagcgaaggcggcgcgcggccctccgagccgcgcgctaccagcagagcctgcggcgctaccatcagcgccacgtccgggcccgatcactctgcgtcgacgacctcgtcctacgccgcgtccaaacgcgtgctggattgagcaagctctcaccaatgtgggagggtccgtatcgagtgatcggcgtcccccggccgggctccgttcggctggccacgggcgacggcacagagctgcctaacccgtggaacatcgaacaccttcgtcgcttctacccctaa

SEQ ID NO: 66308 - DNA, 5684 bp, Oryza sativa
  Clone ID: PAT_MRT4530_67271C.1
atggccgaacaagcaaaggcgcacaacctctctccgagtgttagcggtgacgacggggagccgaacccacgccgtcgagctcgtactccaccgccccctccacgccaaagtcctaggcgggaggaggcactcgagagggtcgaaggatccgcgacttcgacatccacgggtgatggggaagggcggcgagatggggagcgtcgcctcctcgtctacggcgacggcagcacgccccagggcgcgctccaagctgcgggcgcgctcctacgtcacccgcccattgtccctgacccggagtctccagcccaacgttggctagacgacgtggccaacttggtcatgacggcacggcagcgcctaggtgctggtgggcggtcctccgccaccaagacctctggcgctgctaccaccggctccgtgtcgtcaaggcggagggcgcggcgagcggcggctgttgctcgccattcagccgccactccttcgtcagcgcctccgacccaggaagatctgcgtggggggccggatgcccgcatcagtatcgagcgccggcgtaatggccggcgtgctgcccacgcaacggagggcgcctcctcgtccggagtgtcacatcaacacggacgcggggatcagccctccgtgcccccggttggtggtgtcggctgtagagcctttgtggcgagccttcggaacgtccgttggcccccaaggttccggcccactatcgccgaaaaatatgacgggagcgtcaaccccgccgagtttctccaggtctacacgaccgggatcgaggccgccgggggtgacgacagggtcatggcgaatttctttcccatggccctgaagggacaggcacggggttggctaatgaacttgccacccgcgtccgtccactcttgggaggatttgtgccaacagttcaccatgaactttcaaggcacatatccgcgcccaggtgaagaagcggacttacatgcagtccagcgaagggatgatgagtcacttcactcatacattcagcggttctgtcaagtccgcaacaccataccatgcatccctgcacacgcggtgatctacgcgttcaggggggcttcggccgcccccggatccgctgctcggacagggcggcgtgacaggaggaggaagaagaggtcagcccattccgacgacgagggtcatgtcctcgccgtcgagggcgctttgcgggccacccgaaaggggaggcctgcgagcgacaaaaagaaggagaccggcgctcccagtagggagcgcccaaccggcaagtggtgcattgtccacaacacctcccttcacgacctcgcggactgccgcgcagtcaaaagtttggctgagcggacgaggaagtgggaggaggagaggaggcaggagcgccgagagggcaagtccccggcggttccttccggcaatcggcgaagtgaggccaagcagaaggcccccgccgaggacatcgatgacggcgatgatgacctaggtttccaagagcctggggccaccattgccactgtcgatgggggagcgtgtgctcacgtttctcgccggagcctcaaggccatgaagcgagagcttctggccgcggcccctactcatgaggcgacgcgccgggcgcggtggtcggaggttgccctcaccttcgaccagaccgaccacccaccgtgcgttgcccggggaggacagatcgcaatggtggtttcccccactgtttgcaacgtgaagctggggcgtgtcctcattgatgggggagcagccctcaacatcctttcccccgcagcctttgacgctatcaaggccccggggatggtgctccggccgtcccagccgattatcggtgtgacgccgggtcacacttggccgctaggtcatatcgacctcccggtcacattcggtggatccgccaacttccgcacggagcgggtgaactttgatgtggcggacctcagtctgccctacaacgcggtcctagggaggcccgcgttggtgaagttcatggcggcaatccactacgcctacctccagatgaagatgccgggccccggtggccccatctctgtccatggcgacctcaaagtcgcgcttgcttgtatggagcagcgcgcggaccacctcaccgccgcgtccaagcccgagggaggcgacgagaggcttggcacctccgcccccgccgccccgaggcagcggatagtcacatgcgacgaggtcccggtcaaggaggttgccctgagcgacggcccgtccaagaccacacggatcggtggccggtccggcagaaagtacggcggcaggccccggaacgtcaagccttcatccacgaggaggtggcgcgacttctggaggccggattcatccgcgaggtcatccatccggagtggctggcgaacccggtggtcgttcccaaggcgaacggcaagcttaggatgtgcatcgactacaccgaccttaacaaggcatgtcctaaggacccttaccccctgcctcgcatagatcagattgtcgactccaccgcggggtgcgaccttttgtgttttctagatgcatactctggttaccatcagattcgcatggctagggaggatgaggaaaaaactgcattcattacccccataggaacctattgttatacgacaatgcccttcgggttaaagaatgcaggtcctacttttcaacgtactactcgaatttctttgggtagccaaataggacgtaatgttgaggcttatgtcgatgacttggttgtgaaaacgcgcaaccaagagaccttactctcggatctagcggaaacttttgaaagtctccgctccgcccgcataaagctgaaccccgataagtgcgtgttcggtgtacctgcgggcaaacttctcgggttcttggtctctgcccgaggcatcgaggccaaccccgagaagatacgagctatagagcggatgcgcccacccagcaaacttagggatgtgcaatacgtcaccggttgcatggccgccctaagtcggttcatatcgaggctgggagggaaggcgctacccttatttaagctccttaaacgctccgggccgtttacttggacggaggaagctgaacgtgccctcactcagttgaaggcgtatctcagctctcccccggttctggtcgccccggagccagatgagcccttgctactctacttagcggcgaccccgcaagtagttagtgcagcgttggttgtggagcgcgatgaggacaatcctcattccgcacatccccaccctgtgctagcttggcccgggagagagcagggaggagaggccctcgagccgaacggtggcccaaggcccccgacgaccggaactggccctctgcccgcttgtcagacggtgccaggagcccccgacccccaggacggccccgaggccactgtgggaaggccgcccctgtcgtcctccgaccccgaggtcgtcggcacagaagacgagtgcgccccgcgaggccgcttggaagaagagcgacccagagatgcggcccctagcgaagaggatcggccccaccgaaaggtgcagcggcccgtctactttgttagtgaggccctccgggacgccaagacccgataccctcaggcccagaagatgctttacgctattctgatggcttcgaggaaactgcgccattatttccaggcgcatcgggtcacggtggttacgtcttaccccctcggccaaatcttgcataatcgagagggtactggacgggtggtgaaatgggcaatcgaactttctgagttcgatttgcactttgaaccacgccacgctatcaagagccaggccctcgccgactttgtggcagagtggaccccagctcccgagcccgtctccattcccgaggccaactcgggcccctcgcagctgcctcacaccgcctactgggtgatgcagtttgacggctccctgtctcttcagggcgccggtgcgggggtcacgttgacctcgccgagcggagacgttctcagatacctggttcgccttgactttcgggcgaccaataatatggcagagtacgagggactccttgcgggactcagggtggcagctggactggggatccgccgcctcctggtattaggcgactcccagctggtcgttaaccaggtctgtaaggagtaccggtgctctgacccgcagatggacgcttacgtgcgccaagtacggcgtatagagcgccatttcgacgggatagagcttcggcacgtgcccagacgggataacacgattgccgacgaactctcacggctcgcttcctcgcgagcccagaccccaccgggcgcctttgaagaaaggcttgcccagccgtcggcgcgacccgaccccttaggggagacggacgcgcctgaccggcccccgaggcccgtcggagtccaggcctcgggacccgaggggagcgctcccagctcccttagattgattgcttggatcgctgagatccaagtatacctcacagataagactctacccgaggaccgcgaagggagtgaacgcgtccagcgcatctccaaatgctacgtgctggtagaagggaccctctatcggcgcgcggctaacggaatcctcctgaagtgcattcctcgggaacaaggcgtcgagcttcttgccgatatccatgaaggcgaatgcggagcccactccgcctcgcgcaccttggttggcaaagcctttcgtcagggtttctattggccgacagctctcaatgatgcggtcgacctggtccggcggtgcagagcgtgtcaattccacgccaagcaaatccatcagccggcccaggccctgcagatcataccactttcatggccatttgctgtctgggggctcgatatcctgggaccgtttaggcgggccccgggcgggtttgagtatctgtatgtcgcgatcgacaagttcactaagtggcccgaggcttatccggtcgtcaagatcgataagcactccgcacttaaattcattaaggacatcacagcccggtttggagtgcctaaccgtattattacggataacggtacccaattcactagtgagcttttcggcgactactgcgaagacatgggcatcaagctctgcttcgcctcccccgcccaccccagaagcaatggccaagtggagcgcgccaatgcagaaatcctcagaggccttaaaaccaagaccttcaacatcctcaagaagcacggcgattcgtggaccgaggagttgccagcggtgctctgggcaaaccgaaccacaccaagccgagcaaccggggaaacgcctttcttcctcgtctacggcgcggaagcggttctcccatccgagctcaccctgaggtcccctcgggccaccatgtactgcgaggctgatcaagatcagcttcgcagagatgacctcgactacttggaagagcgaaggaggcgcgcggccctccgagccgcgcgctaccagcagagcctgcggcgctaccatcagcgccacgtccgggcccgatcactctgcgtcgacgacctcgtcctacgccgcgtccaaacgcgtgctggattgagcaagctctcaccaatgtgggagggtccgtatcgagtgatcggcgtcccccggccgggctccgttcggctggccaccggcgacggcacagagctgcctaacccgtggaacatcgaacaccttcgtcgcttctacccctaa

SEQ ID NO: 66309 - DNA, 586 bp, Oryza sativa
  Clone ID: PAT_MRT4530_67272C.1
aactgaaagcaaacactttttaaactctaatggctctccagccttgttttagatgttttcagtgttctttttagattaattggagcttaaacagtccagtgttgttctctatctgtgttatgttgcaagtatagcaatcaggtacttattttccagtttagtatttcactaatagtctattattttccacctaggttgcttggtgacaatctcatgcagaattcctttctatgtggtcttttctcttttagatacatcttattatccattaaagagtaatgagataataggggccatctagtgactataggggaataagtgcccagcacaaccttgtaaataagtggttgctttcttccctgaaaagccttacaatatgtccacactggaaacatttttaaggactggttaaaaaaagatcatcacttggtattgcatctctacagttctcacgggagtttcgttaaaactctatttaccatgaatacatgtgggtgttcacagaagcaagaaagtgaacatgaagtggttttcccatcatgcaagtttcgtgcaagttccatgtgtaagtatgaagcaaagaagt

SEQ ID NO: 66310 - DNA, 372 bp, Oryza sativa
  Clone ID: PAT_MRT4530_67273C.1
gctgggtgttctgcctttgaaactagtgttaacttctcccaagggacttttgttccaagctcatttcagtctagaggaggtggtggaactggggtggtttagtgatcagctagatgacacttttgagaaaattgagatacaagaaaatactctggagggtagcagtcagagagagggtaagcaagttgtggtggtggatcccatgacagaagatcaccatgtcagtaagacgggtaacgggctattgaagtttgtcagaagcaagtcctggtgccagaattgatgctgggagaacataagatcaaatgtgcacagatcttgagagacatggaagttgcaatgcaactgcagaaaggagactgtattctgact

SEQ ID NO: 66311 - DNA, 508 bp, Oryza sativa
  Clone ID: PAT_MRT4530_67274C.1
ttttttttttttttttttttgggagagcattttacacaaatcatatattagcacagctcaaactcaatatatacaatttcgacatcgttcttttggtcctggaaatacataggagaaacacatgtttttgtttcaaacaaagaaaatggtaaaggtaataatgtatttacagcgccaatatagttcacatcagcaatccccccaaaaaaatcagaatattgagctgaggtgatggtaaactaatagtagtcagattcactaaatccataaggttgtcagaaaagccggccaaagaaacaaaaatcttccaaccagggcgcctttatttcaactttttccttcgcaagaaacataaatttacagagggcaatctagaatgcacaaataattacatacaaaattgcctatgatgactgaagttgggccatgcaagttttcacaaggtttccatcatcctgtggttttttcaagagctgttctgctgtgatctggggaaacatcaggcaaa

SEQ ID NO: 66312 - DNA, 6111 bp, Oryza sativa
  Clone ID: PAT_MRT4530_67275C.1
atggccgaacaagcaaaggcgcacaacctctctccgagtgttagcggtgacgacggggagccgaacccacgccgtcgagctcgtactccaccgccccctccacgccaaagtcctaggcgggaggaggcgctcgagagggtcgaaggatccgcgacttcgacatccacgggtgatggggaagggcggcgagatggggagcgtcgcctcctcgtctacggcgacggcagcacgccccagggcgcgctccaagctgcgggcgcgctcctacgtcacccgcccattgtccctgacccggagtctccagcccaacgttggctggacgacgtggccaacttggtcatgacggcacggcagcgcctaggtgctggtgggcggtcctccgccaccaagacctctggcgctgctaccaccggctccgtgtcgtcaaggcggagggcgcggcgagcggcggctgttgctcgccattcggccgccactccttcgtcagcgcctccgacccaggaagatctgcgtggggggccggatgcccgcatcagtatcgagcgccggcgtaatggccgacgtgctgcccacgcaacggagggcgcctcctcgtccggagtgtcacatcaacacggacgcggggatcagccctccgtgcccccggttggtggtgtcggctgtagagcctttgtggcgagccttcggaacgtccgttggcccccaaggttccggcccaccatcgccgaaaaatatgacgggagcgtcaaccccgccgagtttctccaggtctacacgaccgggatcgaggccgccgggggtgacgacagggtcatggcgaatttctttcccatggccctgaagggacaggcacggggttggctaatgaacttgccacccgcgtccgtccactcttgggaggatttgtgccaacagttcaccatgaactttcaaggcacatatccgcgcccaggtgaagaagcggacttacatgcagtccagcgaagggatgatgagtcacttcgctcatacattcagcggttctgtcaagtccgcaacaccataccatgcatccctgcacacgcggtgatctacgcgttcagggggggtgtgcggcacaaccgcatgctcgaaaagatcgcctccaaagagccccagactaccgcggagctttttcagctcgcggaccgagtggctcgtaaggaagaggcatggacctggaacccctccggttccggtgtggcagcttcggccgcccccggatccgctgctcggacagggcggcgtgacaggaggaggaagaagaggtcagcccattccgacgacgagggtcatgtcctcgccgtcgagggcgcttcgcgggccacccgaaaggggaggcctgcgagcgacaaaaagaaggaggccggcgctcccagtagggagcgcccaaccggcaagtggtgcatcgtccacaacacctcccttcacgacctcgcggactgccgcgcagtcaaaagtttggctgagcggacgaggaagtgggaggaggagaggaggcaggagcgccgagagggcaagtccccggcggttccttccggcaatcggcgaagtgaggccaagcagaaggcccccgccgaggacatcgatgacggcgatgatgacctaggtttccaagagcctggggccaccattgccactgtcgatgggggagcgtgtgctcacgtttctcgccggagcctcaaggccatgaagcgagagcttctggccgcggcccctactcatgaggcgacgcgccgggcgcggtggtcggaggttgccctcaccttcgaccagaccgaccacccaccgtgcgttgcccggggaggacagatcgcaatggtggtttcccccactgtttgcaacgtgaagctggggcgtgtcctcattgatgggggagcagccctcaacatcctttcccccgcagcctttgacgctatcaaggccccggggatggtgctccggccgtcccagccgattatcggtgtgacgccgggtcacacttggccgctaggtcatatcgacctcccggtcaccttcggtggatccgccaacttccgcacggagcgggtgaactttgatgtggcggacctcagtctgccctacaacgcggtcctagggaggcccgcgttggtgaagttcatggcggcggtccattacgcctacctccagatgaagatgccgggccccggtggccccatctctgtccatggcgacctcaaagtcgcgcttgcttgtatggagcagcgcgcggaccacctcaccgccgcgtccaagcccgagggaggcgacgagaggcttggcacctccgcccccgctgccccgaggcagcggatagtcacatgcgacgaggtcccggtcaaggaggttgccctgggcgacggcccgaagacgctcgtctctttcctgcgggcaaacgctgacgtcttcgcatggagaccggcggatatgcccggggtccccagggaggtgattgagcaccgtctcgccgtgcggtcgggcgcaaggccggtccggcagaaagtacggcggcaggccccggaacgtcaagccttcatccgcgaggaggtggcgcgacttctggaggccggattcatccgcgaggtcatccatccggagtggctggcgaacccggtggtcgttcccaaggcgaacggcaagcttcggatgtgcatcgactacaccgaccttaacaaggcatgtcctaaggacccttaccccctgcctcgcatagatcagattgtcgactccacagcggggtgcgaccttttgtgttttctagatgcatactctggttaccatcagattcgcatggctagggaggatgaggaaaaaactgcattcattacccccataggaacttattgttatacgacaatgcccttcgggttaaagaatgcaggtcctacttttcaacgtactactcgaatttctttgggtagccaaataggacgtaatgttgaggcttatgtcgatgacttggttgtaaagacgcgcaaccaagagaccttactctcggatctagcggaaacttttgagagtctccgctccgcccgcataaaactgaaccccgataagtgcgtgttcggtgtacctgcgggcaagcttctcgggtttttggtctctgcccgaggcatcgaggccaaccccgagaagatacgagctatagagcggatgcgcccccccagcaagcttagggatgtgcaatgcgtcaccggttgcatggccgccctaagtcggttcatatcgaggctgggagagaaggcgctacccttatttaagctcctcaaacgctccgggccgtttacttggacggaggaagctgaacgtgccctcactcagttgaaggcgtatctcagctctcccccagttctggtcgccccggagccaaatgaacccttgctactctacttagcggcgaccccgcaagtggttagtgcggcgttggttgtggagcgcgatgaggacaatcctcattccgcgcacccccaccctgtgctggcttggcccgggagagagcagggaggagaggcccccgagccgaacggtggcccaaggcccccgacgaccggagcaggccctctgcccgcttgtcagacggtgccaggtgcccccgacccccaggatggcccgagggccactgcgggaaggccgcacctatcgccctctgaccccgaggctaaccctgtgccgactcgacccgggagagagcagggagaagaggcccccgagccgaacggtggcctaaggcccctgacgaccggagttggccctttgcccgcttgtccgacgacgccaggagcccccgacccccaggacggccccgaggccactgtgggaaggccgcccctgtcgtcctccgaccccgaggtcgtcggcacagaagacgagtgcaccccgcgaggccgcttggacaaagagcgccccagggatgtggcccctagcgaagaggatcggccccaccgaaaggtgcagcggcccgtctactttgttagtgaggccctccgggacgccaagacccgataccctcaggcccagaagatgctttacgctattctgatggcttcgaggaaactgcgccattatttccaggcgcatcgggtcacggtggttacgtcttaccccctcggccaaatcttgcataatcgagagggtactggacgggtggtgaaatgggcaatcgaactttctgagtttgatttgcactttgaaccacgccacgctatcaagagccaggccctcgccgattttgtggcagagtggaccccagctcccgagcccgtctcagtccccgaggccagctcgggcccctcgcagctgcctcacaccgcccactgggtgatgcagttcgacggctccctgtctcttcagggcgccggtgcgggggtcacgttgacctcgccgagcggagacgtcctcagatatttggttcgccttgactttcgggcgaccaataatatggcagagtacgagggactccttgcgggactcagggtggcagctggactggggatccgccgcctcctggtgttaggcgactcccagctggtcgttaaccaggtctgtaaggagtaccggtgctctgacccgcagatggacgcttacgtgcgccaagtacggcgtatggagcgccattttgacgggatagagcttcggcacgtgcccagacgggataacacggttgccgacgaactctcacggctcgcttcctcgcgagcccagaccccaccgggcgcctttgaagaaaggcttgcccagccgtcggcgcgacccgaccccttaggggagacggacgcgcctgacaggcccccgaggcccgtcggagtccaggcctcgggacccgaggggagcgctcccagctcccttagattgattgcttggatcgctgagatccaagcatacctcacagataagactctacccgaggaccgcgaagggagtgaacgcgtccagcgcatctccaaacgctacgtgctggtagaagggaccctctatcggcgcgcggctaacggaatcctcctgaagtgcattcctcgggaacaaggcgtcgagcttcttgccgatatccatgaaggcgaatgcggagcccactccgcctcgcgcaccttggttggcaaagcctttcgtcaaggtttctattggccaacagctctcaatgatgcggtcgacctggtccggcaatgcagagcgtgtcaattccacgccaagcaaatccatcagccggcccaggccctgcagatcataccactttcatggccatttgctgtctgggggctcgatatcctgggaccgtttaggcgggccccgggcgggtttgagtatctgtatgtcgcgatcgacaagttcactaagtggcccgaggcttatccggtcgtcaagatcgataagcactccgcacttaaattcattaagggcatcacagcccggtttggagtgcctaaccgtattattacggataacggcacccaattcactagtgaacttttcggcgattactgcgaagacatgggcatcaagctctgcttcgcctcacctgcccaccccagaagcaacggccaagtggagcgcgccaatgcggaaatcctcagaggccttaaaaccaagaccttcaacatcctcaagaagcacggcgattcgtggatcgaggagttgccagcggtgctctgggcgaaccgaaccacgccaagccgagcaaccggggaaacgcctttcttcctcgtctacggcgcggaagcggttctcccatccgagctcaccctgaggtcccctcgggccaccatgtactgcgaggctgatcaagatcagcttcgcagagatgacctcgactacttggaagagcgaaggcggcgcgcggccctccgagccgcgcgctaccagcagagcctgcggcgctaccatcagcgccacgtccgggcccgatcactctgcgtcgacgacctcgtcctacgccgcgtccaaacgcgtgctggattgagcaagctctcaccaatgtgggagggtccgtatcgagtgatcggcgtcccccggccgggctccgttcggctggccacgggcgacggcacagagctgcctaacccgtggaacatcgaacaccttcgtcgcttctacccctaa

SEQ ID NO: 66313 - DNA, 192 bp, Oryza sativa
  Clone ID: PAT_MRT4530_67276C.1
atgcttaaagaacatttgatgatgaatgtagtcacaatagaataaataataattacataaattttttaataagacgaatggtcaaatgttagataaaaagtcaacggcgttatacattaatagtaataacttagccagcgttggccatctttctgtgctggacgcctccgaatttggggggggggatcacag

SEQ ID NO: 66314 - DNA, 280 bp, Oryza sativa
  Clone ID: PAT_MRT4530_67277C.1
aaagaatcgtgcgtagttgctcctccaatcagcacaccagttcttttgtgcccttctccaattagcacaccagttcctttgtgtcgtgagacacatatctactaccctgcacatcatgatgtgctcgtctacaaatggttccccctccactttagcttaagctccattggtgacgatgagcaacccacaaccatggagaacaactatttattttataaggtaccctttgttctataagcttcgcttgtgggcttcgcttcgttgcatcattgcatcgacg

SEQ ID NO: 66315 - DNA, 326 bp, Oryza sativa
  unsure (1)..(326): unsure at all n locations
  Clone ID: PAT_MRT4530_67278C.1
caatgtactttcaaagggtcccattatttgtggatccaagaaccacccagttacaactttggcaaagggtggccaattccggggtggttaactgttttctttttcggccacaggcggaaaaaggtgaaacaaagcaccctngtccacctaagcacaaccaataatggccagttctaagtccccacacccaaacantgaagttttagcccantctccagtatcgataataattcccagtgtagtctatctgtatagattatttaattggttcgtgtgagctttcccttttctactgctatatngattaaaaaaaaaaaaaaaaaaaa

SEQ ID NO: 66316 - DNA, 1744 bp, Oryza sativa
  Clone ID: PAT_MRT4530_67279C.1
cggtccggaatcccgggtcgacccacgcgtccgcttgctcgcgcgcggtccgtagtcgcgtgctctgttcgaaaggcgagtcccttttttttttttcttctccggccgcgggcgctaattttcttggagggcgacgcgccacctttggcccggccatgaacgcgctcgccgccaccagccgtaacttccggcaggccgccaggctgctcggcctcgactccaagctcgagaagagcctcctgatcccgttccgcgagatcaaggtggaatgcaccatccccaaagacgatggaaccttggcgtccttcattgggttccgcgtgcagcacgacaatgcccgcgggccaatgaaaggtggcattcgctatcaccctgaggttgatccagatgaagtaaatgcacttgctcaactaatgacatggaagactgctgttgcagcaattccatatggtggagcaaagggtgggattggatgcgctcctggtgaattaagcacgagtgagctggagcgtttgacacgtgtatttacacagaaaattcatgatcttattggagctcatactgacgtgccagctcctgacatgggaactaattcacagaccatggcttggattttggatgagtactcgaaattccatggtcattcaccggcagttgtcactgggaagccaatagatcttggtggatcattaggtagagatgctgctacaggaagaggtgtgatgtacgctactgaggctcttttggctgaacatggaaagtccatttctggatcaacctttgttatccagggttttggtaatgttggttcatgggctgcacgaatcatccatgagaagggtggcaaggtgattgcacttggagatgtgacaggctcaatcagaaacaagaatgggttagacatacctgctctgatgaagcacagaaatgagggtggtgctttgaaagattttcatgatgcggaagtcatggattcttcagagctactagtgcatgaatgcgatgttctcatcccatgcgctttaggtggagtgctcaacagggaaaatgcacctgatgtgaaggccaaatttataattgaagctgctaatcatccaactgatccagaagctgacgagattcttgccaagaagggagtgaccatattacctgacatttacgccaactccggtggtgtgatcgttagctattttgagtgggttcagaacattcaagggttcatgtgggatgaggagaaggtgaacatggagctccacaagtacatgaacaattctttccagcacatcaaggccatgtgtaaatctcatgattgcaacctgaggatgggggcgttcaccctgggagtcaaccgggttgcacgtgccaccctcttgaggggatgggaggcatgaggccattaacaacactcatatccatgtccgaaaatgttggacgaccaatgtctgatctgataaattcatcagaagtggccggcttggaaggagctcacttgcaataatattcaagatagatcggcgtcggcgtccttccaccgttccggcgaaaaataataataaatatattaagggtacctaacaaaaatgtgatgtttcttctttcgtttttacaaaaggccgattcaatcgtgcgtgattatagtattgacaaaaaatggtgtaagctctagaggcaatttgaatttcacaaaggttgtattctgtcattgtcattctgtggatcaaagtctgcgagatggttgaccccc

SEQ ID NO: 66317 - DNA, 1154 bp, Oryza sativa
  Clone ID: PAT_MRT4530_6727C.1
atgagtagagagtccactagttgaggttttgtttgcctagggtgaacaagccgagggagcggacgcgcggaccgggtccacgggaagtggggcccacgcgtcagccgctcggtcctcggtggtccgggcgcacgcggctgtcggcgttcggctccttgggtcccgcgcttcagccgcactctcgggctcggtcggctgtcggccgggcccacttggcagccgtgagggcgcgcccgagggcggcctcgccggcgcggcgtacgggatcggcgcgcacccgcgccccgatggtcgccgccggcgaccaacgggccgcggcggagtggcacccgagagagaggagggaagggggaaacgaaggggacggtccacggctcaccccgagacagcgaaggcggcggaaacggcggacggagcggaggaagacggcggcgcggctcgggatgacgatgacgacggcgctccgacggtcggcgagcgaaacggaggcgcggacgaggtcgacggcgatgcggcgaagcggacggaggtgtcgccgagccgggaggaggtccggagcggcggcggcggcgaaccggagcacggcggcgacggcggagagagaggagcacggcgcgagcacgattccgacggcgagagcgagcggtgagcggcggaaacggaagagcggagctcgggcaacgattatatagcaacgggagggggagaacgcggccggggagggaggaaacggccgcggagttctcgggttccatagatgcgccggcgacgaatacgggattaaatccgagcgaatccgagggagagagagagaggggaaatcgggggaaacgggagagggaatcacggggagtgattcccctctctttaatgcgcgcggggacggcgggatgcggcgcaatccgcggcggcggcggcgctagggcacgggcggcgacgggcgcggcgcgaggagggagatgacaggtgggccccacccgtcagcgagagtggcgggcgggcccgcctgtcagcggcgcgcgcgcgcgcggggagccgatgggccgcgggagaggagagagagagggagagggaagtgggccgagccggcccaagagggaaggggggggggaaagagaacttcttttagggtttttctttttataaaccttttc

SEQ ID NO: 66318 - DNA, 358 bp, Oryza sativa
  Clone ID: PAT_MRT4530_67280C.1
tgacgcgtccggacaagagcggccggttctttgtgttttacacatgtgacaggacgcagcccgcctcctgctccggtcggtgcggcatgctctgcgacgtgtgctgcgaccctggcaagctcaccgcctacaatggcgcgcacacgtgccaggaccagaccgtgatcagcgagtacaccgtcaacgcctccttcggctcgccggcgacggcgaccgtggctaacccggcggaggtcaagaggatcatgacgatggggctgccgattagaacgcaccacggagggctgatcctctgtagaatgggcgaccgcttaccttacttgaaaatgggcgaccagcggagccacggcaacccgtg

SEQ ID NO: 66319 - DNA, 1856 bp, Oryza sativa
  Clone ID: PAT_MRT4530_67281C.1
gtcctgtgttctcgcagaatgttggttttgctcaggaggaggctgcatggaatgatgtaggtggtgctgcagagtgggtggatggtggaggtgatgggctgattggtttgtcgcttgggcggcagcgcagctttgctgatatccttcaggacaatattggccgcagaactcctgcttcagagcatccctctcgtgcagttagtcgcaattcttttcttgacaatcaggaactactaaattctgctgatagccagtactccatgcataatgatattctggaagcacaacgtgctgtcggaaatgtgcaacaatgtcagtggccttcccagtattaatgcatccgcatctcaaacttttgcatctgttctgggttcatctatttcaaggaatgccacgccagattctcattatgtccctagtggtccctagtcctggccttccacctgtcggtgttaggattaattctaatgagaagaagctgaattgctcatcatcattcaacactgcatcttcaaaagcagttgagcctgatgatattttagctgggatatcaaacatgaacatgtcaaaagatgggcccgtgggtgacagtaacagcattagtcaatcaaagttccaaagtgagataagtgaccaccagaatatttctcttgatccaaaagctctccaagttaataagaatcagcattcgctgatgttggaagctgatactgattatttgggtataccaccaatttcacaaccttcaaatccttccttttctgatattaacaagaatgtctcaggtttagcgaacataagaaattctactaacacacgtatagatggacacgcggagatgcaaaggtcttctactttgtctactcggtcatatcagaagtccccaacatcttccaatgcgagcccaggtggttctcctgctcaacaccagaatattgacaatataaattcagcctttttgaactatggactcggtgggtatccactcagcccgggtttgccttctatgatgatgaactgtatgggctctggcaatatgcctcctttgttcgaaagtgcagctgctgcatctgctatagcttcattcggggcagattcgagaaaccttggtaacaatattttgtcgtcacctaccttaagtctatctgatgtgcataaccttggcagaactggtaaccaaacagccacaggtcttttgtcgcctctttctgatccattttatgtccagtacttgaaggcaactcaatatgcagcacaaggaactgccaactgcagtgatccttccttggaaagaggtttcatgggtagtcaatatggtgatttaactgctgttcagaaagcttatattgaagctttgcttcagcagcagaaacaatatggaatgccacttggtaagtcaaccacgtcaaaccatggctattatggcaatttggcttttggcatgggcatggcataccctggaagccctttgggaagtcctgttgcttctccatctggtcctggcagtccactgggccgcagggagccggctcggggagttccttctaacttgagaaacttgggtggctggaattctgatccaagtggctatatgaatgataacttcccatcttcactattggatgaattcaaaagtaataaggccagaagttttgaacttgctgagattgccagtcatgtggttgagttcagcgctgaccaatacggaagccgtttcatacagcaaaaacttgaaaccgcaacagttgaggaaaaagacatggtttttaaggagatcatgcctcaggctctctcgttgatgaccgatgtatttgggaactacgtggtgcagaagttctttgagcacgggagtgcag

SEQ ID NO: 66320 - DNA, 643 bp, Oryza sativa
  Clone ID: PAT_MRT4530_67282C.1
agcaggtcctatcttgtatcctagaaacactaaattaatgtatgcaatgtccattggtaaataactcagagtatattctcctaaaaattactctatgttgtgttttgtagttaaacccacgaagtctagatgtaccgcaacagaatttgcatttaattaatcaaatgaaacgagaacattggggtgggttttttgggtttttgcctgtaatagtatacgggtatacggtacgcccggaactagtcagacaaacgattcgcgaccgtcactccgcacgctccgaacccccgcgaccagaaaccgtacccgccttctcccggaccgggccccaccatagtccacgtcacctgctcagcgctctcccattggtgggtgcgaatagtccacagcagcatgcggggtcgcagcccgccagtcaaacctcgagggagctttgaccagtcaacggtcaaacgttcaaagggctatataatgatcaccggaggcgtcgtcgttggaagaagcagtagccacacccacacgcacacccgatcgatcctggcattctactctgctcgatcgaaacgctagctttcttcttcttcttcttctcctccggctccgatgacccccgcgccggggagcctcccgctggggaactcga

SEQ ID NO: 66321 - DNA, 260 bp, Oryza sativa
  Clone ID: PAT_MRT4530_67283C.1
atgtcgagaatcagacttatgtataaatgggctcagaattgacacgatgaactgggccaaaattcacaagtttgcgcatgggagcaatagaggaggccacttgccgattttgggccaggctggcccagcccatggttcggccaaacccaccacggcgccattcgatccagggttctcctggacggctgggattgactccctatggcggttggagggtatttccgaccattccaaccgccacaaccgtcattctcaagcta

SEQ ID NO: 66322 - DNA, 323 bp, Oryza sativa
  Clone ID: PAT_MRT4530_67284C.1
tcagccacgcattcggaaaaaggtcatacttactggagcccaacattggtggcatggagagcatgcatgtctggagagaaatcgttaatttattgcttgagcataaagtgagaaagctttataagcttgcatttgctgggactggtgcagttggtaagacatcattggctcataaaatatacaatgctggaaatatgaaaggaaggtgcactataaaactctggttttgagagaacaaagtgtactcttaagcttttattatgagagaacttattcgaatgatggagcgttcatcatgagctagattaatcaattggggagct

SEQ ID NO: 66323 - DNA, 1176 bp, Oryza sativa
  Clone ID: PAT_MRT4530_67285C.1
atggggcaaacggtaaaatttggaagagttcctttcaaggttggcttctcacattcacagtcccgcccaaaggaccgatggcaaggaaaatcgagcgagcaaagaagcatcgaatcatacaacaaaattccagaatttccaaattgtcacaagctagaggaaccagaggacaatcaacaaacagcactgcttctatctggatcccagaacctgtcttcccccgatatttttcagctgctatctgtggatagtacaactgcatgcttcgggaatggtgcattcgatcagggcaaggatgcccaagggaaacatgaggagaacagcgtacacaatgtcaatcaagagatcaaacaaaccatggatggaatcaggatgactgtggggggcgtggcagaattcttgaaaagtaaattagcaaacatggtacagaggggatgtggaaggaagagagaggacataagactccaaacagctcagatgcatgcagctctctcagttgcaagactagctacagcagttgcacgaatggttggtaattgccaatctgagtctaccaatgcaaacaacactatcatgactgccatagggaaagatgaacatagaaaaatgcatgttgcaattgcatctgccgcagcactggtggcagcctcatgctctgaggctgcaaagttaactggagctagcagagaacagatttcgacagtcattcacatgggcatggaaactaggtcgctaggggatttgctcatgctgactaccagcgcggcgacctgcttaaaaggagctaatgcctttaagatgcggaacagggcaataagcaattatgcctttgagaatctcatgagtaaccagaaagatgtccgacttcctattcgaacacctgatgggaagatccatatcaggatggtttctgtgcactgcaagcatgacaagataatattgaacttaggaaaggagcatagtttgagaaccagtaaagaatacataatttttgatgaacatggtgggacaacagacttcagctacccaacagatgaacatagctaccatgcaataaacctcgcaacatctggtggaaacatacagttattatttgaagaacatgaacaatacagcgcttggaagtcattcatcagatacctgataatcaacaagagatcaaggctatcctactga

SEQ ID NO: 66324 - DNA, 219 bp, Oryza sativa
  Clone ID: PAT_MRT4530_67286C.1
atggagcattgtcagatgaattcaatgatcaatgcttgcatggcggatgggtgggatccgatgttatttgaagcagctattgataccgcctccgtgggagccaacggtcgtggttgtgaggccttttctggtcgcatgaggccgcaggggcagatctactgcctggtgaccccaggcagctgcccgggctcgtcggtggttaatccactaaaattccat

SEQ ID NO: 66325 - DNA, 130 bp, Oryza sativa
  Clone ID: PAT_MRT4530_67287C.1
tttggggtttttcaattcagtgggttgtacctcttttctatcttcctagttcatctacttttagagaaaacaaaactagaggttcaattgtcttgatccgctattaattctataacaacatgaacattgc

SEQ ID NO: 66326 - DNA, 262 bp, Oryza sativa
  Clone ID: PAT_MRT4530_67288C.1
ttatgagacttgaacggcctcattctgacttcaattgtcgcactgctaggaaaagcattatcgcaagcggccgaaaagaatcttcgcaggcggggcggctgtccgcctgtaagctaacgactgtgaagatcgccgatcttcgcaggcggggcggccgtccgcctgcgaagataattttcgcaggcggacgttggctagtccggtccgcctgcgaaaataggaatagtccgcttgcaaaaaagaaaacttccgcctgcgaaga

SEQ ID NO: 66327 - DNA, 276 bp, Oryza sativa
  Clone ID: PAT_MRT4530_67289C.1
atggcgccgatcttcgccagctcgctgattccgccgctcgtggccgacggtgcaaccatccagtacctccaccggccactgcttgtcgttcacatggcgaatgtgggtaggcggcgagaacaagcggagcttgcagttaggaggtggtgcttggacggggccacagacatggaaaagatgaggaccctcactcagtcggggagggcctcgctggcgttgttaattggtgccagccatcaagaccggctagcagcggaggtgatggcagtcaagtga

SEQ ID NO: 66328 - DNA, 433 bp, Oryza sativa
  unsure (1)..(433): unsure at all n locations
  Clone ID: PAT_MRT4530_6728C.1
cggacgttgcgccgccgccggcctcggcctcggccgccgcctcctctcctcctctgtctccnnccctncccaccgccctcttccggcgcacctcanncccanccccaggccattgcccttntncngccgccaccacctcttgactcctcctctgggtctccatncctcctncccaccgncgatgcaatggcagacgcagcaggtgcgccacttcgncgtcaaggacagatcgcgcgngncacggacgncnaccanctncaaggtcaagaagtacaagatcaagncccggttcttcatgaagttttngattnagagtcatgaatgacgggcaggtccgaagtggagagccggnaagngcacaatggttaacttaagtggaaggaagtgaaaagaggattttggaagcttgaattagtgaattagttatgaaaag

SEQ ID NO: 66329 - DNA, 174 bp, Oryza sativa
  Clone ID: PAT_MRT4530_67290C.1
atggagagagatgggagatcgaggcgtgtggtgtgggcgcatataaacgggccggccaagcccaccgacgtctctgatcacatggccccacgttctgggacaccgcgcgtgctgacacgtgtcccctcgcacgaagctgtaacgcctcgatccgtcgcacatgtgccagcttag

SEQ ID NO: 66330 - DNA, 2677 bp, Oryza sativa
  Clone ID: PAT_MRT4530_67291C.1
gctgaactgtgtggtcaccaccaagtttaacataacaaatggaatgttgcaaaccaccgacctatcaacgaaacaacaaggccaggaacgccactttaacaatttactcgactagaaaatgttcgcagttttgcacttttgcttgcttccagaaaagttggtttcacaacaaacagagcaagaactaaaaaggaacaaaattattgcctgtggctgttgcatgattcagaaggacaacaagcttattgagtatgctctgcttctcatacacaagaaaaattcacagaccaagttttgctgctcttcaaatctaagggcagtccaaattatactccaatttccaaccaagcatgcaacaactggggaaatttggagcaaaaacaaggaactaaaatcttttctgccgatgaatagcttccgaaaggtgtagatttcacttcttcaacaaggttgcactgcattgggccattatctttgaggctcttgtgattgcatcagtcatatagaagttctccacaacagttttgaatggagtagagctcacttgttgctttaccggaggcttcacttcagaggaaatagtgcacggctccctctcatctacatgcacaaggtttggtgctaccatgctaatccggtccctcacacctgagaggctatcataaggaagttgagccccagccacctcagagagagcacggaggatcttccagtcatccctagcatcaccaacagtaggaacagctgggattgtccactgagtgcatccctcggtgttctcataggtgccttctttctcgctgaatgctgatgatggcaggataacattggccctatacacagccttgtcaccatggtgtccctggtaaacaacaaatgcatcatccggaaccttgtccaagtctacatcatcagctcccatcagatacagaaactttgtggacttgatgctctctgtaggattagcaacaagaccaagatcaagcgctgcagcttgtgcagcatgcagcaatagaacattaagcccgttccagtctggtctaaccacattgaattttttggctacagtctctatcgttgagaaaagggcatcttggtcttcccggtcaaataacccggccccagcaatgatgacaggattcttagcagactgcagagttgaacagaagggatgccgaccctctgcaatctcaacaagggtttgtggtccagtgccaagatgctcatggtcatagttgaagtcagttggaggtccaatataagcaaccttagcttgtgtcgctctaacagtcttccggattcttgcattaaccatagcagcttcaactcttggctgtgtaccaaccaaaaggaagacatcagctttctcaagcccagcaatgctagtattcattaggtagttagaacgtagatccgcaggaggacttggaccatttccttcacaaagcaccttatccgaacccattttgttaacaaaatctttcagtgccatcatggactctgcatcagaaagtttaccagcaaccccagtgatttcttctggtttaacttgttgcaaaacctcagcaacaactgcgagagcatcccgccatgtcactgccttaaacctgccatcagtaccacggatcatggggtcgtttagtctttgcctcttcagaccatcataacaaaaccgtgttttgtcagatatccattcctcattgatatcctcattgagacgtggaacgatacgcataacttcaggacctctgctgtcaactctaatgtttgaacctactgcatcagtaacatcaatagtttcagtgcccttcagctcccagttcctagctttaaatgcaaatggcttggatgtaagggctccaactgggcagatatcaataacatttccagagagttcacttgtcataagtttctccacatatgttccaatttcttcaccactgccacgacctaacatacccaggtcttgaacaccagcaacctcactagcaaatctgacgcaccttgtacattggatgcaacgggtcatcactgtcttcaccaatgggcccaaattcttgtccacaacggaccgcttcatctcagtgaaccgaccacggtcagccccaaatgccatagactgatcctggagatcacactccccaccctgatcacagattgggcagtccagcggatgattcatcaacaggaactccatgacaccctccctggctttctttgctactggcgtgtttgtcttaatcttcatccctggaagcgcgggcatggcgcaggaggcgacgggcttgggcgacttctcgacctcgacgaggcacatgcggcagttgccggcgatggagagacggctgtggtagcagaaccgcgggatgtcgacgccggcgacctcgcaggcctggagcacggtgaaccccttggggatccgcacggcgtgcccgtccacgaacacctcgagcgcgtcctccgggttgctggggagctccacccgcgcccctcccacgggctccctggggggcggcgtctccgggtccgcgggcgccaccgccgcgcccgcctccggcgaccccgccgccgccgtcggcgagatccagcggcacgacgcggcgaccgcgggcgggggaggagcgcgcgagcgcaggtacgggctggagtagcggatcgccctcgcgaagaaggccat

SEQ ID NO: 66331 - DNA, 210 bp, Oryza sativa
  Clone ID: PAT_MRT4530_67292C.1
atggcggcaagccactcacgccctgaccgtgtgtcaagcggcgtgaggcaggcatcagtggagctggtggcttgctggcctcctaggtcgtcgaaggaagcagccgacgagagacaagacgtcgtcgtggagtctccctgcacaacgagggacgcgagggagctgatgctgcgacgtgaggtggaggctgcctacaggagaggagactag

SEQ ID NO: 66332 - DNA, 450 bp, Oryza sativa
  Clone ID: PAT_MRT4530_67293C.1
atggcgccggatccagccaccataacacgacatatggtatttcccgatgtcgccgctagccaatgccgacaagaactcgctgtagctgccaccatcggtaccctgaggacactgacacaacaaggacaccagcacaccgagcaaagctcgcatggatgtagatgcaagctccatcagtatcgccatagccatgtgcacgctctagatatggtcgtcatcgggccgccaccggcccctctcttgaacctgaccagcctggtcggttccactcccgccgcttgccagttgctccaagaccaacgcaatgaaaatacagagattttcagaggccccgccaccaccatcttcgcaaccgcgtggttcccagaggccggctcaggtggcgccgaggggaaagcaaggatgtggacagtggtgacatgggatgagtgtctgcatgccataatatag

SEQ ID NO: 66333 - DNA, 715 bp, Oryza sativa
  Clone ID: PAT_MRT4530_67294C.1
attggcttagtgtttgccttataatagtcctaggcttgcttcctcggtttctttgcaaagtaatctatcagaccttttggccatctgatattcaaatagcaagagaagctgagttattaaaaaagctaccccggcagttgggttcaaggcctgcaagtgatatccgctgtcatccagtgttcggcgcagttgctctgtgatcccaggttgcgggttatgttgattcaattgttgagctgatttttgcccatttttttgaagaggctgaaagatgagatgaggcggctgtggaaaaaggtactgactgtgaatgggtaggcaccagacagcgtcgtccttcgggggccaagtaatcaagaaatgacaaatgtacagatatgggaaagggatacatacactctgtattttaaggtagattttgtggttaggaaataaataggtacatagatacaaaattctttttgccaatcttttgtattacttgattatatgttaaccatttttctttttcttccctcctcgtcaaggttttagatggagacttagtggtgtgtccaaatggaattttacgctttacacggtcacaagattgatctcctttcgtgacctatattcatactcttgctaaatttgacaccagtgaaccatttgaactttgaccggcgagctgtttcgattgcaaatgtcttctttaaaaaaaaaaaaaaaaaaaaaa

SEQ ID NO: 66334 - DNA, 432 bp, Oryza sativa
  Clone ID: PAT_MRT4530_67295C.1
ccccatgtttccgccccccttcctctctccctccggcgggggtgttcacgcagggaacaagcgacatgggcgtctacaccttcgtgtgccgcaacaacggcggcgagtggaccgccaagcagcactccggcgagatcgaggcttccgccgctaccccatacgagctgcagcgccgcctcgtcgccgccgcctccgtggccgactctgcctacggcgttcagtcgtccttctccatggtcacccccagctccgtcgtgttccaggtgattgtcggtgctgtcggtggtggtgcaatgatggtgagcggaggtggcggcggtggtgctgctgcatctggtggtgctgctgccgaggctcccaaggaggagaagacggaagaggagaaggcagagagcgacgacgacatgggattcttcctgttcgactagaagt

SEQ ID NO: 66335 - DNA, 595 bp, Oryza sativa
  Clone ID: PAT_MRT4530_67296C.1
gacccagcgaccgaatttttttgttcacccctccactagctgccgcggggctgcgggccgacgaggccgagaaggaattttggactttgatgagggagctgctgattgtgagtcaagaacagttgtgaagaggggtgacaaagccttttgcagcatggagtgccgggagaatttcatggaagatgagatggaagaaggggaacccgatctctctgcacctcctagcagcccagtcgccaacgatggttggattttccaactgatccagggaacgagcatcagtaaacaacttgatatggtcttatctgaagtgctgtccgaggttaataagttgcagccatggatgtgatcatatttcattgagttgttgcctgaagattttgtctgccgcgggactgatgaatttacctattgatttcttaattttacttacccggatcctggaatttttggaggagcctggaccgtaactttgcttccggtcatattattattttggtcggaaagggcgtgcgtctgagtttgaatttgtgtttggttgaaccttattttcaattcgcttgcatggtgacaccattgatcactatcatggatc

SEQ ID NO: 66336 - DNA, 542 bp, Oryza sativa
  Clone ID: PAT_MRT4530_67297C.1
tgatcgattcgaggatttggagaaatacatatcactaacagactattttcaaatatcaatatccttctctgtaaaatatggcttaaaagaaacgatctactttggcagaggttatgagcaagatatcgttgaatatttcatttcgacggttaattataggacctaagttagttgaatagaacgatttgatttctcaactagttaacataactctatcagacgaaaatgaccaattttgagtcaaatccatgtacaacgcaatcatcaactccaatgtaagaatctgcaagagaattttatggaaggtaaaggtatcactaaaaattgaaatatttatgtggtttctgcactaaaggtaatcttaaaaaaaagataaacctcactaagagaaaatggaggggggacaagcaatgttatttttataatacacaagggactatccaacatcttttttctggctaccatgaacaatatgatattatgcgcattgatgttacacacttggaattggtagccaatgagcttttattccagtttggatg

SEQ ID NO: 66337 - DNA, 317 bp, Oryza sativa
  Clone ID: PAT_MRT4530_67298C.1
aaaactcccataaacccctcctctaggagagagagcttagagctcaccgacgacacgagaacccaagcaacccccccacacccagctgagtagcggacgcagcaccagcagtcgcggggaaagggacacgtctagccgccccagcttcccgcctccctgccatgccgacgccgcggacgcgtccaagccacaggaacagcaaccactccgacgaacacctcgcctgcgcgatggaggcggcggcgctggacgcgatggcggggacgaggtgggggcaggtggctggcgcctcgagacggccgtgtgggcgcagggcc

SEQ ID NO: 66338 - DNA, 648 bp, Oryza sativa
  Clone ID: PAT_MRT4530_67299C.1
ccggccgggaactcctttatacacctcttctctctcctcccctctcgctcccgtttcttctacatcggcgagttcgcaacctcctccctccaggctccaccgccaatttcacccgcggcgagctcgccaccgccctgcggaagaatccgtactatgtcaacgtgttgcttgctggatatgattcggatgttggtgcctctttgtattacattgactacatcgcaacattccataagatcgaaaagggtgcctttgggtatggctcctacttctgtctctcgctgatggacaagttatatcgtccagacatgtcagtcgaggaagctgttgatcttgttgacaagtgcattaaagaaattcggctcaggttggtcgttgctcctcaaaacttcataatcaagattgttgataaagagggtgctagggagtatgccaggcgtgcatacaccgacagtccaccggaagctgcaacatcagaagctgcaactgtagcagcctgagttgtatctgccatatgggtgtgaaccttaggtttccgagtacaattgctatgtaatcacaagtactgggatctgagaactttgttgcaaatttacttcctcttttatttgtgttaaaaagaaaaaaaaaaaaaaaaaacccgcggcc

SEQ ID NO: 66339 - DNA, 1143 bp, Oryza sativa
  Clone ID: PAT_MRT4530_6729C.1
ttgcgaatttcttcatttaaatattaatttaaaatggatttattgcgtcagccgaggggaggggcgcgcggaccgggtccacgggagtggggcccacgcggcagcctcacggtccatggtggaccgggtgcacccggctcacaccggccggcgccgtgggtcccacgcgtcagccgcacccgagggcgcgggcggctgacggccgggccccacatggcagccgcggggcgcgcccgaaggcggccacgccggcacagccgacgggaggcggcgcacccgcgccccgatggtcgccgccggtgaccaccggcgcggtagagcggcgcccgagagaggggagggaagggggaaacgaatcggcggtccacagctcaccccgggtcgacggcgacgacgggaacggcgaccggagcggagaaagccggcggcgcggctcgggtagacggggacggcggcgttccggctgtcggcgggcgaaacggaggggtggacgaggtcggcgaggttgcggtgaaaccgaaggaggcggcgccgaagcggaagaaggtccggggcgacgacggcggcagaccggagctcggcggtgacggcggagagagagagcgacggcgcgagctcgattccggcggagagagggagcggcgagtggcggaaacggtggagggaggcacggggagtgtttatatagggttgggagtgagagagggcggccggatgagggggaaacgggcgcggaagatccggccgccattgatgcgccgacgaggtttagggggaaagattccgaacgaatccgagggagagagggagggaaaaatggggggaaagagggagggaatcacggggaatatttcccccctcttgattgcacgtggggcggacgggagcggcgggatttgcggcggcggcggcgctagggcacgggcgaggcggcgggagcggcgggaggaaggggatgatgggtgggccccacccgtcagcgagggtggcgggcgggcccgcccgtcagcggcgcgcgcgcggggaggaggccgaatgggccgcggggagaggagagagagggaaggagatgggccgagccggcccaagagggggagggggggaaaaagactttttagagcttttctttttataaaaccattt

SEQ ID NO: 66340 - DNA, 234 bp, Oryza sativa
  unsure (1)..(234): unsure at all n locations
  Clone ID: PAT_MRT4530_672C.1
actctttcttttatttaaaccattacttgacaggcatcaaatatggtttgattttattaatacacacaacaacaactcnatcatcatataatctcactaaacccatattcattcaacccaaagacaacgaactatcttcccacaaatatatccaaccacaattaaccacttttaaattacatttccccactttacttgtccaatactaaattggttgcttactcccagacgttt

SEQ ID NO: 66341 - DNA, 1181 bp, Oryza sativa
  unsure (1)..(1181): unsure at all n locations
  Clone ID: PAT_MRT4530_67300C.1
gcacgaggcctcgtgccgcacgagggcacccgctcaccgggcgcacgaggctcctctatacacctcttctctctcctcccctctcgctcccgtttcttctcacatcggcgagttcgcaacctcctccctccaggctccacttcccagacgaatcggcggcagcggcggcggcggcggtgatggagtgcgttatcggggtcgtcggccgcgacttcgcggtggtggccgccgacacatcggcggtgcagagcatcctggtccacaagaccgacgaggacaaggtgatggtgctcgacagccacaagctgatgggcgcgtccggagagcccggcgaccgggtgcagttcaccgagttcatccagaagaatctccacctgtatcagttccgcaacaacatcccgctcagcaccgccgccaccgccaatttcacccgcggcgagctcgccaccgccctgcggaagaatccgtactatgtcaacgtgttgcttgctggatatgattcggatgttggtgcctctttgtattacattgactacatcgcaacattccataagatcgaaaagggtgcctttgggtatggctcctacttctgtctctcgctgatggacaagttatatcgtccagacatgtcagtcgaggaagctgttgatcttgttgacaagtgcattaaagaaattcggctcaggttggtcgttgctcctcaaaacttcataatcaagattgttgataaagagggtgctagggagtatgccaggcgtgcatacaccgacagtccaccggaagctgcaacatcagaagctgcaactgtagcagcctgagttgtatctgccatatgggtgtgaaccttaggtttccgagtacaattgctatgtaatcacaagtactgggatctgagaactttgttgcaaatttacttcctcttttatttgtgttatttatctgtttaactgtttcatgttcgtgaatgctgtgcaactggattttatagacatctttctagttcgtcctggtgtcattacatctttcttctcttgcgtgtctatgactttattattacctttatctttatctgtcatcgtgtcattctactcttgttcgtatcgttcttctctgtcactctctcctactgtttacttactactgtgacccttccacgtactttgcgtgtattctnctatcct

SEQ ID NO: 66342 - DNA, 450 bp, Oryza sativa
  Clone ID: PAT_MRT4530_67301C.1
atggcgcaacagacatggctgtggagtaatggccgcggggccattcccaccatctcaagtggaaccgttggactggcgacccgatggtggcctagatcgggtagccccggcgaatcgtcaacggcggcgggcgcggcagtctggatgcgacggctgcgctgcattggcggcggcggcgattcgtcggcgacggcgggtatggctgtctggatgcgacggctgtgctgcatcggtggcggtggcgattcgtcagggtcggagggcaacggcctcgatgcgacggcggcgctgcatcggcgggaggccggcgatggttggatgccgatgaaactgatgaaattcaaggataagcgagcaaccctcacaactggatggaatgctttggttggagccaatcttttcgagcaagctgatgtttgtgtgtttctgttcactgaagttccgatgtaa

SEQ ID NO: 66343 - DNA, 896 bp, Oryza sativa
  Clone ID: PAT_MRT4530_67302C.1
attattttgaaaaggaaaagggaattattgcgtcatcggctaggattcacggtggaccgggtgcacggcggcagctcacaaaaacgaacggccgagatctatccatccaaaaggaacagccaagatccatcggtccacgaccggtctacggcggacggcaacgatgacgtcggcgatgatgtcatcaccggcggcgtctcggcctcgtgtgctcgccggcgaacgacggcgcggcggtgcgaacggagggcaccaacgggttgcgggcatcgtggcgatctcaccagtgacctaagaagaagcggcggcgaccttcggcttggcgacggcggcgatgttccggcggtcgacggcgacgacgaaggggcggacgaggatggcgacggcttggcgaccacgacggtgagctccccgagcagtgacgacgaccggagcgacggcggcgcacggctggagctacggcggcgacggcgacgcgaagctacacggggctagggcgctatcgacgacgagagacgaaggcgagggtggcgacgggtagcggcgggcttggagaaccttttataggggttggaaggcggccggcgatgggatggaaagattagggttcggcggagagagacgattccgattcgagctcaaatctacggatttccaaaccgagataggcgatgattccaaaagagaaaagatagaggagatcgagaagatcatttcccctctattgatttcaccggaaacggaaaggagcggtgggacccacctgtcagcgaccgagggcgcgcgcgcgtggcggctgcggccgaactgggccgactgggccaagggagagagagggagatttgggccgactttcggcccaaagccaaaagaggattttaaaaacctttttcaat

SEQ ID NO: 66344 - DNA, 413 bp, Oryza sativa
  Clone ID: PAT_MRT4530_67303C.1
attgaaatccaaatacccaatattggcaagtctgaaaatgattgatagtttattcaatggttcttaaaactagcggaaccacactattgtataaaccaccttataaatacagacatgggaggaacggtgctgggcgccccctacagcctgagagtgggaccttgactggaggcatgttgaacatgcatcgcatctggatcttcatccacattctctgctgatgcccgagtccaaaacagatgacttgttgcatgctctgcattatccggaaacaggtgcaacaccggaactgaagaatgatgccccaccactgcatgcaacattgatactggaggagctccaatggctaacacatgaacatggatgaaggggtacgcatgtctaacatactgatgatggactggctacaccga

SEQ ID NO: 66345 - DNA, 396 bp, Oryza sativa
  Clone ID: PAT_MRT4530_67304C.1
atggcgccgtgcgccgccgtcgctccggtcgtcgtcactgctcggggagctcaccgtcgtggtcgccaagccgtcgccatcctcgtccgccccttcgtcgtcgccgtcgaccgccggaacatcgccgccgtcgccaagccgaaggtcgccgccgcttcttcctcgtcgccgacgttgtccggtcatcgtctgccgtcgtttaggtcactggtgagatcgccacgatgcccgcaacccgttggtgccctccgttcgcaccgccgcgccgtcgttcgccggcgagcacacgaggccgagacgccgccggtgatgacatcatcgccgacgtcatcgttgccgtccgccgtagaccggtcgtggaccgatggatcttggctgttccttttggatggatag

SEQ ID NO: 66346 - DNA, 2589 bp, Oryza sativa
  Clone ID: PAT_MRT4530_67305C.1
atggggatcccggaggtggtggtgccgccgagggcggccggcccgcggaggtacaaggggctcgtgccgtggcgcttccagccgggcttcgtcaggccgcctccggtcaagccccctgccgccgccgccgccgttgccggaggaggggtcgcgggcacgcccggcggcaagggtcgcgggttgggggcgtcgggggaaggcgtcgggtccagtggaggccggggagatcctcaatcgaggagatgcacccgcagcgcgagcgcgaagggctctggtgatgcgcggagcgtggaggagggcggtccccgtgttgccggagacgacggcggttcgggcaaatccggcgtcgcggcggagggctccggatttgagggtttgaggaatggcaggggcggtggcgttggaacggcagctgccgaagattgtggtttggagaagtccaaccccgatggcatcgtcggagatgctgatgtgcatcttgagagcggcagcgatgcaagagatggggaatgcgtttctgagggtttgaagaagccttgtgtaaataatagcaatggttcttctgccgcggattgcgcgccgaaggtgaaaaagggaaatgacagtggcaatggaggtgccgatgagtgtaatgctgcagccaaaagtagcaacttagcatgtcctggcaacaatggcgacgaaacgaatcgtaaggggcggaaggtagtacttccatggaggttccaggttgggttcaagcggtcgttctcgaaagctttctgctccgatagtgaatcttcagggccctctggtactcaattctacagagcccaagactcttcgacaccgtgcactccagcaacaagaagttctgtccggtgttatgcgagtgctcattctggtgttagagtctcggccatgcgtgatttctcagtgaaaggtgagaaggaaacatcaactccatataagaagagcaaaactggcatggatggtcctagtcaagggatgccaaagaatggagttgtcctcgctagggaaaacattatgggatctctgcagaattttcgcttaatttacagggaccttttggatgaagaagaagagaagtcgacagaagcagtgattagacctgatctacaagcttacagaattttcagggagcggttcatcacagactgcgatgagaagaaatatattggcaatgtgcctggaatcaaagttggtgatatcttccacttgagggtagagctttgtgttgttggtcttcatcgcccacaccgggtgggtgtagatcatatcaaacaggaggatgggacttgcatagctgttagcattgtatcatatgcacaatcttccgatattaagaataatttggatgtcttggtgtattctggagcaatgacagctatagccaatcagaagatagagggtaccaacttagcactcaagaagagtatggacactaacacaccagtccgtgttatccatggtttcgtcactcacctcaatggaaactgccagcgaaagaagatccctacttatatatatgggggtttatatatagtcgagaaatactggagggagaaagagggtaatgatcgttatgtttatatgttccgactgagaagaatggcaggtcagaaacacattgacatccaagacattctgaattcaggacaagctgaatcatatggtggtattatcataaaagatatatcccgaggattggagaagatccctgtatctgttgttaattcaatatctgatgagtacccaatgccctatcgctacattgcacacctgcagtacccccgtaactaccagccagcacctccagcaggctgtggttgtgttggtggatgctcagattctaaaaggtgtgcatgtgcagtgaaaaatggtggggagattcctttcaatgataaaggccgcatcttagaagcaaaacctcttgtttatgagtgtggaccttcatgcaagtgccctcctacatgtcataacagagttggtcaacatggccttaggtttcgtttgcaagtcttcaaaaccaaattgatgggctggggagtaagaactcttgacttcataccatctggaagctttgtatgtgaatacattggagaagtgttggaggatgaagaggcacagaaaaggtcgaccgatgaatacttattcgctattggtcataattattatgatgaagccctttgggagggcctatcaagatccataccctcacttcagaagggtcctgataaagatgaggaagctggctttgctgttgatgcttcaaagatgggcaactttgcaaaattcatcaaccatagttgcacccctaacctttatgcacaaaatgtcctatatgatcatgacgacaagagtgtacctcacattatgttctttgcctgtgaggacattccaccccgccaagaactttcataccactacaactatacaatagatcaggttcatgatgccaatggtaacatcaagaagaaaaaatgtctctgtggctctatagagtgtgatggttggttgtattaggcttgagagtgtactatttccagaggcataattgaacttctttcattgggcatgaaaaaaaaa

SEQ ID NO: 66347 - DNA, 456 bp, Oryza sativa
  Clone ID: PAT_MRT4530_67306C.1
atggcaaagaaggagccgaggacagcggcggcgggcggggacagcggcgagggagtcgaggacggtggcgatgggcggggacaggagaggcaaatcaaagcggtggcgggcaaggacgggggagggaactcgcgcggagcggtaacggcgagcgggaacggcggagggggagctaaggacggcggcaacgggcgaggacgacggaggcaggcaagggacgacggagggggagccgaggacggcggcgacgtgcagggatgggagaggcaactcggagtggcggtggtgggcggcgacgatgacgaaggcaacttggcatcgcgcccatttgcgtcagtcgcttcagcctcgtcatctccttcaccaccgatgccgctgcgcgcctttcccttcgcacggagagccagcctcccccctgccgtctactccatcacaccgtcgcctgtcgactgctag

SEQ ID NO: 66348 - DNA, 243 bp, Oryza sativa
  Clone ID: PAT_MRT4530_67307C.1
atggatgatgggagaatggtgcgttttctgctgctgctgctgctgctgctggacatggtgatgggtggtagtagaggagaggaggaggggagttggggccatggaggagtggtcaaaagttggcatgatagagggggaatatttggagaggggcgacgatctaacaatttcttggaggtgaccattgttttcgtttacgtcgccgtcaccttagaagagatcgttctttcgccgtcaccttag

SEQ ID NO: 66349 - DNA, 243 bp, Oryza sativa
  Clone ID: PAT_MRT4530_67308C.1
ctacaagaatcaaatatttgagaaatattaataaacgacaattgagttttggtttcattactaggtacaaagatgaatgtatttgccaatgaagtgagtatttacctgataacatacttgattcggcaatatacataaagctctgcgagagattaaacagaattgtctgcaacataaacagatgtgtctggaacatatgtgtgatgcaaccgtatgctagatatatactctgtaactaccaat

SEQ ID NO: 66350 - DNA, 352 bp, Oryza sativa
  Clone ID: PAT_MRT4530_67309C.1
atggagtttggatgggtcctgcgacggtctatgcggcttccggattcacctaggcacgagaggggactacccgctgccttgcgatgagtgggggtgaaacctgaggtgtggtgtgcttggttagagggggttatgcgaaggatcctgtcacggcctctatccgacgtggatctgtatgtcaactttgtcgtttgtgtaccccggccagtcctggacagggattttaatgcacactatgcttggaattctattcgggaatttctgggcgtgacaaacaccgaccaagcaacacagcccaagcggccctcaccattgtgctgctatcggcgtcggtcacccggaagcctttcca

SEQ ID NO: 66351 - DNA, 396 bp, Oryza sativa
  Clone ID: PAT_MRT4530_6730C.1
atgtcgtgtggcttgcttcgatgcggcggcatgccaaagccgcccccgccgccgcctaacacctgcctcaatgcggcgcaacgctgccgtcatgccatctccctggcctctgatgttctccttgggcagggtcgccaccgccgtcgcctgttcccctcggccactgctgttctccgtgggggcacactcggttgcatgccgacgggacggggcatacctgcccccactccgcctgacataggacaggatgtgggtgcactgccacccgtcccatctgcctgcgaccgcacctcctgctctgctcacttggccgccacgtggcagccgggtgagggcctcggggtggtgtgctccaagggcccgaggggtgtgacgaggcaccccgaggccccctag

SEQ ID NO: 66352 - DNA, 453 bp, Oryza sativa
  Clone ID: PAT_MRT4530_67310C.1
atggcagttaaggaccggttcgcgggatgccctggaagaacttatcgcaacggtgggcgtgatggagcggggcgggccctgcgacggcctctgtcgcttgcggattcacctaggcacgagaggggactgcccgctgccttgcgaggagtgggggtgaaacttgaggccgcggatccggcggtggcgcacccggatccggcggcggcgcggcggccggcggtggccagagcacggaggctccccgcggctgccactggcgtcctccggcgcccctctaggcatcagctggcgttggtggagaggaagacggccggatctggctccttgcccagatccggcgcgtcctcaggtgggaacgggcaacggcgatgcccttgggcgccgttcaccttcttgaaggcgttgctactggagccctcgttcaactccacttcaagagttttctccgggtga

SEQ ID NO: 66353 - DNA, 548 bp, Oryza sativa
  Clone ID: PAT_MRT4530_67311C.1
ccgggctgcaggaatcggcacgaggcggagatggcgccatcttccctcctcatcatcttcttcctcctcccgacctcccgctcctccgcactagtccgaatccgagctccaagtcgtcgagcaacctcaccgccggaggacaccttccgccgctcgccgtcgccgccgccgccgccgccgcggtgagtttggttctttcttcttgctgattgattgattcttcggctgatgcaatgcgaccagcagcagcatggcgtagcggtggtgggcatggcggcgcaccaggggatggcggcggcgacggcggcggaccggttctgcctgccgaggatggcggcggcggcggcggccgcctcgcaggtggagaactggggcgactccggcgtcatcgtcagcagcccgttcaccgacgacacctccaccgacctcgacgacagcgccgacaagcaccacctccacgctctagtggtgccactgccaccagctacctcctctcgccgccgtctttcttggctggctccactcgtgtaatgcggtttctcgtgcta

SEQ ID NO: 66354 - DNA, 895 bp, Oryza sativa
  Clone ID: PAT_MRT4530_67312C.1
cgacacgaggcctcccgccctgctcgccgatctcgtcatggcagctccaaatccttctgctactatggcggcggcggcggcgtccacgccggcgagggcttggtggcgggcggctgctccggcgagtgcctcaactgcagctgtaagctgcttccgagttggggccaagagcctcacagggcttcagatgacaagcacccgcgcgaacaaagttcggacagttcatgtcaaaagcggggaggcagaaggaagtccaagcacagagagcatcacccgcgacgaggaaactctgcagcgtgacttgcaaacagcgattcaggaagaaaactatgcccaggccgcgaagctcagggacgagctccgagtcctccaggaggacagcaggtcagcagtgctggcagcgaatgcgcggttctacaatgccttcaagaacggggatcttgtcgcaatgcactcggcatgggcgaagggcgaccatgtgtacgttgttcatccttcggcaggccggatatcgggctacgacatggtgatgcagagctgggagatggtgtgcgacgcggactacgagttccctctccagattgatctgcaggatgttgaggtccatgtgagaggtgatcttgggtatgtgacctgcctggagctggttaagaccaaagggagcagcagctggggaaggcaggttgcgaccaatgtgtttgagaagatgtattttgccaacagatttttgccggttgttacagcatccaacctgttcattgctttagctaacgtcgatttgatgatgaaactccccaaggctcgtgatcaggggcatcaaaaagaatcatgcacattgcaggaagctgcagttgtaggggttgcacaggttgagcgacaatcaaacagattttaa

SEQ ID NO: 66355 - DNA, 1860 bp, Oryza sativa
  Clone ID: PAT_MRT4530_67313C.1
atggcacagtatcgttatagggtagttgtggatgatacttcctatgagttcagcatgcttaggacaattcctcagagcttcaccccgtgggatgatagagcagttcaacagagcacctcctcttcgtgtgagcataagaggtatgagcagaagaaccaactgcaggataagataaggaagcaacttcgggaagttcaattatcaccatcttcatacgacacggcatgggtagccatggtgccagtgcagggctctcatcaaactccacgcttcccgcaatgtatcgagtggatactgcaaaaccaacatgatgatggatcttggggcacaaacctgccaggactgaattttattggaaaaaatttctgggttgccatggatgagcaaactattgctcctgtgggttttaacattaccttttctggcttgcttaaccttgccactggaacgggtttggaattccctgttatgcaaacagatattgatgggatttttcacatgcggaagattgaattggaaagggatgcttatggtacagcttcatcaagaagagccttcatggcatatgtgtctgaagggttgggcagcctacaagattgggatcagcttggcatggtggatactcttgaaaagatgggtatctctaataatttttcttgtgaaataagtgatatattggacatgatatacaggttatggatacacaacgaggaggagctaatgttggacatgggaacatgtgcgatggcatttcgcctactacgtatgcatggttatgacatcagttcagatggaatggctcaatttgtggaacaatccagctttgatgactcaattcatggatatctaaatgatactaaggctttgctggagttgtacagaagttcacaaattcgttgcttggaagatgatttgattctacaagatattggttcttgccatgcaaaagagaaggcaattatttctcataatgccattatcatactttcgcaggtggagtatgccttgaaattcccagtctatgccaccttggaaaggctagagcagaagaggaacatagaacaattcaagaccaaggaacaactaaaaattgagggcttcaagctgctgaaatcaggataccggtgggacgggcacggtgagattggcttctcctccgagtgtgtagagattctattctatgctatttacaacacgagcaagcagattgcggaaaaggccgtgccgctgcagaaacgcaatgtcgtggatcatatcgccgaatcgtggtggttcacagtgaggggcatgttgaccgaggcagaatggaggatggacaagtatgtgccaacaacagtggaggagtacatgtcagctgccgtggactcctttgctctaggccccaccatcacctcagcggcattgttcgtcggaccagagctctcggaagaggttttcaggagcaaggagtacatccacctaatgaaccttgcgaacactatcggccgccttctcaatgacatgcagacatacgagaaggaaatcaaaatggggaaggtcaatagcgtcatgttgcatgctctttcccacagcggcggcggccgcggctcaccggaggcatcgatggaggaggccaagagagagatgaggagggttctccagggtagtaggtgtgacctcctaaggctggtgactagagatgggggggttgttcctccaccgtgcaggaagctcttctggttcatgagcaaggttttgcacttcgtctacatggaaaaggacgggtatttcacggccgatgggatgatggcatcagcaaatgcggtgattcttgatcccctgcaagtgacacttcttccatctggtttgggaacgctgtga

SEQ ID NO: 66356 - DNA, 293 bp, Oryza sativa
  Clone ID: PAT_MRT4530_67314C.1
ttggacaggacgccgctgagcgggaagaagggcgtcgtcgtccgcgcgaccgccgcggcggcggctggcgtcgacgccggcgtcgggcacgccggccgtggcgaggtggcgcaggtcgcactcgtgagagcgcggcgtcgcgcgccatgtgtgtcggtagagctgtaacgaccaagatcatcatccaaagacaagtgtggtcttaattctctgtgttcgtgaattcttcttcgtttcatgtgccttcgattgtgaatttgtgatcgattcgctgcttcttggcgcttgaggtg

SEQ ID NO: 66357 - DNA, 2460 bp, Oryza sativa
  Clone ID: PAT_MRT4530_67315C.1
gctgctctccctctctgtaaggcagcgtgtgttatccggctggagagtagcagggcgcgttggccggtgggagtagagtggctgctcttctctccctcccagatctccaccccctcggctccggctcactcgcctctggccgacgaggagggccacgggcggagcgaagcgaagcggcggacgggcgagcgaggcgggtgggcggggagcaaaccaacggcgacctctttccctcccgcatgcatcccgttgtctctccgctgccctcttgcgtggatctgccaccggcgcctggatcccatcctctccgccctcccctcgcgcggatccgccattggcgttgacgggaggggtggatccggtgacctcttctcctcccgcatggatcccgtcatctccccgctccctgctcgcgcggatccgccgctagcgacaacaggaggggcggacccagcagcctctcctacggtgactacaacgattggtggacgtgggctgacccagttcccggcatctgctgcggcggcgacagcgaagttgccgaggatggcatcacgtgcgacttcctgctcaagctgctccgggcggggagcatggtgggtgccgacgcggctctgctgcaggagctggaatccagggcggtgcatacctcgcctagtcagctctcgaggccgggctgcggccgactgacttcgaggagatctcgcccgcgccgtgcttgccaacgaccgacgtccttgaggggatcgatggcggcggcaagcggggccggagtggtgacggcggcgtacgtgcggggctagagacagatcggtggcgtacgggaggcgggcgctggagcgtccaccaccccctccagctccacctcctgcgctgcctctcccttctcccttctcggacactagcggcgcttcggcaagcgatggcggaggtagaggagtagcttgaaggcgtggaggacgctcccgagctcggcggcggagggtgggcgagatcttcgtagcgctgcctctctcctttcccttctccaccaccggtgatagcctcagaaggcggcggcgcttcggttagcggcgatgcaggtagaggagtatcacaacggcgcggagggcgcccacgagctcggcggcgttgcgctccaccgacgccgcctcccatgaccgcgccatctcccccaacgtttttacgctcctccgcctcgactactttgccgccactgccgaggccaagctccccgtgctcgtctggcgacgccgtcgtgggtgtggttccagcaacaacgccgactggatcccccgcctcctgcccgccgccgccgctttggtcctcgcccgcatgccgccgtcgcctccggggcccagcggcgcaaccgacacggccaacgcggccggcggcgacgcaacgctggctgttcctccgccaccgccgctgctgaccggaacggccgttccgccgcccccgccggcagctgcccagccgcaaccacagcaagcaacggtggcggagggtgacccgccgccgccagcaaccggtagtgcagaggaggtggccggcaacggcgagcctcctcaaccgcccgccactgatccggcgagcgaacccactgcgccgccggaaccacagcgagcaacagaggagaagaagggtgacgagccaccaccaccggcatcaaccggagtgaaagaggaggtggccggccatggccagcctcttccaccgcccaccagtactccggcgagcgagccccctgcgccgccggaacagccgttggaacttcctccgcaacctcttccgccgccacaagggctcactgcgcgacgccgtgaaggccgccgctctcacgaagccgcggaaggaggaggaggagaagagcaagaagaccgccgggcccgatgaagccagcaagctgccgccgccgccggctccacctcccgctcccgacgatgacgcggatcgcccaccggaggacggtaaagccaaagaggagcagaagccgtctccggagacgaaggacaaaaagccaccggagacgacggggaaggacaaaaagccggcggacccggagctggggcaagcgaaggagaagacgccggcgccgcagcaagaggaggagaagaaggagaaggaggaggagacgccagaggcgaaagcgcagcggctagaggaggagaagtcacggcggaggtggaaggaacgcggggaggcgctcctgcaggagaaggtgaagaagcaggcggtcacctactggtgggccgcccagttcggcctcccgcaccgccgcgcccccagcgcggcggagccccgcgggtcggaggagatcttcgccgagttctgcgccagcggcttcctctcccgtacttctctccactcacaccgccatattttggctaaggaagggcccatctgcgcggcgcgcggctgtcagggttactcgaccgcacatgcccacccgcgcacgca

SEQ ID NO: 66358 - DNA, 390 bp, Oryza sativa
  Clone ID: PAT_MRT4530_67316C.1
atggcggagaggagtatcacaacggcgcggagggcgcccacgagctcggcggggttgcgctccaccgacgctgcctcccatgaccgcgccatctcccccaacgtttttacgctcctccgcctcgactactttgccgccactgccgaggccaagctccccgtgctcgtctggcgacgccgtcgtgggtgtggttccagcaacaacgccgactggatcccccgcctcctgcccgccgccgccgctttggtcctcgcccgcatgccgccgtcgcctccgctgtggtcctcacccacatgccgttgtcgccgccgctttggtccttgcccgcatgccgccgtcgccaccgctgtggccctcgcccgcatgccgccgtcgccgtcgccactctga

SEQ ID NO: 66359 - DNA, 3225 bp, Oryza sativa
  Clone ID: PAT_MRT4530_67317C.1
atggacgggcccagcggcgcaaccgacacggccaacgcggccggcggcgacgcaacgctggctgttcctccgccaccgccgctgctgaccggaacggccgttccgccgcccccgccggcagctgcccagccgcaaccacagcaagcaacggtggcggagggtgacccgccgccgccagcaaccggtagtgcagaggaggtggccggcaacggcgagcctcctcaaccgcccgccactgatccggcgagcgaacccactgcgccgccggaaccacagcgagcaacagaggagaagaagggtgacgagccaccaccaccggcatcaaccggagtgaaagaggaggtggccggccatggccagcctcttccaccgcccaccagtactccggcgagcgagccccctgcgccgccggaaccaaaacagcagcagcagcagcagcaagcaggcgacgcggcgaagcaggcggcgccgtctgccgacgacgaggacggaggtaaaaagaggcacagccgttggaacttcctccgcaacctcttccgccgccacaagggctcactgcgcgacgccgtgaaggccgccgctctcacgaagccgcggaaggaggaggaggagaagagcaagaagaccgccgggcccgatgaagccagcaagctgccgccgccgccggctccacctcccgctcccgacgatgacgcggctagccgtagccggtctacgcggaggaggctcgtgaaagtgctacgggccgtccaattcatcacgcggttgaagaactggaggaatcgcccaccggaggacggtaaagccaaagaggagcagaagccgtctccggagacgaaggacaaaaagccaccggagacgacggggaaggacaaaaagccggcggacccggagctggggcaagcgaaggagaagacgccggcgccgcagcaagaggaggagaagaaggagaaggaggaggagacgccagaggcgaaagcgcagcggctagaggaggagaagtcacggcggaggtggaaggaacgcggggaggcgctcctgcaggagatcctcgaggccgccttcgaagcgctgctcgccggcgagttcaacaagctcaaggatcagtggcggcagtgcctcctcaccttctccttcttccccgtcaaccacaaggtgaagaagcaggcggtcacctactggtgggccgcccagttcggcctcccgcaccgccgcgcccccagcgcggcggagccccgcgggtcggaggagatcttcgccgagttctgcgccagcggcttcctcgagccgatcaccagccgctgcagcggcgcgtcccacggctgccgcgtgaacccgctcgtccactggatggtgaagcggacggcgaggggcgaattcgccggcctggaccagcacggccaccccaccgtcgatccgggcgagtccagggtcctctgcctcacggcgagccaccgcgagcttctacagaggctaggcagggccgacgagtcgccgtcggcgccaccgtccccgacgagaaaactttcgaaagtcaaaacgcccagccaacaagaccgtcagcaaaaagaggcaaaagaagaccgtcagcaaaaggagccaaatccaacaggaacgccctccaaaatagccgtcagcaaacttgagggcgagacgacacaaaagaagccaaacccaacaggaacgccttccgaaatggccgtcagcagacttgagggtgagacgaagcaaaagaagccaaacccaataggaatgccttccaaaatggccgtcagcaaatttgagggcgagatgaaggagcaacaaaatgaaaatgacaagatcaatctcaagcttgagctccagaagtttcaaaacatacatgtaatcctcaacatcaatgcacatgtgtatcggctcccatattgcttgttatcctttcttggcgatcgcctggtagtcctacaacttggtcgatggtggaactccgataatagcacatacttggaggtggaggggctagagaaactgaatgccatcggcaacctcaagaaactccgataccttggcattcgtgggttgtcaaagctgacggagctacccaagaatgtcaacaaactacaacaacttgaagtcctggatgttcgtgggtgccaaaacctgacccatgtgatgtcatctactgtcaggaaccttaggcagttgacccatttggatctcactgaatgctacatgctggagcatattggatgggagatcacctccctctcagagcttcaagtattcaagggttttgtctttggcattgatgcaccaaggagatatgtattccaatgtcgagataggcatgcgtgtcatttgcaagacctcaaggcgatgaagaatctccaaaagctcagtatcaatgttacaactgatgcaaatgttgacaagaatgatatggggcaacttaagcatcttgaaagcctccaatcactaacaataacatggggtgagttgccaagcatcttaacatctgcagaaagagaaaatgagaaaaagcaactccttgagaggtggactagcctagtgttgccgttaagtcttgtgaaactagatgtccgatgctatcccagtgaagagatcccatttgagtggtttgaaccaaaaggggccattaagcccaaaaacctcaagaaactatatgtgagaggtggagccgttaagaaactaaatcttcccaaagataacaatattaagactctgcgcctaagatatctcaaggaatttaaaatgaaatgggaagaaatattgggtatgatgaacaatctccattatgtggaagttgtttacaaggatcctaaggtgatgaagagtgaaaagataaaacatcaaacagataatgtcgagctacaacctcacataattaaggagaaggaaaagaaggtaaaggaggaagaggaaaaatgtatggcggagatcaaaaaaaatatgaggataccagattctaccttggatgagcatggggtgtggaagaaggatcaaaaggaagctgatcaaaagaaggcaaaggaggaagaggaaaaacatatggcggagatcaaaaaaaatatgggcataccagattctaccttggatgagcatcgggtgtcgaagaatgatcaaaaggaagttgatcaaaacaagaagggcaaaggctgtgagggtgatggggatggaagcaaaggtacacacttcacctactatcttgcctttaataaattttga

SEQ ID NO: 66360 - DNA, 499 bp, Oryza sativa
  unsure (1)..(499): unsure at all n locations
  Clone ID: PAT_MRT4530_67318C.1
aacttgggtgaagcttgcaaaaaaatgggccccctccgtgaatgggcgttcgtcngggcaacaaccgtccgctcccttccanggggctcaaantccacccgccgggcattgccccgtcgccccgcccgctcccgggcaactccaagcttcngnaacgtcagcaatggcggcagggatcangttgcattgccaggtgtttgcccgantgaaaggcatcccanaaatttcnaaaancctctcttacctgccacccgctcacccgtgggaagaactcctgaaancanatngaatttcctcctccgttccaaantggggtnccctgcctccnantttcancaaagtcnggatttgtctacccgtganaaaccacaaggtcncccnggatactaccaaaggcngggntctgggaccatgtntgaaaacttgccccattgtttcgggatgcacccgacnccaccccangtttctcccaggaactccaaagaaggcccanaaaagn

SEQ ID NO: 66361 - DNA, 640 bp, Oryza sativa
  Clone ID: PAT_MRT4530_67319C.1
ctagccgtccgaggccgccatgcctccggtgaccgcagtcaccgccaccgcagccgctgctgccgaacacaccaccgtgcctcctcccaccgtgccacagcagtcaccggtcagccgcacaaccgcggcagccaccggcaccgccgccgtcgagcctcgcgccgccgtcgccgccatgttgccgttgtcgctcgccccgctgccgcccggcccggcggcgcgagctccgtctcccgcgcacatgtcctcgccgcggcagctgccgccagcagccgtgcaagcgtcgtcaccgccgcctccgcctccggccggatccggccaggagatggccagatccgacgaaggtggcgccggatccgccgtctcctcgctgggatgggccgccgccgtcgctcccccaaccgccgctgttcgccacctctccatgcttgagaggggtcgccgccctggagggagccccgtcaccgccatcatggctcgcccgccggctttccagcggcggcgagatggctctcacacaacgccgattcgaccgttcgactcaatattccttacgggcttgtcccagaggataaaccagtgcattctccataaaagtggccagctagctctagccaaaaagcattacgaactatgttga

SEQ ID NO: 66362 - DNA, 1245 bp, Oryza sativa
  Clone ID: PAT_MRT4530_6731C.1
atggcgccggcgattttggagaagttctcgatgaatcttcggcggagaagatggttagagctcatcaaggattatgatgtgggaatccactatcaccctggtaaggccaatgtggtcgcagacgcgctgagtcgaaaaagccgttgcaacactcttggcgtccgtggcattccaccggagcttaatcaacagttggaagccctgaaccaaagcatcgttagccatggattcttggctacacttgaagccaagcctaccttgctcgatcaaatccgcgaggctaagaagaatgatccagatatgcatgggatcctcaagaatatgaaacagggtaaagccgctggtttcacagaagatgaacatgaaaccctatggaatggaaatcgtgtatgtgttccggacgacaaggaacttaaacagctgatacttcaggaagctcacgaaagtccctattccatccatcctggcagcacgaagatgtacttggacttgaaagagaaatactggtgggttagtatgaagcgggaaattgcagagttcgtggccctttgtgatgtgtgccagcgtgtcaaggcagagcaccaacgaccggccggacttctccaacctctacaagtaccagaatggaaatgggatgaaattgggatggattttatcaccggacttccaaaaacccagggaggatatgattctatatgggtagtcgtggatcgactaaccaaggtagctcggtttattcctgtgaagaccacctatggagggaacaaactagctgaactctacttcgctaggatcgtaagtcttcatggcgttcccaagaaaattgtatctgataggggaagtcaattcacctctcatttctggaagaaactccaagaagagttggatacccgattaaatttcagcaccgcgtatcacccgcaaaccggtggacagaccgagcgtctgaaccagatcctcgaagatatgcttcgcgcatgtgtcctagattttgggaagacctgggataagagtctcccctatgccgagttctcctacaataacagctaccaagccagcatacaaatggcaccctatgaagcgttgtatggccgcaaatgccggacaccactgttgtgggaccaagtcggggaaagccaagtgttctggaccgatatcctgagagaagctgaagctaaagtcagaaccattcgggataatctaaaggtggcacagtcccggcagaagagttatgcagataactga

SEQ ID NO: 66363 - DNA, 649 bp, Oryza sativa
  Clone ID: PAT_MRT4530_67320C.1
ctgctgccatcagttttaccaaatgaaaggtttggaaacctgggaacaacatgcccggcaagcgtacgagttctttgataaggagggtaaccgaccaattgtgatcgacgagctcgcatcggaacttggattgggtccttcggttcccctacatgttgttctccaagattggatcagacatcctgatggaaaactcagcttccttgggttcatgaaactattgcatggagtttcttcgcgtaccatcccaaaaacctgagataataacttattttcttacatcaaccaaggcaaaagtgtgatgactaaactaatctctggctgtctggagaagcggcatggaaccagtacaaagattaacaaagctgtcctagtgtaacaagtgaaaaagctctcctgtcaggcccgcgaatttcgccttctcttaccagatgattgatgttgtgtttgtattcaggtttgtttagaggtgaatgtacagatgagtttaggaaacaggaaaaatgaggtgctaagaaagtgaaacatggtttaatttcgattggtgtaactgtgtgcgtttgatcttcgccgatctgtgaatgtcgtgattggactgaaattgagaagtgaggtggtatcagtaccccattcgtatataaaaaccaaa

SEQ ID NO: 66364 - DNA, 455 bp, Oryza sativa
  Clone ID: PAT_MRT4530_67321C.1
ggaccatgggcaaatcacacaacaaatagtgtcatccctccattatgtgtgatctccacaccagcatacagcaattaccaaacagaaagaaggagacgagctagtacagtttttaactagacgaaaagaacaactaaaactacttgatcccatgatcttcccattctttgttcttccagccacaaaaacctgtctcttcctctgcttcagttcctccagtcgattccctgtttccttcctttgctgatttgtctcacacctccagccgtcttctatcaaagttccagccatacttggaattatataatctcttttgcaacctgctttagcaagtcgaagtgtcgaacccacattgtagacttctttggccttccaccgacctcacttgtaatgttttactcaagcccactccataccacttgtacaatgcttcgatctctctatgatatttggct

SEQ ID NO: 66365 - DNA, 2274 bp, Oryza sativa
  Clone ID: PAT_MRT4530_67322C.1
atggtcagagggaaacaatgccaaagatcaaaggtcaaaagtactcattgcccggcctcttcggtgactccggccggtctcaccaaggtggtcaccatgttcggcgccgtccccaacgatgtcgccatgagcctccgcaaacgagctcggatgatgccccaggtctatcaccaggtgggcgtgctgaaccgctacaaggtctacgacgtgtaccctataatttttcgctggtgtcatacatgggtttatggggttgaagccacaagccgctaccaactcttcaagcatgctttgtttagagaactttcacatgaatgcttaactaccaatcctttgacccaaataccacctaatataagcagcgctggctttgaggacaaatatttgggatttccaacgcccgaaggtagaatgaataaaggcaaattccaaagtttacaagagaaagtttggaagagaattctgctatggggtgaaaaccacctttctgttggtggtaaagaaattcttattaagtctgtccttcaggctattccagtttatgtcatgggcatcttcaagatcccggactcggtttgtgatgaactaacaaaagccgtccgtaacttttggtggggcgccgacagaggaaaaaggaaaactcattggagggcttgggacaccctgattaaaccgaaacagtgtggaggtatgggttttcgagatttcaagctttttaatcaggcgttgttggccaggcaggcttggaggatcttggacaacctgaacagcttatgtgctagagttttaaaagctaagtatttccccaacggttcgattatagatacaagttttggggggaactcttccccaggatggaaagggatagaatatggtctcgaacttttgaagaaaggtataatctggagagtgggtaatggtcattccatccgcatttggcgtgatccttggcttcctagggatttctccaggagacccatcaccaggaagggtaactgccgcattaaatgggttcccgatcttctgaacgataatggtgagtgggatcttgaaagaatccagcaacattttaaccagattgacactgatattatactgaagattcgtccctcacgatctcaagaagctgattttgtggcatggcatcctgataaacatgggattttctctgttaggagtgcctatcatttggctgtttccctggctaatgttaactccagctctagctcgtctgggcatgatcttagcaaggcttggaagttagtttggaactgtaacatacctcaaaaggttaagatctttgcgtggaaagcagctactaatagtctggctactctgcaaaataagaagacaaggagattagaaccgatggccatctgtagcatatgtggcagggaagaggaagatgtagctcacgcattatgccgctgccctcacgcgactaacctttggctttctctgcgcagttcaaaggacatctcatttgaagcgggggcttcttggtcaggctctgggtggattcttgaccagctagggctgattgcaaaagaggaaggggcaatgtttttgatgctgctttggcgcatctggtacaacaggaatgagatataccatgggaaatctgctccaccagtgtctgtctcgcacaggtttatcgtcagttatgtgtcatctttgcgagaaatcaagcagttccctcgggcggatttcgccaaaggaaaatttgtggtttcgaatttgggctgcatgaaggggacatcccaggtgcctgatccgaaggtgcttaatcattgggagaaaccaaacccgggctggatgaagctgaacgtcgacgggtcgtttgacgctcgatatggttcagggggaataggtgctgtcctccgtaatagtgcaggcagtttgatcttctgcgggaacatgagcagatgcggcggcgctctggaagctgaacttctggcgtgcagggaaggaattattatggctcttcagtggacgttgcttccatttatcgtggaaactgacagcctggagcttttgaagcttgtcggcgctggtagcagtgacagatcagagctagcgtttttggtcaaggaggttagagaccccttgtccgggaatagggagattatcattaggaagattcacagggagaataattgtgttagtgatttcctagcaaacaagggcggaagtgagtccttgacggccttctggccagacaatagctgtgattgtatctcacaccttgttggtgtggatagctttgttgagtaa

SEQ ID NO: 66366 - DNA, 427 bp, Oryza sativa
  Clone ID: PAT_MRT4530_67323C.1
ctccttaacttgaaataaatatagacggagcttccatgtattacaggcgcatatgcctaagccagcaccgtatagttgtgagcaataccattcttgataggttaggagagagatcgggttaaacaaaaacctaagctgggcacggccgctaaaatgcaaagatgaaggacatactgggaacacacgaaacacggtgggggacattatcacatcatagaggaaccattcaacacggctatatatgacaattacggcttagttgccaccagactccatcaagtcgggggggttgtaggcgatgaagctgatgagcttcacctgcctgacgttgttgaagccctggatacggacgaatgcatgagggtacgtcttcttggtcttctcgagctccttgagcacctgggtggagtcagtgcacccgaacatg

SEQ ID NO: 66367 - DNA, 689 bp, Oryza sativa
  Clone ID: PAT_MRT4530_67324C.1
aacatgagttcccggagtcccggaccgccggcggcgcaattcgttcaggcggggaggatcgagccggtggcgcaaaatcgcgtgccaaggtggcgtcacagacctccaaggcggagcaaatcgcaggcatggagtcctcccctcctccctcttcttcccgctaacttcccaggccttcacaacgtgccacggcggcgcggatggagatctcgtcctccttcctctcccggctcctaatccccatctcatcgcttcgccccccgcctcacggctgcacgcgggacgggacggccctgagagcctcgaaggcggtggcttccacgctggctcgtggcgggatggcggcggcaagctgcctcgccagctcgtgaccgcggaaggattcctctgcactgcagctcgtgccgggggccgccggcgtcggggaggatcccaaggcggcggctctgccggcgtcgactggagcaatggagcacgagcaggttgccgctgcaactcccggtggcgtgggccgtgcctgtcacggcttggcacgaatgggcccatcatcgcaatgggccgtgcttaggcccacatcccgataaggtcggtacggtacagcctccatgaacccgatggttccgctccgccgttctttcgagtataaacccttccttaaacctcggggacttccccttcattccacctcg

SEQ ID NO: 66368 - DNA, 1810 bp, Oryza sativa
  Clone ID: PAT_MRT4530_67325C.1
gtgtaatgcttcgcaggcgacgatggcgagcggcggcgtggtgaagaaggagatcggcgggaaccaggccgagctccgcttcggcgtcaacgacagcgtcaagggggacctcgcgccgccgcacccgctccaggccagcgtccacaaggatgccaagttctgggcggacaagaagaggttcggcgcggaagccatctacggatccgccttcaacatccgcaaggatcttgatgcccaaatcctctccaagtaattcactgtcctatccccatgttccaaaggccccctggtgcccacgcgtccgctatgctaggatatgaggcactgactggttccttagatgattttgggtttgaagattatcttaacttgccccaagattctgaaagcttccgtgctcccgacatgcaccacggaatggaggttcgcctcggtttgtcaaagggacctgtttgccctagtttcaattgatttctcaaaaatgtatttcttgtcttacactgcgctcctcgttcagtatctatatcggtctttagaccgtgaccgtgaccgtgacatgtaagaactataggtattgcatccgtttgaggagttctaaaatcgaatttaatgttatcatgtttgaacttataaaaaaaaaaaaaaatgcaaaagtcgaatgcacttaagaaaatgataagctaacaaaatgcaaacctgggcaccaccggaatctccgtcccccgctccggggcgcttcactcccgtgccgcactggcccagccgcctgagacgacgtgaaccgtcgcccgagttccacacgcccaccccatccacaataatatatccaatccacccatccatcctgggagaaaattggagttgggacgcgagattctcaggcgagcacacgatctcgcggcgcgctcacgtccacgccctcgcatccacaagcgccgcggttaaaaaaccacgaggcatccccctccccctcccccgcctcctccgcggccaccacccgcccccgtcgtgctcggcgccgtcgctgctccgcctgaccaggtcgtcgcggaggctacggctgcgcgccgcggcggcggcggcggaggaggccgacgtgctccccgggcctggggccgagggggagatggcggcgggcgggaggctggaggagcagcccgaggggccgatcgggggcagccaggtcgacatcggcgggctcgccttccagggcgacatgggcggaggagggttcgccggcgggagcgggggcgccggggccggcggcggggacggcaacaagatgctcgaccgcggcatcaacacggccatcgtgctcggcgccagcacctacgccctcaccaagctcctcaccgtcgaccacgactactggcatggatggacgatctttgagatcttgcggtacatgcccgagcacaactggtcggcttacgaggaggccctcaagaccaacccggtgctcctcggcgactggattgcgcagtgctacgaaggcaagccgatcttcgagttcgaccgtgctcggatgttccggtctggcctcgtcgggttcacgcttcacgggtccctttcacattactactaccatttctgcgaggcactgtttccattcaaggattggtgggttgttcccgcaaaggttgtgttcgatcagacggcctggtctgcgatatggaacagtatctacttcgtggtcttggggttccttcgtttggaatcaccggccactatttccagtgagctcaaatccacgttttggcccatgcttactgaaagcactgatatttcctttgttataataatgccttaa

SEQ ID NO: 66369 - DNA, 1884 bp, Oryza sativa
  Clone ID: PAT_MRT4530_67326C.1
ccccctgccctcccactccctgaggcgctcgcccagctcggcctcgttcctggagcaggtatgcacggccgcccccagcgccgccagctcgtccaccaccgcacgcctgcgcatgaattccccgcgttgatcgtagaagcaacagaaggctccgcggcggaggtctccctagccagcgagaaggggataagtgtgttggggtgagtatccgtcggttggctttgtctgtaagagcttggtcgatcgctgctgtaatcgctgctagtgtttccctgactccccggcgctcttcttgatcgtggcccgatggactcacccgattccatgatggaactgtaggtatcttctgcgtacgtagtcctaaatatagagtttagatcttctccatgcgtttgtccttgcaagtgcttcaggatctgaaccatggatggacgcagatgtgctgattggcgcacggcagcggcggcacactccatcattcgcatcattttgttttcatcataatcatctccaatatccggatcaacaaggatatcaaagttgccttcctccatagcttctgaaatcaagggttttgcccaaccaactaacgtgctgtccatgtaagactcagatgactgaaccggcagccttccagttatcagttccaagaggacgacaccaaaagcaaagacatcggctttgtcagtaagcttcccgctagacaggaactctggagcaatgtacccaaatgtgcccattattcttgtggaaacatgggtgtggtttcctggttgctactttgctagaccaaaatctgcaaccttgggctcaaaaccatgatccagaagaatattggatgccttgacatcacgatgtataattttaggagaacagtcatcgtgtagataggccaaaccccttgcagatcccacagcaattttccatctttgctgccaatccagaggtggccacttgtccccgtgtaaatgcgtgtcgagcgtcttgttggggacgaactcgtaaaccagcagcctgtcgttgccggagatgcagtatccgacgagggagacgaggttcctgtggtgcacgcgtgtgatgatgtccgcctcggcgcggaactcgcggtcgccctgcttgctctccgtcttgagcttcttgatcgccacctcggtgccgtcctgcagcctccccctgtacacgcacccgaatccgccctgcccgatgacgttgtcgggggagaacccgcccgtcgcggcggccagctggtcgtacgagagcgagccgccgtcgatggagatggagtgcgggcgctcggagccggcgtcggagaacgtgccgccgctggtctgcggcgccgtcgggtggtggtgctgctgctgcatgaagacgaatggcagcggcggctggtcacctgcaagcaccaaagtgtggtggatatctccgacgacgacgacgacatggacgtacgtacgtacacgacgtcgaacgtgacaagaatcacaagatgcgcgcacctttgtagtaggggttggggttgtataacattggcggtggtagcggaagcggctgggcctgttgccgccgccgccgccgcctccatcgccggatccagagcgcgagcacgtacaagcccaaaaccagaccgacaaccccagcggccactttgacggggtcgtcgcggaggctacggctgcgcgccgcggcggcggcggcggaggaggccgacgtgctccccgggcctggggccgagggggagatggcggcgggcgggaggctggaggagcagcccgaggggccgatcgggggcagccaggtcgacatcggcgggctcgccttccagggcgacatgggcggaggagggttcgccggcgggagcgggggcgccggggccggcggcgggga

SEQ ID NO: 66370 - DNA, 411 bp, Oryza sativa
  Clone ID: PAT_MRT4530_67327C.1
acgccgctagacattgacatcagagatgagcctagacatacccaatatggtgcctgcggaagccgacaagagggatttgcgccatctctgatctcggtgagttcgtactcgagaaggaagactaccctgtcgttgactacgtgttgatgaataagagcaacaccggcttcggccaacaggagtagggctattacctatcagataaggggcccgaacctatataaaaacccttgtctctatctcttttacctgaatcttgcatataccctggtaccaacgatgtccataccatgcaactaccatagtcgtaacctaaaaagtcgacatatgggtataaatacaagcaccctaggaggaaatggacaaaccaacaaaaaccaagacaagccaagacacaagatgcacaaatca

SEQ ID NO: 66371 - DNA, 1836 bp, Oryza sativa
  Clone ID: PAT_MRT4530_67328C.1
atggccgtgttgatgccgcggtcgagcatcttgttgccgtccccgccgccggccccggcgcccccgctcccgccggcgaaccctcctccgcccatgtcgccctggaaggcgagcccgccgatgtcgacctggctgcccccgatcggcccctcgggttgctcctccagcctcccgcccgtcgccatctccccctcggccccaggcccggggagcacgtcggcctcctccgccgccgccgcggcgcgcagccgtagcctccggcgccaacctcccgacgccgtccacgccagccttctgctaccgctggtgccacccgcatcgacctgcctgcatcgacctcttgcatcgccacgccgcgttggacttccatagtcctaccaccgtcaggtgggcttcctagcagcaccacgccagcctaccgccgccactggccactcctagctggtgccccacttcctcccttctccaccgatcgcaccgcgcgggcatgccctccatcgatggcgcgtccttcttatccgcccagaacttggcctcctgcgcgcgggcaagccccaccaccacgtcgtcatctcctccggccacgggcagagagcacgccgtgccgtgaccgagatcatcacgacggccccggcgtccgacccggcacccgcggcaccccagacgggctcgccctcgttcttgaattccgtggccgtcaaagtggccgctggggttgtcggtctggttttgggcttgtgcgtgctcgcgctctggatccggcgatggaggcggcggcggcggcggcaacaggcccagccgcttccgctaccaccgccaatggtgcttgcaggtgaccagccgccgctgccattcgtcttcatgcagcagcaccaccaccacccgacggcgccgcagaccagcggcggcacgttctccgacgccggctccgagcgcccgcactccatctccatcgacggcggctcgctctcgtacgaccagctggccgccgcgacgggcgggttctcccccgacaacgtcatcgggcagggcggattcgggtgcgtgtacagggggaggctgcaggacggcaccgaggtggcgatcaagaagctcaagacggagagcaagcagggcgaccgcgagttccgcgccgaggcggacatcatcacacgcgtgcaccacaggaacctcgtctccctcgtcggatactgcatctccggcaacgacaggctgctggtttacgagttcgtccccaacaagacgctcgacacgcatttacacggggacaagtggccacctctggattggcagcaaagatggaaaattgctgtgggatctgcaaggggtttggcctatctacacgatgactgttctcctaaaattatacatcgtgatgtcaaggcatccaatattcttctggatcatggttttgagcccaaggttgcagattttggtctagcaaagtatcaaccaggaaaccacacccatgtttccacaagaataatgggcacatttgggtacattgctccagagttcctgtctagcgggaaacttactgacaaagccgatgtctttgcttttggtgtcgtcctcttggaactgataactggaaggctgccggttcagtcatctgagtcttacatggacagcacgttagttggttgggcaaaacccttgatttcagaagctatggaggaaggcaactttgatatccttgttgatccggatattggagatgattatgatgaaaacaaaatgatgcgaatgatggagtgtgccgccgctgccgtgcgccaatcagcacatctgcgtccatccatggttcaggttggcatgtttttggtatcaaaccaa

SEQ ID NO: 66372 - DNA, 239 bp, Oryza sativa
  Clone ID: PAT_MRT4530_67329C.1
ttttctagctgatctacaaagtgtgcagtacagatgcatctcttattcattgccatggtagtagccgtgtctggtgctgttgttcttcatctctctagcaaagtatatcttgttaatgaatttgggctcatcatgacaatacgatgaaagtaacatttatgatccacaaaatttatagaatgctattttaatatcactgctgcacacaaagatttttctggtgaaaaaaaaaaaaaaaa

SEQ ID NO: 66373 - DNA, 1148 bp, Oryza sativa
  Clone ID: PAT_MRT4530_6732C.1
ataaatagagtgtccactagttggggttttgtttattctagggtgaacaagccgagagagagggcgcgcggaccgggtccacgggagtggggcccacgcgtcagcctctcggtccacggtggaccgggagcacgcggctggcggcggtcggcgccgtgggtcccacgcgtcagccgcacccgtgggcgcgggcggctgacggccgggcccacttggcagccgcgagggcgcgcccgaaggcggcctcgccggcacggccgacgggaggcggcacgaccgcgccccgatggtcaccgccggcgaccaccggcgcggcggagcggcgcccgagagagcggagaggagagggaagcgaaagggcggtcttcggctcaccccgagtcgacggcgacgacgggaacggcggccgaagcggaggaaggcggcggcgcggttcgggacggcgagggcgacggtgctccggcagtcggcgagcgaagcggaggggtggccgaggtcgacggggacgaggcgaagccgatggaggtgacgccgagtggggaggaggtccggagcgacgacggcggcgaaccggagctcggcggcgacggcggagagaaggtgcgacggtgcgggctcgattccgacggggaggagaggcggcgagtggcggaaacggaggagaagagcacgggggacgattatatagcaccgggaggaggagagcgcggccggagagggaggaaacgggcgcggagatctcggccgcccttgaagacgccggcgaaacttgcgggattaactccgaacgaatccgagggagagagagagggaaaagcgggggaatcgggagagggaatcgcggggaatgattcccccctcattatggcgcgcggggacggcgggatgcggcggattcggcggcggcggcggcgctagggcacgggcgagcggcgggagcggcgggaggaaggcgatgacaggtgggccccacccgtcagcgagggcggcgggcgggcccgcctgtcagcggcgcgcgcgcgggggaggccgatgggccgcggggggggagaggagagagagagagggggagttgggccgagccggcccaagagaggaagggggggaaaagaagacttttagggatttttctttttataaaacctttt

SEQ ID NO: 66374 - DNA, 534 bp, Oryza sativa
  Clone ID: PAT_MRT4530_67330C.1
tcaccggcgcacgacggggatggggctccgggggcgaacctcgacggaggaggggtgggacgagtgggacctcggccgcgcgaacccaacggcggcgacggcgcggtgcggcggcgagtgtagcggtgggggcgtggccgacgtggaccggaggaggcggggtgtggcggtttcggcggcggtggcgacgtgggcgggcggccggaggttggggaagggcccgacaggtgggccccaccagtcggcgaccccgaggagaggagggaggcggccggcctggctgggcctcggctgagctgtcaccatcagcggcccacctctcatccgcagcatataaccccacataatgatatcccataatctagacaccacgccccggtactcctccagaattcctcctagaaagctacacttgtcgaggtagaagtcggcgagagcgccaaacttctgggcactcatccagagcttcccctcatcctctaccagccgatgaagtcggagccgtgtgcgtgctccaccacgatggaccgccat

SEQ ID NO: 66375 - DNA, 1549 bp, Oryza sativa
  Clone ID: PAT_MRT4530_67331C.1
ttcggtcggttgccttggctgctttggagagttgggaggagcagcgagagagtgggggttgatggcggcgatggcggcggccgtggcctcgtccccctccccctcccccgcctccacccgcctcctccgcggccaccacccgcccccgtcgtgctcggcgccgtcgctgctccgcctgaccaggtcgtcgcggaggctacggctgcgcgccgcggcggcggcggaggaggccgacgtgctccccgggcctggggccgagggggagatggcgacgggcgggaggctggaggagcaacccgaggggccgatcgggggcagccaggtcgacatcggcgggctcgccttccagggcgacatgggcggaggagggttcgccggcgggagcgggggcgccggggccggcggcggggacggcaacaagatgctcgaccgcggcatcaacacggccatcgtgctcggcgccagcacctacgccctcaccaagctcctcaccgtcgaccacgactactggcatggatggacgatctttgagatcttgcggtacatgcccgagcacaactggtcggcttacgaggaggccctcaagaccaacccggtgcttgccaagatgatgattagtggcgtcgtctactccctcggcgactggattgcgcagtgctacgaaggcaagccgatcttcgagttcgaccgtgctcggatgttccggtctggcctcgtcgggttcacgcttcacgggtccctttcacattactactaccatttctgcgaggcactgtttccattcaaggattggtgggttgttcccgcaaaggttgtgttcgatcagacggcctggtctgcgatatggaacagtatctacttcgtggtcttggggttccttcgtttggaatcaccggccactatttccagtgagctcaaatccacgttttggcccatgcttactgccggctggaagttgtggccttttgcacacttggttacatatggcctagttcctgttgaacaaagacttctgtgggttgactgcgtggagttaatctgggttacaatactgtcaacttactccaacgagaaatctgaagcaaggaactccgaggacgcatccacatcaaatgcttccaatgacaattcaatatagcgaacggtatagccagccaagctgccctttaccttcatcattttgggcttgtatatattgtacaatttgtagctgcagctctgcaggtgtaacctttttgcaaagataaattaaacatataagatgtgtagcaactgccaaaggcaatcagaacgaaattaccttgcactggatcaactgttgacgagattatgagctatgcaatttaggtagctattcttttgatctaaaaaagctaaaaacaaacaaaataatataaaaaagaactagatctatgaagtgcgtgccatatcaggaaaatcgatatggcaatcttacctgccatcattgctgaacatacttatagcttgctatatgtagtttgttgctacatatataatatgataaatgcattgatgctattttgctacc

SEQ ID NO: 66376 - DNA, 450 bp, Oryza sativa
  Clone ID: PAT_MRT4530_67332C.1
atgaaccacggcgatcggaaaccacggccaaaggcggcggtggaggtggtgctcaccggagtgcgaggggatgagggctccggcgacgaacctcgacggaggaggagagacggcggcggatgggcgcacggcgcgggagcaatggagggcacgggagagagcggtggaaaaaggaaaaaggtggaggggagtgcggggatgctttataggggctcgggagagacggacgtggccggggcactcccgatttcgccagcgacatgggaggttggaggcgtggccgacgtggaccggaggaggtggggtgcgacggtttcggcgacggtggtgacgtgggcgggcggccggaggttggggaagggcccgacaggtgggccccacctgtcggcgaccccggggagaggagggaggcggccggcctggctgggcctcggcctgcggccggcctaa

SEQ ID NO: 66377 - DNA, 1065 bp, Oryza sativa
  Clone ID: PAT_MRT4530_67333C.1
atggcgagcggcagcatcgtgaagaaggaggtcggcgagaaccacgacgtgctccgcttcggcttcaacaacagcgtcaagggcgacctcgcgccgcagcacccgatccaggccaccgtccacaaggaggccaagttctgggcggataagaagaggttcggggcggaagccatctacggatccgctttcaacatccgcaaggatctcgatgcccaaatcctctccaagttccaaaggccccctggtgcattgccatcatctatgctaggatacgaggcgctgactggttccttggatgatttcgggtttgaagattatctcaacttgccccaagattctgacagcttccatgctccagacatgcaccacggaatggagaaaaatttgctaaagataggtatatgcaagaaatacattcatactagatctagaggcgatagtggaggccgcggggtgcggttgccaaatctagccccctctcgttcggatccggcttgtccggcgctggaggctgaccctcaagccaccaccagcggagaggtgacggcgcggacgtggaggtggcagagtgaggactatggaagtccaacgcggcgtggcgatgcaagaggtcgatgcaggcaggtcgatgcgggtggcaccagcggtagcagaaggctggcgtggacggcgtcgggaggttggcgcgacaacgacaaagaagccagcctgactgatggcgtgaaggtcgacgcacgcgccaacggcaaagaagctggcctgactgatggcatggaggtcaacacagtgatgacagggagtccaatgatggtggtgtgtgccacaaggcatgctgagactgactgagtcgattccgttggggacggtgcgcccggccgatggacacggacgccggcagctgttgatagaacggcgggccgatggctgaggacgaccgcagtggaatcaacgattgcagtgatttcagctcgatgggatagagagacaataacaacctaggaagaaacgacggcgacaatttctgcgagggtgaaagggatatgtcgatctggtcggacgcgtggg

SEQ ID NO: 66378 - DNA, 1041 bp, Oryza sativa
  Clone ID: PAT_MRT4530_67334C.1
tcagcggctcgggagagagaggaagggcgccggcacgcggggcccactggtcagcggcggggggaaagaaaaggggcggcggcacccggctcggcttggctcaaggccggccgaccggccgcggcgacggcgcgcgcgcgaatgcgttgccggcggcgcatccggcggcggggcgacggcgcaaaacgacgcggaaacggcggcaacggatggcggcagcgaccgaaggcgacggcgagcgcgggcgacggcgacgcacgggggatcgggggaaggaaaggaaaggggtgggagtcctcaccgaatgggacggcggcgaccgtcgacgatgagccacgggaggacgacgtcggcgggcggacgagctccgagagaacctcgacggaggaggggtgggacgagtgggacctcggccgcgcgaacccaacggcggcgacggcgcggtgcggcggcgagtgtagcggtggctagaggcggccggagtagcgggagaggcggcggcggatgggcgcacggcgcgggagcaatggagggcacgggagagagcggtggaaaaagaaaaaaggtggaggggagtgcgggcatgctttataggggctcgggagagacggacgtggccgaggcgagcccgatttcgccggcgatgtgggaggttggaggtgggggagagagagagagagcggcgggattcaaatttgaatcccggccatctcggttgagggcgcggcgagagagagagggggagtgggtgcgggaggcgcggcgcacgcacgggcgtggccgacgtggaccggaggaggcggggtgtggcggtttcggcggcggatgggcgacgtgggcgagtggccggaggttggggaagggcccgacaggcttgggaggagaacttcggggtgtgacaactgtttccacaacaaaagtgaaaacaaccaagagttcatctgcaagcgcacggatataccattgcagcatttcacccgagagtattccaagggtattgtatttatatcccgtgggaagatcaggctagagagaacctga

SEQ ID NO: 66379 - DNA, 1563 bp, Oryza sativa
  Clone ID: PAT_MRT4530_67335C.1
atggcacggccggcagcgttcgtacccccaccgcctcagtatgtaccccctgaagagccttcagctttcgcgaggctctatgacgtggtggatcgcgccaaggccgccctggtgaccatcaccggtggaccgacgacggtgcatggtgtcgtcgtcatctcctccggccacgggcagagagcacgccgtgccgtgaccgagatcatcacgacggccccggcgtccgacccggcacccgcggcaccccagacgggctcgccctcgttcttgaattccgtggccgtcaaagtggccgctggggttgtcggtctggttttgggcttgtgcgtgctcgcgctctggatccggcgatggaggcggcggcggcggcggcaacaggcccagccgcttccgctaccaccgccaatgttatacaaccccaacccctactacaaaggtgaccagccgccgctgccattcgtcttcatgcagcagcaccaccaccacccgacggcgccgcagaccagcggcggcacgttctccgacgccggctccgagcgcccgcactccatctccatcgacggcggctcgctctcgtacgaccagctggccgccgcgacgggcgggttctcccccgacaacgtcatcgggcagggcggattcgggtgcgtgtacagggggaggctgcaggacggcaccgaggtggcgatcaagaagctcaagacggagagcaagcagggcgaccgcgagttccgcgccgaggcggacatcatcacacgcgtgcaccacaggaacctcgtctccctcgtcggatactgcatctccggcaacgacaggctgctggtttacgagttcgtccccaacaagacgctcgacacgcatttacacggggacaagtggccacctctggattggcagcaaagatggaaaattgctgtgggatctgcaaggggtttggcctatctacacgatgactgttctcctaaaattatacatcgtgatgtcaaggcatccaatattcttctggatcatggttttgagcccaaggttgcagattttggtctagcaaagtatcaaccaggaaaccacacccatgtttccacaagaataatgggcacatttgggtacattgctccagagttcctgtctagcgggaaacttactgacaaagccgatgtctttgcttttggtgtcgtcctcttggaactgataactggaaggctgccggttcagtcatctgagtcttacatggacagcacgttagttggttgggcaaaacccttgatttcagaagctatggaggaaggcaactttgatatccttgttgatccggatattggagatgattatgatgaaaacaaaatgatgcgaatgatggagtgtgccgccgctgccgtgcgccaatcagcacatctgcgtccatccatggttcagatcctgaagcacttgcaaggacaaacgcatggagaagatctaaactctatatttaggactacgtacgcagaagatacctacagttccatcatggaatcgggcttaccgcgttctgatcttttcacaaaacaaccgaataactaccgataa

SEQ ID NO: 66380 - DNA, 1259 bp, Oryza sativa
  Clone ID: PAT_MRT4530_67336C.1
attcccgggtggccgggccgtctcgctttcttctccccaaagaaagaagcgagagagagagagagaaagcttcgcaggcgacgatggcgagcggcggcgtggtgaagaaggagatcggcgggaaccacgacgtcctccgcttcggcgtcaacgacagcgtcaagggggacctcgcgccgccgcacccgctccaggccagcgtccacaaggatgccaagttctgggcggacaagaagaggttcggcgcggaagccatctacggatccgccttcaacatccgcaaggatcttgatgcccaaatcctctccaagttccaaaggccccctggtgcattgccgtcatctatgctaggatatgaggcactgactggttccttagatgattttgggtttgaagattatcttaactacgctgcggcctccgaggatggctgggtcctggggcgtggagctctggaattgctgctcggcggcaccgcctacacacaagcgacaagtgcgccacaaatctctctctcgatgcagcaagtgcagcggagggagctgcaactggtcgccgtttctgccatgctgatagattgcaagtacgaggagatttgggccccagaggtgaacgacttcatcttcatatcagatagtgcatacactagggaacagattcttgcaatggagaaggggattctgaataagcttcagtggaatctcaccattcctacaccatatgtcttcattatgatgctatctgcgtctgcagataacaaaagtgacaaggagaatgctgaggccctcaagttcaaaagattatcacagagccggcaacaactcattgattggtcagtaaaaataaaggtttcaaaggagcatgggggtttcatgagatttatccaggtttcttgcctaggagcatcggcctcttcttctagaatgctgagggccaaggctgctggggaagaatctgtgttgaaggaatttcctgagccattacggcttttaatcagtcataggcaatcaatggggacctgcatcttaaacttccacagcaggattcagcctgtttatgttgtggatgttgctgctgctattgtcaactccctcaaggatgatggcaccagcatgggaaagagctacggacttggtggaccagagatttatactgttcatgatctggctgagctgatgtatgagacaatatgtgaatggccacggtacatcgatgttcctcttcctattgcaagggctatcgcatctcctgaaagctga

SEQ ID NO: 66381 - DNA, 459 bp, Oryza sativa
  unsure (1)..(459): unsure at all n locations
  Clone ID: PAT_MRT4530_67337C.1
gtacnncctcgaggcccggcccgggtactacgatcccattgtcatctatatatatccccataccctctcttcacacaccgcttgatcctctggtgcataggatctatatatccagcatctattaggccaaagcactaaacattgacagatgtctcgccatgaaactccttaatgatgccctaccaatatcatgcaggcatttgcacctgttcgaaatgatgtcgccccgagctgtatcccctgggttcttcgaggtccctaatgaacagtttcaatgtaccgcactatctgtggacacacgagatatcgaacctagaggacttctactatcccatgacactaatggcgcatctctaccatatatcgtctgggtgacaggtatatcagggccagctttcccaggctgccctgaggcctaccaacaacagtgcctgcaatcacgccgagccctattgaccg

SEQ ID NO: 66382 - DNA, 804 bp, Oryza sativa
  Clone ID: PAT_MRT4530_67338C.1
ggatccccgggctgcaggccatgctgcctccgccactgattattctatcatatattacccatgaacatgcacagtacaagtgaataagctacataacaaaagagaaaaaaactcaaaacaaaaaaaatattaaatcatatgtttccgaaggatgatgatatacgagtttacatataaccggaaaaatatatcaaagtttatagttttcttttttacgatataaatactttcttttatgtccccgggctgctcctttgtccttatagtgaatatgtgaatttggtgagatatgccttctttaatattctttatataaacaataaataaattgtccgtgcatctgcacggacttacttcctagttaatttaatttatagaaattcataaattttaaaatcatgagatttatatttttagattcatcatgagaaatatacttaggtatatatcattcacatgttactaaactatacgaatttatagaaaatggttataaagaataaaaatatttaactgactttggacaaatctgaaacgacaagtaatttgaaatggatgtagtcatcacaatccaactctagttaattattaaattgcatgtctattacatttctccttcacttttgtgtataattcttgcatcaacattagttctccaatcctgatacaactacattatttattattggtatgcatataagaaatgctaattttccttttattaattgtgctagttggtggtcgaaactggtacataacaaccgtcaatagcagggggcagggtcggagtggcggcaacacaat

SEQ ID NO: 66383 - DNA, 1193 bp, Oryza sativa
  Clone ID: PAT_MRT4530_67339C.1
atggtgctcgtcgcccccgccgcgtcgtatcatcaccacagagccgccgccgccgcggcggcggcggcggctgcggcggccgcggcagagcccgtgttcccgctgctcgggacggggcagtgcgcgctcgacgctgacactgccaagtcgtcgggcgctgccgcggcggcgggggtgccgcccgggagcgccagcgccatccacttctggcagtcgcagccgacgacggccgccggagctggtggtggctccgccgacaagaagccgctccccatgctggactacggcggcatcggcggcccgggaggctccggcgcggccacgtgccacgactgcggcaaccaggcgaagaaggactgcgtccaccaccggtgccggacgtgctgcaagagccgcggcttcgactgccccacccacgtcaggagcacctgggtccccgccgcgcgccgccgcgagcgccagcagctcgccggcgccgcctcctcccctcccacttcctccgccttccccgccgcgaccaccgcctcggccaagaagccacgcctcctcggctcccagaccaccaccaccacctcccgcacctccacctccaacgccaccactcctcgcagcttcgacacctcctccagccaccaagtcgcgtcgttcagggacgccctgccgcgccacgtgcgcgcgccggcggtgttccggtgcgtgcgggtgaggtccgtcgacgacggcgacgacgagttcgcgtaccaggcggcggtgaccatcaacggccacatgttcagggggttcctgtacgaccagggcgccgacgacggccgcggcggcatggcatccaccagcaacgacgagtccagccacggcgccggcgccgccgtgcccagcatctccgacctgcacctcggcagcgcctcggcggcggtgccaccgcacctgtacagcggcggcagcggcgggccgctgatcctcggcgggttgggctacggcaacaccatgaactgaaaaactaatcgtgcaacaagatcgagtaagcatgaggtacccattgattactataaaatctcctgcttttcttttcattgagtagcttagtttatggagtagtactgtcattgctactgatagtggcagaattctcgtttcttgttaatgttgctgctgctgcaatggagcaagctatgtagtcttgttattagaagctg

SEQ ID NO: 66384 - DNA, 2808 bp, Oryza sativa
  Clone ID: PAT_MRT4530_6733C.1
atgtcctttgccataggatttgggactgcccctttgtatgcccagattcctcatgatcgtcaagaagagaagtgccgagtcaaagtcaccttgaacagtaatagagaagatatcccatcagtgatgttcgaagctggaggaggaaactacatccatgcatgtcaggagggaagtgaccgtggcagctatcttgagactgaggggattgagaatgatgctaccataaggcatttggttgagatgctgtgggctatggatgaaacccgcgcggaggttgtgctagcagctcaagatcgtgacgatcggaatcgtggtaagatttgcaggttagaggacaaggtggatcgtttggagaaggaactagccgcgttgatgggagaagcaccaccgcagaaggccaggattcgtcttaccgcaacgaagagagctctattcgtccctcgctaccaattggcaccaaaggtccgtgtggtggagaaagaagttaccccagccctagcggatcctccggtcgtcaatatggtgctcactcgcagcaacgggaatggccccaacatcaacaataacaacaacaacaatggagagaatcccacacttgcccaagtcctggctcaacaggcacagcttatgaacatgatgatgcagcaactccagaaccagcagaaccagggaaataaccatgcacctccccagaacaagttagcagaatttcttcgtgtgaggccgcccactttctctagcaccactaatcctgttgaagctggcgattggctgcatgccatagagaagaagttggatttgcttcagtgcactgatcaggagaaggtctcatttgcatcacaccagctgcatggccctgcctctgagtggtgggatcacttccgccttaacaggactactgctgaacctatcacttggcttgaattcaccgctgctttccggaagacgcatataccatcgggagtggtgtctctcaagaagaaggaattcaggtcgctcacccaaggatctcgcacggtcaccgagtatctgcacgagttcaaccgtctggctcgttatgctccagaagatgtgcgcactgatgaagagcgccaggagaggttcttggaaggacttaatgatgagctttcttacccactcatgactggggattatcatgatttccagaagttagtggataaggctattcgccaggaggacaagtacaaccgcatggagcagaagaaacgccggattgctcacttcaaggcacaacaggggaatagtcaaaggccgcgtcttactttaggaccccagtccatgccacagggaggttcttcgtctgttgttcgtccgcagcgtcagttcttcaacaacaatgctggcaacaacatccgcaatcaagctccacgccctgttgcagctccaacacagcaacagcctgccaagagggagcaaggcagcaagcccagggcgtgcttcaactgtggagacccaggatattacgctgacaagtgtccgaagccccgacgcgtgaaggttgtccctgcccagagcaactctaccgcatcagcatcaaaggctcgtgtcaatcatgttactgctgcagaagctcaaggtgctccagatgtgattttgggtacgttccttgttaactcagttcctgcaacagtgcttttcgattctggtgctacacattcatttttatctatgagttttgcgggaaatcatgggatggaagtagaagatcttagacgtcctttgatggttagtaccccaagtaatcaagcactctctttgcaacgtagcccctctgtcagaatagaaattcaagaagtaccatttctagccaatcttatcctgttagaatccaaagaccttgatgtcatcctagggatggactggttagccaggtcaagtctgaaccaaatgactttggaagagattcctatagtccgggagtatcccaatgtgttcccggatgatttacctggtatgccgcctaaaagggacatagagttcagaatagatttggtaccaggaacaactccgatccataagagaccttatagaatggcagccaatgaattagcagaagtcaagaggcaagtagatgatttgcttcagaaaggatacatcagaccgagttcatctccatggagagctccagttatttttgtggaaaagaaagatcatacccagaggatgtgtgtggactatcgtgcactaaatgatgtgactatcaagaataagtacccgctacccagaattgatgatttgtttgatcagcttaaaggtgccactgttttctccaagatcgatcttcaatcagggtatcaccagttgaggattaaagaggaagacatacctaagacggctttcaccactaggtatgggttgtttgaatgtactgttatgtcttttcggacttaccaatgccccgctttcttcatgaacttgatgaataaggtgtttatggaatacctagacaagttcgtggtagtctttattgatgacattcttatctactcccgaaccaaagaagagcatgaagaacaccttcgccttgcattggagaagctacgagagcatcaattgtatgccaagtttagcaagtgtgaattttggatgtctgaagtgaagttccttggtcacgtcatctcagctggaggagttgccgttgatcctagtaatgtggaatccgtaaccaactggaaacaaccaaagacagtttcagagatttgtagtttcctaggcctcgcaggatattatcggaggtttatagagaatttttccaagattgctaagcccatgacacgattacgttaa

SEQ ID NO: 66385 - DNA, 387 bp, Oryza sativa
  Clone ID: PAT_MRT4530_67340C.1
atgtggccggtcagaccgtgctactctgcaacggctggaaaactagctgttgtagccctgtcagagggccccatcgacctggccggtcagaccggcctcggctcggtcagaccaccatcggttcggtctgaccgaatacgactccgtcggctctgtatcggccaccttgagcaacaccatcccggcctccagggggccggtctgactgcgcatgtgccaccggtcagaccggccttatgcgccggacagaccgccgttgtggcgctggtcagaccagccagggcatgccggtcagaccgccactgtgtggccggtctgaccgccctggtcaggccgaacccagtcattaccccgcttgatagtacggcgaaactaaaaataaattag

SEQ ID NO: 66386 - DNA, 537 bp, Oryza sativa
  Clone ID: PAT_MRT4530_67342C.1
ctacaagtagggagcatgtcccgtcgtcgccccattgcggccgccgccgccgccgccgccggcggacgacgacgacgacgtcgtcgtcggcatgaacgccagcgccagcagcagcaccagcatcgccaccggcaccagcatcagcatcgacggcggcgggggcagcggcggcagcacgagcgggaggatcaccagcgacgccgtcacgcacaccagcaggagcagcgactccaccgagaagtacttgccccacacgccgccgccgccgccgctagccgccgcctccctgatattgctgccgccgccgccgccggatttacctgacgacgacggcggcggcggcggcggcgccgtactcccgccgccgcaggctttacctcttcccttctccatgtcgctgccgctgctgctgctgctgctggctgcagtggcgcaggatgccaacttgagattgggcggctcgtcgtcgctgatcagctcctggatttcctcctgttcgtcctcctcgtcgccatttcttgggctcaacaagtacat

SEQ ID NO: 66387 - DNA, 711 bp, Oryza sativa
  Clone ID: PAT_MRT4530_67343C.1
ctagcggatgaagattctagaagaagcttcagccgtcgtaaactcaccaaacagaacccttatctcttcaggcgccgtgacaccgactgtgtcggctatccatgcagtggggcccatggcggcgtggtcggccgcgccgtggcgccctccgattggccggagacgcgacgccgcccgatgggtgactgccacgtggcagcgatgctcggctctataaatgagcgccgagtcgtgctcgatcacctccattgccagcttcttctccttcctcttcttcttcacctcgcaagcgagaaagttcgattccaacgatccgatggggaactcgtacagcaacggcggctcgccggcggcggccgcggggtatgtgcaggcgccggagctgccgcttacctgtgcttcttcctggtggtgctgctcgtcttcctcggaccaggcccgggttgttgttgatggcgtcgccgctcgcgctgctgctcgccgtggcggctgctgtcgggcggcggcgacggagagcggcgcggggtggaccagctgcggcagctgtcgctgccgatgcccgagcgggactccatccaccgcgccggcggctcgccgtggggcgtcggggtgctcctcgcgctgctcgtcgtcatggtgtcctaccagtccaacttccgcgacaggtggttccccctcgtcagccggtgaccggccgaccaacgccgccat

SEQ ID NO: 66388 - DNA, 404 bp, Oryza sativa
  Clone ID: PAT_MRT4530_67344C.1
atgccgccggatatcgatatcagagatatgcctagacagactcaatctggtgcctgcagaggccaacgagagggatctagctctatctctgatcttgccgagtgcggattcgagtaggaaaactaccccgttgtcgactacgtgatgatgaataagagcaacaccggcttcggccaacaggagtagggctattacctgacaaataaggggcccgaacctgtataaaaatccttgtctccatttcttttacttcaatctcgcatataacctggtaccaacgatccccatactatgcaaaataccgtagtcgtgataccaaacatcaacaataccgctatagcacttcacctttgggtgaccacaaaaggatagtgaactcagggaacgtatgtaatctacctaag

SEQ ID NO: 66389 - DNA, 420 bp, Oryza sativa
  Clone ID: PAT_MRT4530_67345C.1
atggggaactcgtacagcaacggcggctcgccggcggcggccgcggggtatgtgcaggcgccggagctgccgcttcacctgtgcttcttcctggtggtgctgctcgtcttcctcggattctcgtggtacacgagctacgggtcggcggcggagcggttcgccgaccaggcgcggctgctgctgatggcgtcgccgctcgcgctgctgctcgccgtgcggctgctgtcgggcggcggcgacggagagcggcgcggggtggaccagctgcggcagctgtcgctgccgatgcccgagcgggactccatccaccgcgccggcggctcgccgtggggcgtcggggtgctcctcgcgctgctcgtcgtcatggtgtcctaccagtccaacttccgcgacaggtggttccccctcgtcagccggtga

SEQ ID NO: 66390 - DNA, 241 bp, Oryza sativa
  Clone ID: PAT_MRT4530_67346C.1
acagtcaaattgagattctgattttttttaattccgaccactgatgttaaaactcatcatacaccgccagggtggtaatgccctaggtgcactatatcctagggtagatccatatctagatggagttcaaagccacagacttggcttgagcttgcccatttccgacaagtagagacataactgctggagttgagctgctgcgcttggcctgaacaatgttaatatcttgtagtgagaccgg

SEQ ID NO: 66391 - DNA, 993 bp, Oryza sativa
  Clone ID: PAT_MRT4530_67347C.1
atgcattttaggaagttgagtaataatgattggaaggttattgaacaaagaatagagaggaaacttagtagttggaaaggggatgaccataagaaaaaatatagactaactagatgggatataatttgtcaacccaaagaccagggtggattgggtgttcataatttagagatccaaaataaatgtctattgagtaagtggttatataagttaattaatgaggatggtgtttggcaagatttattgaagaggaagtatcttcataataaatctataacccaagtggataggaaacaaggtgattcttatttttggtcagggcttatgaagataagattctgggatgataaatggctaggtaatatagccttcaaagataagtatccatctttatatgctattgtcagaaggaagagtgcctctattgctagtgttatgggttctgttccgctaaatgtttcttttaggagagctttagttgggcagaatctaacactttggtataatttgtgtgcttccattgctcatatccagttggatgattctactgattgttttagatggaattatcatcaaaatggccatttttcgggtgtggacaaggacaagagaaagttgatacttgttggtgcctctgctttatgttgggccctgtggttatgtagaaatgatagggtttttgacaaatcaccatctgtttcctatatgcagttttatcttgaattaagactttataagcacatcgacaacggcctcggcgttggtggcaagttgtctgtcgattacctcaccggtgggtccgaaatggtcgacaaatgcgatagcaatggtggaaacaacaacggtctgtgcctcaacttgattaagccacaaaattatgcactttgtatggcaaaggttattctcaagtctcaactaccaatgtctctacaggaacgagctccacttgatgatcttgctaattccaagtgccatgacattatcaagctctaa

SEQ ID NO: 66392 - DNA, 1527 bp, Oryza sativa
  Clone ID: PAT_MRT4530_67348C.1
ctcctttcgatcgagctgtagtacacgtgaagcttttcttgattcgggtgtatccatggcgcgggatgacgacccggccaagaaattagctgtggatggcggcgtcgcggcggcggcgcggtgctgtgacttctgcggcggcttgccggcggtggtgtactgccgcgccgactcggcgaggctgtgcctgccgtgcgaccgccacgtccacgccgccaacacggtgtccacgcgccacgcccgtgcgccgctctgctccgcctgccgcgccgcgcccgccgccgccttccaccgcggcgacggcttcctctgctccagctgcgacttcgacgagaggctccgccgcggcagcatcggcggcggcggtgacgagctgccgctcgacgaccgcgccgccgtggaagggtacacgggttgcccgtcgatcggggagctcgcggcgatcctcggtgtcgtcggcggcgattccgacaagccggccgacgacggctggtggtccgcgagctgggaggaggaggcgccacaggtgctgagcctggatgacatcatcgtgccgaccacctcctgccatggcctccgacctctcctcacaccaccctcccctgagaatcagagttcgccggacaacggggagctggacggcgaggttgtccggcagctaggggagcttgccaggtcagaggcggcggcgcaggccacctttgtagccggcgatcagctggcttcatgggcatcaccggagttcacttctgggcatggtgattttggcattgaggcagcaagcactacagtaccttcttgtgagaatgaaacatggatcatgtcaaccgattgcactgaccctaccgatgcaagcaagacggacatcgcacgcgaggaggctccagcaagctcatctgccgagccatgcctctcttcgctcgtcgagatttcagagatttgccgcagcatgagctacagcggcagtggcatcgacaatggcggccatgatccatcaaccctggcaataatgccaacgcaagctctgcccaagaagggagtctatgacatcgcctaccctgacaggggcacggtgatttcgcgctacaaggagaagaggaagaacagaagattcgacaagcagatccggtacgaatcgcgcaaggctcgtgccgatggcagattgaggatcaagggacgcttcgcgaagtcgaactaggcatgatgatttcttggtcggcttatcagtttcagtttctagcatgggcaagagggaccctgctatacaattcctctatttgcatgatgttattattgatgtgtcggcagcatatgatttccttgcgttttcttttcccagctttgtttgtgtggtagcattgttcagtagaagtaataactacatttgaggagagttgatccaaatccaactcttctgtctcgttgtagaaaaggttcagtgctagatgtttgttgtgttgccatgatgttgctttgttccaattctgatttaagactcctactggttattgcagaaaggttatctat

SEQ ID NO: 66393 - DNA, 303 bp, Oryza sativa
  Clone ID: PAT_MRT4530_67349C.1
gcgaacaaaactttcgaactcttttttttctgcttggtttctattgcatttcattccgcttgatggcatcaagcagctcacacaccatggccaaagcgagctcaattcatggtgccatcggggacgatgaacacctatcactggacggatggctcgagggcttctcgactcgagagagcccctggacacgatttcgactcggctggaggatgggatgattgtgacccggctgggtgagggtctctggccacgatgggccccacctttcactttctccagttgccgccgggttcgccgccggag

SEQ ID NO: 66394 - DNA, 1120 bp, Oryza sativa
  unsure (1)..(1120): unsure at all n locations
  Clone ID: PAT_MRT4530_6734C.1
atgagtagagtgtccactagttgggggttttgtttagtctagggtgaacaagccgaggggagggggcgcgcggaccgggtccacgggagtggggcccacgcggtagcctcacggtccacggtggaccgggcgcacccgggctcgcaccggccggcgccgtgggccccacgcgtcagccgcacccgagggcgggggcggccgacggccgggccccacgccgcggccactcggcgcgcccgaaggcggccactcggcgcggccggcggnaggcggtgcccgcgcccctatggtcgccggcggcggccataggcacggcggagtggcggccgagagaggagaagggaagggggaaaagagcggtccacggctcaccctaggtcgacggcgacgatgaaaaaggcggcgcggctcgggtcgacggggtcgacggcgttccggcggtcggcggactcggcgagggggtggacggggtcgacggcggtgcggcgaagccggaggaggcgatgccggggcgggagacggtcccggcgagcagagaaggccggccggaggtcgtcggcgacggaggagagagagggcgacggcgcgagcttgattccggcggggagacggtgcggcaaggggcgaaaacgggcgagggaggcgcggggagggtttaaatagggttggaagggggagagagcggccggaggggaaggaaaccggcgcgggaggtccggccgccatcaatggcgccggcgtgatttgcggggggcaaatccgcccgtttgaacgcgagagagagagggaaaaatggggggaaagggagaggggatcacggggagtgattccccccactttattgcacgcggggacagcgggaggcggcgggattcgcggcggcggcggcgctagggcacgggggaggcggcgggagcggcgggaggaaggggatgacgggtgggcctcacccatcagcgagggtggcgggcgggcccgcctgtcagcggcgcgcgcgcggggagaggccgagtgggccgcggggagaggagagagagagagggggggaggagagatgggccgggccgacccaagggagggaagggggacttttagggtttttctttttataaaatcattt

SEQ ID NO: 66395 - DNA, 1276 bp, Oryza sativa
  Clone ID: PAT_MRT4530_67350C.1
tttctttggacttgaattgaatggaacgaagaagttgataactaggaaacaaagtaaaatctgaacaattcgacttagatctaacggttagatagatttgtgtgatttggtgagatgaaatgtattgagtgacacatacatggttcctttctataatacaagtgtgtactcgatatcataaaaatactataattgagatttcaaatgagcacagcttgttaattaatatctatgtggcccacatagataatgttatttttgatggaaattattgtcaggctttgcccaacagtatagcttttataaaagaaaaatatttacatcatacaaagaggacacagaaagatctgaagaatattacaaagtttgtaaccaaacaaacaatagttgtttaagggggtccttcattctacacatttgccaaaactatcatctggaagaagttgagattggagctccaactgatacccaagtgctgccaacattccaaactgaatggacaggtaaagaaaagatgcagtttcatttctctccaaactatcatcatcttcttttgcacaatgactgcggtctaacatatctcttgtgttaaatcggtccatcgataaaagccaagcaaatacttttattttcatcacgcatcttgtcttctagatacaaacaaatggccttggtggttgtaggaaagaaaaaaaaatagtttgtaaagtctttgagtcgagaatttatcaacattccagatgaaattccaatgatcaccatatcccgcttgcaagtgaatttgttcgagctctgactgcaaaattagaaattcctcataagtatcagcattcagtggcaaaagaaaagcatcttccaacggctttgaacaaatttgtttgacaaactcaagcttataagagcttttgttcattcccaaatggggtggctttgtagtataataagagttccatatatgatacacctatgaaaggtctgcactcctatagaatttggccaagtgctctatcaacaaggcaatgttttggattctcacgttaattatatctaacctacatttctcctttggcctacagactagctcccaagaatcaagtgactttctggtagaattagcgttattacccctccatagtaaattctttcttgcagtaccaatagccttgatcacagttataggcaactttagatagcacatatgttacgtaggaattgttgaaagcaccgagttaatcagagttaatctacctccttgaggtagaaaaatagaacttat

SEQ ID NO: 66396 - DNA, 2138 bp, Oryza sativa
  Clone ID: PAT_MRT4530_67351C.1
atggcgtccacggatccgctgctcggcggcaaggaggaggaggagggtggaggtgaggtgaggagggcgcggcggtggtgggtggggcgggtggtggacacggaggaggcgtgggcgcagacgcggttcgcggtgccgatggtgctcaccaacatgtcctactacgccatcccgctggtgtccgtcatgttctccggccacctcggcgacgtccacctcgccggcgccacgctcggcaactcgtgggccaccgtcaccggctacgccttcgtcgtcgcgacgggcatgagcggggccctggagacgctgtgcgggcaggcgtacggcgcgcggatgtaccgcatgctgggcctctacctgcagtcgtcgctgctcatgtcggcggcggtgtccgtcctcgtctccgcactctggtgcttcaccgagcccctcctcctcctcctccggcaggacccggcggtgtccgccgccgcgtcggcgttcgtgcgcgcgcaggtcccggggctcttcgccttctccttcctccagtgcctcctccggtacctgcagacgcagtccgtcgtcgcgccgctcgtcgcctgctccctggcgccgttcctgctccacgtcgcgctggcgcacctcctcgtcaacgcgctcggcctcggcctcgccggcgccggcgccgccgtgtccatcaccttctgggcctcctgcctcatgctcctcgcctacgtgctccggtccgagaggttcgccgagacgtggaacggcttctccgccgaggcgttcaggttcgtcgtccccaccatcaagctcgccacgccctccgccgtcatggtctgcttggagtactgggcgtttgagctactggtactgatcgccggattgctcccgaatccgacagtgagcacctcgctgatcgccatgtgctcgagcacggaggccatcgcctacatgatcacgtacgggttcagcgccgctgtgagcacgcgggtgtcgaacgagatcggggccgggaacgtggagggggcgaagaacgcggtggcggtgacgctgaagctgtcggtgttcctggcggcggcgttcgtgctgctcctcggcttcggccacggcctctgggcggggctcttcagcggcagcgccatcatcgcggcggagttcgccgccgtggcgccgctgatgatggcctccatcctgctcgactccgcgcagggggtcctctccggcgtcgccaggggctgcggctggcagcacctcgccgccgtgaccaacctcgtcgccttctacgtcatcggcatgccgctctccatcttcttcgccttcaagctcaagtggtacaccaagggattatggatgggtttgatctgcgggctgacatgccagacctgcacgctgatggtgatcaccgcacgaaccaaatggtccaagatcgtggacgcgatgcaggagaagaaggccagctacgtcgcgtagtttaactagtctttggctatactgtagattatcgatcggattggatttgtgtatgtatacacgatgagcatttgaagcaacatctgcggttagcatgtctgcaacacgcgcgacgccggctgttgcgttcgtgcagtgcgtgcgcctgcgacgtttcgcggggttttggacgcgacgacaatgcgcgcgaactgcttgttcaaatacagtttcttcagccctctggaagctggaagcctggaatggacgaacgccttagagcaagtataatagtaggctatcagccaactataagcttatgtggaggaaagagaatttgaaaaatggagagggttggctctcatgcaagagctagctattcacatattttaagatagatacataggtgagagatagagagaggaggagaaaaaaaagaggtaaccttatagcccatttactatatatgttaactctaagataagctataaactcattgttggctctaaaaaaaaaaaaaaaaaaaaaaaaaaaaaaaaaaaaaaaaaaaaaaaaaaaaaaaaaaaaaaaaaaaaaaaaaaaaaaaaaaaaaaaaaaaaaaaaaaaaaaaaaaaaaaaaaaaaaaaaaaaaaaaaaaaaaggggggggggcgtttttaaaggaccaaattttagtacccgggtattgaaaggaaatactttttt

SEQ ID NO: 66397 - DNA, 420 bp, Oryza sativa
  Clone ID: PAT_MRT4530_67352C.1
attttgttcaagtgtttttgctgctggagaaaagaggatgcggggtttcggcgcatcgcccctgggacggactacctcgccatccccgccggcgcggacgaccggccccggtggtccgtggtcgtcgggctcactgccgtcgacgtgccgcgccacaatctgcgcctgcacaggttccgcgtggccgcgtccggccgcatcctaagcggcagcgacgacgtcctcgagaccttccgccacgtcgcgccggacgatgttgctgccgaggccttcagcaccgcctccgcctatctgagcaacgacggcggccaccagatgcacctcatctgccgagccgtccccctcaacgccgacggccgctggacctgcaacaagacaaacttgaacaagtgttacagatcgttctccatggatctgggc

SEQ ID NO: 66398 - DNA, 263 bp, Oryza sativa
  unsure (1)..(263): unsure at all n locations
  Clone ID: PAT_MRT4530_67353C.1
ctcatcccccatctcctctccaatactcgccactaatttcttctctctttctctctctctccgcgccctcgcatcgcacgttaggcagtcgagggatagcggcgcaatggcggcggcgntggtggcgaacggcgngacggcgactcctccaaggccgcgntcggtagatatacagcaggctcaaggaggagatgntcgaggacccggacttcgagttcaccgncgagtcgntccagtggatcgaccgcatgctggattacaat

SEQ ID NO: 66399 - DNA, 285 bp, Oryza sativa
  unsure (1)..(285): unsure at all n locations
  Clone ID: PAT_MRT4530_67354C.1
tcatctttttcttctcggtgcttctctgctccaacctgtactttgcttctgccactccatgtctcaatcttcccctttcttctccggtgcccgagcacatgctggagcaggaggaggagnagctctccctcctccgcggcaccaagggcaccggaggcgcccccaacaagctctccaagagcaaggtggtgcgcacgtcaatcagcgcggaagctagacggagacctcacaaaaacaaaaagcggagcaaaaagaagcgaacaagaacaagacccccccccccct

SEQ ID NO: 66400 - DNA, 1323 bp, Oryza sativa
  Clone ID: PAT_MRT4530_67355C.1
atgctctccacggcggcgccatcctcaacctccctcgtcgcctcgttcccgtcacgcgcgcgccggcgggggctcccgggccgacgcggcgtggtcgtcgcggccgcgggggcggggccgggggcgggggcggcggagaggttcgcggcaagcagcagctccatcaccgactacctgcggtaccgccgcccggggtccgccgggggaggtgggggaaccggggtgtgcggcggggagctgcagacggcggtggtgcggtacgagaagcggctcccgtggtcgctcatccaccccttcctccatgttgatttggtttctactgtccacattgctgacaaagaatacttcgatagactccagcaagcacttcaagattatgattgtgttctttatgaaatggttacaagtcgggagaacttaaacaatcgcaaggacccaacctttgcgaagaagctgaaatcttcacgtaggggattcagtattcttggcttcatacagaagcaaatggcaaacatcctttcattggattaccagctagattgccttgactatggcagtgaaaaatggcaacatgctgaccttgattttgagacattcaagcagcttcagagtgaaagaggtgaaagtcttttcacgtttgcggtagacatgacactgaaatcaactaaagccttggtacaaccaacattgcctgatggtcttgacttctggaggtctaagctgctttgggcctcacgtgttctaccaatgcctcttgttggactgttccttatcagtgggctttgcttaccaatcgacgatcaaggtggatatcctgagcttgaagcattgtccaggctagattttggagctgcactgaagatttttctggctaagcaattgacctccgatttcacatctatgacctcacccattgaggaaaagtcagttatcattggggaaaggaatagagttgctactgagaagatacaggaagcaataaaccatgggtacaagagaatagctgtcctttatggaggtgggcatatgccggacctgggaagacgtcttcgtgaagagctcaatatggtcccagctgacgtccagtgggtgacagcatggtcaattagaagccgggagctagacagggaatctcttccattcctgaagaccatggctgaagtctcagggtggcctttgaatagatacgagacacttgctctgcttatcttttcttcagttctcgcagtggatctttggttctgggagcttcttgtgggtactgccgtgaactgggcatctttggctggctcatggattgaacaatttaatggtccattttga

SEQ ID NO: 66401 - DNA, 888 bp, Oryza sativa
  Clone ID: PAT_MRT4530_67356C.1
atgcgccaagccgccaacaccatgctgccctcccactctccagctgctacccatcagctacccacctcccctcgccgcagcacgcgccccgcgccgccaccaccatgcccatgcccgcgcgccggcgcagccccggcggccgagtctctcctccctggatgccttcgggcggagtcgctgccccggcacgtggcggtggtgatggacgggaacgcgcggtgggcgcgggcgcgggggctcccgtcggcggccgggcacgaggccgggcggcgcgcgctggaggagacggtgcgtctctcccgcgcctggggcatccgcgcgctcactgccttcgccttctccaacgagaactggagccgccccaaggtggaggtggacttcttgatgaggctgttcgagcgggtgatccacgatagcgtcgccgagtttctgagggaaggaattcggctacgtgtaatcggtgacagctcaaggctaccggtttctctacagaagattgcgagagaagccgaggagaccacgaggaacaattcacagcttgatctgacactggcaatcagctacagcgggaggagggacatcgtgcaggcgtgccggaagcttgcccagaaggtgcagagcaaggcgctcgcggcggaggacatcgacgaggcgctgttcgccgacgagctcgagacgagctgcgcggccgacgagttcccgtaccccgaccttctcatcaggaccagcggcgagctgaggctgagcaacttcttgctgtggcagtcagcgtactcggagctcttcttcaccaacacgctgtggcctgatttcggggaggctgattacctcgaagcgctttgctccttccagagcagagacaggcgatttggtgtaagaaaattgtag

SEQ ID NO: 66402 - DNA, 209 bp, Oryza sativa
  Clone ID: PAT_MRT4530_67357C.1
gcacgaggaagttcctaacctgactccaccatgagagattaacatcccaacagctgctgctcgcaactgtacgtaacatcttgcccgcccctcgtcgaagtccgacccgcagctagctcagccggtggccggcgagcacaacgtacgtggtggggtcgcactcgcgcaccaccggtggagctagctagctagcgttgcccctgtctctg

SEQ ID NO: 66403 - DNA, 806 bp, Oryza sativa
  Clone ID: PAT_MRT4530_67358C.1
gatactctctactgtctcgttcacgtagctcacctgctcgacacaatggcgtcgcagcagcagcagaagcagccgaggaaggcgaagcagaaggaaggggaagggcactcggcggaggaggcggcggggctggaggagatcggcaggtatcgcgcccaggcgcagcagaactcgatggacgccatccgcgacgccgaggagcggtacgccaaggctaaccgggagcacggcggcgcgacgcgggcgcccggcgccaccgtggtgtcgtgcgtggagcgcaagaaggagcagccgccgccgccgccgcagcacgggaagaagcacgaggcggcggaggagggacacggaggcggcaaggcggagaccggcggccaggagggggtgaccgccaagaaccgcggcgaggggcggcagcagcatggcgagccggacgccgccggcgctgctgcccgggagaagagtgctggcgccacgcacggcgccaagcaggccggctcgaccgcggccacgcgcgccgcggactacgccgcggccaagggcaccgaggccaaagacgccggcgcgcacgccgcgcaggccgcgacggagaaggcgaaggtggccgcggggacggccaccgactacgccagacaggccgccgcgaaggcgaaggatgtcacgctcagcaccggcgggacggcggcggagaagaccaaggacgtcgcgctgagcaccggcgggacggccagcgagtacgcgaagcaggcggcggtgaaggggaaggacgtcacgctcagcgccggcgagacggcggcggagcacgccaa

SEQ ID NO: 66404 - DNA, 864 bp, Oryza sativa
  Clone ID: PAT_MRT4530_67359C.1
atgcccatgcccgcgcgccggcgcagcccggcggccgagtctctcctccctggatgccttcgggcggagtcgctgccccggcacgtggcggtggtgatggacgggaacgcgcggtgggcgcgggcgcgggggctcccgtcggcggccggccacgaggccggccggcgcgcgctggagaaaacggtgcgtctctcccgcgcctggggcatccgcgcgctcactggctttgccttctccaacgagaactggagccggcccaaggtacacacgcctcgcgccgattccttcgaaatctctgccttcgccgagcttgacgcgtcctcgccatgttggaattcgcaggtggaggtggacttcttgatgaggctgttcgagcgggtgatccacgatagcgtcgccgagtttctgagggaaggaattcggctacgtgtaatcggtgacagctcaaggctaccggtttctctacagaagattgcgagagaagccgaggagaccacgaggaacaattcacagcttgatctgacactggcaatcagctacagcgggaggagggacatcgtgcaggcgtgccggaagcttgcccagaaggtgcagagcaaggcgctcgcggcggaggacatcgacgaggcgctgttcgccgacgagctcgagacgagctgcgcggccgacgagttcccgtaccccgaccttctcatcaggaccagcggcgagctgaggctgagcaacttcttgctgtggcagtcagcgtactcggagctcttcttcaccaacacgctgtggcctgatttcggggaggctgattacctcgaagcgctttgctccttccagagcagagacaggcgatttggtgtaagaaaattgtag

SEQ ID NO: 66405 - DNA, 603 bp, Oryza sativa
  Clone ID: PAT_MRT4530_6735C.1
gatgttatggagagcctggtcagtgacatggtggtggtggtatagaagtgccacagcttctggtgcattgcttcttgggcatatctacatctctgatctgacctgcagtttgtaagatacaaaacagggttcattagcctcccttgcagaaggtcgcgaaagtggcatcttgccctggtcccatcattacacttggaggcttcccaaataactaggttaaccaaactgtaaatagtcatcctatttggattgttgttctccttagccagcttcctttcccaaatgtaaaaaggtttggaggtgcttccatatgataaatcaggttagtggggactgcctgggcaagtggttgtttatatgggcccagggagaatgcatgcgcatgtctctcatagatgttgttcaatagatagatgcatttgtccagctaacacaatattagatggcttgatgaatcaatgccttcttttaagtctttcattgtaagcactggacagtcatccagtgcatcaaggtagggcgtcattgtccttttgtatatatgaattgtacttgtacagttgcccactttgatacaatgcgtccaaaaatgttttgaggtcc

SEQ ID NO: 66406 - DNA, 1021 bp, Oryza sativa
  Clone ID: PAT_MRT4530_67360C.1
ggccgcgggttttttttttttttttttgagagtaaatcctagtatattgaaggcacgaactacaaaggtttttagtacatgcccacttgtgccaattatctcaattctcccaagaatgccccctttgctgcatcaatcttaccaaaatagtgtaactaatgcgagaagtgcaactggaacagaaacgcctgctctaaaaaagacagacatcccaaccccagatccaagcaaaaacctattggtttacatccctggcgatgtctcatgtgttcatcaagatggtaaaaccacatggattcaaagtttctcttccgttgtacagttatcactaactacacttcaccacaaatggtttgaatgcatttaggaactgtgaggtccgcaccccaagcttgaggtcaacttctccaccacccagccagaagaaatccttatctaacttggtaatagcttcatcaatgataaccggtatgtctgtttccattccaatgcatgtaacagcattgtgaacaaaccctgtaagcttgagtgactcctcttctggtgccagcctcatgttaaatctcttcttgggtatctgcttctcgtttagggaatagatgaagttcttgatgctgtctgcattaagccgtgccatatactgaacaacaacgacataatattttgaattctttggattgctgcagtcaacaacatctgcagcagcttgtgtattcaccatgacgatgctcttgcagagttgattgactgaatctgcgcggaggaggtcgcggcgctcctcgagagggcggtcgtagtagtcggcgggcacgcgccggaaggtgaagtcgagcacgccgcgcgcggtcaggatggaggagagccgcgcctccgtggcgcccgtctccgcctcgccccccgagggcgccgcggagatagatagcgcccccaggcggtgctgctgcgcggcgagctcgaggtccgcgacgcggcggaggatccgcagctgccgcgcctcgagatcggccgcggcggcgtccat

SEQ ID NO: 66407 - DNA, 359 bp, Oryza sativa
  Clone ID: PAT_MRT4530_67361C.1
atggggctcttggtttttcacttttgggatagagtacaggtagagaaagggcccacccaaaaaattgaccctggcgacgtctcaacgtcttcatttgccagcgccaggcttctcggtcgctggcgcacggtgcgcccgccgcctcttcggctcaccggcggccacgtagccatgttcggcaccttcatgctcgccagcggcagcgccacgaagtccctgtcgacgctgccgtccttccaccggcactccggcaggcacccctgcgctcgccgccggctcgaactcgtccaggcactagctagcttgcacgttggaatggcgcctttccaggcgtcagagtggccggccatgccgcgatg

SEQ ID NO: 66408 - DNA, 2374 bp, Oryza sativa
  Clone ID: PAT_MRT4530_67362C.1
ccaccgccttcgtccttctgtgccttccgctccctcgctgcctctgatagcctagccgccccgaccacaaaagagatgggggaggtcatctctgccgtggaagaggaagagggaaaagaaggagagggaggggagaaatgggaagaaacggaggggatggattgcagcggcaagtcacagctcgagctccgcaatggtgatcggcagagaccggatttggggggtttcggcagtggtggtgattgggcgccagcgaggtgtggattgggatttctgggaggagagaagctcgactgtggtggtggcttggttgatcggggaggaggaggggtatcgggcggagaggtggcggcggaggaagaaaagggggaggggggaagagagagaagcagggggcggggcggacatggatccccggcggcgggcggatttgtccgtggggtgggcggatctcccgccggaggtgttcccggtggcgaaggtggtgctgtcggcgccgcccaccacgcggggatgggtggtggcggtgctggggcggtcgggcacgatcgcgctgctgcagccggacgcggagggggagggcggtcgttggatggcgatggaggacggggcgaagcacggagggttcgaggacatggcgatctggcgcgggcggctgtgcgcgctgggcggggacggcgcggtggtggcgtaccgggtgagcctgggggcgcgggtggcggcggcgcgggtgctgcgggcggcgcagcatccggtggggtacgcggcgggggcgggggggcagcagcgggtgcgggggcgggtgtgtatgtacctggtggtggacatgtcggggtcgctggtggtggtgcagagggagtacagcgtgcggcgggacgcggtggaggtggaggtggaggtgtcccggttcgcggcggaggagcgcaagtgggaggcggtggaggagctggcggcgggggaggcgctgttcgtggggtcggtggtgtcggtggcggcgcgggccacggaggggtccgggatcagggggaactgcgtgtacatggcgcggagggaggtggaggcgggcgagggttggttggtggaggtggatgggaaacccaagaaaatacgaggacgacggcggcggcgacgattccaacgagaggagaagcgcaaggaggataggcggcggcggcgactgggcgaaagtgatcagagctcgcgaggatgaaggcgacggtgaagggcaggtacgagggcgacaaggccacggccgccgccaccctcgccttcaccccctccgccgccgacctccgcttcaaggcctccgccaccgatgccgccttcgcccgcgggccctccctcgagggcctcatcctcaccctcgagaagcccggctccttcctcctcgacctcaagccccactccaaggatgtgcgcttccaattcatgaactccgcgctgctgctcgaccgccgcgtcagcctcacctacacgcactccaccaccctctccccgggccccgccaagctgcccgcccgcaccgccctcgacggctccctcaccttcgatccggccaacaagctcagcctctcccacacgctcggctcctccggatgccgcgtcaagtactcctacgcgcacggccaagaccgcctcaccaccatcgagccctgcttcgacaccgctaacaacgcctgggacttcgccgtcacccgcaagtttcaaggaggggatgccatcaaggccacctaccaagcctccaccaagctcctcgccctcgactggaccagggactccaagatcggtgcctccttcaaggtcgcagcgtcatttgatctgtctgaccaaagcaaagcgccaaagctaatagcggagagcacgtggaattacgagatctgattgcctcttctaggaggcaggcaactcctgcttaagaagcacccttgtcatactggttgtcttgtacttgggaactattctttctgggtgcaacaatttcaatacctactgccctttgttcatttttggctgccctatgattggagttgtcatggcgatgctacggcattgacaatgaacaccgattatcttttactatattctctaatgcacatgatatgattgaacaaaatgcctttggtggcgagaattcgagcattggtgtttgctccttgttcagatatacggttgatgttctttccttccttcaaaaaaaaagtaaaacgttgaattagcttgccacatttttgttacatttgtttggacaagacaaggtgggcagaaggcaaaagaaggaagaagctaaagagtggttgttgatgatgttctatacttcttccccatcgtacttatcctgctgcccggtggttgaaaaggaactatcacttttgtt

SEQ ID NO: 66409 - DNA, 910 bp, Oryza sativa
  Clone ID: PAT_MRT4530_67363C.1
aatgaaattattaatctcaatgatccgaagcactacacttctaaaaagtgggaataatagcaaggctaagtacaaccacattactcaacaagaaacaccaatgatgcagatgtgcaaggggatacaaggatggatttcacccccactccttaactggcagcgggcagtcccctctcgtgcctaggtaaatttggaagtgacaaagatcgtcgcagggtccatcccgctccatcacgcccacccttgcctggatgcgtcaaccagagaaaagctatacttcaagtcaggcagttacccattcccgcttgtggcaagcgttgtatttctagtgcatcctgcgaaccggtccttaattgccattatgatgtcagccgaggggggaagaggtggcgccgacaagcggaccccacctctcggtgactcaaggggctcgggcgcacggtggaccaggtccacgacggccgaagcagccggacggcacggccgcacaggcgctcccgcaaggcagctggccgacgagcggcggcggctgccgggcctgagaccaccggcgacgacaccggcggcgagtggcaacggcgcgaggggcggcgagaggaaaccaaggggacggagaggaaggaggggagctcaccgagcggccaaacggcggaaggaggcggcggcgggctcctcggggtgactatgggtggcggcggcatggccaggcgaggtgatgctcgccggcgggaggtggctggaggcggcggtggctcgggttggtggtggcggcgaggtttcggcggcggtttggggaggaaagtggtggccgggcttgctctcgcggtggcaaagccggtggtggtggcggcgcgatgcggcggcggctatggcggcggtagcgcgcggctgaagctcgccaggaagcggc

SEQ ID NO: 66410 - DNA, 1029 bp, Oryza sativa
  Clone ID: PAT_MRT4530_67364C.1
atgaaggcgacggtgaagggcaggtacgagggcgacaaggccacggccgccgccaccctcgccttcaccccctccgccgccgacctccgcttcaaggcctccgccaccgatgccgccttcgcccgcgggccctccctcgagggcctcatcctcaccctcgagaagcccggctccttcctcctcgacctcaagccccactccaaggatgtgcgcttccaattcatgaactccgcgctgctgctcgaccgccgcgtcagcctcacctacacgcactccaccaccctctccccgggccccgccaagctgcccgcccgcaccgccctcgacggctccctcaccttcgatccggccaacaagctcagcctctcccacacgctcggctcctccggatgccgcgtcaagtactcctacgcgcacggccaagaccgcctcaccaccatcgagccctgcttcgacaccgctaacaacgcctgggacttcgccgtcacccgcaagtttcaaggaggggatgccatcaaggccacctaccaagcctccaccaagctcctcgccctcgactggaccagggactccaagatcggtgcctccttcaagtgtgccaacatggctgatagcatatcagaattacctatagcactgaaaacagcccgtcagcccgtgcttgcaacttcaacttctttcacgctgaggagccgccgcctggtgctcgcgttgaggggtagtcgccgccgccgtcgcctgctgctcgcgtcgttgtgtgaggagccgccgtctccgcctgctgctcgcctcaccacgccaagagccaccgccaccgcctggtgcttgcatcactgcgtcgaggagccatcctctccgcctactgctcgcctcgccacgccgaggagccaccgccgcctgctgctgctcgcgtcaccgcatcgaggagccttcgtctccgtcgcgcgccaagccggctcgccggagctgccatcggtgccaccgccacgtgatctatctacgatttggggatgggagcagtgggggtga

SEQ ID NO: 66411 - DNA, 1664 bp, Oryza sativa
  Clone ID: PAT_MRT4530_67365C.1
atggatccccggcggcgggcggatttgtccgtggggtgggcggatctcccgccggagctcctggaaggaatcatgaagctgatgagccccctggagcgtgtcaccgtccgcctcgtctgctcctcctggcgcacctgcgcccgtgcctccttcccctccgacctcgccttcgaggccccgcgcctcctcctccgccgccctgggcccccccggggacctctcgccttcttcagcctccgccgcgccgagatcctccccttcgccctccccgcccgcctcagcgccgcccgctgctgcggccacatgggcggttggctcgccatggccttggacgacgaccgcgagatcgccctgtgcagcgtcacgtccggcgaatccgtgggcatccctcggccccccgtgttcccggtggcgaaggtggtgctgtcggcgccgcccaccacgcggggatgggtggtggcggtgctggggcggtcgggcacgatcgcgctgctgcagccggacgcggagggggagggcggtcgttggatggcgatggaggacggggcgaagcacggagggttcgaggacatggcgatctggcgcgggcggctgtgcgcgctgggcggggacggcgcggtggtggcgtaccgggtgagcctgggggcgcgggtggcggcggcgcgggtgctgcgggcggcgcagcatccggtggggtacgcggcgggggcgggggggcagcagcgggtgcgggggcgggtgtgtatgtacctggtggtggacatgtcggggtcgctggtggtggtgcagagggagtacagcgtgcggcgggacgcggtggaggtggaggtggaggtgtcccggttcgcggcggaggagcgcaagtgggaggcggtggaggagctggcggcgggggaggcgctgttcgtggggtcggtggtgtcggtggcggcgcgggccacggaggggtccgggatcagggggaactgcgtgtacatggcgcggagggaggtggagttgatcgcgccgcacgccatcggcgtctactccctggccgacggggaggcggatgggttggccatctccggcggccactcgctcgccgcggagcctgtctggatcgccccctcgctcgcctgaaaaatacgaggacgacggcggcggcgacgattccaacgagaggagaagcgcaaggaggataggcggcggcggcgactgggcgaaagtgatcagagctcgcgaggatgaaggcgacggtgaagggcaggggccatctaaactcaatatcattgctacctggaaaactagacaaccaccatcgcctgttgcttgccagcacgctgaggagccgccgcctggtgctcgcgttgaggggtagtcgccgccgccgtcgcctgctgctcgcgtcgttgtgtgaggagccgccgtctccgcctgctgctcgcctcaccacgccaagagccaccgccaccgcctggtgcttgcatcactgcgtcgaggagccatcctctccgcctactgctcgcctcgccacgccgaggagccaccgccgcctgctgctgctcgcgtcaccgcatcgaggagccttcgtctccgtcgcgcgccaagccggctcgccggagctgccatcggtgccaccgccacgtgatctatctacgatttggggatgggagcagtgggggtga

SEQ ID NO: 66412 - DNA, 278 bp, Oryza sativa
  Clone ID: PAT_MRT4530_67366C.1
gtgtaccggaccaagctgtctaagccctaatcgcctgcgacaccgtcacacaccacggcctgggtcattacctgcatgctcacccatccgtctacaggcacggttcaatgctctgatcacatgaagacagctgttgccgattgatactgcaaaccgtttctcgggctcttcaatgtgaacggattctctatagagctgatcatgcctgagatgcttcttctaaaggcgatcgatctcattctgctcgcggggcgctcctactttaaggacattgacat

SEQ ID NO: 66413 - DNA, 1010 bp, Oryza sativa
  Clone ID: PAT_MRT4530_67367C.1
gcacgagggctcgtgggttgttgcaaagttgcgagagagagagatcagttagtttgttgagtggaagcagatcaggaagatgctggagaagctgtgggacgacgtggtggccggtcctcgaccggagaccggcctcgagaagctccgcaaggccgctacaacccgcccccttgtcatcaacaaaggtagcttatgtggttgtacagatgcttactactcctaactaagaagctaatataatttcgttccaaattatgagatgttttggtcgtttcgtcgtttatttagattgattaacatcactataaatttggactatatataagctattcaaaataaagaacggtctcataacatgaaacagagaaaatattacctttattaagcaaacaagcagggactgcaacaaatttaaaagagcgtcgtaaccagaaatattgcttatatatatattaacgagtgttaagatctggactctggacggccggagtgttccatttgtaccttcaaaatcatgttttttttattttaaattactatgttaaatttcggagaattctacccccttactagttaagttttaccttaagactgtctttagcaatttgtgactcccatcaatcactgaacctctgaataattagatggcaacggctaagccagcggagtggcctacaaaccgacgcaatcgattgccacgaccccgacgacgccggtgacccctgtggtttgagcccggcacggggacacgacgacccaggggctagacttttgaaggactggtggccgcgggagcactaggcccacatctgtggtcgccgttggccgtgcgcatccctaccgccgggtgagctgttgctattgggccacgtaggcagccgactgtttgggtttgcggtcctccgatctttcttctgactctctctcattttttgttctcaaggcgctctctcgttctcgttattctgtttatttgggtgtgtggttatacattgcacgctttgtgtctt

SEQ ID NO: 66414 - DNA, 153 bp, Oryza sativa
  Clone ID: PAT_MRT4530_67368C.1
gcacgaggcttcagtgccacgtgctgttcatctcctccgcgaccatgatgtccttcctttcctacttccccatctacctcgacaacaaggatgcccaggccgacgtcggcgacgtcgacatccccggcgttcggtcgcctggaagaggtcctg

SEQ ID NO: 66415 - DNA, 546 bp, Oryza sativa
  Clone ID: PAT_MRT4530_67369C.1
atggaggtggtggagagggcggcagccgacggcgtaggcttcgccggctcgagcgccagggcgggcgcgtggtggagcgtgggaagggcggggaggagagagaggggaaggtgggagacggcggcgcggagatcgagtagggatgagcagatcgagagggctccgccgtcgccgggaggagaggagctaagaacaaatgggaacattggtcttgttgaaattgctattgtattgttcgtgacgttgtatttcaggctaggacaaattgaccgcaaccttggtgcaggcgacatagctcatttatatcacatgatgcatcgccagctacttgtcgcagctcaggttcgtgcagctcagcccaacgagcagcaaccgaacatctcatcgaagtcgaactcaccgattggaggtactctaacacaaggtaccccttgtggtgtcaacggtgagcatgtagacatggctcttgttgtggttcatgaattaggcgaggttgaagtcgtcgagcttaccaacggcgatggaggagtggttagagatggatga

SEQ ID NO: 66416 - DNA, 393 bp, Oryza sativa
  Clone ID: PAT_MRT4530_6736C.1
atggcggagcggcggccgagagaggggagggaagggggaaaggaggcgacggccccacgactcaccccggggcgacggcggcgatggaggaggcggccggaacggagggaggcggcggcgcggctcgggtcgacggggtcgacggcgttccggatcgggtcgatggggtcgacggcgttccggcggtcggcgaccgacacggagaggtggacgaggtgggcgaggatgcggcgaacccgtaggaggcggcgccgaggtgggaggtggttcggggcgacgacggcggcggaccggagctcggcggcgacggcggagagagagagcgacgtcgcgagctcgaatccggtgaggaggaagggcggcgagaggcggaaacggacggaggagcgctag

SEQ ID NO: 66417 - DNA, 1497 bp, Oryza sativa
  Clone ID: PAT_MRT4530_67370C.1
gcccgacccccctgcccagctgtctacgccaagaagatccgaggagaggagcctaacaacacctgtcacctactactacacacagcgacagagaggagcagagccgcaagaagagtcgagtcatggcggggtcgtcgtccctcagcacgctctccctctgcacgcagtcgccatcaccgtcaccggtggcgtccgcccgcctcgtggcaccggctgtcctcggtttcgccggggccccgcggttcccgacgctgcgggccgcgccacggcggctgacggcgcgggcggtggccggggacgccgaggacgagtgggggaaggagccggcggcggaccagggcggtgccgccgcggcggtggccgaggcgcccgcggatgtgccggtgacgagcgaggtcgcggagctcaaggcgaagctgaaggaggcgctgtacggtacggagcgcggcctgcgcgcgtccagcgagacgcgcgcggaggtggtcgagctcatcacgcagctcgaggcccgcaaccccacgccggcgcccaccgaggcgctcaccctcctcaacggcaagtggatcctcgcgtacacctcattttcacagctattcccactattggggtctggtagtttgcctcagcttgtcaaggtggaagaaatatcacaaactattgattctgagaacttcacggttcagaattgcatcaagttttcaggacctttagcaacaacttcagtgtctaccaatgccaaatttgaagttcgaagtcccaaacgtgtacagatcaaatttgatgaaggcattatcggcactccacaattgactgattctattgtactacctgagaagtttgagttatttgggcagaatattgacctgaccccattgaagggcatattttcatcaattgaaaatgcagcatcctcagttgctagaaccatctctggtcaacctccactaaagataccaattaggactgacaatgctgagtcttggttgctcacaacctaccttgatgatgagcttagaatctccagaggtgatggcagcagcatctttgtactgtttaaggaaggaagcaccctcctatattaagcttggcatgcctaatctagggtagaacttgatgctgaagcaactccaagcagtacttgtggctaaattatttttcatatttaagttggtgtgttgttatttgtgtttgtatagttcgggcgtttggattatgtgaagttttgtgtatgtgtaatgtattctttgatgtccctgagcacctgagctgctatactagtatacatgttatatattgcaaaagttacactgaaatgtaaaaggaatatgtgaagcgccctttctgtaaaaaaaaaaaaaaaaaaaagaataggggcttaaactttcataacacaaaaaaaaaaaaaaaagcgccgcaaaaaaaaaaaaaaaaaaaaaaaaaaaaaaaaaaaaaaaaaaaaaaaaaaaaaggggatccactagttctagacgccgccac

SEQ ID NO: 66418 - DNA, 921 bp, Oryza sativa
  Clone ID: PAT_MRT4530_67371C.1
atgggggaacctttacgcaatggactcatcggtccaattttattggaaacatttgaatacccatcagattcaaatgtggaaacctatactcgtgtttacgatgatccagaggaagaagagggaacgacacttgatgaagctgggaatttcaatgataacttagaaaataatatcgaagagggagcaggtcatctagcaaaaggacatgacaagttagcagtgatcaaagaggaaactaacattgaagacctgataaaagatgaaaaggcagaagatgttgaactgaatatgattgtagatgaagttgttctagttggcaatgatttggctggtgctttgcagttctgtatgaagtgctcaatgcatcaaatggtgcttatcctgacctcctatgtccttttttcttatatggtacagacggaggcatttgtcaccaagctagcaagtgacgccaacgccagtggcctctctgtggtggagaaagagcatcctaggagtctgacgcccatgctatgggccaaaaaggtggctatgatattccatgttccattacgcaattactttacatttggtaatgtgtgcctcgtacagatatactccaacttgccatattcagaaacctgttactcagcatttctttgccaggtcgagcacttttccgaacatcaaacgaagcgcccatgctgggagcaatgcctccgccaccttcaaagggaccgaagaactgaacctgcagtggacttaactgtttggagcagatttcgagccctcaccgacagcaacgacagggccaggtaccaacggcacatgacatgtggtgaaaacttcagtgaccagcggtacttgcccatgcatatgctctcccacgaaatcgcagagcctgaaccaatggttctttctgtcacattgctttgcgtttaa

SEQ ID NO: 66419 - DNA, 260 bp, Oryza sativa
  Clone ID: PAT_MRT4530_67372C.1
gtcgatgccgacgaccccgacgacgccgttgtacgccgactagtaaatcttacacaactacgacgtctgtcacaccgagtgtcaacacgagttgctggtacatttgtttacatgcctacagactctcgatatggtgaggtttctcctaaggtgtatgtttatgctattgatgttgtcctttatgaactactgtcagcaaacaagttgttgtgaattcattatcttttgatttcaaaccacatcgtttcgttattctgttt

SEQ ID NO: 66420 - DNA, 386 bp, Oryza sativa
  Clone ID: PAT_MRT4530_67373C.1
ataaatacctactttacattatgttcttgttatactaaatatacggctagcttatctgggagatgctttggtgcgggtataatgtttgcttatgcagttactctatgtcatgacgatgatattggagtagtatctggtagtttagacgtggtgtctagattacgggatattattatttggggttatatattgcggatgagaggtgggccgctgatggtgacagctcagtacgtatttctccacgccgatatataatcctaagttaattccctgaggagagtattcctccatatttagccccggttgtatggtcatgacgggctgtcgtaaggaactcgacagtcaggggtggcttctcaaagtaccaggagggcatcggatagagg

SEQ ID NO: 66421 - DNA, 1102 bp, Oryza sativa
  Clone ID: PAT_MRT4530_67374C.1
tggaaacacatgagggcctatgatgatgttgaccctctagattatttgggaggatataatgttgaggacattcaacttatttgttgccaaccggatgcatcgacgatgtggttgataccagctccagtgcaaaccagattcattcaatcccttgaggagacagaaatgatttttggaaacatggagcttattttaaattgggattttctcagagctagaccaaaagggaaggaactagtgaaatatgagtcacctgttgatcgtagtccaagtgtagatgatgttaaacgagtgctaaacgggactataaatagcttcaggataactgatgcttaccctagatactttcgggttactggacaggtgaagtgcgacgattagaagcatcgatggattcagtaagtggcgaactgctcttgaataatggcactcctccttggtggtcattctatgatacaaacccatcagatttggctggctgtcaaggccttaatggtcccatggccatcgttgtgtctgaggaaacacctcagggtattattggtgaaacactgagcaaattcagcatttggagtttgtacattacctttgtgttagctgttgcaagatttattagactgcaatgctcagatctgagaatgagaataccttatgagaatcttccatcttgtgacaggttacttgacatctgtgaaggcatttatgcagcacgagcagagggtgagttagaagtggaagaagttctatattggacattggtaaatatatacaggtcacctcatatgctgcttgagtataccaagccagactagtatatcaccagttttgctaatggcgtagaatcaaactacttgattaaaagtattttgatgaaaagactaacttgataggtctatactgaatccaacagaaataccccacttgggggcttggggctgtcccttcacttctttcgtcatagcttttatacttcatggaacaagataatgcaaataggcgttgtattttacttggctttttttttctctcttgtttcctgctaacatgtacataagattgatgacgagttactaaagatgtatatacttcaaagatgcctgcc

SEQ ID NO: 66422 - DNA, 410 bp, Oryza sativa
  Clone ID: PAT_MRT4530_67375C.1
atgaatgcctactttacattatgttcatgttatactaaatatacggctagcttatctgggagatgctttggtgcgggtataatggttgcttatgcaattactctatgtcattacgatgatattagagtagtatctggtagtttagacatggtgtctagattacgggatatcattatttggggttatatgctgcggatgagagtgggccgctgatggtgacagctcagtacgggtattcctccgcgcgtgtatataatcctaagttaatttcctggggagggtattcctccgtatttagccccggttgtatggtcatggtgggctgtcgtaaggaactcggctgttaggggtggcttctcggagtaccaggagggcatcgaatagaggacaccagcaagagaaacaattcg

SEQ ID NO: 66423 - DNA, 241 bp, Oryza sativa
  Clone ID: PAT_MRT4530_67376C.1
agcatgaataaaaaggaccatagaagtgggccggtgatcaacaataaggcatgatgccacctgacaaagaaaagcactctgtatcaaacaggccctcagtgtggtacacacacgcaggctaacaagcctagtgaacagctcgcggagacctaggttaacctagccaggtgcagagacactctgggcgacagaggaggtcacatgagcaaaacatcgggaggatatacgggccgcattgaaa

SEQ ID NO: 66424 - DNA, 406 bp, Oryza sativa
  Clone ID: PAT_MRT4530_67377C.1
atgaatgcctactttacattatgttcttgttatactgaatatactactagcttatctgggagatgctttagtgcgggtataatgtttgcttatgcaattactctatgtcatgacgatgatattagagtagtatctggtagtttatacatggtgtctaggttacgggatatcattatttggggttatatgctgcggatgagaggtgggccgctgatggtgacagctcagtacgggtattcctccacatgtgtatataatcctaagttaattccctgggagggtattcctccgtatttagccctggttgtatggtcatgacgggctgtcgtaaggaactcggcagtcaggggtggcttctcgaagtaccaggagggcatcggatagaggggaagggtgggagggggag

SEQ ID NO: 66425 - DNA, 2607 bp, Oryza sativa
  Clone ID: PAT_MRT4530_67378C.1
atgaagctcaccgcagtacaattcattgacaggtttttgggtggttacgaggatcctgcacagcaaattttcctgcgcgcaccagaagcactaatgaagtacaaaaggacctcaactttgaagggattaagttggtggaggcgcagaggaacacagcagcagcagcaagaacccacaagaaggaccagaggaggaagaaggcacaaagaggagaaaatatggtacctgtgcagcatctatgggtgccaagccttgctcgggatgaccatccttgccgccgtgtggttggccagggtggccgctgtggtcactgtcttagccctatcctggaagcgtctcaagaagcaagactacttgaatcccggggacatcatgaatgaccaaaaccagaacatcacgtggtccctcaacatcttctacagcttggtgtttgcccagggaatcatgttcgtcaccatactgctcaacccactgagctattattttctgttcaatgccgggatcaagtacaaactatttgacccctccggtctcaagataattttgaattacaagaggtgcaattacctggaattcattgccgggaatgtgaaagcaaccttgcaaatgcacctggtcaccttcgccaagaaactagcggtatccaacatggccgatgacaagttacttggtgtcggtgccatggaccgcatcctcaggtcgatggagttcagaagcctagctcttaggaagcttcgagctttcatggaacccgacgagctggggaagctggttaacatgctaggttacgacaagagccacaaaaacaagaccacggaggaggaggatatcagaggccataccgcaagagtggtgctgaaacttagtccagatcttctggttcagagttatcctcagatcctctatgccatatcttcttccctgctcagcacatccaagtccaacaacaagagggtgtgcaagtgcaacatggattctgacttggtctggtttggcctgcgtatcctagacaagctcacggacaacccagaaaactgtaggaaagccaccaacgacgagagcggtggtgatctattgtccaccatcatagacctcaccatcccatgttgtcatggtcatggtcatggccgcagcatgaggagtaacactagtaccatttctgattcttggattgaacaggagattatccctttgcttcaaacagaaaacgagattcctcttcctttcatcgacaagcttgaccaagaaattattgttggcatggcactcaacatcttgagcaagctggtcgctgcaccggatgaggctggggagaaactcagaaaagaaacatcaaagcatgtgcatttcctgaccaacactgggatgatcttggaccatgtccaggcaacaagagtcatatcatgcttagcagtggataaggaaggccgagaatatatcggcaagtttcctgagatcatcaagaaacttaaggattgtctactttccaagacaccatacgtaaatataactaaagtagctgccaagctgttggttctggagtgcactggtgatgagcaattgttaaaccaaatccagcttttcattgaggaaaatcgtaccgtggaagatcaaagcttttcactaccaatttcagccttcattgaagaacttgattttgatcaacttcaccagccatggatatggaattttgtacagagccttgatgtggaagatgcacttttcgcgccacgggtgaatcactctgacgcagctgctaaagcattaattttgctcaccacagaatgtgcgagcaatgttgaagctttcctacaagggatcaataaagaagagttgaacaagatagtgaatgcactctcttctgaagatggagacaaagagaagagaagggcgctggcacaatttgaaggacgacgtaatctggacccagaaacattgcgcagagtcaaaaaaataatattggctgagggtgaagaacaggcaacaggaccaaaagaatttgatgagtacatgaaattgatagatgcagcactgccaaaggtgctcaaagcagtcgtagatgcagtggcaactttggaggatccatcatcagcagaaaatctggaccatgtgaaggatgacatgtggatcaaacaaggcaaagtactagagagctttataggcctcgcagtgcagatttgtaggtccccgaacaaaagaagtgatttctccactgcactgaaatatgccaatcttactgcggacacattgatcaagaagcttaagaagatattagaagtgtacatgtctccaagtactgattttccatgcataagggtatccacacttgagttaattacttggatggtcgaagaaaacaacagctactgggaaatactcctacaatgtggagtatatgaggaactgaatgaagtggcaaggactgctagaaaacttgagagcttcaagctgtttcactgcggtatcgggattcctacggaaagaactatcgaatgcatctcttccctcgcaactaaattacaagaaaagcttaagaaaatccccgatttcgaaagaagataccgctatggagaacatgcaagccgcatatctgttttaattgcttaa

SEQ ID NO: 66426 - DNA, 428 bp, Oryza sativa
  Clone ID: PAT_MRT4530_67379C.1
atgagtacctactttacattatgttcatattatactgaatatatagctagcttatctgggagatgctttggtgcgggtataatgcttgcatatgcaattactctatgccatgacgatgatattagagtagtatctggtagtttagacgtggtgtctagattacgggatatcattatttggggttatatattgcgcatgagaggtgggccgctgatggtgacagctcagtacgggtattcctccgcgcctatatataaatctaagttaatttcctgggagggtattcctccgtatttagccccggttgtatagtcatgacgggctgtcgtaatgaactcggcagtcaggggtggcttctcgaagtactaggagggcatcggatagaggttcaggggtcaagatttctggtattgaagttgagggatatg

SEQ ID NO: 66427 - DNA, 1613 bp, Oryza sativa
  Clone ID: PAT_MRT4530_6737C.1
agtcgttttgggacgcgacactgcttcagaaagatgtgaagtacaagtggtcggaagaatgtgagcagagtttccaagagttgaagaatcacttaatattagctcctattttgattttgcctgatccaaagaagggtttccaagtgtattgcgatgcatccaaacttgggttaggttgtgttctgatgcaagatgggaaggtggttgcctatgcatctcgtcagttacgtccgcatgagaagaactaccctactcatgatcttgagttagctgcagtaattcatgcgttgaaaatttggcgtcattatcttttcggtactcgtacagaggtgtataccgatcacaagagtttaaagtatatctttactcagccggatctgaacatgagacaaaggagatggttggaattaattaaggattatgacatgggaattcattatcacccgggaaaggctaatgttgtagcagacgctcttagcaggaaaggttattgcaatgctacagaaggacgacagttgccattggaattatgcaaggaatttgaaagattaaatttgggaattgtcagtagaggtttcgttgccgccttagaagcgaagcccactctaattgatcaagttagagaagcccaaattaatgatcctgatattcaagagatcaagaagaatatgagaagaggaaaagctatcggtttcttgaaggatgagcaaggaactgtatggttgggcgagagaatctgtgtccccgacaacaaagatttaaaagatgcaattctgaaaaaagctcatgataccttatactctattcaccctggtagtacaaaaatgtaccaggatctcaaggaaagattttggtgtgcaagtatgaagcgtgaaatcgcagaatacgtagcagtatgtgatgtttgtcagcgagtcaaggcagaacatcagaaacccgccggtttgttgcagcctttgaagattcctgaatggaagtgggaagaaatcggtatggattttatcactggtttacccagaacgtcatcaggccatgactctatttgggtgatagtcgatagacttacaaaagtagctcatttcattccgacagacggacaaaccgaaagggtgaatcaaattttggaagacatgttgagagcttgtgctttagatttcggtggaagttgggataagaatctaccttatgcagaattttcgtacaacaacagttatcaagctagtctacagatggctccgtacgaagcactgtatggtcggaagtgtcgcactccgtacgaggttgcctatcagttagagttacctcaatctttggcaggagtccataatgtgttccatgtgtcgcaattgaagaagtgtttaagggtacctaccgaagaagctaatcttgaacagatagaagtccaagaggatctgacctatgttgaaaaaccaatccgtatcttggaaacaaatgagagaagaaccaggaatcgagttatccgtttttgcaaagtccagtggagtaatcactcggaagaagaatcaacttgggaacgagaagatgaattgaagtcagctcatccgcatctgttcaccagttcttccgaatctcgaggacgagattctgtttaa

SEQ ID NO: 66428 - DNA, 1712 bp, Oryza sativa
  Clone ID: PAT_MRT4530_67380C.1
tttttttttttttttatttgattcaactaccatatgtatacagtcaaacacaaaaaaacgcactgcattgcatgagttcgtctgtgtttcaccgtcacgattaagcagtggtgtgcatcatgcagagccaacacatgaataagaagaatacttggtcacatggattactggattaccatctccactagtgaattctatctgaaaaatacaacaaccttggcaggaaggcagcataaactacatattcatcgtattcatagatgacccaataacacaaaagccactgcagtaagcaacgttttcgtcagcctgaatctattccaaaccctgacaggatttcttcttgcatgcaaatgtaacaggtaggctgctctgaataggacaaccacgcgtatcatcgtcgatattaagctagtgtatggttttgatctgacgttctagtctatctagggacacttggagttgaccatcgcccagctccagctgctgggcgcttccccgattgccgcatctcctgtgctttggccaactgcgcggtcagatcctttggtttgaaggaaccatccaaagagtgcaagattgtatctgcaagcccataatcgatggcctcctgcgcacggaagtaccttggacctttgagaaactctgcgagctcttcctttggttttccaactccttttgacaacagttcaaggtagtaatccgtgttcgtgtctaactcttttgccttaatccacatgtcaatagcagctccaccagatttgtggaccttaggcaggtacagtttagtgattgaatttggtagcactcctcttttacccttgacgccaagggacagaagcattgcagcctgaccatatgccatgctaagattgattgtgtagaccttggatttgcttcgattgataaaatcagcaattgcaaatgcatcagtttcagatgcaaccagctcattgttttcatccatggttcctgtggagtttatatacaagtaaattggcttggtgcggtcatcataatctagccacagaaattgcgcagcaataagctctgttactgctggaacaataggcattccaaggaatataattcgagagtccaatagcaatgatggcagatctggagctgaacttctcattcttctatatcctcgccctgccctgcccatgctcatggtgcccattcccatacccatgctgtaacctgcagggccctcatgcataccggacaagttgtacatgccaaattcatcatagctcctagaagcagaaatgctttcctctgtaactctctgtgattgccgatcatatggattatcatcgttcataaacatttcgatctgagcagggcttaagccataaaggaattgaggaacattcttgtaattatccatcaggccatctttgaggttctcctcgcggaactgcttggggatgtggtcgtagttcttgcggaagccaccgccgtcgccgtagtagtagcacctgcagctggcgggcggcctcctcgggagcctcgacggcggcggggaggaggagggcgggaaggtgctcttggctggcgacggcgaggcagcggcggggcagcgcagcgcgagcgccatggtgaggaaggaggcggccggagaggaagaagaggattggtggcccggacgcgtgggtccgcccacgcgtccgcccacgcgtccgcccacgcgtccgcccacgcgtccg

SEQ ID NO: 66429 - DNA, 252 bp, Oryza sativa
  Clone ID: PAT_MRT4530_67381C.1
ccagcaaaatgaagactatgcttcgaaatagtatcaggcttccactaaaaattatgtaaagagtaccaactgccaagtggtaagcagcagcagcaacaaacggtgcttactgcacattatttatcttatgatagtgatatcatatgatacatacaacagtgtatacaggtttcccaaaataaaaaatggcgagcaatgatctcacaaaaccagttcaagagggacaggccattggcaatcaattaattattc

SEQ ID NO: 66430 - DNA, 413 bp, Oryza sativa
  Clone ID: PAT_MRT4530_67382C.1
atgagtacctagtttacattatgttcatgttatactaaatatacggctagcttatctgggagatgctttggtgcttatacaattactctatgtcatgacgatgatattagagtagtatctgctagtttagacgtggtgtctagattacgggatatcattatttggggttatatattgcggatgagaggtgggccgttgatggtgacagctcagtatgggtattcctccgcgccggtatataatcctaagttaattccctggggagggtatttctccgtatttagccccggttgtatggtcatgacgggctgtcgtaaggaactcggcagtcaggggtggcttctcgaagtaccaggaggacatcggatagaggagggccatcgtttaccttcggccgccgccgccgaaaccct

SEQ ID NO: 66431 - DNA, 438 bp, Oryza sativa
  Clone ID: PAT_MRT4530_67383C.1
atgaatgccaactttaccctatgttcatgttatactgagtatactgctagcttatctgggagatgatttggtacgggtatagtgtttgattatgcaattactctatgtcatgatgatgatattagagtagtatctggtagtttaggagtggtttctagattacgggatatcattatttagggttatatgctgcggatgagaggtgggccgctgatggtgacagatcagtaagggtattccttcgcgcgtgtatatagtcctaagttaatttccaggggagggtactcctccgtatttagccccggttgtatggtcatgatgggctgtcgtaaggaactcgacagtcaggggtggcttctcgaagtaccaggagggcatcggatagaggagacggggaggaggtagccaacaacggaggagatggtcggcatcaagatc

SEQ ID NO: 66432 - DNA, 397 bp, Oryza sativa
  Clone ID: PAT_MRT4530_67384C.1
atgaatgcctactttacattatgttcatgttatactgattatactgctagcttatctagcttatctgagagatactttggtgcgggtataatgtttgcatatgcaattactctatgtcatgacgatgatattagagtagtatctggtagtttaaacgtggtgtctagattacgggatatcattatttggggttatatgctacggatgagaggtgggccgctgatggtgacagctcagtacgggtatttctccgcgcgtgtatatagtcctaagttaattccctagggagggtactcgtccgtatttagccccggttgtatggtcatgatgggctgtcgtaaggaactcagcagtcaggggtggcttctcgaagtaccaggagagtatcggatagaga

SEQ ID NO: 66433 - DNA, 437 bp, Oryza sativa
  Clone ID: PAT_MRT4530_67385C.1
atgaataccaactttactttatgttaatgttatactgattatactgctagcttatttaggagatgcataggtacgggtataatgtttgctattgtaattactctatgtcataacgatgatattagagtagtatctggtagtttaggcgtggtgtctaaattatcgggaatcattatttggggttatatgctgcggatgagaggtgggccgttgatggtgatagctcagtacgggaattcctccacgcgtgtatatagtcctaagttaatttcctggtgaacgtatttagctccggttgtatggtcatgacgggctgtcgtaaggaactcaacagttaggggtggcttctcgaagtactaggagggcatcggaaagagggcattagctatttgatggaggtggtatctacgcaattctttctatccaactcatgacca

SEQ ID NO: 66434 - DNA, 315 bp, Oryza sativa
  Clone ID: PAT_MRT4530_67386C.1
atgtttgcttttgcaattactctatgtcatgacgatgatattagagtactatctggtaatttaggcgtggtgtctaaattacgagatatcattatttggggttatatattgcggatgagaggtgggccgctgatggtgacaactcagtacgggtattccttcgcgcctatatataatcctaagttaatttcctgaggagggtattcctccgtatttagccccggttgtatggtcatgacgggctgtcgtaaggaactcggcagtcaggggtggcttctcgaagtaccaggagggcatcggatagagggtattagc

SEQ ID NO: 66435 - DNA, 1769 bp, Oryza sativa
  unsure (1)..(1769): unsure at all n locations
  Clone ID: PAT_MRT4530_67387C.1
atggccgttagcagccttgtccccaagccggccttgcgtcccagcgcactcccgctgccaccaccagtcgtcgccgccgccaccccgccagacctggtcggaaacgacgtggatctgggcaagggctctgtcgccgccaaccttagtcgtcgccgccgtcaccaccacttagccctgccgcccaccgccaccccgtcagattcgttctggaacgtaaacatggaggacaagacgatactactatctctggccttgtctatgctcctcgccatcctcctctccaagctggtctcgatttccaagaagcccaggctgaaccttcccccggggccatggacgctgccggtgatcggcagcatccaccatctcgccagcaacccgaacacccacagggcgctgcgcgctctgtcgcagaagcacgggcccctgatgcagctgtggctgggcgaggtgcccgcggtggtggcgtcgacgccggaggccgcgcgggagatcctcaggaaccaggacctcaggttcgccgaccgccacgtcaccagcaccgtcgcgacggtctccttcgacgccagcgacatcttcttctccccgtacggcgagcggtggcggcagctgcgcaagctgtgcacgcaggagctcctgacggccacccgggtgaggtcgttcagccgcgtccgcgaggacgaggtggcgcgcctcgtgcgggagctggccggcggcggcggcgccgccgtggacctcaccgagaggctcgggaggctcgtcaacgacgtcgtgatgaggtgctccgtcggcggccggtgcaggtaccgggacgagttcctgggcgcgctccacgaggccaagaaccagctgacctggctcaccgtcgccgacctcttcccgtcgtccaggctcgcgcggatgctgggcgcggccccgcggaggggtctcgcgagccggaagaggatagagcggatcatagcagacatcgtccgggagcacgaggggtacatggggagcggcggcgacggcggcgacgaggcagctgctgcagctgcagggaaagactgcttcctcagcgtcctgctagggctgcagaaggaaggcggcacgccgatcccgatcacaaatgaaatcatcgtcgtgcttctggaccctaagtattgggaagaccctgaggagttcatgccagagaggtttgaaaatagtgatatggactacaaagggaatacttttgagtaccttccatttggttccggtcgtagaatttgtccagttggagctgaagttgaccatggcaagatggagttactcttgtctcaactggctggtaaggatatcactgagattattgcttccggtcgggagaagtttgcttctgttccatgtggcggaggtggcgtagctgttgcagcagctgctccggctgctggtggtggagctgctcctcaatctgaggctaagaaagaagagaaggtggaggagaaagaagaatctgatgatgacatgggcttcagtttgtttgactaggaccattccttggattatacccatttttggttaacttgggaaacggcaacctaaacacgctttttgaattactcccctttgttctatatacacttctcgagatccagagatattccactgatgactatctgtcgaaccatagatttgttagaaggtttcattaccnatgatttgtttcagcaaaatcagcaccgaccatgatatgttgagtttatatgcttcccaaaaaaaaaaaaaaaaaaactcgagactagttctcc

SEQ ID NO: 66436 - DNA, 655 bp, Oryza sativa
  Clone ID: PAT_MRT4530_67388C.1
tagtggatcccccgggctgcaggagaaattgctgttctgaaaagccagttattgcagctaagtcttgatgctgatgagacaaggaggagcctcgacagaggagatggatctgggaaaatatttcctgggtttgattctttgatgtctcattcaaggaattctcagcctagagagcagagcaatggacctaagccgcccattgctaaactgtttgaacaagttgggttacagaagatactgtcgttgcttgaatcggaagaacctgatgttcgtgttcatgcagtgaaagttgtcgcgaatctggcagctgaagaggcaaatcaggaaaagattgtagaagcaggtggccttacttctctcctaatgctgcttaggagctccgaggatgagaccattcgcagagtagcagcaggagcaattgctaaccttgcaatgaatgaaacaaaccaagatcttatcatggcccaaggtggtgtaagcctgttatctatgacagcatctgatgcggaggacccacaaactctaagaatggttgctggagccatcgccaacctttgtggcaatgacaaactgcaaacacggttgagaggagaaggtggcatcaaagcattgctgggaatggtcaaatgcgggcaccctgatgtccttgctcaag

SEQ ID NO: 66437 - DNA, 192 bp, Oryza sativa
  Clone ID: PAT_MRT4530_67389C.1
atgacgggtttctgccagcggcacacggtggcgcccacggtgcgtttcccccggcccgtgaccggtcgcaggggcgggcacactggcgcggtcaccgcagcaaatgcagcggggcaaagtcaagacccggtcactatggacaagtgcccaggctccgcccgctgcaaaagtacgtaccagctgcttgattaa

SEQ ID NO: 66438 - DNA, 333 bp, Oryza sativa
  Clone ID: PAT_MRT4530_6738C.1
acggaataccgctgtagcacttcaccttcgggtgaccccaaaaggatatcaaactcagggaatgtgtgtaatctacctagggctaagacgatccaaggacaacaactatagtgtggttccggctatagctctatgatgtacccgaacatggaggattactaggacggaattcagggctgtcaccacctgccgtctacctctgacaaatccgtgggatacacaacaaacaaagccgaacccaaaaactctcctcctggcctctcctttggtcgggaggttggttaatgggcccccaacaacctgggcgatgttttggtccaattctaaatagtt

SEQ ID NO: 66439 - DNA, 739 bp, Oryza sativa
  Clone ID: PAT_MRT4530_67390C.1
aattcagcaacagatacaaacgagatgcaccaacattaccaaaacttcacagaatttagcttactgatattatggtaagctaaccaacatttgccctgactctccattgactccattcaatgctttagatggctaagaaaacaaatcaacaatccacccattttctttaattatttctcaatgtgcgttctcaaataattcgtagtacaaattttagctatgaatggacgaaggtggctaaccatcttatttcaatcaatcaaatattcgagtgggcatccgacttattgcgatgcgccatttgacgaaggatcaggcttgtgagtagccagcaagaagtctagcaggatcttgttgaaccgggttggatcctccagctgtggagcatggcctgttttgcttatgatttccactctagctttcccatccaaagaactctgaactgcataagccttctcaaccgggaacaactgatcttgctctccccagacaatcaacacttcctgagatattggagttactgggaacttgtctgtgccaactgccttcccctccgggagctgctgatcttgccccccctgccccgcgacacgtcccggcatgtgggcgcggcgggggacgtcccgctgccgccccggcgcccccggccggctcgaggccgtcgcccgctgcttccgcatcgcggcgggctcggccggcaggagcacctcctccacgccgctccacccgtcgccggccc

SEQ ID NO: 66440 - DNA, 192 bp, Oryza sativa
  Clone ID: PAT_MRT4530_67391C.1
atggcgcaccaagaatttagccggttaggccctcacgacccggcgttgcgtgtcgccatcgcgcagctgtgttctgctttgccgggctcggatgaatggacgggccgcgagcggcaggcctcctgggttcctcgaatagaatggcaccgtgcgagttgcgcaaaaattcttttgcgcatgtggagtatatag

SEQ ID NO: 66441 - DNA, 433 bp, Oryza sativa
  Clone ID: PAT_MRT4530_67392C.1
aaaggcataaactggggtgttgactagatacgatagtagtacggtaatccatgtccacataaacggtacaactacaaactcatagctgacttacgttgttcctacacgcagatcttaacagaatcccacacataaaacacgtaatttcaagtattgggggtgcttccctgatggagcagcccatttttttcccaacccttttattttttgaaagggaagcatatgttaagtgagcttaggaacttcaaaacatcgagaacactttaataaaccacttcacatttgacctcgacaatctcaagatattttaacattgcagttgacacccccgatggatggcggcttcctttcatttccactttatgtttaggtcccatcaaaaaaagttgaagagttgagctttttttaaaacaggtgaatgctgaaaaatgta

SEQ ID NO: 66442 - DNA, 391 bp, Oryza sativa
  unsure (1)..(391): unsure at all n locations
  Clone ID: PAT_MRT4530_67393C.1
ctgaatcaccagccgccgccaccaccgccgccgttaaactggccgatggcggggggaggcggcagcggctctggtggtggagggcagctatanctactcccacagagacattgcttatacctatccaaattctactacaataacttccagctcaatctcaccggcattagacaatatacacggactttcaaagtctttgaccatcttataaacttgtcgcttgatgaagctctttaattctaaaaaagagcaataagatccattgaaactatcatggaaaaccatacagctagctcttattgcctgtagcgatacatcatcgactcttaaataaacaaccctattaacaaactatatttccaacccccttcacatcaataaagcataaacc

SEQ ID NO: 66443 - DNA, 269 bp, Oryza sativa
  Clone ID: PAT_MRT4530_67394C.1
caccaaaaaacctatatatattttaacccccgctaattaaaaataaaaggcctatataaacccccccccaaaatttcttaatcccaaatttacacaccccaaatcattttacaattctccaaattccaaaaatatttcccttttaattaatccctggtattaaaaacataaaccccccatttcctaggtgtccccccaatactttattttccttccacccctcttcaattcaaccaaatttttttccaacaaattcccccaattaaatt

SEQ ID NO: 66444 - DNA, 2476 bp, Oryza sativa
  Clone ID: PAT_MRT4530_67395C.1
atgggcaactgctgtcctggctctggggatgcggaattcccgggtcgaccgacgcgtccgtcctccggcaacggctcgtcctccttaaggccggcgcgtcgccgtcgtcggcgcccgcgcagaacaagccgccggcgcccatcgggcccgtgctcggccgccccatggaggacgtccggagcatctacaccatcggcaaggagctcgggcgcgggcagttcggcgtcacctccctgtgcacccacaaggcgacggggcagaagttcgcgtgtcaagaccatcgccaagcggaagctgtccaccaaggaggacgtggaggacgtgcggcgggaggtgcagatcatgtaccacctcgccgggcagcccaacgtggtggagctcaagggcgcctacgaggacaagcagtccgtccacctcgtcatggagctctgcgccggcggcgagctcttcgaccggatcatcgccaagggccactacaccgagcgcgccgccgcctcgctcctccgcaccatcgtcgagatcatccacacctgccactccctcggcgtcatccaccgcgacctcaagcccgagaacttcctcctcctcagcaaggacgaggacgcccctctcaaggccaccgacttcggcctctccgtcttcttcaagcaaggagaggtgttcaaggacatcgtcggcagcgcgtactacatcgcgccggaggtgctgaagcggagctacggccccgaggcggacatctggagcgtcggcgtcatcctctacatcctcctctgcggtgttcctccattctgggctgaatcggagcatggcatcttcaattccatcctgagagggcaggtggacttcaccagtgacccatggccacgcatttcagctagcgccaaggaccttgtcaggaagatgctcaactccgaccccaagaagagaatttcagcctacgaagtcctcaatcacccgtggatcaaggaagatggagaagcacctgacacgccgcttgacaacgctgtcatgaacaggctcaagcagttcagggctatgaaccaattcaagaaagcagcgctaagggtcattgctggatgcttgtcggaggaagagatcagagggctgaaggagatgttcaagagcatggactctgacaacagcggcaccattaccgtcgatgagctgcgcaaagggctgtccaagcaagggaccaagctcacggaggccgaagtgcagcagctaatggaggctgccgacgcggacgggaacggaaccatcgattacgacgagttcatcacagcgacgatgcacatgaacaggatggacagagaggagcatctttacaccgcgtttcagtatttcgacaaggacaacagcggctgcatttcgaaggaggagctcgagcaagcgctgagggagaaaggtcttctcgatggcagagacatcaaagacatcatatcagaagtcgacgccgataacgatggaaggatagactacagcgagttcgcggcgatgatgcggaagggaaacccggaggccaatcccaagaagcgacgggacgttgtgatataggagaggagcttgacaacaaaacaaaaacatgatcttcatcatcgatcagttttggcatcgaaaaacatttgtcacgacaggttgcacacacacacacacactccagaggaattgcttgctgctgtttcatggcatggtattacatgcacctaaaatgatgaaattaattggaagggatggtgagcagggagccttgctatgtgtcaacgttgtgaacacaatgggtatgatgcttaattttcctttttggtgttgacccaaactcgatcgtgttagaactgttcgtatacacttctttgtttagcggcctcttggtgttcgacggcgacaatgataagccgtatgttctgatgtaagataagagattagcatatggcaattgggcacgcgctaattgattgggcactatattttttttactcttgtataaaaataaaaaaataaaaaaaaaaagggcgtaccgttccaacagaatagttgatgtcataatggtcaacatgatacctagatattagctagtatatacaaggtatcgtgttgatgtcagctattctgttgcaacggtatactattacgtagtctcccttgactgcttcaggagaacattatctgatgtggttattcaggagggagaattgcatacggcaatagaaattccagaagtagctttcactctattggcagtggaacaccttatacagttacatgattaaatggtcttcttgaattttgcggtgacatactaatgcaggactagaatcaacgaattgtgagtgtatcctgagagttacaatacatacatagcacaccgttaattaggaaaagtatccgtgtatttgctctcggtgcttctgcagaaatgagagcttaagatgttagggcctgttttttctttcataacagaggagacgcttgttattgt

SEQ ID NO: 66445 - DNA, 422 bp, Oryza sativa
  unsure (1)..(422): unsure at all n locations
  Clone ID: PAT_MRT4530_67396C.1
gttcgaacaaaatttgattgatcaaaaagaacccgttacaaaacaagcgctagcgcatcctcataattcccatcccaaatcctaattcataacccgatttgaagaatccacaggcgatgaaaaacagcatgctcttgacgaagatgccttctccattggacgccttcgcaaaagatacccaactttaacaaagtaaaggcaacttcatatcaacccctcgagtttccgccgtgtgatgttgtcgagaccgagccaatcgaaaggcatgngcaccggtgtgcgagctgagcccgaggtggtcatatcgaaggaaatttacttgtgagggcagccatcgcaagagcagctagcgccgcaaccgcaagcaccggaggaagcacatccgcagccagacattttgatttgtggttgggggggggggt

SEQ ID NO: 66446 - DNA, 190 bp, Oryza sativa
  Clone ID: PAT_MRT4530_67397C.1
attaaaaaaaaataaatataaaaaaatgtattcacaaataaacaaagagatggaataaaatgctaagcgcaagaaacaacctggacaaaagaatagttggtctacacaccgtacatgaaaagaaaagccaatttgagggtaacattctaattctagaaaggtctgaaaattagacaaactggaaactacc

SEQ ID NO: 66447 - DNA, 250 bp, Oryza sativa
  Clone ID: PAT_MRT4530_67398C.1
cggtcgcccaggcgtgcgacatgaccttgatcttatttgccgggcacatcaggttgatcgaggatggatatgagccctctgccgacagagggcgtgtcaccatattgtcaggtccaaactatagatgtgaattcgataatgcaagtgcaatgatgagtgttgatgaaactttgatgtgtgcgtttcaaatttttaaagttgcttagagtatgggcaaatttatggcataaaccaaaatgtgaaatggtgt

SEQ ID NO: 66448 - DNA, 852 bp, Oryza sativa
  unsure (1)..(852): unsure at all n locations
  Clone ID: PAT_MRT4530_67399C.1
aattgactaggcgataccgggtgtttaccgttgggaaaaaaaaaccagggaaaggccttccccccccgtttcacccggggggacggagggacgtggcaccggcgaacaaagtccggagcctcctacgaccaaaagagagggttaaaaaaaaaaaaaaagtgcgagggggcangggccccggcccaaggcggcggccatggcgtcctccccgggcacacgacggggatgggtctccggcggcgcaccctcaaagggaaaggggcggccgaggtagatctcgaccccccgaatctaacggcggcgacggcgcaagacggcggcgagcctagcggcggctagcggcggccgaagtagcaaaaacggcggcggcgggtggttgcaaggcgcggggacgattgggagctcgggaggggtcggcgaaatggggaaaaagagagagggggtggggaggagagagaggcgggattcggttttcgaatcccggccatctcgggcgcgggcgcgagcgggagagagaggggaatgggcgcggagggcgcggcgcacgcgcggacgtggccgacgtggcccgaggaaggcggagacgtgggcgcggcggcggtttcgggcgcggcggcgcgccgggatcggcgggaggagggagacgggaccgacaggtgggccccacctgtcggcgaccccgagagaggaggcggcgggcggcctgggctgccggactgggcctcggcctgcggccggcccagcaaagaggagggggaggaaaagggaaatgggccggcggcccattcggaaaaaaaatgaaaaagggagggaaaagaaaaagaaaaaggaaaaaagattttccctggaatt

SEQ ID NO: 66449 - DNA, 632 bp, Oryza sativa
  Clone ID: PAT_MRT4530_6739C.1
ttttacacgacgaatacagaaaacgctccaaaagaatacctcagggttgacagttaacaaaacaaccgttctaaatcctaccccatgtcaagcagaaccatttgaccacgcctagttttgctacttatccattctcacccttctagaccatccaaaaacaaaatgttccatatcctctatgttactagcactacgaaatgacatagactgaccaagctagggacagcaataataagcatacaaaccagtaaaccaatccttcatggctattaagacggttttagcaccctatctcgtcatcaattaccagagggtgatatgctgatcatcaagcattctggttctcgacgcgctaattacagtatctgccacgcgcctccactgctgtccgcggtcaaaagagctgaagatagcctcttgatgcggcatactctgttcccacctttgtacatggcatcacagggttgcccttgcgaattatccattgtacttccttggcacgttgaatgagccaaatgtatctgagtcagaaatagtgaaatcatcacatctccatttctctagttgctggtggaggcccatctcgcttgtctcaccctcgtagtcatcggacgcgtgggcggacgcgtggg

SEQ ID NO: 66450 - DNA, 1154 bp, Oryza sativa
  Clone ID: PAT_MRT4530_673C.1
ttattctcccactcccagggttttagctagggttctgtgtcccccgcatcgccgccgccgccgccgcgagccatggccgacgccgccgcccccggagaggacgacgccgcgtgggagcgcgccatcgcggcggccgtcaagaacgcccccttctccgcccccaagaccctaaccctcgacggcgccgtcaagtccaccaccggccgcctcccctcgccgtcgctcctcggccgctacccgtccctcgaggagctctccgtcgccggcgcccgcctctcctcgctcgcgggcctcccgcgcctcccggcgctccgccgcctctccctccccgacaaccgcctctcgggggccgcctccctcgccgccgtcgccgagtcctgcggcgccacgctccgccacctcgacctcgggaacaaccgcttcgccgacgtcgccgagctggcgccgctcgcgccgcacggggtcgagtcgctcgacctgtaccagtgccccgtcaccaaggccaaggggtacagggacaaggtgttcgcgctgatccccagcctcaagttcttggacggcatggacgccgagggcaacgactgcttggattccgacgacgaggaggatgaagaggaggatgagggagaggagggtgaaggggaaggtgatgaagaagaagaagaggagggtggagaggaaggggaaggtgatgaggatgacgaagaggaaggagatgaagaagaggatgaggaagaaggtgaagaggaggctgaagatgaagaggatgaagctggtgccgatgaagaagatgaaagcaaagtggcgaatggaagcaaagggtcttcaggatcagctcagccaaacaaaaggaagagggacagtgaagatgatgctaacggagacaactgatctggttgggtctggaaatggttgcggctggtcgttggaggcttttcctccaatgttctttggagggctttgagccttttgaggcgtttccttctgttgatgtagaagatttagctgttctttttagatgccaagttgccaaaggttttctaattataattcaggacttggacatatcctgatgtactactgcacatttctgtgactttccgatgctgctaattgaaatactggttctgggcctggtcatgcggaaaaaaaaa

SEQ ID NO: 66451 - DNA, 369 bp, Oryza sativa
  Clone ID: PAT_MRT4530_67400C.1
tatcaggcttgatttaaacatgcagggttgaagccaagcaaattacatacctgataccctttctgtagggctttgggagaaggggctaggataggtgcattgattatagcaggggtaaggggtaagtccagctttgacaaatgaaatttctatctcgagcaagctccaaatggttggtaatggctgtctggtgcactgtgttgagaaggattcggaggccaagttcaggctctggaaacccacaggccagcagatctgccatccctgtgttatttcatgccctttatccatcagtgacagatgttttctcaaagtgagaacactgggtcacatttattcaccaaaattgtcctgctgaatcttatagtc

SEQ ID NO: 66452 - DNA, 199 bp, Oryza sativa
  Clone ID: PAT_MRT4530_67401C.1
ggggggggtgttattttggggggtttttttttttttttttgaaagtgggaaaaaagttaccctggtaccaaatgttgaagagaatacaagcttcaataaaccccattgaccgggagccacgctgggtggaaaacaccaattccgtccttattcagggcacatagaaggggaatggccccccaggggttaatgtacaact

SEQ ID NO: 66453 - DNA, 378 bp, Oryza sativa
  Clone ID: PAT_MRT4530_67402C.1
atggacatctctagggcaaatgaaggctacacgagctacggcccggtagtcgagatgtcatggcatagggccgatgtcctgctgctaggggctcagtcctgcctacctgtcccgggggttccggccgtaggtggggttgggtcggcggatgggtcgggtggcagcacacccacgttccgcccctgtcaggcggagtgggggcagcgccctagcgccgtgccgcctcgagccgcagtcgtcgccgtcgctctagccgtgcttcgccgtcgctccagctgtgcttcgccgtcgctccagccgtcgccgtcacttgggaaggtcgccatcgtggtcgccgtcgtgtcgccgtcctcgtccgccccttcgccgccgctgtag

SEQ ID NO: 66454 - DNA, 1212 bp, Oryza sativa
  Clone ID: PAT_MRT4530_67403C.1
atgcggcggtgcggcggcgcgcagggcggcgcgcacgacggcgcacgggcgcggggagtggtggccgggcctaatggcgatgggacggggcgggccgcggggcgcgaggcgacggtgacgcgcggcgacgcggcggcgcgggcctcggagtggcgacgcgacgggcgggcggcgcggcgcggggctcggcacggggctcggcgcgacaggcgagcggcgcgcggcgcgacgcgcgcggcgcggcaggggcgcggggagcgaggcggcgcggcacggggcgcgacgcgggggcgacgacgacagcgcgcgcggaggggaggggctcgagacgatgcgaccgacgacggcgacggcgatgtgggcggtgacgcgacggcgataggacagcgcacggcagcatggggctcggggctcgaaggtgcggcagcacgacggcgatggctcgcggcgcgcggcgatggcgacggcgcgcggcgcggcagtggggacgggacggcgtggcgcggcacggggctcggcgcgcggcgatggcgacagggcggcgcggggctcgagacgacggcgacacgacgaacgcgatgcgcgggcgtaggatggcgtgacagcggcggtgcgcggcgcgaggcagtgacggcgacggcgcgcagcgcagcagcggcgacgcgacgggcaggcggcgcggcgacagagagagggggaaagaggaggggctgggatgttacacaacccaagtccggaggacaggtggatcggcatggtgattctgtgatttctgggtggcgtatattcgccaaggtggagtttgttagaatagtacgtcgcgctgtcgacgctcacgaggccacagttgatgtcgcagctcccgccatgtcaagttcacgccgtcatcgccccgccacgcgcagcgtgagcacgtccaccacgtcgaacaccgagacctcgccgcacgcggacggggatgtggacgatcttgtgtacttccatgattccatcccccgtcgtagggtggcagccgaagctgacggcggccctatggaacacgcagttccgatttcggaggcagccgcggcggcggcaggacggccgaatgttacagtgcgcagcctggcccaccaaccgtgggccacccaggtcacatgggcctgctctaccataggtccaatcggaactacccaggtcacactggccctgctccaccacaggcccaactag

SEQ ID NO: 66455 - DNA, 325 bp, Oryza sativa
  Clone ID: PAT_MRT4530_67404C.1
cctcctcgctctagctgggagggggtaaccaccgcgccaccccgggctcgaccccactcggggggagccacgtgggtttggggccggcccgaccccaagctgggagggggcagccgccgcaacaccccgggctcgtcccccctcggggggagccatgtgggagggggtagctgccgtgccaccctgggctcgacccccctcggggggagccacgtgggtttgagggcggcccgaccccaagctgagagggggcagccgccgcaacaccccgggctcgacccccctcggggcgagccacgtgggtttgagggcggcctcctccctc

SEQ ID NO: 66456 - DNA, 333 bp, Oryza sativa
  Clone ID: PAT_MRT4530_67405C.1
atggtggctcccacaggtgaatctgttggtagtggctatgggcggatccacaggatgccatggcagtggctcccgcgcttggatccacctaatgcaccaacagcgacccctacgggtggatcgggtggatccggtggcggtggatcccacgacagcgatggctctcgcgcatggggcagtagcagaggcaacctccatgtcccaagtaaactcatccttaaaatcagccttccatttgccaaagtttgcttgaataccattaaagatcaagtcatttcgcctactccagagatgccagcaacagattgccaaaacttcataaagaagggatga

SEQ ID NO: 66457 - DNA, 840 bp, Oryza sativa
  Clone ID: PAT_MRT4530_67406C.1
atggtgtggccatacttctgccacggcgagcacgtcctgacgaccgacgtgcggatgagacgcagatcggcgcacgcgcaccggctgcaccggctccgtgacgggagccgcctcgcgctggctaaccttgggacggcggacacggcggcggcgccgatgtacgacgtccaggcgtttccctacgtcggaaccacagagccgctaggagagattgttagaccagagacccaggtaacaagtcttcgggtttacatggtcttcggggtcacatgggttaatgtgacgggagagattgttagaccagaggcccagacccgaggtccgggtaacaagtcttcgggtcacatgagctcggaacaattttcatgggtcacatgggttaatgtgacgggggagattgttagacccgaggcccaggtaacaagtctcttcggggtcacatggggccagtgtgacctgggtagttccgattggacctatggtagagcaggcccatgtgacctgggtggcccacggttggtgggccaggctgcgcactgtaacattcggctaccgcaacgacctgctctccctgctggagcctggaagagagcaccggcaacatcacgattgtcaacccagccaccgtttcacggtctcacccgtcctgccgccgccgcggctgcctccgaaatcggaactgcgtgttccatagggccgccgtcagcttcggctgccaccctacgacgggggatggaatcatggaagtacacaagatcgtccacatccccgtccgcgtgcggcgaggtctcggtgttcgacgtggtggacgtgctcacgctgcgcgtggcggggcgatga

SEQ ID NO: 66458 - DNA, 654 bp, Oryza sativa
  Clone ID: PAT_MRT4530_67407C.1
atggcgcgtgagatctcgctggcgccaacggcggcggtggaggagccggcggcggcacctgctcgcgtccgccggcggcggcagctccacctcttcagtgtcgccgctgaagtgcacgagaattatgatacctccaacgtatcacatgatcttcctaagatatcatcagtgaaacatgataataccatccatgatactgaggaggatcatgatacctcccaggtatcacacataatgatactttgcagtatcatgtatgaaactttcagatcatatccttgtaaaacacgattccgaggatgtttcatggggaagcagaagagccagcggacggcgaggcttccgctggaaagaagcgaggaatcgcgcgccgcaattccgaggaggtttcactgggatgtagaggagctggcggatgatgctcgcgccggtggaaggaagcgaggaatcacgcgctttctaggaggatttgccatgatgcggagaagccggcggacggtgcgcgtgccagcgggaggaagcaaggaatcgcgcgcgaaggcgcgcgcttccgaggaggtttcgctgagatgtagggaagccggcgtttggcgagcgcttgtcgtcgttcacgttttgctgcaatgcacgcaggtggcggacgacagttgctga

SEQ ID NO: 66459 - DNA, 206 bp, Oryza sativa
  unsure (1)..(206): unsure at all n locations
  Clone ID: PAT_MRT4530_67408C.1
ttaggnggtgcggttaaaccttgcggtcagaagtcttctgccntaaatcgcaaantcctacncntcaaggctctctgttggtgatccagaacgggnctattgttatncgatgcaaccaatntancagtgatgatctccgagtggactntccctttgccacgtnctttgttatcaacgtcaattggtgangntgatgtccctaatca

SEQ ID NO: 66460 - DNA, 671 bp, Oryza sativa
  Clone ID: PAT_MRT4530_67409C.1
agtattcattcccaaacatacaaatcatatccatggccaaacaggcgacagctgcggtgctcgccgtcgcgttggtgctcgcggcgtcggcggggctcgcgcacggcatctgcaacctgtcggacgcggggctccaggcgtgcaagccggcggccgccgtgcgcaacccggcggacacgccgtcgtccgagtgctgcgacgcgctggccgccgccgacctgccgtgcctgtgccggtacaagggctccgccggcgcccgcgtgtgggtgaggttctacgggatcgacctcaaccgcgccatgacgctgccgggcaagtgcggcctcaccttgccggcgcactgctagtgctagctagctgatggcaagcacaaactacagtgcggcgacctcgatcgccatgttgctgcaattcaattatgcagtcgtgaccactagcgctaccaatatatagcatatatatagtagtaatattaatatatatgtcatactatgcgatcgatgagcccggcaaggggagatgaataaatttggcaacatatatatgtatttatgctcttctttcagtatcatcaaaagatatgcgtgtgatgaataggttgggtgtttaaccaataatatatttgtaatgatactgatttgagtaaaagaggaagtcgttctatacttttc

SEQ ID NO: 66461 - DNA, 354 bp, Oryza sativa
  Clone ID: PAT_MRT4530_6740C.1
cccaagatcttgaaagatcgaaatcgtggtaagattagcaagctagaaaacaaggtggatcgtttggagaagaaattagccgcattgaagggagaagcaccgccgcagaaggccagaattcgtcttaccgcaaggaagagagctttatttgtccctcgctatcaactggcgccaaaggttcgtgtggtggagaaagaagttgctccagctcaagcggatcctccggtcatcatcataagtagtgataaagaagaagaatccaagcgcaaccattccaagattgagtgggtagcaactcaagatgatgaagacgagccttcaatcgacctccgatgcttggaagaactagagtga

SEQ ID NO: 66462 - DNA, 1734 bp, Oryza sativa
  Clone ID: PAT_MRT4530_67410C.1
atggcgcgtgagatctcgctggcgtcgacggcggcggtggaggagccggcggcggcacctgctcgcgtccgccggcggcggcagctccacctcttcagtgtcgccgctgaagtgcacgaggaggttcttcattttcttgctttaagcagtgtcaagaaaatcggtgacatgaattggaaccatgataccagtcatgatactaagaagaatcatgatacctctctcgtatctcatgatccttctaagaatcatgatacctcccacgtatcacatgatcttcctaaggtatcatcagtgaaacctgataataccatccatgatactgaggaggatcatgatacctcccagactgggccttctcaacatgttgtcctcccattggtgtcaagttcattgatgcaagctttggtgtcaagttcattgatgcaagctttctcagctaaaccttgtattgttttgattgcaagatcatatccttgcaaaacacgattccgaggatgtttcattgggaagcagaagagccggcggacggcgagggttccgctggaaagaagcgaggaatcgcgcgccgcaattccgaggaggtttcactgggatgtagaggagctggcggatgatgctcgcgccggtggaaggaagcgaggaatcacgcgctttctaggaggatttgccatgatgcggagaagccgacggacggaatgcagatgggctaggtcgacccagctacccactgacccagcgcatgaactatggggcaaacactatatgggtcaacccacatgggccaacatgggtcggccggcgggtggggaggaagtcggtgaggaggtccggcggctggcgacgggtgacacggcgacgacgagcagtcgaggcggtggttgcagaggccgcatgcttggaggatcccgccgtcttgatggcggagaaatcgacggagttccgctagagcctcacgagcgccagcacagcgtggccctgggagtaactagcgaggacaggctaagcgcactccttgatgatattttgctcgaaatactccaacgtctcgccgacgacctgcgttccgttgtcagggccagcgccctctcgagaagatggagacacctcccgcacatgcttcctgatatcagactccatgcccgtgacttcacgcagccggacatcggctccggcggaagacacaacaacgccgccggctacaccgttgatcagacaatggcggcgtacaccgccacggcgaggtggctcctggagccgacgatcacaacgccgcagcgggtgaccaagaagagcatcgacctggcattcttcttgagagacccttacctgcactccatcggccgagccgtcggacacgccatcgacggtggcggcggcacggaggaactggacctcaccgtggaggccgacatcgccgtcgccgacctgaccgacgagcacaaggtctcgctgggacgacgcttctggtccttcttccaagcgtgtcccgttgttttcaggtggctcacgaggctcaccgtggacgactgtttgagcggaccggacgacatcccgaccctcgtcaacacctgcgggaggctgcgtttcctcgagctgaggcacagcgacgtggtcgacgacgccgtcctcgagatcgacgcgccgcgctcgcagctcgtgtgcctgaagctgcaccactgcaacttccggagggtggatctgatccgggtgcccaagcttcggcgcgtgtag

SEQ ID NO: 66463 - DNA, 536 bp, Oryza sativa
  Clone ID: PAT_MRT4530_67411C.1
cggccgcgtggtgaaaaaaaaaaaaaaaaaaaagaaaaaaaaaatataaaaaaaaaaaaaataaaaaaaaaaaaaaataaaaaaaaaaaaaaatctaatataaaaaaaaaagggctgccttttttggggctccaagtttactggggggggcttgtttaaccttacctttttttcattggcctcctttttcaaattaattgcctttttttttgccccccgtttttccctggtaatgccctgggtttccccccctctttcgggtggcagcctttcctctttccaccttttggccttttgccgtttcccccttttccgctgttgttttttttcctgggggcccccctgttgcggtttttaaccccctttgtaccggttctttaggctcggggccttcctttttttcgcccttttccccccgcccgtttgtggggttccttgcccgcgctcttttccttttttccccttcttttcccccgcttttttcgttttttccctttttttttgtgactcgttggctgcttttcgcgtcccgcttt

SEQ ID NO: 66464 - DNA, 157 bp, Oryza sativa
  Clone ID: PAT_MRT4530_67412C.1
gtgggaggtgatctcaccgccatagcctacagcgagctatgccaccgacccattcctacataacctctctatagtatcagacgagcctacatacaatcttgcagatctaggtgatctgatacatgaaagcccgaatcataaacataactaggaggtc

SEQ ID NO: 66465 - DNA, 219 bp, Oryza sativa
  Clone ID: PAT_MRT4530_67413C.1
atgactcatgcgtcgcacagtgagatcacggatctgatcggctgcttgggggcgcaggagcgcatcgatgcagcagccggtgagctcacatggccgtacgtgcgagggattgccgccacggaatccgaggaagtggccgtcctcctccccctacctccatatggctccatggctgtggggtgtggctccattgccatgcatgcctacgctgatggctag

SEQ ID NO: 66466 - DNA, 754 bp, Oryza sativa
  Clone ID: PAT_MRT4530_67414C.1
atctggtggcatatgtgccaaagcttctttcgcagttgcacatcgagggcctctgtcatggtaacctatcagaagatgaagcaatgaatatatcaaagaatattccaaaacacatagggggctcagacactgcctgatgaggcagggcatgaagaaagagttctttgcattcctgatgatacaaattttgttagaagtgtccgtgtgaagaatgacacttgaagagaattctgtggttgaggtttattttccagttgaacaagacattgggaaggatgcaacaaaactcagagctattacagatctttttagcaacattatggaagaaccttgctttgatcagctcaggacaaaggagcagcttggctatactgtggactctagtccgcggatgacttaccgtgtgctcgcatattgttttcgagtcatgtcctccaagtatagccctgtttacctacaaagtcggattgatagcttcattgatggtgtatctgctttgctggatgggcttgatgaagagacttttgagcatcacaggagtgggttaatagccgataagctggagaaggatccttctcttagttatcaaactggagattattggtcgcagattgttgacaaaaggtatatgtttgatatgtcaaaactggaagctgaagagctaaggacagttcggaaggaggatgtaatcagttggtacaatacttacattaaaccatcatctcccaagcgcagacgattagcaatccatgtg

SEQ ID NO: 66467 - DNA, 375 bp, Oryza sativa
  Clone ID: PAT_MRT4530_67415C.1
agcatcaccagtcatgcatcgttccccgtatgattgtatgcagggatacattaatgatccggacctacatgtaagggacaaagttaaggggcctcaaagatggaagcatcctggtccagcggggagatctcggggagcctttggagcaaaatttcgttccacatgtcgacggggcccggcatgcaccaggggaggcagtcgctgacaatgtttttttgccaccttttggcgatggccgcgccgggggggccgtcggcgcgcaacattatggcctttgtcacgttgagcacctcgaacctcctcgggttcccgctcgccgggggcgtcgtcgccgtcgttttcttacccgcataaccttcttttggtggaccctcc

SEQ ID NO: 66468 - DNA, 259 bp, Oryza sativa
  Clone ID: PAT_MRT4530_67416C.1
attggaggtgtctctgaatgatgtattttgccacagaaaacgaccacttttacacacatttgggtcggaatggtacaaaatgtacatttgagtcgaaatgatcaacgaccaagtccagtcaatcaactgaacacaaacaggatgttacaacttacatcagtgcatggttaccttttgctttgcatatgtgaagtaaatggtgctttaagagcaatcaaatttattacggttagtcctgatcagctgaaggggtggccat

SEQ ID NO: 66469 - DNA, 3831 bp, Oryza sativa
  Clone ID: PAT_MRT4530_67417C.1
atgtcgacgtcttctgccacctctgctgcgaccgacaactccacagcatcggcctccaccaactccgtcgcgaccgtcttcgtcaacccgtacgcgaccatctccgtcaagactcatgtcccgatctccctcgagcttcgcaaccccaacttcaacaagtggaagaccttcttccgctcgatgtgcggcaagttcggcctcctcgaccacctcgacgactccgcacctcctgcagcccccgacacctcatgggagcaagccgacttctgcatccgcagctggctattcggctcggtcaccgacgacgtcctcgacctcgccatggaaccggatcagacggctcgcgccctttggctcgccatcgccgacctctttcaagcgaacaaggaaccacgtgcaatctttcttcatcatgagttccgctccatgatccaaggcgatctctccatcactgcctactgccagcgcatgaagacggcagccgatgcccttcgcgacgtcgggcaccccgtcacggagtcgcagctggttctcaaccttctgcgcggcgtcaactccaacttcaccagtacggcggacaacatcgcaagtgctcctgtcctcccgtctttcgcttctgcgcggaacacccttgttctcaaggaactccgtctggccaacgacgccaaagttcagacagagaccgcccttgtcgcggcaagcagcgctgctgcctcttgcccctcgggctcctgctcctccactggaggtggcggcaagggtggaaacaagaagaagaatggcggccgcaactacaaccgcaatggcggcggtaacaacagcggcaacaacagcggcagcggtggtggaaatcgtcaaggcggcggcggcggcaccttctcctttgctgtcccgcgccccccaactggaccatgggtctgtgtctcccaatgggccggccagcagcagcagcagcagtggcgcgcccccggcatcctcgggccttttcctcaagcccacaccgcctttgccggcccgtactcgtcgccgaccacctctgcagcgcaaccggcctgggatcaggctagactggtggctgccctcaaccagatgacggtccacagccccaattcttgggtcctcgacaccggcgcgacctcgcacatgtcatccaccgatggtatactcgttacccgcttacccaactctcacacctatattactgtcggcaatggtcacactattccggttttatgtcgtggctcttcctttctacctataggcaccaccaaatttgatctcaaacatgtccttgttgctccttccttggcagacaatggcgctgagttcgtcaaccgcagcaccacctccttccttgctagccgcggctgcctgctccgcctttcctgcccatacacatccccgcaaaatggcaaagccgagcgtgtacttcgcaccattaacaactcagtccgcacccttctcctgcaagcctccatgcctcctgcctattgggccgaaggtttagccacagccacatatctcctaaaccgacgtccttcctcatccatacagaactccatcccattccagctcctccacaataaaatcccggactactccctattgcgtgtgtttggatgtctttgctaccctaaccttagtgccaccgctagccacaaactcgcccctcgctctgccgcatgcgttttcttaggctatcccacctcacacaaaggttaccgctgcttcgacctctccactcgccgcatcatcatttctcgccatgttgtcttcgatgagacttgttttccgtttgctcgtcacccggtcgatgtctcttcgtttgattttctgctacaggaagtgactactcccaccgtggtcgctccacccgtcacgggtgtcgagcaaccgcggccctccctgccccgcgccacggatgacccggtgcggtcgtctttggtggctgctccctcggctgaggtcgagcagccgcttcttccctacacgatggtggtcccggctgctgggttggcttggccggctgctggggacccagtgcccacgacccggacggccaccgggcctcttcttccaactacggcacggctggtcgagcccttcccgcacgtctatcgacgacgacaggccacgccaccaccgcgcctcgacgctgcaccggcacctcccctagtcgtgccgcccccgccaagccgcatggtcacgcgctcccagaccggctccctcaggcctgtcgaccgcctcatcctggcggcttcccactccgctatctccccggttctgaccaactaccgcagcgcgctcgccgatcccaactggcgtgctgccatggcggatgagtacaaggccttgatcgacaacggcacttggcgcttggtgccccgccccccgggtgctaacatcgtcatgggcaagtggatcttcaagcacaagtttcactccgacggctctctcgctcggtacaaagcttgttgggtggttcgcggctactcccaacaacacggcatcgactacgacgagaccttcagccccatcgtcaagccgtccacgatccgagtcgtcctcagcattgcgacctcacgatcatggcccatccaccagctcgatgccaagaacgccttccttcatggcacgttggacgagacggtgtactgccagcagccctccggctttgtcgacccggccgcgcccgacgccgtttgtcttcttcagcgttctctctatggcttaaagcaagcccctcgcgcatggtaccagcggttcgccacctacatccgtcagctcggatttgttgcctcgacctccgacacgtccctctttgtctacaaggatcgagaccgcatcgcctacctcctgctctacgtcgacgacatcatcctcactgcctcctccacggatctacttcgcctcatcaccactcggctgcactccgagtttgccatgacggacctcggcgacttgcacttcttcctcggcatctccgtccggcgctcctcagacggcctcttcctgtcccagcgacagtacgccattgatcttcttcagcgagccggcatgtctgaatgccaccccaccgccaccccagttgacgctcgggccaagctctccgcctccgatggcgcccccgtcaaggatccgaccgagtacaggagccttgcaggagctttacagtacctcactctcactcggccggagctcgcctatgctgtccagcaagtctgcctcttcatgcatgatccacgggagccccaccttgccttggtcacgcgcattctgcgctacgtcaaaggctctctctccgccggactccacatcggcaccgggcctgtcaagtctctgacggcttactctgatgctgactgggccggctgtcctgactcacgacgctccacctccggctactgcgttttcctcggcgacaatctgatctcttggtcttccaagcgtcagacgactgtctctcggtctagtgcggaggctgagtaccgcgctgttgcccacgccgtcgccgaatgctgctggcttcgccagcttctccaggagcttcatgcccccatcgcctctgcgaccgttgtttactgtgacaacgtcagcgctgtctacatgacggccaatccagtgcatcaccgtcgcacgaagcacatcgagatcgacattcacttcgttcgggagaaggtggctctcggacaggtctgtgtgctccatgtaccgtcgtcccatcagttcgtcgatatcatgaccaaggggctgcctgtgcagttgttcactgatttcaggtccagtccttgcgttcgtgatcctcccgttgcgactgcaggcgggtattag

SEQ ID NO: 66470 - DNA, 1332 bp, Oryza sativa
  Clone ID: PAT_MRT4530_67418C.1
atggcggctttgcgttcctggagcaaaacaaaggtgaaaaatgtgggtagagaacttgcaaaggcaaggaagaagctgggggacttgattgcttcagatgctgataattcccaaattcgttttgccactgaccaaatgaatgaactgttatacaaagaggaaatgctttggcttcagtggtctagagtgaattggcacaaggaaggagataagaataccaaattttttcatagtagggcggtatggagagcaaaaaagaatagaatcacaaaactgaaagatttgcagggtactgtgcaccgtacgacaacagcaatggaatcaatggcaactgattatttccaggagatgtttgctgcagacccgaccttgaaccctgaatctgtcaccagattattccaagctaaggtaacggctgaaatgaatgacctgctctgtgcagacttcaaggatgaagagatcgctcaggctttgttccagattggaccgttgaaagctccgggtcctgacggtttccctgcccgcttttatcaacgaaattgggggatcattaaagaggacatcatcagtgcagttagtaagttctttcagactggatgtatgccagaaggagtcaataatacgactatagttctaattccaaaaattgagcaacctatggaattgaaggactttcggccaattagcttatgcaatgttctttacaaagttgtctccaagtgcctggttaacaggctcagaccgatgctcaatgaattggtatcagaggaacagagtgcttttgtccgaggccgaatgataacagataacgcgctcctagcctttgagtgttttcactatattcagaaaaacaggaaagctaacaaggcagcgtgtgcttatgacagggtggattggcgtttccttgatatggcaatgaatcggttgggtttcgctcaccgctgggttaactggataatgacttgcgtaaccacgggaacgggccaattgatcaacccggctaaatgctcaattttgtgcgatgatgcttcccccatcgagatcactgaggtaataaaacagattctccagttagaaaagagcaactttgaagataaatatcttggttttcccaccccggaaggtagaatgaacaaggggagattgcagagcctacaaagtaaaatctggaagcggctgatccaatggggtgaaaaatttctctcttcgggtgggaaggaagttctggttaaggctgtaatccaggccattccggtctatgtaatgggcttatttaagctcccggattctgtgtgtgacgacctaacaaagctcaccaggaatttttggtag

SEQ ID NO: 66471 - DNA, 383 bp, Oryza sativa
  Clone ID: PAT_MRT4530_67419C.1
ggggaaggggattccaatgggcctttatgtaaaggggaaaagggtattaagaaacccttaaaaaaactgggggattgggcaaaaaaaacctcaaaaaagggggcagggggtggggacccggggatctgacaggggaaacagggaaagaaaaggggctgcttcttgggttaacatgaaaaggaaaaggggtatatccccgaagaactgggtttagaccatggatgttaacccagggccccctattgaagaaaaactggtcaaagaatcccgacccctggggcgaacccggaaatccggacccggacccggggggggacccgggtaccctaaagcgaggcccaatagagccccggggaatcctggggaaagggggttcccggggg

SEQ ID NO: 66472 - DNA, 823 bp, Oryza sativa
  Clone ID: PAT_MRT4530_6741C.1
agcgactgggggtaggcggcagcgaccggcgcgggcggggatgtcgcgcgccggggggggggggaaggggggcgcggaaaggggagagagagaggaagggaggaggaagaaggattggagagagaggatgagagggaagagatgatggagaagggcaagtctgagctgaggatagccatggaggagctgtccttgccatgtccaggagatgatgaggatgagcagcagcagaggcagaaaaggtcatctaccatggaccttctctgtgtctccaagcacatcatccatgtccttgatgattggaccgactttactagtcctgaggcaagacattcagcaaaatgttcagagattacaggatgtgcttgcaagggacccttccaaatattcaagcctgacagcaatagtgacagaggaagtggaggaagggacctcaaagaaggccaatagctgcaccagagctattctttggttggcgtcgataaatttctcaaaacatttactggaggggttgcttaacacctgtgatcagtcgagcctcagagagatcgtcgaaaaggcgtatattactacattgaagccatggcatggttggatctcatcagctgcttacagggtggcacagaagctcattccggaaaaggagatcttcatagcattgctgatggggaactgtcaggaatttgaggttttcgcaaaagatgtgaaggtcttgctctccattgtccagcccctcatagaagaggccaatgcagttttggtcagagctcctatgatagcacacctttcagtaaatatttgagtttcaaggaaatttagttca

SEQ ID NO: 66473 - DNA, 1552 bp, Oryza sativa
  Clone ID: PAT_MRT4530_67420C.1
gcgcccacgcgtccggcccggtgtctcctcctcccaactacacacccccgcaatctcgctcgctagctcgctgatcgatcaagctcaagctcaagctagcttcggtcgtcggcaatggcggcgcaggcgtctcctccaacgaagaaggtgttggtgccgatcgtcgccggcacggagccggtggaggcggcggtgcccatcgacgtcctccgccgcgccggcgcggacgtcaccgtggcttccgccgatgatggcgagctggtcgtcgaggtcatgtacggcgtcaggatcgtcgcggacgcgctcgtcgccggcggcgactgcgccgccgctcacttcgacctcatcgtcctcccgggaggggttccaggcgcggcgaacctcggcggctgcgcggcgctggaagccatggtgaggaggcacgcggcgaccggaggtctctacgccgccatctgcgccgcgccgccgctggcgctggcgtcctggggcatgctcaacggcctcaaggttgctaaagctagcaagtgtggcagtcttgcaataacgattcaaaacagtggtaaaacagtggcaactgctcatccgctgttcgtggacaagttcccaccggaggtggccgccgtggatgcgagcgtggtggtggacgcgagcgccgtcacgagccgtggcccggcgacgtcgacggagttcgctctcgctctggtagagcaactctacagcaagaacaaggccgagcagatcgcaaaagaaatgcttgtcagatacgatgctgggtataccatcgatgaagtcaactcggttcaatggaaatgtaacggcacgcccaaggtccttgttccagtagccaatggcaccgaggagatggagctgataacaatcatcgacgtcctgcgcagagccgacgcggacgtcgtcgttgcgtcggcggaaaacgccggcgtcgagatcgtcgcgcgccacgggatgaggatcatcactgaacgtctgaacactttctctcctcgtctcaaacaacagggtggcacgcctggcgcgaagacgatgagcagcaacgagaagcttgtcactctactgaagaagcaggcggcggcgagcaagccctacggcgccattggcgccgcgacggctcatgtgctcgagccccacggtctgctcgagggcaagaaagcggcggatcaggatggcggcgacgagtgcgagagcagagtggtggttgatgggaacgtgatcacgagcggaggcaccggcaccgccatggagttcgccgtggccgccgtcgagaagctgctcggccgcgacgtggcgcagagggttgcggaaggcttgctttttgcctgatcgatcttctgttggttttaggtgatcaaaccaatgaaagttttcataatgcagatgtgtgatctgtgaaagagataattttccttccaagaaaaagacataaagagttgtcatttgtcaaaccatcaacatttgttctcccataaacttataagggtgttttcttaatttatagctgatggattgattgatggataaaaaaaaaaaaaaaaaa

SEQ ID NO: 66474 - DNA, 513 bp, Oryza sativa
  Clone ID: PAT_MRT4530_67421C.1
atgacggcggcggttggcggttggggcagaggaggcgacagtcgtcggtatggtgtggaggaggagattccagcttacaactctatgatatacccgaacgtggaagattacgaaggacggacagagccatcaccacctgctgcctacctctacaacccatggagcacacaacaagcaaagagatgtagagtagtatttattaattgcatgactggtttcaacttgtcgaaaaatttccaagataatcccgaaggattctttgggagcatcaaacctcgtgttgtccctccgcagaagactctttcggtagagaaatcagccatcccagcgccaacaactttcaagacaatggctgataagacactctgcgagttcgttgctccatccgctgacagcgtgcctattggaccacgtgtcaacgtggacttcgacctcaagacaggcctaatcactatggcgcaggctagcccgttttgtggcaagccgaacgaggatgctagtgctcatctgtaa

SEQ ID NO: 66475 - DNA, 792 bp, Oryza sativa
  Clone ID: PAT_MRT4530_67422C.1
atggaggaagtaggagtgagggagcactctcgagttcttgaagcagctgtagttcgttggaaaaagatctgggagggagggagggagggaagccgccgcctgccggtccgccccgcgcacgacgccacgccccaccgtcggtccgcccttcgccgccggccgccggcctcccccctcactcctccacccagatctgggagggagggggaggggagccgccgccagtccaaccttcgccaccagccgccggcctccccctccctcctctggccagatctgagaggaaggaagggaggggagccgccgctggccgccccgcgcgcgatgcaagagggagggagggaggggaccccccactggacgccccgcgccgccccgctgccggtccacgggatccgccgccgccgggagccgggagctaccgccgcctctggccgaggagaggaggagaggggaggggaggggagaggagaggtgtggagagatctgcttgactcccaaatccggctggagaggagaggggagagggcgttggtggcggcagctatcggcggtggcagcggtagcatctacctcgacgcggctcccctcccctccctccgtcctagatcaggccaaaggggggagggggaggacggcggcggcggcggctcccctccctccctccctcccagatccggtcgaagggagagggggaggacggtggcggtgacggcgatggctccctttcctcctcccagattcggccagagggagagggagggcggcgacagcggcggctcccctccctcc

SEQ ID NO: 66476 - DNA, 382 bp, Oryza sativa
  Clone ID: PAT_MRT4530_67423C.1
cccaagcctactgcaaatgcacattctcgatccaccatatccccataactctccattacagcggcattcttcttataaacgacaccataggacacacacctcttccaactttactgcatcttggaaacgcacagcctccaacaatagaggggcgctcttctcctcaagcattactattgcacgaatgggcaccctcaacattgctctgcgacttaccttgcaacttaactgcgtgactgaccaaatcatacctatctcaatgagaggacaaacatcttgtctctagcatacaccctgtatgctatcacatacactgtttcaccattaaagtatgctctctcggaatcttgaggaacctcgcaattacccattgtcaactgca

SEQ ID NO: 66477 - DNA, 1543 bp, Oryza sativa
  Clone ID: PAT_MRT4530_67424C.1
atgacatctcgactaccgggccgcagctcgtgtagccttcatttgccctggagatgtccatcgacccccgacttcgtccatctccatccgtgtacttttgtttataaccagactgagccacaaactaagccttacccactagacatgtggaagtacgctagtactttgcaacagaggcccgaagaccggtccttatatggccgaggtgctactatcaaaaccatgcaccccgagcccagcctaaaaccattgttggggattttgaatagagggggcggtgtgaatccaattccacaatactccaacaattccaaagtgtccagccgaggggaggggcgcgcggaccgggtccacgggggtggggcccacgcggcagccccacggtccacggtggaccgggcgcacccgggctcacaccggccggcgccgtgggtcccacgcgtcagccgcacccgaggacgcgggcggctgacagccgggccccacgcggcagccgcacggtgcgcccgaaggcggccacgccggcgcagcggcgggaggcggcgcgccctcacccctatggtcgccggcggcggccataggcacggcggagcggcggccgagagaggggaagggaagggggaaaagaagcggcggtccacggctcaccccgggtcgacggcgacgacggaaacggcgaccggagcggaggaaggcggcggcgcggctcgggtggacggggtcgacggtgctccggcggtcggcgagcgaaacggaggggtggacgaggtcgccggggatgcggtggagccgaaggtggcgacgccgaggcgggaggtggtccggggcgacgacggcggcggaccggagctcggcggtgacggcggagagagagaacgacggcgcgagctcgattccgacggggagagagggcggcgagtggcggaaacggtggagggaggcacggggaagcaacagatgcttagcccaagcggtgagttcgtaaggcagcagtgcagcacagtggcaacccccttcttccaatcacccgtgtttcaactgagaaactgccaagtcatgcagcagcagtgctgccaacagctcaggatgatcgcgcaacagtctcactgccaggccattagcagtgttcaggcgattgtgcagcagctacagctacaacagtttgctggcgtctacttcgatcagactcaagctcaagcccaagctatgttggccctaaacttgccgtcaatatgcggtatctacccaagctacaacactgctccctatagcattcccaccgtcggtagtatctggtactgaattgtagcagtatagctagtataggagacccaaaaaaagtcatgcatcatcgtgtgtgacaagttgaaacatcggggtgatacaaatctgaataaaaatgtcatgcaagtttaaacataatgcctctgtaaggataaatcctagtacattgttgaaattaattatcatcaccgtctactatggttgcatttacactttaaataaaaaaaaaaaaaaaaaaaaaaataaaaaaaaaaaaaaa

SEQ ID NO: 66478 - DNA, 396 bp, Oryza sativa
  Clone ID: PAT_MRT4530_67425C.1
atggccgccgccggcgaccacaggggcgcgggcgcgccgcctcctgccgctgcgccggcgtggccaccttcgggcgcaccgtgcggctgccgtgtggggcccggctgtcagccgcccgcgcccttaggtgcggctgacgcgtgggacccacggcgccggccggtgcgagcccgggtgcgcccggtccaccgtgggccgtggggctgccgcgtgggccccacccccgtggacccgtctggttataaacaaaagtacacggatggagatggacgaagtcgggggtcgatggacatctccagggcaaatgaaggctacacgagctacggcccggtagtcgagatgtcatggcacagggccgaagaggagtctctggaagatgaaggttttggtgtctag

SEQ ID NO: 66479 - DNA, 1479 bp, Oryza sativa
  Clone ID: PAT_MRT4530_67426C.1
atgtggaagtacggtagtgctttgcaacagaggcccgaagaccggtccttatatggccgaggtgctactatcaaaaccatgcaccccgagcccagcctaaaaccatttttggggattttgaatagagggggcggtgtgaatccaatttcacaatactccaacaattccaaagtgtccagccgaggggaggggcgcgcggaccgggtcaacgggggtggggaccaacgcggcagccccacggtccacggtggaccgggcgcacccgggctcacaccggccggcgccgtgggtcccacgcgtcagccgcacccgaggatgcgggcggctgacagccgggccccacgcggcagccgcacggtgcgcccgaaggcggccacgccggcgcagcggcgggaggcggcgcgccctcacccctatggtcgccggcggcggccataggcacggcggagcggcggccgagagaggggaagggaagggggaaaagaagcggcggtccacggctcaccccgggtcgacggcgacgacggaaacggcgaccggagcggaggaaggcggcggcgcggctcgggtggacggggtcgacggtgctccggcggtcggcgagcgaaacggaggggtggacgaggtcgccggggatgcggtggagccgaaggtggcgacgccgaggcgggaggtggtccggggcgacgacggcggcggaccggagctcggcggtgacggcggagagagagaacgacggcgcgagctcgattccgacggggagagagggcggcgagtggcggaaacggtggagggaggcacggggaaggtttatataggattgggagggggagggagctgccggacgagggggaaacgggcgcggaagatccggtcgccattgatggcgccggcgagagtcgttttgggacgcgacatcatgctgcagcaacagatgcttagcccaagcggtgagttcgtaaggcagcagtgcagcacagtggcaacccccttcttccaatcacccgtgtttcaactgagaaactgccaagtcatgcagcagcagtgctgccaacagctcaggatgatcgcgcaacagtctcactgccaggccattagcagtgttcaggcgattgtgcagcagctacagctacaacagtttgctggcgtgctacttcgatcagactcaagctcaagcccaagctatgttggccctaaacttgccgtgcaatatgcggtatctacccaagctacaacactgctccctatagcattcccaccgcgctcggtgggtatctggtattgaattgtaccagtatagtagtaccacggagagaaaaataaagtcatggcatgcatcgctgtgtgaccagttgaaacatcggggtgataacccaatctgaataaaaatgtcatgccaaatttaaacataatgcctctgtaaggataaatcctagtaccttgttgaaattaattatccaaaaaaaaaaaaaaaaaaaa

SEQ ID NO: 66480 - DNA, 343 bp, Oryza sativa
  Clone ID: PAT_MRT4530_67427C.1
agcctaataggaaccaatcctacgaataaaagctcttactgaggattgagagctggagacagatagtgctcacaatgcaaatgctgctgactccgggactgaatgaatgaccctatagagagcgaaaacagccactacaacacatgggggaagagagatttgacatggaccagatgcatgtagggcacaaactacctctacgcactcatgtcacacagtacagatcttgcaggtgaagctagtttcacataacacatgtacgtccatgtacttttggaggacgtatacagcttacaggtatggccagtacagtttgtgcacacaccctgtaactggtatagcc

SEQ ID NO: 66481 - DNA, 295 bp, Oryza sativa
  Clone ID: PAT_MRT4530_67428C.1
ttaaaaacttaactcaggtttgaaaacttttaattcaaatttaaaaacttcttttaactcaaatttgaaaactttcacctcaaaattcaaaatattcgacttagatttgaaaacttccatcttaaaattccaaaacattcaacttaaatttaagaaactttcaactcaaattcaaactctcattgatattgaaggtgaaagattgaatttataaaatatcgcaaaaactcatgcgcgtgtgtggagaaaaaaaaaagaagccaatccaaaaaatattcgaaaaaaaaaaaaaaaa

SEQ ID NO: 66482 - DNA, 444 bp, Oryza sativa
  Clone ID: PAT_MRT4530_67429C.1
atgtccgctcccaccggcggcacgtctcgtactccccggcgaacaggccatcggctctcgccgtctcctccacggccacgcaggcgacagctcgtcgtgcagcggatcgttaaggaaggcggctcggtctcctatccaacgctcacacgctcaaattactctgattgggcggtgttgatgcgagtcaatctccaggctcaaggtctatgggatgctgtcgacaccggcgatgtcccgtatcaggaggatcgccaggcactttcggccatcttgcgagcggtgccggctgagattgtccggccgctcgccgagaaggacagtgccaaagacgcctgggacgcgctcaaatccatgcgagtgggcgcagatcgtgttaaggaccttcgtctccagggtgttgtcagcgatcttcgtctccttggagatgatctgtctgaagagaag

SEQ ID NO: 66483 - DNA, 631 bp, Oryza sativa
  Clone ID: PAT_MRT4530_6742C.1
cctcgccggcgccatcaatggcggccggatcttccgcgctcgtttccccctcgtccggccgccctctctcactcccaaccctatataaaccctccccgagctccccacctccgtttccgccactcgtcgccctctctccccgtcggaatcgagctcgcgccgtcgttctctctctccgccgtcgccgccgagctccggtccgccgccgtcgtcgccccggaccatctcccgcctcggcgccgcctccttcggctccgccgcatcctcgccgacctcgtccacccctccgtttcgctcgccgaccgccggaacgccgtcgaccccgtcgacccgagccgcgccgctgccttcctccgctccggccgcctttttcgtcgtcgccgtcgacctagggtgagccgtggaccgtcgcctcgtttcctcctttccctcccttctctcggccgccgctccgccgtgcctatggccgccgccggcgaccataggggcgcgggcgcgccgcctgtcacccccgcgtgggtcccaccgcccggtcgtcgtcctcctcccgcccagcttctctctctctctcccgtgaaccctagtttcttcctccctcaaatccacgcgaatcaatgccattctttccaaa

SEQ ID NO: 66484 - DNA, 358 bp, Oryza sativa
  Clone ID: PAT_MRT4530_67430C.1
acatgcaccactaatttatccagatggggtctgcttatgcaccacagggaaggatggatttaagggaaacgccccccactgttgctggatgaaactgatgcactgctgtgttgtggtttgatgcacctcttgtgttgtttgatttcgtgggaattacctcagaaaatcatatatgtctaaattattgtttgggggtcttttagatgagttgaagcttttatagtgaaggttactgctaggttttatagttggaagtactagtgttacattgaataaactggaatggcttaccggtgtagaaatgaacaccttgagagggcgtatccgtacagattttggcgaagagaatacccaaccc

SEQ ID NO: 66485 - DNA, 108 bp, Oryza sativa
  Clone ID: PAT_MRT4530_67431C.1
atggggattcgtgactgcttgaccataggaggtagcgtcttcatggcgctgagaaagaccttgcagctcgagagcatggatgttgagaaagacccagcaggcttgtag

SEQ ID NO: 66486 - DNA, 425 bp, Oryza sativa
  unsure (1)..(425): unsure at all n locations
  Clone ID: PAT_MRT4530_67432C.1
cataggcaagaagagtctttnttcttcctcctactcgccgccgtcttcgtcgtcgtcgccgcctcggtcttcatagctcggctgcaatgtctgatcgtngtgcgtgtgcgtaggattcanctgagtttggttcttagtggattcgtttgaaattggtgcagggtaaggtttgccaagacggctccgcggcggcgtctccggctaatctccggtcactctggccttccccgtggcgccgncgccgnctcgcgccgtnagtaaggtgtgtggtgctgtggggcatgcaatctnctccgccgtcttcctcctcgtctngccgtcgctgctncggagagtctntnccgtaggacaacggctaaaaaggtctcagaaacttacttaaattttgaacgaattcgtnttaacagaagaaaattngaagggnt

SEQ ID NO: 66487 - DNA, 462 bp, Oryza sativa
  Clone ID: PAT_MRT4530_67433C.1
atgaacaagcacgggttcccgcgcgtcttccgcttcgtggcttcgtgcccgacgacctggaggaggctggagctcctcgacatcctcaacgacaagctccggagccgccgcgcgtgtaccgtcgtcacccgcgcgcgtcagggcagccgacaaggtgtaggagctgaagaacgcgtgttcgacggcggcaagaaccccgttgtgttcgaacgagggcatggcggcaccggaagacgggcacgaacaagatgcggtcggagcgcgcggctcagagcggccagtggaaagtcttcggcaactgcagctgccgttgggctgggcgtgcgcatcggcgagactatctggttggcgccaccgccgccgccgccgcagtgcatcgacgtcccgggaccgggaggcgacgaactggaccagctgctttacggatacgaagaatcacctggcgttcttgttcaaggatga

SEQ ID NO: 66488 - DNA, 306 bp, Oryza sativa
  Clone ID: PAT_MRT4530_67434C.1
atgacaatctcagggcatatcactaacactagcttggtgaagctgtatcaaattaggatgatgcctgctgctaggatgccacaggttgtcttggccgaccggagatggcgagtttgtgataggggcagagtgagcccaatggggaggaggactcagagttcagcattgtcggagatgcaagacggtgaccaggattggaggaggcgatgcatggacgaagctgactcggtgaaacctgacatccgacgggccaacgatatgggctgcacagcccaatttggatcacgctcaggacgtgtagtgtag

SEQ ID NO: 66489 - DNA, 598 bp, Oryza sativa
  Clone ID: PAT_MRT4530_67435C.1
tcggttaaaaaaaaaaaaaaaaaaaaaaaaaaaaaaagaaaaaaaaaaaaaaaaaaaaaaaaaaaataataaaaaaaaaaaaaaaaaagaaaaaagtaaataaaaaaaaaataaaatataataaaaagaaaaaaaaatgggggggtcttttttaggggttttatatttacttgcctgggattgccatgtttttgtttttttttggggaaacttaatttattttcattgggcgagtttttaaaatgtgtgaagtggggaaaaaccttgggttttccaaattaattgggttggctgaatttctctttttacccggttggtttattagcaaaaaggccggcacctttggctttttcaaaaaattgggaacgttgattgggaatggggcatccccttgtttggtttttttaatggggtgggttttggggttttcccgcagggtgaccctttcatttgcaagggccttggcccccttttttttgctttttttccttttttttttgccgggtttcgggggttttccctggggggttttaattggggggttttttttagggttcgtttttagttttttggggcttttccccccaaaaaatttttt

SEQ ID NO: 66490 - DNA, 112 bp, Oryza sativa
  Clone ID: PAT_MRT4530_67436C.1
gacacatactcattccatgcaagtctaatcacgggcagacgttaaaatatgacacgagctgatccaacaaaactaaacactcagctacctagctacctattcccatatcgtc

SEQ ID NO: 66491 - DNA, 126 bp, Oryza sativa
  Clone ID: PAT_MRT4530_67437C.1
atgggtcgtccccgccacgaagaccgactcctcttcgtcggcatcgttggcgcgaaggtctccgcctcgggcaacccaccggcatcgtcgtccggccaacggtacctccgcggcaccaaagtctga

SEQ ID NO: 66492 - DNA, 273 bp, Oryza sativa
  Clone ID: PAT_MRT4530_67438C.1
atggactccccagcgacccccgtgggtttatctccgccacttctcagtctggtgctccgcaatgaaccatgctatacaaaagaccctgatgacgtcagcggtgacgtcatctccggcggcggctcggcggctcgggcgcgcaagctcgccggcgaacgacggcgcttcggcacgaacggagggcaccaggacatagagaacgttgcggcgaactcaccggtgaccaaagaagcggcggaggagcagcggacggcgacggcggcgcggcgctag

SEQ ID NO: 66493 - DNA, 2155 bp, Oryza sativa
  Clone ID: PAT_MRT4530_67439C.1
cgcaacggaaaccacaccccgatacgactaggaagattcctctctgcttcttcgatccccttgttattacaatcaatcctgcaggaggagcactctataattgcagcggcaagatcgattttttacaaaccaacaaagcagaaaggattcacgcgccgccgcttgcgatttgtcaattgcagccagaaagaggcgatggatttcaaagtcgcttcctttctcctactcctgttaatcgtcacctgcggagctgctcaaggtcaaggcaatgattttgttgtccttgatctaaaaacaactgaggtcggggaagatgctagcccaatgtacaaggagcaaattgcgttgaccaagatacctgtaactcttctgaggagcaagcacagctcactgtgctcggcttgtgaaaacatcacaagcgaagcagtcaactttcttagtgagaaacaaatccaagataagataatgactatccttcatgacacgtgttctcagacatccgcctttgagcaaaagtggcttgcttcgccggcttcctactcaactcccttgtcgccacccctctcgcatccctcgccagctccctcccacacatccccaagcccagggcttgggatttcatacacaggttctacagtttgtccattcctgtgtttattgttctatggtttgcctgatcccctgggcactccacttcaatctcccagtgaagcgatgatgcttcaaaaaatcctcctggatgaggaaaccacagttgaatctacatattagcaagaataggcgagtttcctgcagttcctctccatggtcatagtgcactttgaacaggttaagaatgaaagcacatgcttattcaggaaccacgatcatcgatgaagttacgtccaaactgaaaaattcttatccaagagtaaaagatcattcaattactactcaaggaatggcaacaagattgaaggtcatcagcaccagtgcaagaggatggttctgcagtacgtacctctggttctggtgaacggtgagaagttcctggagaagaacgatgtgtgcgcaatgatccaagcctgtgatgcaggcaagaggaaggcactcaacttgttctctgcacggaaattggtgcgtgacgcatgaagtagtaggaagcgtgcgtacacgaatcaagttgtggtaggcatggagaagacgaagtgatggcagcttgtacatatggttgttattaatgaaatattaggcaatacactatgtgaaggggatgatccgataattatgtgcacacacttgtgctgctatctgaattctgaaagtaatgctatgattacttttttgtgaaaaaaaaaaaaaaaaatcatcactattgatggaacttgctgcattgtcatcgaaaggaatctgcactgatgatactcacagctcaatggaatggtctcttacaatagccgaacaaagccaaaatacagaggctgatgatgaaatgtcttctctggtcacttcacaaggatcaccatcccaagtctccgaatctcacaaaaccaaacctgagatttttttgatgtttgaaggtttctggctgattgcacgctctccctatctgatgtatatatctctatttttgtggctgagcgctgttgtgtcgtccttcttttacttccagggtcgtatccttaccatagctggtgtaacagttgctatctgtgcatccccattcattgccacattgaatatggttgcccttgctctatggccaacttgggttgctgttgctgtcactgaaacaattcgaaaggtaactacttatgttttgacaagacctggaagggaattgctattcacagttgtctcacaggatgagaagtacaaagccaaggcatggcgcaagaggccgccctttggcatcttgcccatcctctgtcgccaacgcttccttcttagcgtgctaggtttgatagatgttgttgttcaaaggcttggtgatgcaacagctgccggaatatacagtttgttgttcagcagccttgagaagaaggcatccatggtcaccctctacgcgttgccgctctgcttcgtgtggcttctaacggcatttcatttgggccggctccagacaaaccttgtcaaggttcaggttgcttcttttgcatcttcgattcctagatag

SEQ ID NO: 66494 - DNA, 1068 bp, Oryza sativa
  Clone ID: PAT_MRT4530_6743C.1
cccacgcgtccgatggaggtgaggagggaagagatgatggagaagggcaagtctgagctgaggatagccatggaggagctgtccttgccatgtccaggagatgatgaggatgagcagcagcagaggcagaaaaggtcatctaccatggaccttctctgtgtctccaagcacatcatccatgtccttggttagtaatagctcatcatgttctttctttcatatgaaaatcataccctgatggaaatttagcaggtttctagtgttgagatgtactgctgtttgcacttgctttctttgtatacatgtcattgggaagaacaattgctcatgctcctgtggatatataggaagagaagagttctttttcttaattacagtatcaatgttgtgcatggcatgtgcactagcagtgggtcattctagtattggctttgttctgtagccatatgtgattggggaatttggttaataaaaaacatgcatgcatataccttgtttgtttcttagagggggtggacatataaactcatcatgtggcccagaggccttaatcctttctctgtcttgtggccatctcaatcaatggaaaggagaaaaaaaatggaagtgccttttcatgtatttttcatactctgaaaaaaaagaggaaatatgattaacttgatgccattttatttgctatcctacatattatattttccttcttgcccatgtgagaaatcatgctgaattgagacacaataccttgttgcgaatgaagatgagattggaccgactttactagtcctgaggcaagacattcagcaaaatgttcagagattacaggatgtgcttgcaagggacccttccaaatattcaagcctgacagcaatagtgacagaggaagtggaggaagggacctcaaagaaggccaatagctgcaccagagctattctttggttggctaggtcgataaatttctcaaaacatttactggagggggttgcttaacacctgtgatcagtcgagcctcagagagatcgtcgaaaaggcgtatattactacattgaagccatggcatggttggat

SEQ ID NO: 66495 - DNA, 798 bp, Oryza sativa
  Clone ID: PAT_MRT4530_67440C.1
ccccgatacgactaggaaggaattcctctctgcttcttcgatccccttgttattacaatcaatcctgcaggagggtataattgcagcggcaagatcgattttttacaaaccaacatagcagaaaggatttacgccgccgccgccgcttgcgatttgtcaattgcagccagaaagaggcgatggatttcaaagttgcttcctttctcctactcctgttaatcgtcacctgcggagctgctcaaggtcaaggcaacgattttgttgtccttgatctaaaaacaactgagatcggggaagatgctagcccaatgtacaaggagcaaattgcgttgaccaagatacctgtaactcttctgaggagcaagcacagctcactgtgctcggcttgtgaaaacatcacaagtgaagcagtcaattttcttagtgaaaaacaaatacaagataagataatgacgatccttcatgacacttgttctcagacattctcctttgagcaaaagtgtcttgagactatggactcctatgcaactcttgtctttgcaaaaattgctgagatcaagccagctgcgttctgcaaacagtatggcctctgcagggacatggctcttttatcagctgttaaaagtgaaagcacatgcttattctgccaccacatcatcgatgaaattacgtccaaactgaaagatcctgatgcagagtttgagatcattcaattactactcaaggaatgcacaagattgaaggtcatcagcagcagtgcaagacgatggttctgcagtacgatggttctgcagtacg

SEQ ID NO: 66496 - DNA, 1239 bp, Oryza sativa
  Clone ID: PAT_MRT4530_67441C.1
atggagaggagaaggggagatcaaccgcgttttggtaacaagaggaggcctgatgagagagatcaggagcggtgggatgaactagctgcaaggcgtgaggaggaagatctcagggataagctgcgacgggagttcgagcggaggaaggaggaaaatcctaccaaagctgatgaagatgccaagcgacaagatcagcagtatccagcagccatgaagaaagggaaatgggtgaatgatccacgaggtgagaatttgtttcgccttgattctcaaaagcgtcctgttgattctcgtgatgtgagagatgggaaggaagaggagtttgcgaagaagtgttacaagtgtggcaaaaaggggaaatcgagtcatatctcaaccaattaccctgatctgaacaaagaggaaggtttgaagttatgtggagatgggatgctaggacaagtgtttcattgtttgcatattgcaatttcagatgaggaggaagtatgggtgagagctaaaggtgttccatcaattgccaggagtgagaaaatcatgatgaaaattgctcacttgattggagaccctgtggaagtggatgccatcagccttattagagagacagttagggtgaagattacttgtaatccagagggagttaagcagtccttcccaccagaagaccccgaacctggatataagaaagacttcagaaggagaaaagaagacgatgatggagacaaccaagaggaggaagagtttatggaatctgaagatgaagatgggaaggttgatattccagattacttccctaagctatcagaagatgtctcctcagacaaagaaatgcagacctatccccagcaaaagggaatagaggaaaaaactccaatcttgtcaaagcgagacttactgacagaagagacagttatcaacagatgtgggagggacagagccccatctgataacaaatgtggggcacccaaaagatcatgctctgtttctagggaggacaacactcctttggaaacagggatgatagataatgtcagatcaactccagggggagataaaggtcccatacaaacaaacagaagtggggaggatcaggatctaatggatgaagacctaagacaactggaagtgattgcgggagaggagaaaattcagacaaggactgatgatgctgaaggcttcacccaatctaggaccaagaagttaaagaagaagaagaagagtctagtggtggcgactagataa

SEQ ID NO: 66497 - DNA, 1558 bp, Oryza sativa
  Clone ID: PAT_MRT4530_67442C.1
tgtgatcatgctcaccagctatcctatcatccaccccctccagctcccagccatccacgccttcttctaccaatacagaactatcagcgatctcaggggcagcctctttaccgttaacctcctctaccacacaacccttggactcctctaccacacaacccttggattccgccgccatgggagcatcctcctcctccaccgccccagcctcacatccaccatctacaccatcctcctcatgaacagtctcggcacaacccggtgctgcattggactccaccgcctccccgccctccccgaggacagccggatctggcttggcctccagattcgaggcctccccagagagatcgccgcccgcaaccacgaatgggtcgctcaccgcctcgcccacgcgcccctccgaggtcgcggccggtgcctcctccaccgccaattccgcctcccgcacctccaccccgccgccgctactcgccgccgcctccgccgccattgccccccaactgcgtcccgatcctacacgcgaaaacacaatcatcagatcaaaaccccccaaccccccccccccacccccgccgcctggcctccgcgagccggcaagctccgccatccctgcgcccgcacctccgcccgccctccacgagtcggcgagttccatcctccccgtgcccgcgccttcgcccgcattccgcgagccggtgagctccgtcctccccacgctcgcgccttcgcccgccgtctacgtgccggcgcctccgcctccttccccgcgccaacgagatctccggcgctagctgtcgctcgccacccaccgttcgtgtgtcggtcatcgctccctccccgagcgtacacgccaccgccacccgggctccacgcgttggtgagctcctgcgccgccgcccgtcctcctagagccgacgagctcccgcgccgccgcccgtcctccgccaccgccactgccatcctccgtgcgctagactccgcctccctccttgcatgcaccgccggcggcggccatttggcctccgcatgccggtgagctcccacgcctcacagggccccccttcctcccttcgcccacgcgctggcctccgcctccttcgcctggctcacctcctccacctcgtcccacgccacccggcaccccgcatccccggcggcttccccggcgcacgcctccgttgcctccgccaccttccgctcgatcagctccgacagcgccgcctccttcctcgccgtccccttgtacctccacttcacggacgctattaccagccgccgcctccgctgccggtgtgagatcggccggacggacgcgggcgatccgagcgtgcgtactccggcgccgccgccgccgccgccttcgcctggctcacctcctccacctcgtcccacgccacccggcaccccgcctccccggcggcttccccggcgcacgcctacgtcgcctccgccaccttccgctcgatcagctccgacagcgccgcctccttcctcgccgtccccttgtacctccaccttacgaacgccaccaccaaccgccgcctccgctgccggt

SEQ ID NO: 66498 - DNA, 443 bp, Oryza sativa
  Clone ID: PAT_MRT4530_67443C.1
cccggaggcctcattaaacaggaggcaaaaaactggttatttttttttccttttcctcttcagcaactaacacagagggccccatctacggaaatcggggatttaaaacagcaacagatccgagtccccccttaaattacagacggggagacaaaacaaacaacaagatgggggccaagggccgaaaagagcggggcccccccatgaaagctaagctccggggggagacccctaagactaaaagctaagggcggcaccctccgacccctagcagggggcagcacccagcaacgtccattttggttgggccgactggaaaactttccctactaccgggggccctccttggttcactcggcaccggtgccctcgtcctgggggttcacctgggacttggacttggcaaagcccccgggggggcccggcccccccgcctgcttggt

SEQ ID NO: 66499 - DNA, 426 bp, Oryza sativa
  Clone ID: PAT_MRT4530_67444C.1
atggcgtcgccttctctctcctccctcttctccgcggcggctcccctggccggcggcggcggcggcgccggagtacgcacgctcggatcgcccgcgtccgtccggccgatctcacaccggcagcggaggcggcggctggtaatagcgtccgtgaagtggaggtacaaggggacggcgaggaaggaggcggcgctgtcggagctgatcgagcggaaggtggcggaggcaacggaggcgtgcgccggggaagccgccggggatgcggggtgccgggtggcgtgggacgaggtggaggaggtgagccaggcgaaggccgacctccgccgccgcatcgcccagggcgccgacgaccccctcgagcccttctgctcccacaatcccctcgccgacgactgtgccgtcgtctacgacgacgacgacgaatga

SEQ ID NO: 66500 - DNA, 4605 bp, Oryza sativa
  Clone ID: PAT_MRT4530_67445C.1
atggcggcggaggcggcggcgagtagcggcggcggggtggaggtgcgggaggcggaattggcggtggaggaggcaccggccgcgacctcggaggggcgcgtgggcgaggcggtgagcgacccattcgtggttgcgggcggcgatctctctggggaggcctcgaatctggaggccaagccagatccggctgtcctcggggagggcggggaggcggtggagtccaatgcagcaccgggttgtgccgagactgttcatgaggaggatggtgtagatggtggatgtgaggctggggcggtggaggaggaggatgctcccatggcgatcgggcatgtgctcaccgaggctcccgtggcgaacgggcatgtgcactctgaggcggcgcctgctactgagacagctgagatcgctggatcggttgaggatgggatgaatggtaggatagcggatgagcatgatcatcctgatacgagtattgcggaatccaagggttgtgtggtagaggagtccaagggttgtgtggtagaggaggttaacggtaaagaggctgcccctgagatcgctgatagttctgtattggtagaagaaggcgtggatggctgggagctggagggggtggatgataggatagctggtgagcatgatcacacctatacgagtaccgtagaatccgaagttcatgatgacagtttgattaaacaagtggatgcggatgcaactgggttgatggagcaggaggccatcagtagtgaacaggatggttcagatgttccaatagaaaatgggcacactcatgtaggcgtaagtgctgattgtggtgaaggtgcaaagtctgatgttcaagttgatcaaagcaacgttgaagaagctaatgccaattctgcgaaaccagtggaggaggtagctgctctaattcaggatggtttaggtggtcccgtgtccaatgggcatggtcacgtagatgcaagtggtcatggttatgtgactggtgcggatttagatgttaagggcagcaatagcaaaggggaagacactgaaacatttgaggagctggttacagctactgtagattatgaccggtcagatattgctatggctaatggacatgatcaagtggagaggagttttgattctggtgaagttgagaccaagtctgaggtatgtgatagcaaggaaaaatccggagaatgtgctactgatgccatggaacttgtcaagcaggaagcaaccactggagaacagggcacagaagctgtatctgtggtcaatggatgtgatcatccaaacacaaatgctgattctgatgaagctcctatgcagattttggttacctccaaggaaagtggcatagtacaaagtgttgtggaggtcgtggaaagtgtgcatcttgaaggaacccttaagattgatcaacaaatagagggggatcaaaaggtagctaacaagaaggtcactgaagaagagatccttactaatgggtatgagcagggggatgcaaaggtggctaacaaggaggttcctgaagaagagatccttactaatgggcatgagcatgtggaagagagtgccggaattacttcagtgttggaacctttggttggcgatggacagcaggatttcatagctgttaatctgttggagaatagagctgatgacaacagggaagacgccttggaagacgcatttacgtctgggatagatgaggctgccattacgtctggggtagatgaggctgccatggaagcagatgcttcgactgtagagaaaaatgatgacactgccattgacggtactgagacaaaagaaaaacatgagaagacaaacgatgatattctacaaggtcttgatttgtccaaggataacgttgagtgtggtgtcaatggggatgaggtcagcacttttcaacccgtagaatcgatatcgtgttcaactgttgaaattgagagagaggagatcagtgatcaacaacaaacatctgcttccttacaagacgctgagcaggcgctctcagctacaaatggcaatcatctatctgataaaagtgaactgaagcaagagtctgatatggaggacattgatggtgctaatctttgtgctgatcctggagtggttcctgctttacatggtgagacaacatcctcagatttggctgataatgatggggctgaagttgaaaattcaactcctgcttgtgatttgggagcttcaagtggtgcacccacaggagataatgattctaaagaaaactctgctgctgctgttgctcaagttgaagaagatgtcccttcgcaagatgatgctcaagttgaagaagatgtcccttcgcaagatgatgacaattgccctgctgatggggcacctggtgagatttgctctgaaaatgcaaatgcattcactacatcttcttgtgtggctgaaacggaatatgtgcaagatatagcatctacaactgttgacataattcatgataagcacaatgatgatgatgaaaacataaacacagatataactggaaaccatagtgagccgaaattagaaaccaatgtcgataatgaagacagaggagatatacaagttattaaaccatatccggtttatctgatgaaagttccaagatttatgagtgaatctcattgggaaaagatacaagatgcccaaatttgtctggatgagttgacacaaaagcgagatgcaattaatgttctgaggcaaaagaagaaggctttgtgtgatgactaccgagagaaactggaagctgcacgtcaagaagaaagaggagctagaactgcacatggtgataaaagaaatgatttaaatagtgtgcaatcaatgatcggaaggatgaacagagcaaattcaattcaagaaattgatgacatgattgcaatgaaggaaaagatcatagcacatgaatctatttctttgaaagaagagaaacgtcttcttcaagatatcaaagaactaaaagctcaaaagaagcagctgtcttccaatatgggctcaaaagcagaaatgggtgaagcattcgaacagaaagagcatattcatgagcagcaaaagattctgaagaaggactctgatgtacttctgactaatttgaagtccctggaggataaaacaagatttattaagaaagcttttgatgatgaaagagatgctcttagaaaattaactgaagaacaccaagctgctcatgaagtacgtcaaaaggcctatgatgagtggtttgagctgaaaaaggaaccgggcaggaagaacaagttctttttcatgtacaggaaggatagtagagctgcaaaagagtatgtagacaatggtgacatgaaaggacttgtgttattttgcaacaatcaggtagaaagtttcatggtgttgtggaacaaggatgatgattttcgcaggcagtatgttgaatcaaacaagaatagcacgctgcgaagactagggacctcagatggaagaaaacttggccctgatgaggttcctccagaaattccaagatattccaacagaatgcagagcaatccacctctcctgcctgttccaagcacacatgcgtccgtttcagcttcagaagcaacacccgcaaagcctgcttcaccagtaacagttgtagaagagaaaacatttccagttttgcaaagttcccagagcagcaagccttttaagcctaaagttgttggtaactcttccagtaaagacacacctggagctccaattcctgaaagagaagatgtagaaaaatctgaaaaggaaaagaagcgtaggacggaacaggagttggagttgtcacggcaggcggcagagttggctatcagggaggaggaattaagacaggagaaagctgcagctgaaaaggaacgtctccgattggagcaaaaggcaaaagctaaggaagctgaagagaggaagaggcggaaagcagaaaaggccctggaaagagctgaattcagagcaaagaaggaagcggaactaatggaaaagaggagagcaaaaagggatagaacaagaggatcaacatctgcagactccggaagtggtagtggtgaggccaatgcggaagctacagtgactaatgatgctgattctagcaccatagagaacagtcgaggagtagatctttctcaacatagagctctgaagaagaggccccctacacttaagcagctgaataagatggagccgatgccattgccactgcgtaacaagggcagaaggaagatgcgtcaatacattatggtggctgtggctgcagtgatctcggtgcttgctttggttgtggcaagcaaatatgtaccctccaattttagggcatcatcgtcctaaatatgggtaaacatgatgaccgctctttttgcaattaatcgatgggttgggggggggggggtatattgacagatagcagagggtaattcgtttgagtaatacccggttcttagtataggcgctgcttgcttgattggattgttgagaaaagcataagtatttattctcctatatagatttcataccggaagaacatcgtgtttacctacagtatgggatgtttggtggaatattcgttattattatagtacaagtacaataatggtaaaagaaagattttac

SEQ ID NO: 66501 - DNA, 868 bp, Oryza sativa
  Clone ID: PAT_MRT4530_67446C.1
gcgcgcggcagcagcagcagcagagcgtgctcgagctccagctgcgtcggccgccatggcggtgagcaacaacatcacggcgtgcgtgacgctgatggcgctgatctgcgccgtcccggtgatcgcctcgggcgtgtggttcgcgtcggcgcagggggaggagtgcgcccgcctggcgcggtggccggtggccatcctggggggcctcatcctccttgccgccctcgccggcttcgtcggcgcctactggaaccgccgccgcctcctcgcgttctacctcttcgccatggcgtcgctcatcgcgctgctcatcgcgctcctcgtcttcgccttcgccgtcacccgcggctccggcgcctacccggtgctcggccgcgcctacgacgagtaccacctcgatggcttctccatgtggctccggggctacgtctccgacgacccggcgcggtgggagcggatcaaggcgtgcctcgtcgtctccgacacctgcaagaagctggcgcgccaggccgggttcctcaccgccgaccagttctaccagtcgcgcctctcgccactccagtccgggtgttgcaagccgccggcggtgtgcgggtacaactacgtgagcccgacggtgtgggcggggccggcggcgcggccggcggcggacgcggactgcggggcgtgggggaacgacccgtcgcagctgtgctacgagtgcgagtcgtgccgcgcgggcctcctcgcggcgctccgcgcccagtggcaccgcgccaacgtcgccctcgtcgtcgccaccgtcgccctcgtcttcctctacctcgtcggctgcagcgcctacaagaacgcccaggccgaggccctcttccgccgctacaagtggtag

SEQ ID NO: 66502 - DNA, 686 bp, Oryza sativa
  unsure (1)..(686): unsure at all n locations
  Clone ID: PAT_MRT4530_67447C.1
aantttggattcccccccccaaattcnggcttggntttccgaggaaattncagntggnnctttgaggaagnntttnccagagncttttnaaaggntgtgcaaagttagacgnngcccccattanggtttgaaatgtgggggagttccctactattnctaaattgggcatntttatnncgaaaagaaaantctcccatacacgaacaantgaganttttgttcggcgagcngtgcgcatcactgatatgggcagcaagtcggtttggctcccactcnnngacgtggancagaggcagatgnccttgccaaatacaagcaaggagagttgttgaanccttggagcccntactaagacaaagcacatccaatgcgttcctttttgtcttcctgacaatggtctgatatcactgatccaagcaatgtgcttcatttgcctatagcaaagctttgttgtcatattttctgtgtagagccattcttatgtttctgtatgtacaaactttgttgaaaatattctattagttcagctttgcagaaaagatgttattagtttccattcgaaaaccatggactaggttacggtggtaacttagggcttgtagtggttccccattttgtaaaccgtgggtttaatacgaaatttgcctacaaattgccttttatgcttcaaaaaaaaaaaaaaaaaa

SEQ ID NO: 66503 - DNA, 186 bp, Oryza sativa
  Clone ID: PAT_MRT4530_67448C.1
atgcgctacgatccgacggcccgggagacgtgccaacagcaaccgccaccgtcccgtgtgacgccactctaccaccgccattcggcggacgagacgaggtcgtcatccatcccgccgcgccgcccggaggtgcacggcggcgggcggcagcagggtgacgatggcaagggattgcaccgcggctag

SEQ ID NO: 66504 - DNA, 754 bp, Oryza sativa
  Clone ID: PAT_MRT4530_67449C.1
cccacgcgtccgcaaaatattgtccttcatggagatgtgaagtctggcaacattctcctagataacgtcttcatgccagtgggctcggactttggaatatctagactcatatctatacagaaacaccacacttcatttgtcataggggatatgaactatatggatcctgtttatatgaagactggaatgcttactgagaagagtgatgtgtatagctttggagttgtactcttggaactaattaccaggaaaaaaccaagatatgatgaaaataacagcctcccaataaactttgtgaagtattacatgactgatagcagggcaagggagatgttcgatgatgagatcaagtctcctgaagtcaacattgactgtcttgacatgattggtaagattgcagttcaatccctcaaggatgatgtggaagagaggcccaccatgaagcaagttttggagcaccttaatttggtgagaaacaaattaatggatacagagataagcatataagagttgttatcacgtttatgatcagaatttcctcctacgacgcctcagtttgccttgttcaatctgtgaagctacagcatgatctatgttgccttcctgtgaatgtgattgtgtgtaatgttaatttgttatatattctggtatactctgtattgtacaatagaataaagttgcaatgtaagatttatggtatttaggttagagtgttgtggttgtgcttttcgcccagtttctcttaattaactgt

SEQ ID NO: 66505 - DNA, 648 bp, Oryza sativa
  Clone ID: PAT_MRT4530_6744C.1
atgtcatggcacaggaagaggagcccctggaagatgaaggctttggtgtctagctcgtgcctgccgtcaagtgcctgtggtcgtcgccctagtcttctgctgttcaacgttgtctttgagtgtgctgggccgtcgctgcccatagacactggagcaatggagctcagggtggtgttaacagtgaaatttggtaagcccggagtagtcatcggcttagaatcaatacaattcggcgcatcgccaccttttaccttttctactttattttatcgttctggcggaacttggcacccgacgtggggctgcatcgtcttcgatctccggcgaagggataagtccaatgttcagccggtccaggcaattgcatcatttatatcggcgtcgttcaaggctgcatcagtggacaacaagtcagctctggccctggcaaagaacctcgtttttcatgaacggagcaagcatatccgggtgaggtaccacttcatccgggactgcttagaggaagggagcatcaaggcgagctacatcaactccagggaccatcttgcggacctgctcaccaagccccttgggaggatcaagttccttgagctctgctctagggccaggatggcccgacttttccacaagacgatgtacaagacttag

SEQ ID NO: 66506 - DNA, 1147 bp, Oryza sativa
  Clone ID: PAT_MRT4530_67450C.1
cactccactcacgctgctgccatccaacaaccaccgattgttgattgggaaaacctacatatcgatgaatcactagatgtcgtaggaagattaaaaatcgtggatggggacctgttgcacgtgatttttgggtttgagggatgaggatgaagccgccgagtatgcacgagcggtggctcaggctacaactgaaaatgatgatcaggctagaggtaccgatgccaatggtgctaaaaatgctaatgatgatgaaaatgagggtgtggttgatactccaaggttgcgggagaaaggatgatggtgtatgacgtgaataactcatccttggtgaaaggtactatgtatcccaacatgaaggtctttacgttggcggttagacagtttgccatcaatggggagttcaaactttgggtaaaggcgagagatcgtactagatttgtaggaggatgcaaaggggcaattgattgtccttggcatgttaatgggcgtaaacaggctgacgagtggaccacaaaagtaacaaagtttattaacaaccacacgtgtacatctggcggcagaaggaagactaccacaccaaccagcgactaggttgcttccaaggccatgcatatccttaggaaggattcaagtatgggccctgaagaactgcaaaccaagttggaagaggatcagaaatacaaaatcaattatgatactgtggctaagggtgggactttggctatgatctagttgcatggcagttgggaagataatttccatttgttgtataggtggagggttgcaatcatggagaggtctcctggtagtgttattgaaattgacacaaaggaagcatgcattattggacttctaattggatgtaggccatacctcagtatagactcaactgccctaatggtttcattgatgcttttggtttcattgatgctgaaactagtgataactggacctggtttataaatcaattgcataaaactacaggaaatgtatctcctcttgcaatttgtactaatgcatgcaaaggcttagaacatgcagtgcaccgagttttccattgggctgaacatagagatttgtttgaacacaagctcaaacagatgaagggtagaccagggataaattcatgagcctcacaaaattccta

SEQ ID NO: 66507 - DNA, 297 bp, Oryza sativa
  unsure (1)..(297): unsure at all n locations
  Clone ID: PAT_MRT4530_67451C.1
cggcacgagggttggcatttgactgcttgttgagcaggattctttgaagggaaatggacactgaaagtggcttcttcctggggaagctctgtngcttgggcaatgcatttggtggcttcattctgaagggtgagccgcgagccagagccatcaggtatttgtcagcagcagccaaagaagctactcgatcagtagctatcttggggagctaagggaggtcatgggtcacattggcgaggctggcggcggcgctgttgtcatgggctgcaaggtgctgccgatgtggagggagagcgg

SEQ ID NO: 66508 - DNA, 176 bp, Oryza sativa
  Clone ID: PAT_MRT4530_67452C.1
gggaaaagctcgtgctctctttgagtggattggcttctcctccccctctttaccttttcctcctcggttcggttccgagctttgagtaggtggagtggggcagctatggctctttcatctcccacaatgctgcagttggtgaactcttctccttccttgtagtgcgctgcgccgcc

SEQ ID NO: 66509 - DNA, 474 bp, Oryza sativa
  Clone ID: PAT_MRT4530_67453C.1
atgccagagccatcgcaatcgaagggcccttgcgaatttttcgagactcaggatgccaagacctcccgaggcagtagagaggaaagtccacgtccaattcaccttgcacttccctcctgtgatggtttcgtttcccgcccacaagaactatcttctcttctctgtttgtccaagacttcaagggattccttagaagctttcaagtccgccagtatgaaaataggctggatttctaagataaattcaagttaccaggaaaagaaaaagtccaaaaccgtatccggaaacataggtggcacccccctcccccagatgcggcttccctgtacttcctacttccgtattcccgtccctgtttccgctacatggcgtacatccatttgcttttgtttcaccggtggccctacttccttcccatccatcggaaaaacaaaaatcgagtctccaacactctccctacagggtccagactga

SEQ ID NO: 66510 - DNA, 907 bp, Oryza sativa
  Clone ID: PAT_MRT4530_67454C.1
atgtgggtctatcctttcttcctcctccctctctctccccattatcgcgcgtctctgtccccctcttcgcctgttcggcgagcgggggccagcgcggcggcggagtggcggcggcgggcaggagggcggcggcgtcgagggagacgagccagagctcgagggagccgtcggcgcgccgccccacgcttgcgggagctccatcaggacgacgacggcaagtagcagacgccagcaggccatgctctaggggctctaggaggcaccgacaggatgaagctcgacgaaggggctctagggtggtggcgccagcagatggcagtgatggagcacgagtcggcgactggtggtggatggcgatggcagcgggacagagcttggcactgggcagaagcgtcaccgcaacaggcgggaccagcgtcaccgcaaccggtgggaccaacggcggcgcctgacgcccgatgtaagcgtcgcagcaaccagcgagaccagtctccgctccagggttgtcgcacgccaccgaagccgccgctcgaccggctccggattgacgccgccagcacccctcccagccgaccgcgtcgcgagacacctccgactccccctctacagcgacgacgatggtgcccctccctgccgaccatctccagatcgatgccaccggcgtgagaacgcccttgcgccagccgccacaagcccacaggccacaaccctgcgctctgcatcgccgccgccccgccgctcctgctcccggcgtccccgtcccctcctcaccacgccgcttccccatccgccgccccgctgcacgccgtcgcgctcccagccgcttccccattcgccgccccgctgcacgccggcgcgttgggggagttgacgccacggcatttccaacatccctttgcaccgtcat

SEQ ID NO: 66511 - DNA, 1241 bp, Oryza sativa
  Clone ID: PAT_MRT4530_67455C.1
cgggtaaataacagacatgaaatcttcatataatagtatgaatgcaaatgtttgtttaattccagccgtggacatgttatgtacagtcgtagcaaaaataggtgccgaatatgtatgtacaagacgcagagcaaggagccttcaaaactagctagctggagtgaactggagcaaaatgccgatgaaaattacaccggtttcagaccatatgtcagtcccttgatcccttctgcaggagcgggatgatcatgcgtccaagtctctgtttgacctccacattgggccctcagtcacaacaccatctgcaactttagctgacccgttctgtactaggagaagagtccctgcttcacctcctttcaccttagtgtggaaaaatggagctgacaattccggggccttctgtttattctccatcaagcaaaagaaagaatacaggatcattcctaacaaggcaagaagaatccctaatatgttcctccaactaaatgggtcgttaaataaaacatatccaaaaccgaggatgatacaggtttttaagtggcctactacttggtatgttacaggagatgttttcccgatcacaagaaatgtactgaagtttaccgagacagatattagacaggaaagaacgatgaatacctgataaaagccaatagagttgaatccaaggctcagattaagcaacccaatagatatgccatttagtattccaaatccaatgattgtcttggggtctaaatctttgttctcgaaaagcttcatcaagatctcgaacacgaagccgagtgtgctcatgagcgccttgttgcagacgacgatcgacaccgacgacaccaccgacaggcccagcgccgccgccgtgccggccatttaagcgcaaagtaggcgagcgaggtaggttcaagagggtgatcgatagcaccgaggtaggcgagcgcgaggcggggagatctccggtggaacgaggaccgagggctggggcgaaggcgaccagtcggcgccaccggcggctgaggagcacggcgcagaggagaccggaggctgaggagcgtaatgatatccccggtccccggaacgccatccgggcaggttgataagcaagggtgattaccgatgggtgagaagcaaggaattatagaaagttagtgaaagttctaatatattgacgtgcaatccttttgcacgttcacgaaaaagtaagttagtgaaagaaaataacgggtcagctaaagttgcaa

SEQ ID NO: 66512 - DNA, 9987 bp, Oryza sativa
  Clone ID: PAT_MRT4530_67456C.1
atggcaagtacttctctagtttccgtggatgactttccaccaggctccaatcacatcacccaccggcttacacctgctttgcttctgttttccgtggttttcacaccaggccaatccgcctcctgttcgacggctacctctatcatcattacgatgccgacgagagtcagccacggtcaccccgtgtgctgcggcggttcctggccccagtcggggagccccgccggcggcccatcgggatccaggggcgtctaccgcgtccgcggctgccgggagactggtgggactgtggccgttgcgacctagcctggttccggattcggcacaccttatccacgacgttggccgggaggtcgttgagactcttcttggcctcgccccatgtcttcttacaatatggcagaggactgaccaacccctaggcgctatgataatgtcacgctctcagagtcggatcgatcatcgttggaatatagcccggcgtggccatctaccacggcgatccccctcccagccttcacgacgtgtacggtggtatgctcagccccagattcagagaagattacacggcttacgccgttgtttgcttcaagaacttcggtgacagggtgaaacgctgggtgacagtgaatgcgccgaacatatagcccatcggtggctacgacgcgcgcgttccgccgccacggccgggcgcctaccccctcggcaccaaccgcaccggcggcgacttctcgacggggccgaacatcatgggtcaccagctgctcctgggtggtgaccgcggcgcgtccacctccagacggaaggatgagtctctttccgcgcgcgacctcgccagcgctccgctgcgctcccggtatgagcccttcatcgacgggttggcagatgcagctgctgtcatctcccatgaatcaagtgcattttggtgggcctatgaatcatctggtggatggagcctcccctgtgccaatgaggagccggcctgcgctggcccatgcaacccatgcggccacctcattttctccgttggccgacgatgggcggggtttactgctggcgttgccggacgccacgggttcgccagctgctgcagacgccgtcacggcctctccggtcgacgtcgtcccgccggtcgacgcgggctcgccagctgccgatgtggccaccacgtgctctccggcagccgctggcatgccggccgccgccgtggcggatgctgcgacttcatcggcatcaaccattacttcgttatctttgtgcaatccagcgacgcaattcgtgaccagaaactaagggactactacgttgatgcaggtgttcaagagaatggtggaggaggattcgacaaggagcactatcagcttcatccctgggctcttggcaagatgctacgtcacctgaagctcaagtatggcaaccccccaggcatgatccacgtgaatggcgacgcagattcaccggagaccccgggcaagatcgactacgacgacgactttagatcggatttcttgcagagctacctggaagttctgcacctgtccatactgatcgcgacgttcgcccgggtttacctctgggatccatgcctccacggccgagacgactggtccgcttcacgagatcgcctcctggcctggggggttggtttcgctgtgccgtcgcggcccagggatcgcctgggccggcgtccgcttcacttccccgcactggccggcgcggactacgtgaacagcgcggcctggtggtgagtggcttagcgctgaggcgccgcgtcctgggcagtcaccaccttcggtagttgaagagaccgatcgcgtcctctacgatggaccgtgggttatccttgacctcgtcggccgcccacaggcgcactcgcttccatcttctatagcagacaactccgctcttcgcgccttcctctctagctgcgccaggcctttccctcctgtgctcctatcgcagcctttgctgctgcagtctctcgccgccaaggcggtggaggttgtgccgaagcgcggtgagcgtatcgctgctaagatggcacttgaggcgcttgaggggccgatccacgcagtgtcgcgcgcccagcgcaacctgatgcggaagctcggcctagttccggagaggggcccggtcacggccgaggcggttgcggcttacaacgccctcttctccaagccactttcccaggagcacatcatcgcgctctcctcgctcttctccagctccttgcccccggccaaggctgcggaggagttggtcgagactattatggatgtaatcccctctcgtactattctagaaatgctaggcctcgactttgattattctttcttgtctgcggaggagccggacaagcttcgtttcttagatgagcttcgttcgctgcgctcctctcgcacggggccgtgggccgtcgtaggcgatttcaacctcattctcgaagctcaggataaaaacaaccttaatctcaatcgtcgtatgatgggtcgttttcgtcggctcatcgacgagttggaactccgggagctgccgcttgacggacgtcgcttcacttggagcaatgagcgtgagtcgcccacgcttgttaagctcgaccgcgtcctcttctctgcggattgggaagagcttttcccctcttgcctcctccaagcggcctcttctatcgcctctgatcactgtgctcttctccttcatacctgcgtcacctccccgaaagcgcatcgttttcgttttgaggccttttggcccaagttcgacggctttcttcaacttcagatggcgaaggaacttgtcttccggcttgatgttgcgcaggagagtcggtctctttcccccttggaaacctggctgcggcgagatttaaagttgaagtgtcttggtcttgcctcgcttgagcgtactatcgcgcgtcagcgttcgcgtttggtctggcttaaggagggtgacgccaataccaagttcttccacctgcacgccagagctcgtaggcggaagaacttcatcacgcgcctttatgatgaggatgaggtctgggcggtgatcaagtccttgccctctgataaggcgcccggtcctgacggttttacgggccgtttctacaagtcttgctggccggtgatcaaggtcgaaattctggcggctcttaactccttgttcctgaccaacggccaaggtttcgcttccctcaacgacgccctaatctccctcttgccgaagaaggacgaggctgttgacgttaaggatttcaggccgattagccttattcacagctttgggaagctgttctccaagatcttggcctctcgtctctctcctcgcctggacgagcttgtggcgcctaatcagagcgctttcatcaagggccgctctctccatgacaactttcgctatgtccagcttgcggcaagggcgctccacgccaaacgcgttccccgacttcttctcaaggtggatatcgcgaaggcctttgacacggtcagctggcctttcttgcttgaggtgctagcccagcttggcttcagtcaacgttggcgtgattggatctccctcattctcagtgcctcctcttcccgggtgctggttaatggggtgccaggtccacggttcccccatcggagaggtcttcgccaaggagatcctctttcccccatgcttttcattctagtcatggatgtgctcaatgcgatgctccgcaaagcctctgactcgggtggttttcttcccctcaatgatcgttctattcgacatcgtgcatccctctacgccgatgatctagttctcttcctttcccccgttcggcaagaccttgagttcatccaaggcatcctctctgtcttcggtgccgcttccgggcttcggaccaacttcaccaagtgctcgattactccgatccgctgctcggttcttgacctggagctggttcagtcctcttttccttgctcgatctcggagtttccctgcacctacctcggcattccactgtcagttcgcaagctgccaaaagcggccctgcaaccgcttgtggataaagtctcccattggctccccccctggaagggctgtctaaccactctggcgggtcgctcggttctagtccagtcggttctctcttccattccggtccatgtttctatggcgatcggcttgccaagctgggttatcaaagccattgacaagaagcgtcgcgccttcttgtggacaggtacggactcggccaatgggggacagtgccgggtgtcctggacgagggtttgtcgtcctagggatctcggtggactgggcattccggatctcagggtggctggctttgccttgagagttcgctggctctggcttcagcgctcgggacacccctactggtctgatctgaaggcccctgttgagcggagcgtctccgacatgttcgtagcatccaccttctctatcctgggagatggtcagtccacgctcttctggactgatcggtggatcgatggtcgctcgatagcttctatagctcctgacctcctccacgtcgtgcctccacgcttccggggatcgcgcacagttgctgctgggttagcgaacaactcctgggttggtgacatacgtggcgccctcactgtcccgcgctgctggactgccgatcttctccaaaagcgtggtatcgatagccactctgcttgccccttttgcgctcaggagcttgagacagcgaaccacatcctcatcgattgcgtgttcgctcggcaggtctggctccgtgtgttgtcccctcctggctgggctgccctctctccccctcgtggcagctggctccaggattggttgtcatcctccaggatcacctatataaagatacgtcacttcaccactggcaatgtctctcatgagtcccatgttgacaagaatttgctttaccgtgttgttgttattgatctgctggggtacattctgtcaggttacccggcagaagctatgcaagcaatcgatctgtttggttgtgcaatgctcagtctgcagatagcaaaacactttctacgtgcgctcttagcgaagacaattgtctgcatccccttcatgagtggcgtgcttgagctgggaaccactgatccgcttctcccgctcagcccaatggccgaacgggcagtggcgcatagcctctctccgaacgctagcggcgacgacggggagcagaacccacgccgtcgggctcgcaccccaccgtccccctctcgtcgaaatcttgggcggggggaggcgctcggggaggtcggaggatccgcgacttcgccgcccgcgggcgacgggggaggacggcgagacggggcgcgtcgccgcctcgtctacggcgatggcggcacgccccagggcgcgctccaggctgcgggcgcgctcctgcgtcacccgcccgtcgtccccgatccagagactccagcccggcgttggctggatgacgtggccgacttggtcatgacggcgcagcagagcctaggcgccggcgggaggtcctccgccaccgaggcctctggcgctgccgccgccggctccacgtcgtcgaggcggagggcgcggcgagcggcggccgttacccgccgttcgtccgccattccctcatcaacgcctccgacccaagaagatgtgcgtggggggtcggatgcccgcctcgatatcgagcaccggcgcgacgctcgtcgcgccgcccacgcaacggagggcgcttcctcgtccggagcgccacttcggtccgggcacgggggccggccccccgtgtccccggttggcggtgccggctgtcgagcctttgtggcgagccttcggaacgtccgttggcccccaaggttccggcccaccatcaccgaaaaatacgacggaagcgtcaaccccgccgagtttctccagatctacacgaccgggatcgaggccgccgggggtgacgacagggtcatggcgaatttcttccccatggccctgaagggtcaggcgcgggaggatctgtaccagcagttcaccacgaacttccagagcacatatccacgcccaggcgaagaagcggacttgcacgcggtacagcgaagggacgatgagtctcttcgctcgtacattcagcggttctgtcaagtccgcaacaccataccgtgcatccctgcacacgcggtgatctacgcgttcagggggggcgtgcggcacaaccgcatgctcgagaagattgccttcaaggagccccagaccaccgcgcagctttttgagctcgcggaccgtgtggctcgcagggaggaggcctggacctggaactcctccggttctggtgtggcagctccggccgtccccgggtccgccgctcggtcagggcggcgggacaggaggaggaagaaggggtcggcccgttccgacgacgagggtcatgtcctcgccatcgagggtgcttcgcgggccccccgaaaggggaggccagcgagcgacaaaaagaaggaggccggcgctcccagcagggagcgcccgaccggcaagtggtgtaccgtgcacaacacctccctccacgacctcgcggactgccgcgcggtcaaaagtttggctgagcggacgaggaagtgggaggaggagaagaggcaggagcgccgtgagggcaaggccccggcggctcccgccggcaaccggcgaggtgagaccaagcagaaggccaccgccgaggacatcgacgatggtgacgatgacctggggttccaggagcccgaggccaccgtcgccaccgtcgatgggggagcgtgcgctcacgcttctcgccggagcctcaagtccatgaagcgcgagcttctggccgcggcccctacccatgaggcgacgcggcgggcgcggtggtcggaggttgccctcaccttcgaccaaaccgaccacccgccgtgcgttgcccggggaggacagatcgcgatggtggtttcccccaccgtttgcaatgtcaagttggggcgtgtcctcatagacgggggtgcagccctcaacatcctttcccccgcagcctttgacgccatcaaggccccgaggatggtgctccggctgtcccagccgatcatcggtgtgacgccggggcacacctggccgctgggtcatatcgacctcccggtcaccttcggtagttccgccaacttccgcacggatcgggtggacttcgatgtggtggacctcagtctgccctacaacgcggtcctggggaggcccgcgttggtgaagttcatggcggcggtccactacgcctatctccagatgaagatgccgggccccggtggccccatcaccgtccatggcgacctcaaagtcgcgcttgcttgtatggagcaacgcgcggaccacctcgccgcggcgtccaagcccgcgggtggcgacgagaggctcagcacctccgtcccggccgccccaaggcagcggatggtcacgtgcgacgaggtcccggaagacgcgctcgtctccttcctgcgggcaaacgccgacgtcttcgcctggagaccggcggacatgcccggggtccctagggaggtgattgagcaccgtctcgccgtgcggccgggcgcaaggccggtccggcagaaagtgcggcggcaggccccggaacgtcaagccttcatccgtgaggaggtggcgcgacttctggaggccggattcatccgtgaggtcatccatccggagtggctggcgaacccggtcgtcgttcccaaggcgaatggcaagcttcggatgtgcatcgactacaccgaccttaacaaggcatgtcctaaggacccttaccccctgccacgcatagatcagattgtcgactccaccgcggggtgcgaccttttgtgttttctagatgcatactctggttatcatcagattcgcatggctagggaggatgaggaaaaaactgcattcattacccccataggaacttattgttatacgacaatgcctttcgggctaaagaatgcaggtcctacttttcaacttactactcgaatttctttgggtagccagataggacgcaatgttgaggcctatgttgatgacttggttgtgaagacgtgcaaccaagagaccttactctcggatctagcggaaactttcgaaagtctccgctccgcccgcataaagctgaaccccgataagtgcgtgttcggcgtgcctgcgggcaagcttctcgggttcttggtctctgcccgaggcatcgaggccaaccccgagaagatacgagctatagagcggatgcgcccccccagcaagcttagggatgtgcagtgcgtcaccggctgcatggccgccctaagtcggttcatatcaaggctgggagagaaggcagtacccctatttaagctcctcaaacgctccgggccgtttacctggacggaggaggctgagcgggccctcactcagttgaaggcgtacctcagttctcccccagtcctggtcgccccggagccagatgagccgttgctactctacctggcggcaaccccgcaggtggtcagtgcggcgttggtcgtggagcgcgacgaggacaaccctcactccgcgcatgcctaccctgtgtcgactcgacccgggagagagcagggaggagaggcccccgagccgaacggtggcccaaggcccccgacggccggagttggccctccgcctgcttgtccgacggtgccaggcgcccccgacccccaggatggccccggggccactgcgggaaggccgcgcctgtcgccctccgaccccgaggtcgtcggcacagaagccgagtgcgccccgcgcggcctcttggaccaagagcgccatggagatgcggcccctggcgaagaggatcggccccgccgaaaggtgcagcggcccgtctacttcgttagcgaggctcttcgggacgccaagacccgataccctcaggcccagaagatgctttacgctattctgatggcttcgaggaagttgcgccattatttccaggcgcatcgggtcacggtggttacgtcgtaccccctcggccaaatcttgcataaccgagagggtactggacgggtggtgaaatgggcaatcgaactctctgaattcgatctgcgctttgaaccacgccacgcgatcaagagccaggccctcgccgactttgtagcggagtggaccccagctcccgagcccgtctccgcccccgaggccagctcgggcccctcgcagttgcctcacaccgccttctgggtgatgcagttcgacggctccctgtctcttcagggcgccgataagactctacccgaggaccgcgaagggagtgaacgcgtccggcgcatctccaagcgctacgtgctggtggaagggaccctctatcggcgcgcggctaacggagtcctcctgaagtgcattcctcgggaacaaggcgtcgagcttctcgccgatgtccatgaaggcgagtgcggagcccactccgcctcacgcaccttggttggcaaggcctttcgccagggtttctattggccgacggctctcaacgatgcggtcgacctggtccggcggtgcagggcgtgccagttccacgctaggcaaacccatcagccggcccaggccctgcagaccatacctctttcgtggccgtttgctgtctgggggctcgatatccttggtccgttcaggcggaccccgggcggtttcgagtatctgtatgtcgctgtcgacaagttcactaagtggcccgaggcttatccggtcatcaagatcgataagcactccgcgcttaaattcatcaggggcatcactgctcggtttggggtgcctaaccgtatcattacggataacggcacccagttcactagtgaactcttcggtgactactgcgaagacatgggcatcaagctctgtttcgcctcccccgcccaccccagaagcaacggccaagtggagcgcgccaacgcggaaatcctcaagggcctcaaaaccaagaccttcaacatcctcaagaagcacggctactcgtggatcgaggagctgccagcggtgctctag

SEQ ID NO: 66513 - DNA, 591 bp, Oryza sativa
  Clone ID: PAT_MRT4530_67457C.1
aaaaagaaaaaaaaacaaatggggggggggggggggggggggtgaaaaaaaaaaaaaaaaactagcaaggtacgaattactacgcggcggacgctcatggcagaacatgggggccatctccggcgcgcacctgagcgagtcgcgagagaggttcagggacaggcagtgccaacgggacatgcaggagggggggggggacgcgtgcctacaggtgctcgaccggcagctcaccggccgggagagttccagccgatgttccgccaaccgggcgcgctcggcctgcggatgcagtgctgccagcagctgcaggacgtgagccgcaagtgccgctgcgccgccatccgacagatggcgaggagctacgaggagagcataccgatgcccctggagcaaggctggccctcgtcgtcctcccattactacagcggccaggggtcgtcctttgagcaggggtactaccgctaggggtcctcggaggagggctactactgcgagcagcaacagcagccggccatgacccgcctcaggctgaccattgccaggcactacgccccccaactgccgtcgatgtgccgggttgagccccagcac

SEQ ID NO: 66514 - DNA, 5244 bp, Oryza sativa
  Clone ID: PAT_MRT4530_67458C.1
atggccgaacgggcagtggcgcacaacctctctccgagcgctagcggtgacgacggggagcagaacccgcgccgtcgggctcgcaccccaccgtccccctctcgccgaaatcttgggcggggggaggcgctcgagggggtcgaaagatccgcgacttcgccgcccgcgggcgacgggggaggacggcgagacggggcgcgtcgccgcctcgtctacggcgatggcggcacgccccagggcgcgctccaggctgcgggcgcgctcctgcgtcacccgcccgtcgtccccgatccagagactccagcccgacgttggctggatgacgtggccgacttggtcatgacggcgcagcagcgcctaggcgccggcgggcagtcctccgccaacaaggcctctggcgctgccgccgccggctccacgtcgtcgaggcggagggcgcggcgaacggcggccgttacccgccgttcgtccgccattccctcgtcaacgcctccgacccaagaagatgtgcatggggggccggatgcccggctcgatatcgagcgccggcgcgacgatagtcgcgccgcccacgcaacggagggcgcttcctcgtccggagcgccacttcgttccgggcacgggggccggccccccgtgtccccggttgacggtgccggctgtcgagcctttgtggcgagccttcggaacgtccgttggcccccaaggttccggcccaccatcaccgaaaaatacgacggaagcgtcaaccccgccgagtttctccagatctacacgaccgggatcgaggccgccgggggtgacgacagggtcatggcgaatttcttccccatggccctgaagggccaggcgcggggggggggcgtgcggcacaaccgcatgctcgagaagatcgcctccaaggagccccagaccaccgcgcagctttttgagctcgcggaccgtgtggctcgcaaggaggaggcctggacctggaactcctccggttctggtgtggcagctccggccgcccccgggtccgccgcacagccagggcggcgggacaggaggaggaagaagaagtcggcccgttccgacgacgagggtcatgtcctcgccgtcgagggcgcttcgcgggccccccgaaaggggaggcctgcgagcgacaaaaagaaggaggccggcgctcccagtagggagcgcccgaccggcaagtggtgtaccgtgcacaacacctccctccacgacctcgcggactaccgcgcggtcaaaagtttggctgagcggacgaggaagtgggaggaggagaagaggcaggagcgccgtgagggcaaggccccggcggctcccgccggcaaccggcgaggtgaggccaagcagaaggccaccgccgaggacatcgacgatggcaatgatgacctggggttccaggagcctgaggccaccgtcgccaccgtcgatgggggagcgtgcgctcacgcttctcgccggagcctcaaggccatgaagcgagagcttctggccgcggcccttacccatgaggcgacgcggcgggcgcggtggtcggaggttgccctcaccttcgaccagatcgaccacccgccgtgcgttgcccggggaggacagatcgcgatggtggtttcccccaccgtttgcaatgtgaagttggggcgtgtcctcatagacgggggtgcagccctcaacatcctttcccccgtagcctttgacgccatcaaggccccggggatggtgctccggccgtcccagccgatcatcggtgtgacgccagggcacacctggccgctgggtcatatcgacctcccggtcaccttcggtggttccgccaacttccgcacggagcgggtggacttcgatgtggcggacctcagtctgccctacaacgcggtcctggggaggcccgcgttggtgaagttcatggcggcggtccactacgcctatctacagatgaagatgccgggccccggtggccccatcaccgtccatggcgacctcaaagtcgcgcttgcttgtatggagcagcgtgcggaccacctcgccgtggcgtccaagcccgcgggtggcgacgagaggctcagcacctccgtccccgccaccccgaggcagcggatggtcacgtgcgacgaggtcccggaagacgcgctcgtctccttcctgcgggcaaacgccgacgtcttcgcctggagaccggcggacatgcccggggtccccagggaggtgattgagcaccgtctcgccgtgcggccgggcgcaaggccggtccggcagaaagtgcggcggcaggccccggaacgtcaagccttcatctgcgaggaagtggcgcgactcctggaggccggattcatccgtgaggtcatccatccggagtggctggcgaacccggtcgtcgttcccaaggcgaacggcaagcttcggatgtgcatcgactacaccgaccttaacaaggcatgtcctaaggacccttaccccctgccacgcatagatcagattgtcgactccaccgcggggtgcgaccttttgtgttttctagatgcatactctggttatcatcagattcgcatggctagggaggatgaggaaaaaactgcgttcattaccccaataggaacttattgttatacgacaatgcctttcgggttaaagaatgcaggtcctacttttcaacgtactactcgaatttctttgggtagccagttaggacgcaatgttgaggcctatgttgatgacttggttgtgaagacgcgcaaccaagagaccttactctcggatctagcggaaactttcgaaactcttcgctccgcccgcataaagctgaaccccaataagtgcgtgttcggcgtgcctgcgggcaagcttctcgggttcttggtctctgcccgaggcatcgaggccaaccccgagaagatacgagctatagagcggatgcgcccccctagcaagcttagggatgtgcagtgcgtcaccggctgcatggccgccctaagtcggttcatatcgaggctgggagagaaggcactacccctatttaagctcctcaaacgctccgggccgtttacctggacggaggaggctgagcgggccttcactcagttgaaggcgtacctcagttctcccccagtcctggtcgccccagagccagatgagccgttgctactctacctggcggcaaccccgcaggtggtcagcgcggcgttggtcgtggagcgcgacgaggacaaccctcactccgcgcatccccatcctgtgtcgactcgacccgggagagagcagggaggagaggcccccgagccgaacggcggcccaagacccccgacggccggagctggccctccgcctgcttgtccgacggtgccaggcgcccccgaccccaaggatggccccggggccactgcgggaaggccgcacctattgccctctgaccccgaggtcgtcggcacagaagccgagtgcgccccgcgtggcctctcggacgaagagcaccctgtatcgactcgacccgggagagagcagggaggagaggcccccgagccgaacggcggcccgaggcccccgacggccggagctggccctctgcccgcttgtctgacggtgccaggcgcccccgaccctcaggatggccccggggccactgcgggaaggccgcgcttgtcgccctctgaccccgaggtcgtcggcacagaagccgagtgcgccccgcgcggcctctcggacgaagagcaccctgtatcgactcgacccgggagagagcagggaggagaggccccgagccgaacggcggcccaaggcccccgacgaccggagctggccctctgcccgcttgttcgacggtgccaggagcccccgacccccaggatggccccggggccactgcgggaaggccgcgcctgtcgccctccgaccccgaggtcgtcgacacagaagccgagtgcgcctcgcgcggcctctcggacgaaaagcaccctggagatgcggctggcgaagaggatcggccccgccgaaaggtgcagcggcccgtctacttcgttagcgcatcgggtcacagtggttacgtcttaccccctcggccaaatcttgcataaccgagagggtactggacgggtggtgaaatgggcaatcgaactctctgagttcgatttgcactttgaaccacgccacgcgatcaagagccaggccctcgccgactttgtggcagagtggaccccagctcccgagcccgtctccgtccccgaggccagctcgggcccctcgcagctgcctcacaccgcctactgggtgatgcagttcgacgggtccctgtctcttcagggtgccggtgcgggggtcacattgacctcgccgagcggagacgtcctcagatacctggtccgcctcgactttcgggcgaccaacaatatggcagagtacgagggactccttgcgggactcagggtagcaactggactggggatccgccgcctcctggtgttaggcgactcccaactggtcgttaaccagactctacccgaggaccgcgaagggagtgaacgcgtccagcgcatctccaagcgctacgtgctggtagaagggaccctctatcgacgcgcggctaacggagtcctcctgaagtgcattcttcgggaacaaggcgtcgagcttcttgccgatatccatgaagacgaatgcggagcccactccgcctcacgcaccttggttggcaaggcctttcgccagggtttctattggccgacggctctcaacgatgcggttgacctggtccggcggtgcagggcgtgccagttccacgccaggcaaccccatcagccggcccaggccctgcagaccatacctctttcatggccgtttgctgtctgggggctcgatatcctgggtccgttcaggcgggccccggacgggttcgagtatctgtatgtcgctatcgacaagttcactaagtggcctgaggcttatccggtcatcaagatcgataagcactccgcgcttaaattcatcaggggcatcactgctcggttttgggtgcctaaccgtatcattacggataacggcacccagttcactagtgaactcttcggtgactactgcgaagacatgggcatcaagctctgcttcgcctcccccgcccaccccagaagcaatggccaagtggagcgcgccaacgcggaaatcctcaagggcctcaaaacaaagaccttcaacatcctcaagaagcacggcgacttgtggatcgaggagctgccagcggtgctctga

SEQ ID NO: 66515 - DNA, 5367 bp, Oryza sativa
  Clone ID: PAT_MRT4530_67459C.1
atggccgaacgggcagtggcgcacagcctctctccgaacgctagcggtgacgacggggagcagaacccgcgccgtcgggctcgcaccccaccgtccccctctcgccgaaatcttgggcggggggaggcgctcggggaggtcgaaggatccgcgacttcgccgcccgcgggcgacgggggaggacggcgagacggggcgcgtcgccgcctcgtctacggcgatggcggcacgccccagggcgcgctccaggctgcgggcgcgctcctgcgtcacccgcccgtcgtccccgatccagagactccagcccgacgttggctggatgacgtggccgacttggtcatgacggcgcagcagcgcctaggcgccggcgggcggtcctccgccaccgaggcctctggcgcagccgccgccggctccatgtcgtcgaggcggagggcgcggcgagcggcggccgttacccgccgttcgtccgccattccctcgtcaacgcctccgacccaagaagatgtgcgtggggggccggatgcccgcctcgatattgagcgccggcgcgacgctcgtcgcgccgcccacgcaacggagggcgcttcctcgtccggagcgccacttcggtccgggcacgggggccggccccccgtgtccccggttggcggtgccggctgtcgagcctttgtggcgagccttcggaacgtccgttggcccccaaggttccggcccaccatcaccgaaaaatacgacggaagcgtcaaccccgccgagtttctccagatctacacgaccgggatcgaggccgccgggggtgacgacagggtcatggcgaatttcttccccatggccctgaagggtcaggcgcggggttggctaatgaacttgccacccgcgtcggtccactcttgggaggatttgtgccagcagttcaccacgaacttccagggcatatatccgcgcccaggcgaagaagcggacttgcatgcggtacagcgaagggacgatgagtctcttcgctcgtacattcagcggttctgtcaagtccgcaacaccataccctgcattcccgcacacgcggtgatctacgcgttcagggggggcatgcggcacaaccgcatgctcgagaagatcgcctccaaggagccccagaccaccgcacagctttttgagctcgcggacagtgtggctcgcaaggaggaggcctggacctggaattcctccggttctggtgtggtagctccggccgcccccgggtccgccgctcggtcagggtggcgggacaggaggaggaagaaggggtcagcccgttccgacgacgagggtcatgtcctcgccgtcgagggcgcttcgcgggccccccgaaaggggaggcctgcgagcgacaaaaagaaggaggccggcgctcccagcagggagcgcccaaccggcaagtggtgtaccgtgcacaacacctccctccacgacctcgcggactgccgcgtggtcaaaagtttggctgagcggacgaggaagtgggaggaggagaagaggcatgagcgctgtgagggcaagacccctgcggctcccgccggcaaccggcgaggtgaggccaagcagaaggccaccgccgaggacatcgacgatggcgacgatgacctggggttccaggagcctgaggccaccgtcgccaccatcgatgggggagcgtgcgctcacgcttctcgccggagcctcaaggccatgaagcgagagcttctggccgcggcccctacccatgaggcgacgcgacgggtgcggtggtcggaggttgccctcaccttcgaccagaccgaccacccgccgtgcgttgcccggggaggacagatcgcgatggtggtttcccccaccgtttgcaatgtgaagttggggcgtgtcctcatagacgggggtgcagccctcaacatcctttcccccgcagcctttgacgccatcaaggccccggggatggtgctccggccgtcccagccgatcatcggtgtgacgccggggcacacctggccgctgggtcatatcgacctcccggtcaccttcggtggttccgccaacttccgcacggagcaggtggacttcgatgtggcggacctcagtatgccctacaacgcggtcctggggaggcccgcgttggtgaagttcatggcggtggtccactacgcctatctccagatgaagatgccgggccccggtggccccatcaccgtccatggcgacctcaaagtcgcgcttgcttgtatggagcagcgcgcggaccacctcgccgcggcgtccaagcccgcgggtggcgacgagaggctcgccacctccttcccggccgccccaaggcagcggatggtcacgtgcgacgaggtcccggaagacgcgctcgtctccttcctgcgggcaaacgccgacgtcttcgcctggagaccggcggacatgcccggggtccccagggaggtgattgagcaccgtctcgccgtgcggccgggcgcaaggccggtccggcagaaagtgcggcggcaggccccggaacgtcaagccttcatccgcgaggaggtggcgcgacttctggaggccggattcatccgtgaggtcatccatccggagtggctggcgaacccggtcgtcgtttccaaggcgaacggcaagcttcggatgtgcatcgactacaccgaccttaacaaggcatgtcctaaggacccttaccccttgccacgcatagatcagattgtcgactccaccgcggggtgcgaccttttgtgttttctagatgcatactctggttatcatcagattcgcatggctagggaggatgaggaaaaaactgcattcattaccctcataggaacttattgttacacgacaatgcctttcgggttaaagaatgcaggtcctacttttcaacgtactactcgaatttctttgggtagccagataggacgcaatgttgaggcctatgttgatgacttggttgtgaagacgcgcaaccaagagaccttactctcggatctagcgaaaactttcgaaagtctccgctccgcccgcataaagctgaaccccgataagtgcgtgttcggcgtgcctgcgggcaagcttctcgggttcttggtctctgcccgaggcatcgaggccaaccccgagaagatacgagctatagagcggatgcgcccccccagcaagcttagggatgtgcagtgcgtcaccggctgcatggccgccctaagtcggttcatatcgaggctgggagagaaggcactgcccctatttaagctcctcaaacgctccgggccgtttacctggacggaggaggctgagcgggccttcactcagttgaaggcgtacctcagttctcccccagtcctggtcgccccggagccagatgagccgttgctactctacctgccggcaaccccgcaggtggtcagcgcggcgttggtcgtggagcgcgacgaggacaaccctcactccgcgcatccccaccctgcgtcgactcgacccgggagagagcagggaggagaggcccccgagccgaacggcggcccaaggcccccgacggccggagctggccctccgcctgcttgtccgacggtgccaggcgcccccgacccccaggatggccccggggccactgcgggaaggccgcgcctgtcgccctctgaccccgaggtcgtcggcacagaagccgagtgcgccccgcgtggcctctcggacgaagagcgccctggagatgcggcccctagcgaagaggatcggccccgccgaaaggtgcagcggcccgtctacttcgttagcgaggccctccgggacgccaagacccgataccctcaggcccagaagatgctttacgctattctaatggcttcgaggaagttgcgccattatttccaggcgcatcgggtcacgatggttacatcttaccccctcggccaaatcttgcataaccgagagggtactggacgggtggtgagatgggcaatcgaactctctgaattcgatttgcgctttgaaccacgccacgcgatcaagagccaggccctcgccgactttgtggcggagtggaccccagctcccgagcccgtctccgcccccgaggccagctcgggcccctcgcagctgcctcgcaccgcctactgggtgatgcagttcgacggctccctgtctcttcagggcgccggtgcgggggtcacgttgacctcgtcgagcggagacgtcctcagatacctggtccgcctcgactttcgggcgaccaacaatatggcggagtacgagggactccttgcgggactcagagtggcagctagactggggatccgccgcctcctggtgttaggcgactcccagttggtcgttaaccagataagactctacccgaggaccgcgaagggagtgaacgcgtccggcgcatctccaagcgctacgtgctggtggaagggaccctctatcggcgcgcggctaacggcgtgccagttccacgccaggcaaacccatcagccggcccaggccctgcagaccatacctctttcgtggccgtttgctgtctgggggctcgatatcctgggtccgttcaggcgggccccgggcgggttcgagtatctgtatgtcgctgtcgacaagttcactaagtggcccgaggcttatccggtcatcaagatcgataagcactccgcgcttaaattcatcagggacatcactgctcggtttggggtgcctaaccgtatcattacggataacggcacccagttcactagtgagctcttcggtgactactgcgaaggcatgggcatcaagctctgcttcgcctcccccgcccaccccagaagcaatggccaagtggagcacgccaacgcggaaatcctcaagggcctcaaaaccaagaccttcaacatcctcaagaagcacggcgactcgtggatcgaggagctgccagcggtgctctgggcgaaccgaaccacgccaagccgagcaaccggggaaacgcctttcttcctcgtctacggcgcggaggcggtcctcccatctgagctcaccctgaggtcccctcgggtcaccatgtattgcgaggctgatcaagatcagcttcgccgagacgacctcgactatttggaagagcgaaggcggcgcgcggccctccgagccgcgcgctaccagcagagcctgcggcgctaccatcagcgccacgtccgggcccgatcactctgcgtcgacgacctcgtcctacgccgcgtccaaacgcgtgctgtactgagcaagctctcaccaatgtgggagggtccgtatcgagtgatcggcgtcccccggccgggctccattcggctggccacgggcgacggcacagagctgcctaacccatggaacatcgaacaccttcgtcgcttctacccctag

SEQ ID NO: 66516 - DNA, 564 bp, Oryza sativa
  unsure (1)..(564): unsure at all n locations
  Clone ID: PAT_MRT4530_6745C.1
ctgtctgtggcgagggccccgcgtacttcggctgccgtgccgcgagcgcttggcgcgggagccggcgtggcacgagaccagagggagaggggcactcttcttccttcgcgatccggggtgcgacaaggccacacagctcatggaccgcgtcgtggcgttcatatccggcgcatgagctgcatgctcttcatctgcatatgctttccggttgcagctgtgccttcattgaaacaaaataaatggttctattattttttttttgggggacgggaatatgaatttcgcatttgcattcgctgctacgttcttggaagaaatattttatcgcgtgtatgttcttccattggactggtggtttccgttgctctgagcctcggtccaagccgaccgcgatgtaatgttgtcatgttgcattcggtggtagcaacgttccgtttggtttttttctcctggacctggtaactactttctcagtccaaaatatttgttttttatttttttctaatactatttgcattgaaggtggnnnnnnnnnnnnnnnnnnnnnnnnnnnnnnnnnnnnnn

SEQ ID NO: 66517 - DNA, 918 bp, Oryza sativa
  Clone ID: PAT_MRT4530_67460C.1
atgatgcggcctcctcccccgccatccgcgccgccgccttccccgcctcgcgccgtcttcccctcagctcgctgctgccttccctcacctcaccgcttccttccctcaactcgccggaagcggctagtgacggtggccaagctggcgttcccggccgagttgaaggcgcacacattgcatctcgtcgacaacggcggcgagctcatgctcgtgcaccactgcttcgggacgacgcgccgaggtgcgggcggcggcggcttcaacctattcaacgatcgtcttacgagtttctactacacgcaccgagtagatctggacgcgaagaggaggagagcgctacgcgtcggacatgacgaagcattttccccgaagaggacggtgtcttgccgtgggctgggcgtccgccgccgcgccgcgttcctcggcaggaaccgcacgctgtccgtgtccgccgaggtacgtctcatgcttcagctgtggatgaattcattcgtttgttcgcagcgattctctgtcatcgccatgaagaagcagctgcaagacgagatacagcaacatgaagaagcacacgcaggtgctgggctggaagcctggaagtggaagggaaggccgaggggagctcgggctgttaattccaagtatcatgggctggaatgggccatggggaagaggggagagttcgccggctttagagggatggccgtgggaggcggcagcctggcagcgggcggcggcgccgccgaagccgcagggttggaggacggcggcgggggcaaagcggaaagagttgggaggaggcggccggggggcctcgccggtgccgttgacaccattcggccagccggcgaggccgggcggtggcgcgctggggcggcggcggcggcggtggcggaggcgctgaggagcggtggcgcgtga

SEQ ID NO: 66518 - DNA, 413 bp, Oryza sativa
  Clone ID: PAT_MRT4530_67461C.1
agattgaaaaatacaaaagctttggtggtgttcggattgagagtgacgtgtatgtgacggcgcatggatgcaagaacctgacaaactgccccagggagacctgggaaatcgaagctgtaatggctggtgcgccatggcctgtgcgtgcgacaaataatagcctgtccaaagcgtcctgaccaccttacctcagtttttcagtgctcctgaaccctgtccaagcagatacatatggagataaaaataggtgaacctcctggggttgttggtctgatgttcatcggtcatttcatatgttaaattgtaggatctgttgaagacggtcccctcgagtatcgtcctttgaaaactgaaaggtacaaataaaagatcaagaaaactgaaaagtacaataaaaagatcagcttgagagg

SEQ ID NO: 66519 - DNA, 627 bp, Oryza sativa
  Clone ID: PAT_MRT4530_67462C.1
atggtgacggcggcagcggcgaggaggcggccgagcctggggcggcagaagatcgagatccggcgcatcgagagcgaggaggcacggcaggtgtgcttctccaagcgccgtgcgggcttcttcaagaaggccagcgagctgtccatcctgtgcagcgccgacgtggcggccgtcgtcttctcccccgccggcaaggcctactccttcggccacccgtcggtggagttcctcctggaccgcttcctctcgtcgtcgttgcccgcgacggccgggaaggaggaggggtcgtcggtctcggtggtggcggagctcaacaggcagtacggcgagctgcgcgcgatggtggacgcccacaaggcgcgccgggagagggcggagaagacgatggagaagcagcggcagcggcagcccgcggcgtggatggatccggaggcggaggtgggtcgcatggcgccggaggagctgatggccttagggacgaagctggtggccgtgcaaggtggcgtggcggcgcgcgcggaccagatgctgcgtgacgcgctgcttcttggccggaggccgaacaccaccaccaccaccaccaccagggcgccgcccggcttcttccacctgcacccgcacttctga

SEQ ID NO: 66520 - DNA, 2151 bp, Oryza sativa
  Clone ID: PAT_MRT4530_67463C.1
atgaggaggtggaagaggaagctgggccgcactctcacccgcttcctctccaagccccctttcaagcccaagcccaccaacccctcgccgccgccgcccccgccgccgccggggatccagcctcctccaccggcgctgcccggcatgccgcacggacgcccgccgccgccgttcccgggagggcgggacgcgttcccgcaggcggcgtcgacggtggtcccggacccggccaggttcttcgcgccggcgctgctctcgtcgccgctccccaccaactccttcttccagaacttcgtgctcaagaacggcgaccagccggagtacatccacccgtactcgacgttcgtcgaggacctgaccgtctccgcggcgtccgacgccgcggcggccgcggcggggcagaggcaccgggtcgccgcgttcgacgacctctcagtcaccctcgacgtctcgccgtcgctcagggcgttcctcgtcaggggctgcccctttgtcaccgtcgccaccgccgacgccgcgggccccgtcgacatctccgtcgcgtccgtccacgccttcatcgaggtggcctcctgcgacgacgcgctcaccaagtggcggctccggatgaacagcggccagaccttcctcctctacgcgtccgcgccgatccgcctcgcgcagtccagcgtcacgcagctgtcggcccccggcttctccggcgtcatccgggtcgcctacctgccggacccgtccatggaggcggttcttgatcagtacagccggtgcttccccaccgccggcgaggcctcgctgaaccgccccttctgcgtcgagtacacctggcgcaagcaagggtggggagacctcctcatgctcgcccatcccctccacctccgcctcctctccgaggattgctgcgtccgggtgctcgacgatttcaggtaccggagtatcgacggcgacatggtcggcgtcgtcggcgattcttgggttctccggaccgatccggtgtcccccacatggcactcgatgcggggcatcagcgacgacggggtgggcgaggtcgccgccgcgctgcgcaaggatgtggatgcccttgcttccagctccatcacgaccacctcctcctacttctacggcaaggcgatcgccagggcggcgaggttcgccgtaatcgccgaggaggtcggctgccctgacgtcatcccggcggtgcagcgattcttgaaggccaccgtcacgccatggctggatggcagcttccagggcaatggattcctctatgaacccaaatggggtggccttgtcacattgcagggatccaaggacaccggcgccgatttcggcttcggcatttacaatgatcaccactaccatttggggtacttcttgtacgccattgctgtgcttgccaagattgatccctcctgggggaggaagtacatgccccaggcctactccatggttgcagatttcatgacattgtcgcggaaacacggcgcaagctacacaagattgaggatgtttgatctctggaagctccattcctgggccggaggtttgacagaatttgcggatgggcgcaaccaggagagcactagcgaggccgtgaatgcgtactactccgctgcgcttctcggattgagctatggggatactcaccttgtctccatcggcgcgacattgaccgcattggagatgcttgcagcacagacatggtggcatgtccgtgaaggtgacaccatctacgaagacgatttcaccggcaacaaccgtgtcgtcggcgtcctgtgggcgaacaagagggacagtggcctctggttcgctccaccggagtggaaggaatgcaggctggggatccagctgctgcctgtcctgccgatcagcgaggcgctgttcccggacatcagcttcgtcaaggagctggtggactggacaatgccggcattgtcaagggaaggggtcggagaagggtggaagggcttcgtgtacgccctggaggggatctacaataaggaatcggcattgcagaagacgagggcgctgacggggcacgacgatggcaactccctgaccaaccttctctggtggctgcacagccgcggcaccgccgatgatggcgtcgtcgggttctccaggtgctgctggtaccgccagtattgccattga

SEQ ID NO: 66521 - DNA, 2710 bp, Oryza sativa
  Clone ID: PAT_MRT4530_67464C.1
atgaggaggtggaagaggaagctgggccgcactctcacccgcttcctctccaagccccctttcaagcccaagcccaccaacccctcgccgccgccgcccccgccgccgccggggatccagcctcctccaccggcgctgcccggcatgccgcacggacgcccgccgccgccgttcccgggagggcgggacgcgttcccgcaggcggcgtcgacggtggtcccggacccggccaggttcttcgcgccggcgctgctctcgtcgccgctccccaccaactccttcttccagaacttcgtgctcaagaacggcgaccagccggagtacatccacccgtactcggtccgctccgccgccgccgcgctcaccctgtgctacccggcgcggaaccactccccgtcgttcgtcatccagacgttcgtcgaggacctgaccgtctccgcggcgtccgacgccgcggcggccgcggcggggcagaggcaccgggtcgccgcgttcgacgacctctcagtcaccctcgacgtctcgccgtcgctcagggcgttcctcgtcaggggctgcccctttgtcaccgtcgccaccgccgacgccgcgggccccgtcgacatctccgtcgcgtccgtccacgccttcatcgaggtggcctcctgcgacgacgcgctcaccaagtggcggctccggatgaacagcggccagaccttcctcctctacgcgtccgcgccgatccgcctcgcgcagtccagcgtcacgcagctgtcggcccccggcttctccggcgtcatccgggtcgcctacctgccggacccgtccatggaggcggttcttgatcagtacagccggtgcttccccaccgccggcgaggcctcgctgaaccgccccttctgcgtcgagtacacctggcgcaagcaagggtggggagacctcctcatgctcgcccatcccctccacctccgcctcctctccgaggattgctgcgtccgggtgctcgacgatttcaggtaccggagtatcgacggcgacatggtcggcgtcgtcggcgattcttgggttctccggaccgatccggtgtcccccacatggcactcgatgcggggcatcagcgacgacggggtgggcgaggtcgccgccgcgctgcgcaaggatgtggatgcccttgcttccagctccatcacgaccacctcctcctacttctacggcaaggcgatcgccagggcggcgaggttcgccgtaatcgccgaggaggtcggctgccctgacgtcatcccggcggtgcagcgattcttgaaggccaccgtcacgccatggctggatggcagcttccagggcaatggattcctctatgaacccaaatggggtggccttgtcacattgcagggatccaaggacaccggcgccgatttcggcttcggcatttacaatgatcaccactaccatttggggtacttcttgtacgccattgctgtgcttgccaagattgatccctcctgggggaggaagtacatgccccaggcctactccatggttgcagatttcatgacattgtcgcggaaacacggcgcaagctacacaagattgaggatgtttgatctctggaagctccattcctgggccggaggtttgacagaattcgcggatgggcgcaaccaggagagcactagcgaggccgtgaatgcgtactactccgctgcgcttctcggattgagctatggggatactcaccttgtctccatcggcgcgacattgaccgcattggagatgcttgcagcacagacatggtggcatgtccgtgaaggtgacaccatctacgaagacgatttcaccggcaacaaccgtgtcgtcggcgtcctgtgggcgaacaagagggacagtggcctctggttcgctccaccggagtggaaggaatgcaggctggggatccagctgctgcctgtcctgccgatcagcgaggcgctgttcccggacatcagcttcgtcaaggagctggtggactggacaatgccggcattgtcaagggaaggggtcggagaagggtggaagggcttcgtgtacgccctggaggggatctacaataaggaatcggcattgcagaagacgagggcgctgacggggcacgacgatggcaactccctgaccaaccttctctggtggctgcacagccgcggcaccgccgatgatggcgtcgtcgggttctccaggtgctgctggtaccgccagtattgccattgatgggggctgaaatgatcgcagcagagattgcccgagatgatgcgttgttgctgaagatcaggttgtgtgggtgatatgccgaaggatacagattattatagagtgggctgttcagtttcagagtttccgtgtgattcaaacatcaggatgctacacacacatcttttacactttgttgtttcaataaaaagtagtcaaaagtcatggtatgttgatattttacatggaacgcaattggttcagaagttttgagttgcctatgttttctttattaaatatatatatttatataagttttaaaagtgagatttctcctgctgatagcctgctagcaggtgtggcccattctcaatctcagggctcaggccagtttatttggaatgcaacttacacaaagattcccccttaaaacactagaatatacttcctccgttttataatgttatatgtatgatgttgttgactttttaatcaacatttgatcatt

SEQ ID NO: 66522 - DNA, 362 bp, Oryza sativa
  unsure (1)..(362): unsure at all n locations
  Clone ID: PAT_MRT4530_67465C.1
attttaaatatacaaannnnnaactanctaaaannggagtgtatggtacgagacaagttgatatacatcttggggaccggatgaagggcggggcattccatcgagaagcatcaggggtgggggcaactgtatgtgatctaatcagatctagggctgtttcggaacagacctaaccatacgggaggaggtggtgatggtttgcaccttcttgcatactgataaccctgcatacgccatatganaaaaaatntcttatagaatgaaatcataaagncnctactgctttgtaatggatacgcacatcctctcttcatatttcaaaaacaaattctgatacaaaaagcacataaatggctatgacc

SEQ ID NO: 66523 - DNA, 120 bp, Oryza sativa
  Clone ID: PAT_MRT4530_67466C.1
atgcccgattggatccgcgacgccctcgtgcctgtgatttgcgcttgccgcatctccgattgggattgcgtggctctcgcccacgatttaaaaattgaagatgtttttgtgaaaactatg

SEQ ID NO: 66524 - DNA, 415 bp, Oryza sativa
  Clone ID: PAT_MRT4530_67467C.1
gtcaggggcctcgccgccgctctccccctcgtcctccgtgggcccttgctaactgttgatggtatagtcctgacttgtgtcgcccgtcttgaccgctgcccgttcctggtgacatttactgctgatgctacacactaaatcggtggagagctccataccggtgctggactccctatctagtcctacagtgacggggtaccttgacctatgctggtgtcgtcccaagatggatgttacccattggaccgttgcccatcctcttgagaaaacactatacccgaactctgacctctactggatgaacatatacggatctctacctgttctcatgccggatgccctctgactggaatcgcatgcaccatgctggctttacctctccatgaccttcgaagctgatgccggtcaacccgac

SEQ ID NO: 66525 - DNA, 217 bp, Oryza sativa
  Clone ID: PAT_MRT4530_67468C.1
tgcacacgtctgctcacgcgggcgctcactcgatcctgcacgcattcgtcatgggtgcctaccacttccgtgctccactacggcctgattagagccggcttgacgaagtcatgctagactagcatacggcacgttactactgacaaaggagacgcgtactccgagagaagaacaccacatgttgtaactagcgtattaatgacgagatgtgcgcata

SEQ ID NO: 66526 - DNA, 274 bp, Oryza sativa
  Clone ID: PAT_MRT4530_67469C.1
tgatatgggctatcatcgcatcctggggactgtaccagatgaccatcttcaacgaccgcgtaagccgtggcgacgcccgattgctggaagctaacgagatcttcctcacgggggtggcgctcggacctacatgggattggtcaccgtgctctttttctacctggcgcacgacacgaacttcttcatggatgtccacggcgtgacacctgtcagatagagcgagagggcactaatggcacacgctgcacctgcagaagaccatgaacaaccaggc

SEQ ID NO: 66527 - DNA, 4959 bp, Oryza sativa
  Clone ID: PAT_MRT4530_6746C.1
atggccgagaaaccaccgctgtcgccatcctcggctagtccaggcactgttaaggaaaagatccagaagttaggattgaccgacgtcaatgaaggaaacgtcgtgcccatcgatccagaaaaattcacacctgatcaaaagaaagattttgacgcgatgatgcagcaggcacgcaatcagttcttgaactcattcatgcagactcgcaagggaacacttgttcagaagtataaagtaaaggtagttgctgatgatcctgggaccagttcttctaaaggtgaagacgggaaacaagctccggatggctcggctcaaccgagtgacaaaggtgctacagatggttctctaggaagtcaaggtgacaattctcaaggagtccatggggttcaaggtgagggggtgcatggagttctaggtgatggtgctctggggttgcagggaggaaattttaatcaggatggcaatgcatcacaggagtttttcaataacttccaagatcgggttgactatgccgtgcacaatgctttgatcaatcaatctggggtgttagtcaatacattgtcaaatatgatgaagtcaatggtcgatggtacaatagctgaataccaagctgcaggcccagtttatttgcaaggaggagtatttccaaattaccgaccattgatcaccaatactcatccacctgttcaagcagctccttctattgcaccatcggctcagccgatggcaccagcatcagctcctgcacctacccagcagccgattcagcaaacaccaccaaggcagcaggttgtgcaacccatacagcaaacacccccaatccaacaagttgtgccaccagtgcagcaaacaccccgagctcaaagagttgtacaaccgattcagcaaatgccattaaggcaacaggttgtccagctgattcaacaacaaggttcaatgaatgcatcggctgggtttgcgacacctggtgggcggcctgtgcagcatgctacaaatcaggttgtcccagagcatttagtccatcatgtacaaccagatggcacggtgattccgcaagttattcctgaacatttggtgcgtaatattcagccggatcttcaaaattaccaggggggcaatttgaattatcaatatcagccaccgtcacctcatgttcaacaccagcaagcaggatcagctcagccccaatttgttcctcaatataaccaattcgagccgatgccacaacaacctcaagggacacctcaacagcggccatgggccgatttgattgcagatgtcataaaggagcagttcgggctcaggccgaaagatgctggaaatctatatcgacagccatatcctgaatggtttgagagagttcctttacctaaccggttcaaagttctagatttttcaaagttctcagggcaagatagtacatcaacttatgagcacagtagccgatttttagctcactgcggtgaagcatcggctgtggatgccttgagagttaggttattccggttgtctttagctgggtcagcctatacttggttttcttccttaccatatggatcaattaacagttgggctaatttaaaaaagcagtttcatagctgcttctatagtgggattcatgagatgaaattgtccgatctgacgtcgatcaagcaaaagcatgatgagccagtacatgagtatattcaaagattcagggagatgagaaataagtgttacagcttgagtttgactgatgcccagttagccgatttggcttttcagggtatgattgctccaattagggagaagttctcatctgaagattttgaaagcttgtcacaccttacaaagaaggtagctctgcatgaacaaaggtatgcagaggctaggaaaaattctaaaaaggttaatcatgtttgtccttatatatatggatcggatgatgagggtgatgattctgagatagatgcagtcgagtgggtaaggagtaagaaggttataccatgccaatgggtaaagagctcaggtaaagaggagaagtatgactttgatataaccaaggctgataaaatttttgacttgctactccgagagaagcatattcaacttcatgccagtcacacaattccatcggctgaagaattgggcaagaaaaggtattgcaaatggcataattctaggtctcatacgactaatgattgcaaggtcttcaggcagcagatccaagcggctattgaaggaggcaaaatcaagtttgacgattctaagaggccgatgaaggttgatggcaatccttttcctgttaatatggtgcatacagctgaccgaatagccgatgggagtcgtgcaaggggttttcaggtaaattcggctaatattatcagcaaatatcagaggaagtatgacaagcagcaggagaagcattatgaagaagatgatgatggttttgatcctcattggaatgaaggtatgaggctgccatctatcgaagactgtcctgggtgcagtgatattgctgagagttcaagccgatcatatagtaggggcaatcggctaaggcagacaagagttcctgttcatgaaagattgggtccagtgaatcaagatcatagccaagaggacaatgaaatcaggaaaaatcagtggtgtccatctgagcaggcggtttttgagaagccagaggggacagagaatcggcatcttaagccattgtatataaatggttatgtcaatgggaggccgatgtccaagatgatggtcgatggtggggctgcagtgaacttgatgccttacgctacattcagaaagttgggcagaaacgttgaagatctcatcaagacaaacatggtgcttaaagactttggcggcgatccatcagaaaggagttttgaatgtggagctaacagtcagcaacaaaactatccctacaacattctgtcatcgatgcgaaggtggcaaggcgacaagattgagattgtgccagccgacagccaattgaagatggagaacccgagctattattttgagggcgtcgtagagggttcagatgtctacaacaaggacacggtagatgatctcgatgacaaacaaggacagggtccaggtgatcgaccaaggccgacatttattagtaagaatttatctgcagaatttagaaccaagttgatagagttgttgagagaattcagagattgcttcgcttgggagtattatgagatgcctggactcagccgatcgattgtagaacatcggctacctatcaaaccaggggttaggccacaccagcaacctccgagaagatgcaaagctaatatgcttaaacctgtcaaggctgaaattaaacgattatatgatgctggttttattcgtccttgccgatatgctgaatgggtttctagtatagttcctgttattaagaagaatggcaatgtcagggtgtgcattgatttccgagacctgaataaagctatcccgaaggatgaatacccaatgccagttgccgatcagctggttggtgctgcatcagggaaaaaaattttgagttttatggatggaaacgcaggatataatcaaatctttatggctaaagaagatatccataagacagcttttaggtgtcctggtgcaatcgacttgtttgaatgggttgtgatgactttcagcttgaagagtgctggagctacatatcaaagagccatgaattacatataccacgatctaatcggctggttggttgaggtttacattgatgatgtggttgttaagtctaaagaaatagatgaccacatagccgatttgaggaaggttttcgagagaaccagaaaatatggcctgaagatgattccgacaaaatgtgcttttggtgtgtcggctggccagtttttgggatttcttgttcatgcgaggggggttgaggctgagtatgaggcagtgctcaaagggttgcaactactcaaggaagttgaagccgatgcttttgaaatcatgggggattctttgctggtaataagtcaattggcaggagaatatgaatgcaagaatgatacgttaatggtttataatgagaaataccaagaattgatgaaggagtttcggctgggagcattggggtataagccgatgatcaaagatgttaaggttgaaattgcagctatgacagccgatgattggaggtatgatgtgcaccagtatttacagaatccatctcaatcggcttctaggaaattgagatataaggcattgaagtacactttattggatgatgagctttactatcagacgattgatggggtgttgcttaagtgtttgagtgccgatcaggctaaagttgcaatcggtgaagttcatgagggaatttgtgctaatgggcaggccgaggcatctaacaagagcttgatcaaattcattaagcggaagatttctgattatcctaggcaatggcatactcggttggccgaagcattgtggtcgtattggatggcatgtcatggatcaattcaagtccctccctataagcttgtttatggacatgaggctgttttgccgtgggaggttagaatcggctctagaagaacggaattacaaaatgatttaacagccgatgagtattacaaccttatggccgatgagagggaggatctggttcagtcacgattgcgagcccttgcaaaatttatcaaggataaggagcgtgttgctcggcattacaataagaaagtggtacccaaagatttttcggagggggaacttgtttggaagttgattctgccgattggaactcgggatagcaaattcggcaaatggtcgccgaattgggaagaaccgtttcaaatttataaggttgtgtctaaaggagcttacatgttgcaaggactcgatggagaagtttctggcagagcattaaatggcaaatatttgaagaaatattacccaagtgtttgggttaatgcaagatcggctgatgttgccgatacatga

SEQ ID NO: 66528 - DNA, 690 bp, Oryza sativa
  unsure (1)..(690): unsure at all n locations
  Clone ID: PAT_MRT4530_67470C.1
cccccggccggacgcgtgggctcgttcccaaaccctgcatccttctctttcacacaagcctctctctcgccggcttcggcgtccgtctcctcctcctcctcttcgtctagccttgtggcggcgtgcggtgcggtgcggtgaggaaaggagggagctttgaaggtcgggggagggcggaggagatgtctgaggtgtccgttatggccgaggtggaggagacggcggcggcggcgccgctggacctgccgccggggttcaggttccaccccaccgacgaggagatcgtctcgcactacctcacccccaaggccctcaaccaccgcttctcctccggcgtcatcggcgacgtcgacctcaacaagtgcgagccatggcacctcccagccatggcgaagatgggggagaaggagtggtacttcttctgccacaaggaccgcaagtacccgaccgggacgaggacgaaccgggcgacggagagcggctactggaagggccaccggcaaggacaaggagatcttccgcgggaggggcatcctcgtcggcatgaagaagacgctcgtcttctacctcggccgcgcgccccgtggcgagaagaccggctgggtgatgtacgagttccgcctcgagggcaagctccccagccaagctncccgcgctccggccaaggaccagtgggcggtgtgcaaggtg

SEQ ID NO: 66529 - DNA, 532 bp, Oryza sativa
  Clone ID: PAT_MRT4530_67471C.1
gctgcaggaattcggcacgagggggcaatcatgctggccgtgcgtgcgttccggcggtccgctctgcgtgcaggcacgagcaccagccgcgactgggtgcgacgcgtgccatctcaggtcatgcactcggtgtgatgcatgggcaggcgcaggtgaacccattcacgatccatgaagggcaccttcagccaggtctcccagcggacgaattccggttccgccgggggcagttgctcgactctctgccggacaactcagcactcattgtgaacgcggcgtcgaccaagtacatgacccacgatattccgtacgagttccgccagaactccaactttatgtacctcacgggcctggaagagcccgacgccgtcgccgtgtttctcaagacgcagcagaagacggcgttcattctctttgtgctcccacgcgacgcccatagtgagcaatgggatggtgcccgcgtcggtctcgacggcgccaagtccaagtacggcgccgacgacgccttccagcttggcgacatggagcagca

SEQ ID NO: 66530 - DNA, 450 bp, Oryza sativa
  Clone ID: PAT_MRT4530_67472C.1
aataccattgctcaactttattatagggaatatcgcatgagaagaacatacatagccgtctcccaacaaaaaactgatttgttgggtagtttgcatgcacccataattaatttgtgtagaaacacaaattgattttatatgctataacacataactgatctacggcatgccaacaaacatactaattgtatacttagacatggttgttctcccagaactgcacctgggcccagtctatggtgcccttgtcaacctgaaatgcctttggcaaaactacatctgagactggtggctatgacccgtgaaccacttttgccttggtgacggcaaccaagttctggcttctaaaagctacaattgtaacccctgccatgtgggggtcaaggtataattgaaagtggatgagccccactgcgaattcacacacattaccctacttaacgacctttg

SEQ ID NO: 66531 - DNA, 545 bp, Oryza sativa
  Clone ID: PAT_MRT4530_67473C.1
atactgtggacggcccgccctttttttttttttttttgttccaagcctatgtacaactgttcataccattcatcaatgatttccccagcctccaatttcttgttcaagatgacctgacattacaacaccgtggcgctcaatagtaacaagaagtgtgccacccccagcactgatcgcaacacaaacatgaacttctattaactggcatgtctgtttagtttattattttacccatatggagaattcctatgttgcatgcagacatgttgagtcatataccttttccaacagccatatgctgcaaacaggcacaagtttacttcaaaagctcagcttgaagtgtgagctgaacacacattttttgacaacttggcagacgcacattgcctagtaaaccagggggaccaccatccgagcatgaacacaccgcataacgccccatcagcggccggtgaataaagggaaccgtgatccagggaaactaatgtaaactacagctactttctgatcctagttgcgtgttaactggaactggaactagggct

SEQ ID NO: 66532 - DNA, 277 bp, Oryza sativa
  Clone ID: PAT_MRT4530_67474C.1
gattggagccggatttgtccgacgtggcacgttgaccacggactccggcgctgagtcagcacgggaacaagcaagcggcgcggcggcgggcacaatctgggatgcggcgtgcagcagcgggcaagatctggcaagtggcgactcagcgccggagaccgtggtcaacgtgccacagcccagtaggacatcacggcagcacaggaccactaggcacgagggcataacaacaaagacaaaggcccaaaccaaccagcatcctgggcaactacgtggttag

SEQ ID NO: 66533 - DNA, 1392 bp, Oryza sativa
  Clone ID: PAT_MRT4530_67475C.1
atggatgatgggtggagtgctaacatggttaatgcgcaaaagagaagaaggaaagagatagaacttaagttggcagaattagacaatattgaagaaaggagggatttgtttccccaagaatgggagatcagatatgagttggaaagggaagtggaaaatatttatttacaggaggagatttggtggcagaggagagggggtgaacaatggctgttgagggggggaaaaagaaaaagtcatattttttctctgcagcaagggggagacacaatcttagacttcaaccaaatccaacatcacatttatgagtactacaaaaagttgtttggaagagaggaaattaggaatattcatctggatcagggggtgtggagggacaaactgagggtgagtgattctgaaaatgagtatctgcagaagccttttgatttggcagagattgatagggtgatgaaaagtatgaagtcaaacaccgctccaggccctgatggcttccctgtgggcttttataagaaactctggcctgaatttagggggttgatcaaagaaatgcttgatgacttgcataaaggggttttagatagtgatagaattaattatggggtgatatctctcttgccaaagataaaggatgccaatataataaatcattacagacctatttgtcttcaaaatgtaatcctgaagattatcaccaaggccataactttgaggatttctgaaataattgggtgggtaatcaactggactcagtctgcttttattccagggaggtatattttggatggatgtgtgatcttacatgaagtcttgcatgatttaaatttgagacaggaagctggtatcatttttaaaatagattttgaaaaggcttatgatagggttcattggggtttcttatatgaagtaatgagactcaagaacttccatagtacctttattgaatgggtgagaaaaattactaaggggggggggttaactcaccttcaatatgctgatgatactattctttttactaaagcttctgaggagaatgttttggctttgaaattcctgctttattgttttgaagaaatgtctgggatgaaaataaactaccaaaagagtgcagtttatgtcttgggggttcctaaagaaacagaggaaaagtttgctgatatgttgaattgcaaagtggggagtctgcctttcacttatttggggttacccatgggttttgagaaaatagggttcttcagaaagtggaaaagagattggaatcttggtacagtgggcatctgtcatatggagggagagaaatcaggattaattcttgtctgtccagcatccccatgtactccatgggtttctttaagctccgagaagaatttcacaagaagatggacagtataa

SEQ ID NO: 66534 - DNA, 394 bp, Oryza sativa
  Clone ID: PAT_MRT4530_67476C.1
tttgggttttttttttttttggggtttttttttttttttttttttttttttgaaaattaatgatttgcaacactttgatttccaaaacttatttgttacaacccttgttgcttttgaaacctgccactcgtagcaagttttgctgttgcatgcttgccgctttgcaacgaaaaatttttttgggtaacccaaagattaggggaaaaataaaattttccccaaataaaaacaacaccgaacgcctccacactccactgttattcaccttatcggcccactcctgcaccaaattggcaggggctcgccgttcccctctcttggggccctccaccaacgggccgatgggcttgccttctctgatagccccaagaaccttgttcagctcctccccagg

SEQ ID NO: 66535 - DNA, 575 bp, Oryza sativa
  Clone ID: PAT_MRT4530_67477C.1
ttcattattgatactgcatctgataccaatatatatatatatatatatatatatatatatatatatatatatatatatatatatgtgtgtgtgtatatatatatatatatatatatatatatatatatatatatatatatatatatatatatatatatatatatatatatatatatatatatatatatatatatatatatatatatatatatatatatatatatatatatatatatatatatatatatatatatatatatatatatatatatatatatatatatatatatatctactactacattgtatagctgcctttatgctccacttgctttatatagctttttatttctccacctacatccatatttatttgggactatttccaactggaatatcgtcttgtaggcttgttgatcttgtaatattgtttgcatttgcctgtatatatatatatatatatatatatatatatatatatatatatatatatatatatatatatatatatatatatatatatatatatatatatatatagcaatcctttcagcaccaacacaatattcaaaact

SEQ ID NO: 66536 - DNA, 288 bp, Oryza sativa
  unsure (1)..(288): unsure at all n locations
  Clone ID: PAT_MRT4530_67478C.1
naaaaaaaaaaagaaaaaaaaaaaggggggggggggggacagatataaaagaaaacaagggttacgtaactctagcgtgcccaagtcttacgctctcctatcgtagcgacctcaaaggcagttcactggcgcggcgtttttacaccgttcatggctgcggagatccctggcgttccccactttaatcgcctgggggggcgatccccttttccccagttggcctcatcgcgatttggcccgctccggtcgtccctcccagcagtggcccagcctgccttgccaatgggt

SEQ ID NO: 66537 - DNA, 200 bp, Oryza sativa
  Clone ID: PAT_MRT4530_67479C.1
agcgacgcgtccctctgtaccttataggcgaaagattgtcacggagggctaaggcactctctgagaccggggtccttacctctgcgaccagttcactggggaagtctacaggagcaatgcctactgcgaaagcaacaacaaatcctgttctatcttcgaatgcctgaataccgatggttaggcgtcgttatattagtgga

SEQ ID NO: 66538 - DNA, 398 bp, Oryza sativa
  Clone ID: PAT_MRT4530_6747C.1
cttgttgttgggggggtttcttaataattgcaacgtgggcctgactctaagattctgttcgaaagtcttagcctgggtgatccccccgtgcatagggagaagggtgttcattgaccctatccctccctctattaatccatgacgtcccccgacttttgggggggggggctcacctcaactttctctgcattctgtcgaggcacccccgcagatgaatttcgttcttttcctcttcacctgctagcagacgcatgccgccgcttatgacgtcgtgggaggccttggccggcggtgctatctttcttctcccccgccaggttgccccccacgccgctcattttcgttcaagccagcccttggaactgcacacacgacagagcctcctaacgcgtcttcta

SEQ ID NO: 66539 - DNA, 332 bp, Oryza sativa
  Clone ID: PAT_MRT4530_67480C.1
aaggtacagcgtcgtcctctcaggaagatgtagcagcttgtggctgccgatggcagcaggctactgccagcagagtgaaagaccggatgctcctcctgagaggcgaccttgaagaagtcgcagcgtacctcgccgatctgtcggagctggagaacccccccttgacagcgaaacactggatgagagagtttcccaagcgatatccggcgcagcgctgggtggaggaggataaggctgacgacctcgactggggcctctttggcgacgccaatgaccgctgcggcgagctctgcgttttggtggtatcacataatatgtttacatatttataa

SEQ ID NO: 66540 - DNA, 1161 bp, Oryza sativa
  Clone ID: PAT_MRT4530_67481C.1
atggtgtcccccatccggttctccagttcgcaggagaatgtggtgtggttcgcctctggctccggctcagaggcagagcacggaaatccaagggaacacaccggcggcaaatcgaactctggtttttattttcttctgactccacgcaacagggactggtggtggtcgacgtcctggtcctgttggaggaaggcatgcagaaaatcgggcggcgaccgcctaaggatactcaccgagtatggtagaggcaatcatgggttggggttcccggccctggaaagaacacagcctaattacttcctccgtttcacaatgggaggggaggggaggggaggggcgctgatctccatctcatctggcgaggggagaggaggtgatcctgaggacacccttacgttcagtgataccatgattgctcttcaactgatgcgcacacaattcccaaagctagagaaggttgtgacagaaccattcattttgcagtcacagttgtatagtagtgtgaaggacaggacacaagttgatagagaccttgagtccttgaagaaagacaaagtattgcgtgtattcaaactcaatactgggcaggatgatcatgcaatcatgttcatggatgattatctgaaacagtttggtgaaacaccatgcatcgaaatcgacatcatggtgttacatggcatcatcccaccatttgctatgatggcgttggcagtcaagaggtcaaggggtaaggaccaagatggtactgaagtttttgggtggtttgagagatatgttattcatttgaagcttgaagttagcattgatcagcgcgatctgttttctctgttatcacttggaggtgatgtaactgacaaacatatcacattactgatgaatgctggtctcttaactcgccaattaattgatccaaacatgtactggttttctataccaagtattggtcccgtcttgaaaggcctaacccagggaaggaaggaaattctttcattattgaaccgcaagaagtacaaggagatgctactctcttcactggagaagacaagattacggttttcacctcttgatgtgcgctttcacattcgcgacttaattggatctgggcacataaaaacagttcaaacacccactggtttacttgttcgcatatcaaaagattga

SEQ ID NO: 66541 - DNA, 738 bp, Oryza sativa
  Clone ID: PAT_MRT4530_67482C.1
ctgcaggaagcgccacgctccactcttctccaccccaagagaattgaagccaagcatggagaatggaggggaagaagatgacagagcaagccgatgcaagaggattaccagagaatcagatgcaaccaagaatggtgcagcgaccaagctgcaagctttgaggctcgtcgaggacctctccctcccttccgtgcaggtggtggtgatgagcgccaacatgggctgttcgcactgccgacagcgggtcacaaaggttgtctccaagatgaacgggttgctagattacatggtggattttgggaagaaggaggtgacagtgagagggacgatggtgcacaccaagaagaagaggaagcaacacaagaagcagcatgaggaaaacaagaagggaatcgctgcaaactgggagaagaaatcgtcttctcagagcaatgacagcgccaggacgctggcctggttgctacgatgctacagttcatagcaactactactatctagtgcatactatagtctacatatagtgttacttatatactactaatatatatagatatatctagaagctatatagctgctcgattaattgtttatttttctctttagtttcttcttgcaatttctttctttctcatgttttattatttttctttttgattgaaaataacgtatgatggtaggaaatgtgtatattctgcccataactgtgcattataaaatcctctatttgcaaggtaacat

SEQ ID NO: 66542 - DNA, 672 bp, Oryza sativa
  Clone ID: PAT_MRT4530_67483C.1
atggccgccattcgcgcctccttcctccttgccgccgccgctctcctggccttgtggtgctctgaccatggcggcgtcgtcgcctccgatccgagccatctccaggatctgtgcgtcgcggacaaggcgtccacggtgcgcgtcaatggcgtcgcttgcaaggacggcgaggacgtcgccgccgaggacttcttcttctccggcctccacatggccggaaacaccaccaacaagcagggctccgccgtcacggcggtcaacgtcgcgcaggtccccggcctcaacaccctcggcatctccctcgctcgcatcgactatgcgctgcatggtctcaaccctcctcacacgcatccccgtgccaccgagatactcaccgtgcttgagggctcactctatgttgggttcgtgacatccaaccccgagaataagctgttcaccaaggttatcaataagggggatgtgtttgtttttcctaaggggcttgtccacttccagttcaactatgggacaactgatgcggttgctatcgtcgcactgagtagccaaaaccctggggtgatcactgtagccaatgcggtgtttggatcaaagccatccatcacagatgatatccttgcaaaggcctttcaagtagagaagacagtggtagaccaaatccaagctaagttctaa

SEQ ID NO: 66543 - DNA, 594 bp, Oryza sativa
  Clone ID: PAT_MRT4530_67484C.1
atggagaatggaggggaagaagatgacagagcaagccgatgcaagaggattaccagagaatcagatgcaaccaagaatggtgcagcgaccaagctgcaagctttgaggctcgtcgaggacctctccctcccttctgtagaatactggaattgcttggcatggatgtcgtacacccttagattacagctaagaagaaatatattactatctatggatgtcaatgattttggccacccgaccatagggtatgagaggccacatgctgttgcccaccatgcagaagatgataatgaagaattgatggtgcaggtggtggtgatgagcgccaacatgggctgttcgcactgccgacagcgggtcacaaaggttgtctccaagatgaacgggttgctagattacatggtggattttgggaagaaggaggtgacagtgagagggacgatggtgcacaccaagaagaagaggaagcaacacaagaagaagcatgaggaaaacaagaagggaatcgctgcaaactgggagaagaaatcgtcttctcagagcaatgacagcgccaggacgctggcctggtttctacgatgctacagttcatag

SEQ ID NO: 66544 - DNA, 447 bp, Oryza sativa
  Clone ID: PAT_MRT4530_67485C.1
atgccggccgttgccgcccatcccggccacgatttctccctccccgagcctataaaaactaaccccggagctctctctctctcatttttcctccttccccgagcttcccgtcgcctccctcgctctccctgcgccgctcccgcgcgctgccgatcgccggtgaccctcgagccggccgccacagccgctcccacctctgccgtgctgcaccactgccaccaaaagctgtgtcgcgtcatgccgcgccccggcatccacttcgtgctcccctttcaaccccgcagcaccatccccatcacgaggccaagctaccgccgcctgtaccgcctccagccgcacatcaccgccgtcctagcgccggcgtgccacgcggcaacctccaccggcttcgccgtctcaagggcaagcccggccaccgcctattttcccctctccaccaccgaataa

SEQ ID NO: 66545 - DNA, 518 bp, Oryza sativa
  Clone ID: PAT_MRT4530_67486C.1
ggggttaaccggtggtgtcccctgtcaatctcttaagttaattcgtgtccaatttgtaacaattcgtccgcccatctgtaaactcagaattcttcttctttctgtgatgattttctgagtgtgtatttttctcttgaatcttctcatctttggtagatttctgcagccttcttgttgtaattttaatagattttctaggtgttttcagagtccaggccaaagaaagatttggttcttgagatgttcagttggacaatttgttttgctaagcaaccatagtgaggaaattaaagcttataattacaatgtattatcaaaataaaaaaaaaaaaaaaaaaaaaaaaaaaaaaaaaaaaaaaaaacaaaaaaaaaaaaaaaaaaaaaaaaaaaaaaccccccccaaaaaaaaaaaaaaaaaaaaaaaaaaaaaaaaaaacaaaaaccggggggccccctttatggagaccacattttccccccgggggtcggcaagccaaatctttttttttgggcccccc

SEQ ID NO: 66546 - DNA, 113 bp, Oryza sativa
  Clone ID: PAT_MRT4530_67487C.1
attcggcacgaggagggccacgctgtagtacacgcggacggagcagcggtacgagctcgccgtgtccgaggagcccaataacccgctcatcctggccaacttcgcgcagttcc

SEQ ID NO: 66547 - DNA, 626 bp, Oryza sativa
  Clone ID: PAT_MRT4530_67488C.1
gggatcaatctagatgtgcattttacaagtttacagacatagatgatactctggtccaagtttacggaccgcccatgtattatactcttttgattaagtcatgttggttgtgggccgtgtcaatgtgacttctggagtaaaaaaggatcgcatgatgatcacccgaatgcatactgtgtctgatatcttctgtgttggctgcggatccattgttggatggaaatatgaagctgcacatgagaagagccagaggtacaaggaagggaaatttattttagagaggtataaggtgtctggtcctgatggcagccactactttgttacacatgatgctcatgttgggggaagcgacgtggacgacgtagccttgatgttgataacatgacatacgaggagttgcttgtccatggagataacccaagtgtttgttgctcttagttacccggggatttgcttccattcagagcaaccccagcgtactcgctgtcctagacgacctaatatcctatcatattccttcaggagatcaggtcattattggttgtaccagttgtaatccatgtaaccagtgatgcctgtagtagccccctaaaagctgtgtgtatcctggaatgaattcatgccct

SEQ ID NO: 66548 - DNA, 195 bp, Oryza sativa
  unsure (1)..(195): unsure at all n locations
  Clone ID: PAT_MRT4530_67489C.1
cgatccggtcaccacgcgtcggagacctgtcagtgatagcnacaggctaggaacgatctgcaaattaatacaaagtgggctgataatgtgctcggtgctgtgatggaagagatatgtggtctacttcagatggaatttgntggtcacactcctgctgatgtaaaagtgaatggatgtacaagaggagatttttgg

SEQ ID NO: 66549 - DNA, 273 bp, Oryza sativa
  unsure (1)..(273): unsure at all n locations
  Clone ID: PAT_MRT4530_6748C.1
gngcggtntnatgcngaggaagtaaatcacagaggacgcgcgcggatttgccgttaccaccttctgcctgcctgcgccggattcgccttcctcccgattccaattttccaatcctcctcctcacctctcctcctcttccctcccccaccaattctgccgcgaatcctcccccctcctcccgatctcgaaaaaatctcgtcgcgttggctggccccacgcgaccacccctgctcattcgatccgnaaattccccccctggcccctctcggcttt

SEQ ID NO: 66550 - DNA, 594 bp, Oryza sativa
  Clone ID: PAT_MRT4530_67490C.1
atggtggtctccaggggcagcagcagccgccgctctctcgagcgcagcagcagagccgcgccgtttcctccgagggaagcagcagccgccgctgccaacgccgctccctcgagcgcagccgccgctgctaccttcgcgctgccgttaccgcgcaccggaacacgtgcgacgctccttccgcacggagcaccctctgcgccaccatcgccgctccgtttctccgcgcgtaggaaccgccgtcgcagctccctttttccggaagcagcaaccgtcgccactgctgcttcctttctccgcgtgtatcatcagctgctccgtcgccaccactccctccctccacaagtttccgccgcgccgccttgtgaccgtgcgacgctcagtggcggcgccggcgggcggaggcggctgttcggtgcgttccggcggctgcgggtgcggtggctggcagcgttgtaccgcaggaggagtggcggcagcaggcgagcacggcgagctgagcggcgatggcgggcgagcgccacgacgacgagcgcagcggcggctgcggcgcttgagagcagagagagaaagaatgagagagggagaaaaggataa

SEQ ID NO: 66551 - DNA, 270 bp, Oryza sativa
  Clone ID: PAT_MRT4530_67491C.1
atggcgcgaagaggaggcgtgatcccggcgtccggtcccgacgcgacacgtgtcgcccgctctgcacctggaccacatctccgtgggccccacggtgtggagaacgaggccgtgggccgtgggcagcagcagccaatgggagccggatgcgtaggccagtcgcggcctgcagccgacggacaagtggacgcgggcggcaccaactctcctcaaggccactcactgatatctgggacccacagtgacccgggcccacgcgtcagtgattaa

SEQ ID NO: 66552 - DNA, 3738 bp, Oryza sativa
  Clone ID: PAT_MRT4530_67492C.1
atggcgtcgcggatcttcgagtacttcgtcgtgtgcgggatgggcccggagatccggacgctggacggcgtcaagggctaccacggcgtcgacgacatgtacatgccggccttcctcgaccagctcccgccctccagccacgcgctctacccgcccccgccgccgcagctccccacctgtgttttgccagctggagtaaggatatactcttctgggttggatgcaaatgatttctcaacctatccacgggagttatcccgatagttttgacagagggagatggctcaaaaatttatgttagttgtattgcatttcgggatccaatttgtgaagatattcttgaagcttaccaaattccggcaaactcttttgctgataaatgcatatggtgtgtctcccggtctccgacaacaaccgccatcatatggcatggcttccccccgtgcgcttgatgtatctgatgaaagccaacaacctgccgaggcatctggattgggtcgaaattgggtgcaaagcatgtttagtagggacagaagcttaagggctagctctttgccattgagaattgccttctttctgtggaggctcctccaaaagaatggcttcctcatgccgatatatccttccagccattggtgcagtgcctagatgttgataaattaatacaattatttactgcagttctgcttgaaagaaggatattgctgcgatcaaataagtatacactgttgactctagtttcagaagccatatgccatttaatatacccacttaggtggcagcatgtctacatcccaataattttctctagtggggttgattacatagatgctccaacaccctacatgatgggacttcattcaggtgttgacacatccacagtgacaatggatggtaatgcatgtttaaatccatatcttgatttattcacaagcaaacactgtcataatattcttctcatgaataagactaggttgataatgagcaaggttgtggtggtagacctcgaatacaatcggattacaacctcagaagaaatccctccaataccagagactgaacataatttcttgcgtggtgagatattaaaactactacagcccaatgtaatgggtattgattacatgaaaatcaaccttggcagtatgggtgaccattctctccggactggcacaaaatcatgggggcaggaacatgattttcagcttaggttgattttcttaagattctttgccttgattatgagcggttaccgtaacttcattgataatgcttcaccaagtggtttcaatactcaagcatttcttaaaaagcgttcactggcccaatactctgtgttgagtactcaccctcagataaaggaatcatcacgggttcctctgatgggcttatacgtttttgggaaaatgaaggaggaataagatgtgtcaagaaccttacgcttcactcggcatctgttctgtccattagtgccagtgatcattggctaggaataggtgctgctgacaactctatgtctcttttccatcgtccgcaagaaagattcgggggtttctcaaatacaggatcaaaagttgcaggatggcagctttacagaactccccagaaaactgctgctatggtgagatgtgtagcatcggacctggatcggaaaagaatctgcagcggtggtcgcaacggacttcttcggctttgggatgccaccacgagtatctaagttataccaggacccatgtccatgtaaagaaaatgtcaattgcactgttgtgtttgttgtatgttattaattttttagtggccctctgtataaataatataggaactctatataagttccatccatttttgtaatctcaaaagacctgcccagatacctcgagtggaattttgtgtatatttagaagaaaatttattgttctagcccaaaaaaaaaaaataactgatgaacagtttattgctgtaaaagaactgctcaagacggctataactcgtgccaactcccgcaatgacatgctaaccatcagagatgctcttgaagtttctgctgaaatgtataagaaggacccaaacaatgttcaagactatgtccagcgtcatctattgtccctgccagtatgggaggaacttcgtttctgggatggctattttgaatacttgatggagaattgttcgaacaagtcaacaaattatgtaacattagttactgcacagcttattgtcatggcaactcacatggctggactgggactatctgatattgattcttggaatatgattgagaaaatagctgagagaaacaacttgggttacaagcagctcatcaaacttagagcattgctcacacatctgcaacaactgcgcattggctattggggagtcgctacagggaaaggacaacaaccgccatcatatggcatggcttccccccgtgcgcttgatgtatctgatgaaagccaacaacctgccgaggcatctggattgggtcgaaattgggtgcaaagcatgtttagtagggacagaagcttaagggctagctctttcaaccgaactaatgaagtgaaggttggtgctactgcaggcaaaactgacctacctgctgcacaaaagaaaattcaaacaaatatgaggacccttagaggacatacaggtgctattactgctcttcattgtgtaacaaggaaagaggtttgggatcttgttggtgatcgtgaagatgctggctttttcatcagtggaagcacagattgcacgttacttgtagaacatggcatgccacaaccatgcaagtctgtggttcattccaagcaaaaacttggtttgccgagaaatgaagcaaagatcagcatgctgccaaggacaattcgagcaattagttcagatcgtggtaaaattgtttctggagctgatgatcaatctgtcatagtctgggataagcaaacttttaaacttttggaggaacttaagggtcatgatgcaccggttagttctgtccggatgctctcaggagaacgtgttcttactgcatctcatgatggcactgtcaagatgtgggatgtacgtaccgatacttgtgttgctactgtgggtcgttgtcaaagtgcagttctctgtatggaatatgatgactcaactggaattctagcagctgctggaagagatgtggtggcacatgtctgggatattcgttccagtaagcagatgttcaagctccaagggcacacaaagtggataagatcaatgaggatgacgggtgaaaccataataactgggagtgatgattggacggctagggtgtggtctcttacccgaggaacatgtgacgctgtgttagcatgccatgctggcccaatactctgtgttgagtactcaccctcagataaaggaatcatcacgggttcctctgatgggcttatacgtttttgggaaaatgaaggaggaataagatgtgtcaagaaccttacgcttcactcggcatctgttctgtccattagtgccagtgatcattggctaggaataggtgctgctgacaactctatgtctcttttccatcgtccgcaagaaagattcgggggtttctcaaatacaggatcaaaagttgcaggatggcagctttacagaactccccagaaaactgctgctatggtgagatgtgtagcatcggacctggatcggaaaagaatctgcagcggtggtcgcaacggacttcttcggctttgggatgccaccacgagtatctaa

SEQ ID NO: 66553 - DNA, 332 bp, Oryza sativa
  Clone ID: PAT_MRT4530_67493C.1
tgtacctctgcccctgcccatagctaacccgaaacccccaaatcgaatcccccgccttgcccgcagatctcccaaccccccccctcacctctggccgccgtccgtcgaagccgatccggcgcctagatatgatggtgaactggtctaggcaacacaactatctctggtcaaggatcttgggagggcttgaaataggggcgtaatggaggctggagatcaagggcagacacccatggggactaacatggggtatgaaccatggccttctggaattatgcatccttatcaggctgggaatcctgatatggtccatgcatggctgcctgctgact

SEQ ID NO: 66554 - DNA, 442 bp, Oryza sativa
  Clone ID: PAT_MRT4530_67494C.1
gccccctaccctgtctcaggttcttggacaatacttattaattgaagagtagagtccatcaccggtccctaaacttgtactgttgtgtcatcctggtccctaaactcgcaaatcgaccgtttagatcctcaaacttgttcgactgtgttatcccggtctctaaacttgcatatcactcgtttagttccttcaacctgttcagttgtgtcactctggtctctaaacttggatttgaatatcatctgggtcaaaatggatgagaccgggatgacacaactgaacaagttagagaacctaaacgagtgatctataagtttagggaccgggatgatacagtcgaataagtttgaggacctgaacggtaaacgagtgatctataagtttagggactgggatgatacagacctgaacggtcaatttgcgagtttagagaccaggataa

SEQ ID NO: 66555 - DNA, 727 bp, Oryza sativa
  unsure (1)..(727): unsure at all n locations
  Clone ID: PAT_MRT4530_67495C.1
atnagagtcctctccgcctgctgggttgggagtagggaccctcggccatttccgtacgagaggcggccggaggaaggcgcggggtggcggcgggggagcggaggaaggcgaaggcgaaggaggcggcggtgggcgccatggcgagggctctgttctacccgacgctgctgtaccacgtggtgcggagggtggttcaagatttcagcaagaagaatgcagaagcagaacttcccacagtcacaagccactcagcagcagcatctccagcagggaatgtggtatcggtaacagaagcagatttggagagctctgaagtaacatgcagctaatattcctgatattacagagcatcgccagcttggtcttctcacaagactaccccaaccaagccaatgacaaatatgctctcatgtttgattccatctctgaagtgactcctctctagctgagcatcaataatccaagactctgaggcatatgcatgtacctcaacaccggtttagccgaaatggtgtctcgcaggggaaggaattcagttgcgttgccatcgttctaaatgtatatagctgcccatattcatcctatttgttatgtatgtatgtgcctattatcaattcaagattgtttgttccttgcttcaagatttgctagggtaaatttcaaaaatcagggcatgagttttttttaagcaaaaaaaaaaaaaaaaaaaaaaaaaaaaatagaaaaa

SEQ ID NO: 66556 - DNA, 3830 bp, Oryza sativa
  Clone ID: PAT_MRT4530_67496C.1
atggcgcccgctgctgcccctgccagcgtctctgcaggcagcgccgaggctgatggagcccctcgcatggccaagttcctctgcagctttggaggaagcatcctgccccgcccacttgatgggcgtctgcgttacgtcggcggcgagaccaggattgttatgctgccgcgtgatgtatcctacactgacctagcagcgcggatgcgtgagctctatgaggatgctgatatcatcaagtaccagcaacctgatgaggatctagatgccctggtctcggttgttaacgatgacgatgtggtgaacatgatggaggagtacgacaagctcattgctgcaggagaggggtttactcggttgaggattttcttgttctcacagcacttagacgatgaggccgcagcagcggctgtccattacaatggagatgagagagagacagagaggaggtatgttgatgcacttaatagcctcggcgatgttagaacaccttcctctcctgtatccgtggagcagctctttggtattggaggcaacgagtctggaattcctgatattgctggtctgcggcatttgaatgttcctcgcccttcacatagccaaaggtatggggagatggattctccttggagccctgcatatatctctccagggcactatggagtgcatgatcctcgagattttcccatttcaccaaggtttcaagttggagcagaagattttgatgagaggattcctgatgactttgtaaggcattcgccaaaatatcggcattatgaggttcattcaccacagcatgtggataatttggtctggcttcctccaggcgctgtaattcagcaaaacgcaggcttcccaggtaacttgggtcgccctggcaatttcttggatggaagcagtatgtatgatcactgccgttcaccattccataagggtcaaggtgatcctcgatatgtggatcctcgttggaggcctattcaacattttgaccaaacgagcatgacaaatgagtattctggtcaccctactaattcatgtccagattgcaaccgccctggtgagcgttttgtattaaaccaagatgttagactggaaaatggtgtttatgtcaaagagcagactggtggtcaccctcctcccatgttttataacgaatcgcattctcatgatagagcttggcatgcacatgcaaaccaaagccatcagcgatatgaagatccaaggttgcatatgcctggtagtgctagagcgatggaaccatacattgttgacaacagctcagttacatctctcagtcgatctagccatgaaagtccgcactattttcatggcagtagtgagcatgtcagtgatacatatcataaccaacaagttggagtcggtgggccatatgtccagacaccaggatttgaagaatctacaggtcagcattatagccactcttcaacatatggtgcagaccccttttaccaaatgcagcagaatctgccaccacttcaatctttgaggagaagagcaaatagtcctgtccatacaggttcaccctatgaatcaccacacctgccaattccaaatggcaactttgtcagaaatacaggtgatgttagtccacggattccaggtatgcctgcatatgatagaatcccaaacccatggccctcacccaatggaagcataccatatcgagttgttggacatgatatccctgctgttgtagaaaaccggtcaaatccaaacagtggccagtatgttcagcctttatttgcccctgaatcagtccaaaatcaaccaggagctccactgatggagattcatcctgaaagagcatgcggtggatctgttctatcatcacaagttgatggcagagtagctgcattacccctcactgatcagttgtccaggatggatatcaatccattgaagaaacttgaaggtccagagcatgagaagtttacccgaaatgcgaatgaaacaacttctttgcatgctatgaatgatccaagtgccttgacccaccatatcggagttgtacctgaagttgatcccaaacagaggaagcctgtcgaatatgaaactgtcacaagtaaagtgcatgaaggaggggctacagcactgcaggaatgtggggatatttcagaggatagattgaatttccttccagagctggctgcatctgttaagaaggctgcattagaagattctgaagagaaagaaaaggctcaacaagatgctggtcccactcttttgccgacttgtgatgaggaaggcaatggaaagaagttggaggagacacctgctggtaatactggtacagatcaggattctgatgtgcatggaagtggtgagcagcagaaaagttctggaattgaggctacaaccgctgaagcagaagctttatcaaaaggactacagactataaaaaatgatgacttggaggaaattagggagctaggttcaggtacttatggtgcagtttaccatggtaaatggagaggatgtgatgttgctattaaaaggataaaggctagctgttttgctggcagaccatctgagagagagcgtttgattgctgatttctggaaagaagctcagattctaagttcacttcatcatccaaatgtggtttcattttatggtgtagttcgtgacggtcctgatggaagcttagcaactgttactgagtttatgatcaatggatctctcaaacagtttttgagaaaaaaagacaggacaattgatcgccgtaaaagagttatattagccatggatgctgcatttggcatggaatatttgcatgggaagaatatagttcattttgatctaaagtctcttgcttcaaatggttgttacctgactgtcatcccacctccattttctgctcagattggtgatcttggactatcaaaggtgaagcagcacactttggtgtctggcggtgttagaggaaccttaccatggatggcaccagagcttctgagtgggaaaagcaatatggtgtcagagaagattgatgtatactcgtttggtattgtgatgtgggagctgcttactggcgaagaaccatattctgatatgcgtgctgctgctattattgggggcatcgtgaacaattccctacgtcctcagatcccctcatggtgtgatcctgaatggaaatcactgatggaaaactgttgggccagtgaaccagcagatagaccatccttcacagaaatatctcaaaggttgaggaagatggctgcagcaatgaatgtgaagtaaaggttcacaagccatgcaaagtttcctacgtccagttcccttgatacaggaggaaggcaaactcagaacaagattctatggagtaactatgatatggatgtctttgcagcattccagtttatcctagttcaattgttaatctaatgagttacacggaggaaaaaaatttcatcacggaagttccagagcaagtttaatggattttcgatcctggaatcatcagctgtcgtttgccttcctcggggaacagtatgctatataccttatcctctggacgggaactatagaaatagaaatgtaatgtaaataagcttcggcttgcttcttccggctggcacatgttagatgtgcacagtagtagacactgttcaaagttggacacagttatctttttgcacaaaattgtgtcctaaggaaagaggggacaactcgaacagagatatccttattcagattgtaaatagctcacgaataagatttctatgtcacttgcaacatggttcttccctgtatagatcatcagtggcactattcctcctgggtccatacaataaaaaatacgaacaaatcaa

SEQ ID NO: 66557 - DNA, 1055 bp, Oryza sativa
  Clone ID: PAT_MRT4530_67497C.1
tactaaaccaagcagaacacgcggagatcgaaaagaccaatcaagcacgaggccaaccgccattcgcacgggccgatttgtgggccgtacgggccgcctcgttcggcccaatataaaaggcaaaagtgatgacaaaattcctccggtcttctctgctcgcaccgctccgcacgccaacgcagttaaatctgaaaaggatttgcaggttgaaatggcagctattacgtataatgcaggggagggagaagggagaatcggccatggccgtagtagaggcggccggaggaaggcgcggggtggcggcgggggagcggaggaaggcgaaggcgaaggaggcggcggtgggcgccatggcgagggctctgttctacccgacgctgctgtacaacgtggtgcggagcaaggtccaggccgagttccggtggtgggacgaggtcgatcagttcattttgcttggagctgttccattccgtagggatgttcctcggttgcagaagcttggggtgtatggtgtcataaccctgaatgaaccatttgagactttgtctcgtgggattgatcaccttgttattcctacaagagattatatgtttgctccctcacttgtggatattagtcgagctgttgatttcatacatagaaatgcatcttgtgggaggatgacatacatccattgcaaagctggaaggggcaggagtacaactattgtcttgtgttatctggtgaaatacaagaatatgacgccttctacagcttttgagcatgtgcggtctaaaagggctcgagtgttgctgactcgttctcaatggagggtggttcaagatttcagcaagaagaatgcagaagcagaacttcccacagtcacaagccactcagcagcagcatctccagcagggaatgtggtatcggtaacagaagcagatttggagagctctgaagtaacagcagctaatattcctgatattacagagcatgccagcttgtcttctcacaagactaccccaaccaagccaatgacaaatatgctctcatgtttgattccatctctgaagtga

SEQ ID NO: 66558 - DNA, 408 bp, Oryza sativa
  Clone ID: PAT_MRT4530_67498C.1
gtcgaccacgcgtccgggatgttcttgttatggtggatcatgaagattaccctgctctattagagtatctgcaaggaaaacaagatgaccagcaattccgcaagatgctagcatggaaagctttccaacatgtcgcttcttatgattcagctgtctcagaatggttgtggaagcaatcgaacaaaggagatgtattccccccgaacttcaccgtgcccctgtccctgaaatctacacttcgttatggtgaaaatcctcatcaaaaagctgccttctatggggacaagagtctttctgtagttaatgctggtggtattgcaacagcaattcagcaccatgggaaggaaatgtcttacaacaactacttagatgcggatgctgcatggaactgtgtatcaaagtttgaga

SEQ ID NO: 66559 - DNA, 344 bp, Oryza sativa
  Clone ID: PAT_MRT4530_67499C.1
ttggtttttttaggtgagggggttctctcatttgctatcactttgttctcagcagtcaataaaggagttcacctttaagcagacaaggccaaaggatatacaaacgctacacaaccctccctgttaaactgctgcatcttttaaatgacgccgactttaagttagatggttgctacttgctagaaacaaccagaactatacattaaagagcaaacaagactggatctactttgatgttatctctgaacaatgaactgggataatccactaacattgtaacacatgaactaaactaatgtcctgtaaggtatatgggtgtccattgctaatgaaaccatgctgaa

SEQ ID NO: 66560 - DNA, 149 bp, Oryza sativa
  Clone ID: PAT_MRT4530_6749C.1
gggcatcggggtataagccaatgatcaaagatgttaaagttgaaattgcagcgatgtcagccgatgattggaggatggcttgtcatggttcgattcaagttcctccttacaaacttgtttatgggcatgaggctgttttgccatgggag

SEQ ID NO: 66561 - DNA, 2871 bp, Oryza sativa
  Clone ID: PAT_MRT4530_674C.1
atggcagcctcgacgggggtggtgagttccctcctctcgaagctggcgaccctggcggagcagaagtacggcgacgtcaggaggatccgccgcgagatcaccttcctgacggacgagctcagcagcatgaacgcgctgctcctgaagctggccgacatggaggagctggactcgcagctgaaggagtggaggaacaaggtgcgcgagctcgcgtacgacgtcgaggactgcatcgatgccttcgcgcaccaccaccgccttagccgcggcgacgccgacccgggcggcctcatccggagggcagcacgcaacatgaagaagctgcgggcgagctaccgagcggccgaccagatccacgagctcaaggcccggatcatggaggtcagcgatcgccggctgaggtacaagctcgatgaggccgcgtctgctgctcctgctccggctctggccattgatcctcggttgccagcgctcttcgctgagtccaagggtctcgtgggcatcgagggccccaggagtacactagtcagctggctgatggatggggaaggtcagctcaaggttatctccattgttgggttcggagggttggggaagacgaccctcgccaaggaggtcaaccatgctgtgggagcacacttccagctcaaggcttttgtgtcagtctcccgtaatcttaaccccaagaagctaatctgcgatgtgctctctcagatcatggaccaaaaagattatggcaagaaagattatggcaagttggaggtggagcaattgattccaattctgagggaacacctggcagataagaggtacctcataattattgatgatatttggagaatacaagcatgggatctagtgaagtcagccttgcatgacaacagctgccaaagtagaataatcacaacgacacgcattagtacggttgccgagtcatgttgctcgaccttgaaagatcgtatctactacattgagcctctaaatgaagtcgagtcccgagagctattcttcaagaggatattcgccacagagcacggttgtcctcctcacctagaagaagtttccaacgaaattctgaagaaatgtgggggcctgccattggctatacttagtatagcaagttcactggcaaacaagcctgacataaaggaacaatgggaaatggtgaagaaatccattggttttgctcttgagggaacgcctactttagaaggaatgaataagatattactttttagttattacgatcttcctactcatctcaaggcttgtttgctatacctcagtatatttccggaggaccaagtgattgagagtgacaaactagtatggagatggatgtctgaaggactaattgttggagaaatgggtaaaaatttggagcaagcaggacagatttatttcaatgagctcatcaacagaagcatgattgaatcagtgggtgttcggtatgatggcaaggtactagcttgtagggtgcatgatatggtgcttgacatgatcatatctttgtccgctcaagagaatttcgttaccatattacatgggcatgaggataaatttgcaggagaaaagattcgccggttgtcccttcgatgcaatcgcccagatgttgaagtaacgcaggtgacaagcaaaaaatttgcccaggctcgttctatcagcctctttggttacaaggagatgcttgatctacagggcttccaagctttgcgggtgctggatttaggaaaaaatgttttgttcaagcaagtgaaaaatataggcaagtgttaccaattgaagtatctggatctctccgatacagatatagtggagcttcctgaagagattggaaatgtacaatccctagaaactctggacttaagaaattgcagacgactaacattgccatcaacaatatctgggctcagaaaactagtgcgtctccttgtggattatactgcggcattgccagaggagatttctggtcttgtagctctacaagtgctatcttgtgcctcctataactccgtgaagttcatgcaagcgctgggccagctgacagagctgcgatcacttgcattcaagtgctggaatcctgactggtattttgacgcgggaatgtacaaggaggtatctgtcgcatctctccgtgagctggggaaacacaagcttcagtatctagatatctgtgacgatgatgctatcccagatgcactaatgtgttcgtcgtcagagtcagactgcccgtttccgcacctgcagaagcttgttctgtccaaccacaacatccaaaggattccaaggtggattggctcgcttgtcaacctctgtcacctggaaattgttgtcaagaccacacggcaaaacgatctcggcacactagggaacctgccatgtctgctctacctcaagatctgcaggttgtatgagcccgtcgaaagccagcagctcattgtaccgaaccgaggattccgttgcctcaaggagctgtgcttccagtgttggtgcccgttggggctggagtttgccccgggagctatgccgtgggtgcaaaccttccgcctgtggttcatgccatgctggaagagctgcgatcatggtgtcagcgtcggcttaggcatcgagcatctgctagaactcaagcttgtggatgttaagacgggctatggatgtggtaagagggaggtgaagtcatttgaggcagcaatcacagctgtggtcgccaaccatcccagacgccctgcgctcgtattgcgtagatcaggtgagagaagtgcagtcaggaaggagaattggacagcagtggagacaaacatgaacaagtccctgtttgattcatcaacagtcagacaaagattgcagaagcagtccagatttcaaacttga

SEQ ID NO: 66562 - DNA, 207 bp, Oryza sativa
  Clone ID: PAT_MRT4530_67500C.1
atgtcgtcgtcggggggattcaagaacggcgggaagcagaagcctctcaaggcgcccaaggccgccaagaaggattacgacgagaccgatctggaaaacatgaagaagaagaaagaggaggagaaggccctgaaggagctgagggccaaggcggcgcagaagggcgcacttggaggcgccggtctcaagaaaagtggcaaaaaatga

SEQ ID NO: 66563 - DNA, 589 bp, Oryza sativa
  Clone ID: PAT_MRT4530_67501C.1
gcttcggggagaacttctcccccgcgcgggccaaggggtaccagttcgggatggtggcggtgttcgacagcgtggaggggctcgacgcggtggacggggacgggaaggtggaggcggccaaggccatagtcaggccgctgctcgacgacgtgctcgagctggaattcgtcgtcggacctgccgccgcggaggctccggcgccggccaacctctgagaggtttgcctttggttcgaaaactctagttgccttgtttgatcggttgagaataatacaatccttgtgattgggtgtgctgtggcctgtggttagcaatggcaattgattttgaaatgaataagaattgtacctgactacctgaactaggaattaggatggccgctcttgcttggacgtctaccgaacaagagcttgctgtcttcagtgttcatcttttcttctcgctctgcaactgcaaatttgtatgtcagataattttaagactcgcaactcggtgctatgcctctcatgcctcccttcccccattaagcatggaggaaccactgacatgccactgcacaatcttttaggatttgatattcttttgactt

SEQ ID NO: 66564 - DNA, 2054 bp, Oryza sativa
  Clone ID: PAT_MRT4530_67502C.1
atggagggcggtggcacgatcacgccccgtcgcgccagcaccgcgagccctcaacgaaccaaggactggatcgagccaccggactagactaaggacctgcgctcgccgccccatccctctcccccgtcctcctcaaagttggtggcggtcgtcccatacctgtgccgcaatcgcaatcgcgaacacccccacttcatcgaggcgcgccttgcctcaccggacggcctctacctgcgagcggtgtatccttctcattttcttgtgcagcctccagtatttctctttctccacttttcgaaacccacccatgatgcgggaggcgttgacacagatgactataactgccgctacgtgctgccagggaagggtctggcggcaatgtactcatggttgtgcggagagtgcggtctcctctcctccctccctgctcgcgctctcagtctcccccatccccaatcaccttactagcttagtagctttgtgaatcaatcaaggccagggtttgatcagatcatccttccctcccatttgcccatgccttggctttgatccgaccaggcatggagggcggtggcacgaggacgcgccgtcgcgccgccaccgcgagccctggacgcaacaaggtctgggtcgagccaccgggcaagacccatcacctgcgctcgccgcccccgcccccttccccgtcctcctcaaagagggtggccgtcgtctactacctctgccgcaatcgccatctcgaacacccccacttcatcgaggtgccactcgcctcaccggacggcctctacctgcgagatgtgattaaccgcctcaacgtgctgcgagggaagggcatggcggcaatgtactcatggtcgtgcaagaggagctacaagaatggcttcgtgtggcacgacctatccgaggacgatctcgtcctgcccgcgcaagggaacgagtacatcctcaagggctccgagctcctcgaccgatcaccgccagatcgacagcagaatggcgttggcgagcccaaggttgagaccctcaagcaccctccagaagagtcccctcattcgcgaggatcgcaagaagggtgctcctcctcatcatctccatctgctgctacaaagggcggcagcccatcagccgcttcaccacaggcacagcagcaagcaaaatctctttgccccaatgggtgtaaagttcaagcctgccaatttgctcatgcagctgatcacttgtggctctatttctgttaaggatcaccggagctttgggctcatcccaacatacaggcctcggtttacacaagttgagtttccttctccaatgttctctactcctttggcattgcgacacctcgacaacattccttgtaatgctagaacaattggaatgagaattccagaatcagaatatttcagtggaagcttggtcgagacaaagaagcaggatgagtcagggaaaggaggaacaccaacacttaaacgctcatcatcttgcagtgaggacagagtctgtagagtatcggattccaacagggacatggaaagtatggctgaatcaggcagcttcagatgtctgccacagacaatcaaaatgatatcatttacaggtggggatcctgagccatccatccatccattgcttggtgtgtgctgcatcctagccacattgtttgcaactcctgcctgcttgcctgcatctgcatatgcatcaatcagagagattcagagaggggaggggtccaagttcaggttatctatctgtaaggctgttgcgtgcatgttactgcatgatagtaaagtgctggcatttgctactactcctactgtagtttggagggaagagatggtcagagtgtctcgcttccagagatctttagtgactcaatgttgtgaggctggctacacagacgcgttggcccattatatttgggcccaggctgtaattccctgggaattgggcccaattccagcgtaggcttcaaagtgcaattttattcattttatgacgtgtgtgatattcagcaatcaatttattacaccttcacgaagaaaaaaacctcgtgc

SEQ ID NO: 66565 - DNA, 1476 bp, Oryza sativa
  Clone ID: PAT_MRT4530_67503C.1
atggagggcggtggcacgaggacgcgccgtcgcgccgccaccgcgagccctggacgcaacaaggtctgggtcgagccaccgggcaagactcatcacctgcgctcgccgcccccgcccccttccccgtcctcctcaaagagggtggccgtcgtctactacctctgccgcaatcgccatctcgaacacccccacttcatcgaggtgccactcgcctcaccggacggcctctacctgcgagtttttttctttttccccttttcgatccctaccaatgatgcgggaggcgttgatgcagatgtgattaaccgcctcaacgtgctgcgagggaagggcatggcggcaatgtactcatggtcgtgcaagagcttcagcaggagctacaagaatggcttcgtgtggcacgacctatccgaggacgatctcgtcctgcccgcgcaagggaacgagtacatcctcaagggctccgagctcctcgaccgatcaccgccagatcgacagcagaatggcgttggcgagcccaaggttgagaccctcaagcaccctccagaagagtcccctcattcgcgaggatcgcaagaagggtgctcctcctcatcatctccatctgctgttacaaaagaggcctccccaccaccccctacaccacagccacagcagcaggcacaatcggccacgttgctgccttcatcgtcagcttctactaaccgtgaggatgaccaatgccggactccgcgctctggctcatctggaaacatgtcccctgaaccggcaggaagagttgctcctccattatcagaggcaagctctccaggacctttagagtacagagtttgcaagcccatcggagcccaggacgcatccacacagaccgacgacagtgagagggatgctcctgagaggaattctcgtatggcaggagtatgtacagagaatagtacatcagattctgagattcaggaatgtcatccaaggagcacacaaccatctccaaagggtcctggagttgttcgagaatcaccaccggtgtgctcctctgacgcttctccaggtggtagagttgagaccttggagtccctgataagggccgaagccagtaggaggagtagctttagggcgctagaggaggaacatctctttgccccaatgggtgtaaagttcaagcctgccaatttgctcatgcagctgatcacttgtggctctatttctgttaaggatcaccggagctttgggctcatcccaacatacaggcctcggtttacacaagttgagtttccttctccaatgttctctactcctttggcattgcgacacctcgacaacattccttgtaatgctagaacaattggaatgagaattccagaatcagaatatttcagtggaagcttggtcgagacaaagaagcaggatgagtcagggaaaggaggaacaccaacacttaaacgctcatcatcttgcagtgaggacagcataagttaa

SEQ ID NO: 66566 - DNA, 203 bp, Oryza sativa
  unsure (1)..(203): unsure at all n locations
  Clone ID: PAT_MRT4530_67504C.1
gaggcagagctcgtcggcggcgaggagggtggtggtggtggtgtgcgcggcgatggtggtggcggcggcggcgncgcagaagtacaatncggtgtacaacttcggggactcgatcacggacaccggnaaccttntncaccaattggcaggccgtcgnanatcaactntcanccaancttacctanggcgngaactncttttgg

SEQ ID NO: 66567 - DNA, 390 bp, Oryza sativa
  Clone ID: PAT_MRT4530_67505C.1
atggtcggccgcggatttggagagcacctacgcgtagaggacatcgagacgaacccgatggtactcaccacgacgacaaccgatgcacgacaacggccggcgacgaggaagaaagcggcggcggctcgggttggacggcggcggcgagctccggtggtcggcggcgaagggggacggacggccgaggttcctcacctccgtgcgcacctaacggcggcgacggcaagcggcggcgacgacggaggcggcggcgcgacgtggccgaagacggccggcggcgacggcgagcttggcgcgcgtggcggcgacgctacgaggcacaggagaggacgagagagggggcaaactgaagaggacgacgaggggaagctatatataagcttggattga

SEQ ID NO: 66568 - DNA, 138 bp, Oryza sativa
  Clone ID: PAT_MRT4530_67506C.1
atggaggggctcgagggaggcccctactccatcaccagcttcaccgatgatgccggcaacggcccctcctcctcctcctcccctgctcttgtccccatttcatctattcttggagaagcttctcgaagatgtctttga

SEQ ID NO: 66569 - DNA, 781 bp, Oryza sativa
  Clone ID: PAT_MRT4530_67507C.1
ttatgctagggaccctataggagaaacctctcggttgttctcgtttttagcctgcatcttgcatatgcgtctggagaaccagtatccgtagagaagtgttcccctcgggtggaacgagtaggactttaaaatttctaaatcaagcgccggctgtttttggattcgccaccctctctcccccccaactgtccagccggcgatgccggcgaagaggactagggcggcgccggagtggaggtcgacaaccgctacggccctctctccaacacgtgcccaatcgaccttcatggcgccgttcaagttctgcagcgatggccgaccgttgatgcgggacaacggatctatcggagtgctcgccgatagtgacccacgtgagcttcggtcagctctccgccgccttctcctctggcctgacgcccccagtcgctccgtctctatatatatatctatccacgtcggcatcgggaccctcggctcccccgcacgcgcgccctttttcctcaccgtcagtggcagatgccgctgtggagaagagcgttgggactcctgctgtgtgacacgagggcaacgagcacgcggtgttccacttcggccgacgaggacccacttcgcgcgccgaggagagtgccgccgcggtcgtcgaactccacttcggccacccccaacgccggcgtctgatagctggaggagagagatgagtgaaggggagagaattacaagtgggaccacaccgttttttcatatgtgttgccacattggcatgccacgtgagcaaaagtga

SEQ ID NO: 66570 - DNA, 477 bp, Oryza sativa
  Clone ID: PAT_MRT4530_67508C.1
atggacgaagcggaggcggccttcttcgcgcggcgcgggcggcggtgctgctgcttcccctggccctcgtcggcgtcgtcccaccagcgggtcggcggggcggaggaggagagctggtggcagcgcgccgtggacgcggtgctcaaggtgcgggagtggtcggagctggtggccgggccgcggtggaagaccttcatccggcggttcggccgcggcggcggcggcggcggcggcggcggcgggccgcggccgcacaactacggccggaagctcaactacgacgcgctcagctacgcgctcaacttcgacgagggccacggcgccagccccgagggcgactacaccggctaccgcgacttctccgcccgcttcgccgccccgccggcctccgccaagtcgtccatggacctcggcggccgcgacgccccgccgctcttcaacccgccgccgccccacgacggcgccggccgggcttga

SEQ ID NO: 66571 - DNA, 160 bp, Oryza sativa
  unsure (1)..(160): unsure at all n locations
  Clone ID: PAT_MRT4530_67509C.1
caacaaggnggnctcagtgngcttctcgccgatcgtgtccgtgactcgcggcgacggcgaccatngcggagtaccaccaccaagaccaggtcgtacacccgggagagaccgctctgtgtcagccaggaatggctaccgtgtccgtccgcgcttgcaggca

SEQ ID NO: 66572 - DNA, 2364 bp, Oryza sativa
  Clone ID: PAT_MRT4530_6750C.1
atgaagcccggaaagaaccgcgtcgcgccgcctcctcggtcgaccccgacctgcgccgtcgcctccctcggcttcgcaagggtgagagctaccccggccacccgttcccttgcgccgaatctcgccggaatcgctctccccgcgctcgccttctctctccacctccggctgccgctccagcagccccgcgccgtcgctgtggtcgtcgccttcggtcgccgctgccgccgttgggttcgcgaggaggagaagaagaccggcctccacttccccgtcgtcgaagaccccgggaagcccgtcgtcaccgtgaagccgatctgttccatcttcagccgcgccgttcgtcgccgtccatcgccgccttcgttcaccgtcgccaccctcgggatcgcaggagcgagcggcgacggtcgggttgacgacgacggcggtcttccggcgatcctcggcgatgacggaggggtgaacgaggtcggcgacggcttggcaatcccgatggcgaccttcccgagcgacgacaatgaccggagcgacggcggtgctcggctgaactcgcgacggcgacggtggcgcacgggtgaacgcggagacggcgctacaagcggcgatgagctaaggcgagggtggcggcgagtagaggagggcggcggcggcgcggctcagctagggttcgggcgcgaggaggacgacgagtccgacagtttcctctgttgcacccacaactcagccgacgacgccagcgtcgactcctttgcctgccacactagctatgacgccaggacagccgcagcagccgattcagcagacaccaccaatccagccggttgtacaaccagctcagcaaacaccaccaaggcagcagcctctgcaaccgattcagcagacgccaccaaggcagcagcctcaccagctgatccaacaggctccgttgagacagcagatcgttcagctgattcagcacccgggccttatcctgagtggtttgaaagagtccctctccccaatcggtttaaagttccagatttctccaagttttcgggacaagagggcatgtcgacttatgagcacatcagccgattccttgctcagtgtgctggtcaagcagccgatagggtccgtgcaaagggttttcaagtaaattcggctaaaattatcaacaagtatcaaaggaagtatgataagcagcaggagatgcattatgaagaatacgacgatggttttgatcctcattggggttgtgagttctttagattatgctggaatgaagggatgaggttgccatccatcgaaaactgccctaggtgcagtgatgtcgtcgagagctcgagccggtcatatagtagaggtaatcggctaagacaggcaagacttcccgttcatcaaagattgggtccgatgaatcaagatcgtggccaagaggatgaggaggttgaagaggaaatcaaccatcgtctgaggaaaccaaagccaagacaggagtggcgtgttaagaatcaagttcccgtagccgatgatgctgcagccgatgaggcgaagaggttggcaaaaggaaagagtgttgtagcggcaccaattaacatggtctttacattgccagctgaattcgggatcgatcaggccgatgtcgatgaagtggaagaggaatcggctaagttggttccgtcaccagagcaggcagtattcgataaacccgaggggacagagaatcggcatcttaaaccattgtatataaacggctacgtcaatgggaagccgatgtctaagatgatggtcgatggtggggccgcggtgaatttgatgccttatgctacattcaggaagcttggtaggaacgccgaggatctcatcaagacaaatatggtgctcaaagactttggtggtaatccatcggaaaccataggtgttctaaatgtggagttgacagtcggcagcaagactattcctaccacgttttttgtcatcgataggaaggggcatcccgtgaaccggtccttaactgccatgggtgcgaccagcaaaaccatgcacccacagcccaccatgcggggcctgcatgtcagcggcgcacgggtggccggtctaccgtgcaccgggaccacgcgggtggtccaccaccgatccacgggaccgacggcccagatcggcccagagccaatcggacggtgcggcggcggcctggctcggctcagctcagcacaaagccggccggccggccatggcaagggcggcggtgcgcacgcgtgtgttgccggcgacggcaaccaacggcgcaaaggcggcggcgcacgaccggggcggcggctcgacccggcgcggctaggaaggagagggaggggaatagaggaggagggatgcctcatctag

SEQ ID NO: 66573 - DNA, 480 bp, Oryza sativa
  unsure (1)..(480): unsure at all n locations
  Clone ID: PAT_MRT4530_67510C.1
tccccgntcgnccccgcgtccggctggttcctgggcctcttgtggctggggctgcgcctggcgttcggcctgccctgcttgccgtgcgtcccgctggtgcgcaggtggcgggtgcggaagccgctggctccgcctgcgggcgtggctgctcctgctcggcttcctctcccgcttgtggcgcctgcggctccattgccactggtgggggggggtcccctgcgtcctctcgctcccccggtcgcctcctcgggcgcgcgggttcctccgaccctcctcctgtggttgtcctggaggaggtgacccctgtccggctctcccgtctctggcgctgcggtttcttgcgacccttctcctggncatgacgacgtggggggggcccctgctgcacctcgtcgccacctgcggcggtaggcgggggaaccttgttgtctctaaacctgctatggccgggcacctccggtgccgacgcagggttggggc

SEQ ID NO: 66574 - DNA, 786 bp, Oryza sativa
  Clone ID: PAT_MRT4530_67511C.1
atggccggcagcggcgacgaggagtggatctacgtcgacgaggagtgggtctacgtcgacgatttcagcaaggaggcggcggcgccggtggaggaggcctcgccggtggattcttccggtgacaaggacgacgacgacggcaagtcggggagcacagcggcggatgtcgccgctgtagacggcgacctccccggcggcgcgacggcaagcgaagcggtgggcgccgatgacgactcctccaccggcgtcacgtcggacgaggaggaggtggtaagctccgacgacgacgcgtacagcgacacggatttggacaaatacctggagtactacgaggacgacattgccgatgggctggacagcctcaagatcggtggcgacgcgataccacccatcttcctcgacgacccgccgccaccgatcgacggcgacgccgccgcggcggaggagaaagaaccagagcactcgccgccgatcaactccgccgcggtggaggaagaaccagcgtacgccaccaagccccaacagctatgcttcgacggccaattcggatacctgaccggcggtgggtacagttacggctacggcggcggaggagcatactacggcgacctatacggaggagtataccgttatcccgctacctattttccatcttactacttgcccagacagcccggcgccggcgtgtaccagccgccgacttacatgtcctacccggacggcttcgatccgtacgccggcgatattttcgcgccgccgccgccgccaccaccaccggagaattag

SEQ ID NO: 66575 - DNA, 340 bp, Oryza sativa
  Clone ID: PAT_MRT4530_67512C.1
cgatcgtggttacaccacgacccggccgctcgccgtccgcgtcgccgtccggctcgcgccctgcctggaggtccccgagctccccgcgccggtgctcgccgtgcatgtgacgcgcttcgtcggttgcgggggcgggggcggcgtctcggtgggcgtgtgcgtgcaccacgccgtggcatacggccagagcttctggcggttcatggacgcgtggtccgcggcggcgcgcggccggccatctccccccgcgccggcgtttgaccggtcggcgatcgtgcaccccatggccgctgacatggcgcggcgcatcctccgtaagaaggcaccggagctaccactg

SEQ ID NO: 66576 - DNA, 545 bp, Oryza sativa
  Clone ID: PAT_MRT4530_67513C.1
tcggggaggatccccatcatttaccatttaatggaggtggacttgggggcgcgcatgtaccgggaacacgatctcgggcatgtccggagcggtcaagccgactctggacagtcgagaggcgctgggccaatcatcatcgcgatgggatggggcatacctgccgcaccgccgcacgccgcctgacacacggccaaagcgcgcctggctttgccgccgtctcatctatcatttgaccggtcacgcaccggtcatgagttagtcaggtgcgcagcacgccgcatttaatgtggcatggtgcgtctgctctacccgcactaaatgtggttaggtgggtgctaaggggtgtccacctaacatcacttgcatggcggccatgtggtgaccgccccgaggagtctgacccctcgggctagggaggggcggctgcaacccatccacgggcccgatcccctcgggggaagcgccacgtggacataggggggcggcttctcccctttaagcatggtaccccggacccatatcatcgacacatatatataaattac

SEQ ID NO: 66577 - DNA, 1750 bp, Oryza sativa
  Clone ID: PAT_MRT4530_67514C.1
cgggctgcaggcagcattcaaatacatgctgatcttcttaataatctaataggtgcaccagtcccgggctgcggccatcggcccgggggccggatactgaacagattatcctcagacctatatgccattgatgattctcttccgttgatcctcaacatattcgtggcaaacttcttcagcttgcttggtactctggttgtattatcttattcacaggtttcattcttactgatcttagttcctctctggcttatctacagaaaagtacagttctattataggtctacatcacgtgaagtacgacgacttgacagtgttgctcgttcgccaatatattcatcttttacagagacacttgatggttcatcaacaataagagcatttcaaaaggaaggattcttcttagaaagattcatccaacatgtgacactataccagaaaacatcctattgtgaactggttgctggtctgtggctctcattgagactccagttgttggcaggttttataattctgttcatcgccattatggccattgttggcttcaatagtaaatctgttattaattttggtacacctggactggtcggcctggcgctgtcatatgccgcacccgttgtaccattgttgaatggcttcttaaccacctttacagagacagaaaaggaaatgatttctgttgagagagttgttgagtatgttggcatacctcaagaagaacttcatggatcggaatcccctcacagtggctggccaacagaggggaacattgagtttgagcgtgttactctaaggtacaaggaggatttacccccggctttgaatgatgtttcgttctttatttcatcaggcatgcaggttggaataatagggaggactggagcaggcaaatccagtatactgaatgcacttcttcgtttagctccaatctgtaatggccgcatcttagtagatgactttgatgtggccaaacttgctgtccgagatcttcgtggacattttgcagtagtcccacagagcccgtttttgttcgatgggtctttgagggaaaatctagacccttttaatagaacaacagatctcaggatatgggaagctcttgataagtgtcatatgaagacagagattgaatctataggtggacttgacatccatgtgaaagaaagtggtgcgtctttttcagtaggtcagagacaactcctgtgtcttgcccgtgctatccttaaatcatccaagatactctgccttgatgaatgcacagctaatgttgacaatcagacagcctccttgttgcaaaatactatttctgctgaatgcaaaggcatgacagttctgacgatagcacatcgaatttcaacagtgatgaagatggacagtattctagttcttgatcaaggaaaattggttgaagaaggaaacccagaggttcttgtggatgacaaattctcaagattctcacgatttgccaaggcatctaacatgtgattctaggttaacatactctgatggtctagtttttctgctaactccccttgagcagatgtactagacacgttagatcagctgcaattttacatcgatagctggtagggaacataaactctgatcatctagcttatcattagtcattgaaaaagagattgaagaaaatgtttctttcccttgaaaaattaaatttgggctaatgttcgatccggatgattgcaaaattgattgatcactgaaagggaaaaaaaaaaaaaaaaaaaaa

SEQ ID NO: 66578 - DNA, 161 bp, Oryza sativa
  Clone ID: PAT_MRT4530_67515C.1
atgtcgagaaccagacatatttatgaatgggccaagaactcagaattaacacgacaaaatgggccaaaattcacaagtctatggaggagaataacagaggaggccacctgccgattttgggccagggacgctccagatcctctcctgatggcggttgcggg

SEQ ID NO: 66579 - DNA, 306 bp, Oryza sativa
  Clone ID: PAT_MRT4530_67516C.1
atgggccgtgccaagccgggccggcccaagcacgaccgcactgtagaaggcccaggcccggcacagcacgccggcctgtgggccgtgccggcacggcctgtttacccgtgccgtgtctgggctgacgccatagcccgtgggccagcacgacacggcacgcacaccgcgcacgtggcgccaagcggccgagccgccgagggcagccgcggggccaggcggcgggaagcgcacgtcgccgcgtggcgcgtggcaagcggcgtcgcgacgtgtcgttggggctgggaggctgggtcgctctcgctctga

SEQ ID NO: 66580 - DNA, 626 bp, Oryza sativa
  Clone ID: PAT_MRT4530_67517C.1
atcactagggaaagagagaggcgaggaagaaggaaggctagggcaagatggctctcggggctctcctccgccgcgcccgcgcccttccccgcctgccccaaggcaccgccgcgcgctccttctccgcccccaacgtcggccacttctccgcctccaacaccaaacacgccattcagcgatgtcaggaagcactgcttgaagaattgatctggaatgaggtgtatgccaagcacaatgaagctagagtaaggcgccttatcaattcgcttgtgaggtcgctcggtgatgttccaaaacaaaagggtttcactaagacattttctcaagaatttgggatggttgtgaaggaactagaaaaggatatgaatatgagttttaaatcattcaaagtgccactacgaaggctcatcctcaggactttggacaagtatcagcagcagggaagtgatgctttactgaagaattctctggaatccaaagtgcacagcagccactggggagatgcacatgccaatcctaatttctggactagagcattcggactaagcctcctcctcagcttcttcagcttcgaagttggacaacaatatgagattctcaatggagagggagagcttccaaagtga

SEQ ID NO: 66581 - DNA, 423 bp, Oryza sativa
  Clone ID: PAT_MRT4530_67518C.1
atgggccgtgccaagccgggccggcccaagcacgaccacactgtagaaggcccaggcccggcacagcacgccggcctgtgggccgtgccggcacggcccgtttacccgtgccgtgtctgggccgacgccatagcctgcacaccgcgcacgtggcgccaagcggccgagccgccgagggcagccgcggggccaggcggcgggaagcgcgcgtcgctgtgttcgcgcgtggcgcgtggcaagcggcgtcgcgacgtgtcgctggggctgggaggctgggtcgctctcgctctgactgcctccgtcactccgtgcctcgttgggagcagccgagacggcgacaggcgactcagcgagaccccgtacggcggccgaacagctagtcaaacgacgaatgcgagagtgccacgtgtccccaacggctag

SEQ ID NO: 66582 - DNA, 463 bp, Oryza sativa
  Clone ID: PAT_MRT4530_67519C.1
cacatgaaacctcagccttccattatgacagtgacctgtctgtctctgtccaaaagcttcatacatgagcaaaggaacatcaaactgaaaaagtaagagcttaattataggactcctccagtcccagccttagggattgaccgagataaactctatttctacatccactaatttcatcatctccccgtactgacgcagttgcaaattttgcttaatttcttttgaaggtttcagttggacagagctgcaaggaagaggaaaggacataattttgcctgcatagtatgcatgcctgacaatattatgatctattcctcctttgacaaggactaaggtaccccctagttactactaaaatcagatcattgctgctgcctcccactgtctcaagcatggtttggtaacctctggacatggaggctctgatcgatcagaagttggtgttcatcatcagaccttgatc

SEQ ID NO: 66583 - DNA, 228 bp, Oryza sativa
  Clone ID: PAT_MRT4530_6751C.1
atggcgtaccttcggtctatagcattcaagttctacttaaagactaaggtgattcagggtataaaaggcacaccccctgaggggtccagatcatcgaatcataaggccaacaccaccaccactgtagcctacaatctggaggacgtgaagtgtactcaccaggagatctcgtcgaaacatctcaacaagggtctcgccggtaatctcgagattgttggttctctattt

SEQ ID NO: 66584 - DNA, 270 bp, Oryza sativa
  Clone ID: PAT_MRT4530_67520C.1
accccaagattggatgattatcttttgcacatgaaaaaagtacaccgcaaaaccggatacaacacatccctgaacttataaaaccgtacgaactaagtcttttgacaccgattttatctggcggctgagtcagcataggacccacgttggtcccacatgtcaggatgccacgtcgtcaaggcagcctctcccttcttcctctcctttgctcctcccccccgccaaacaagatatatgtctgtgtgtgtcccccccatgtctatatgcact

SEQ ID NO: 66585 - DNA, 333 bp, Oryza sativa
  Clone ID: PAT_MRT4530_67521C.1
atggcgcggccggcacggagaccacatcgactcacggacgcggcaaccgacgacgtggatctagctgccctcggctgcttcctccattgcctgcagcttagcaacattaacggagctgagatcacggtgacctcgatagcagaccagcttccagctttagtcactggcctccccaagctttcccagcgacggattcggcgacagctcctcgaagtcaacctagaagcacccatcaggagtaggatgatgggcgggcgacagcagggcggcaacgacgacttcccatcccttcccagttcgccttacctcggttccctactgcatcgcaagtaa

SEQ ID NO: 66586 - DNA, 133 bp, Oryza sativa
  Clone ID: PAT_MRT4530_67522C.1
tgacgcctggggcagcaatggatggaccaacaccaagggtggggatgaggagaacaagaccgatgcggccgaaagcatagaagaggatgtcatggtgattgcggagaaggctacgggaccatcagctggctag

SEQ ID NO: 66587 - DNA, 174 bp, Oryza sativa
  Clone ID: PAT_MRT4530_67523C.1
atgccggcccacaagaaaatacgtgttcggttaaacccaatcagtgtgctacctcaccccaacccgggaaaaaaatcagcttctcctgaggtgtggaaaaaaaaaaatcctcacaacgggagccgggaggcgacgcgcaagcgcaacacgctgcggcggcgccacaactactga

SEQ ID NO: 66588 - DNA, 386 bp, Oryza sativa
  Clone ID: PAT_MRT4530_67524C.1
gagattatcttgatgtagaacatgaacaaccttgatgatacctttgagctaaaatgctactgatactctggtatttcaccgtgtcttaagaatggaacatattacatagtatatcatcatctaccattacaccaccagtttggagctcagaaacttaacgggaatgcttggtttctgcagaatttaaattaaattacattctttcccgcaaaatttcggcttaatttggatttcatccaaatccaaatccatagtggtgttcagcaccggaagccgagcaccttgccgtccaccggcgagacgccgacgcggcacaccttggccgcctcgacgtggtgcgtcagcacacgcagcacgggcaccctccccttgaccaccagcagcga

SEQ ID NO: 66589 - DNA, 374 bp, Oryza sativa
  unsure (1)..(374): unsure at all n locations
  Clone ID: PAT_MRT4530_67525C.1
gcacgaggagtagccagagttcgccagggcgccaggagctcaggaccaagctcgacggccatgccaacggtccgccaccgcgccagcagcagtagagacgacgacnacggcggcggcggcagtaggagacaacggctcgcacggttcttccaattgcatctctaatcaggtttagcgcttgcataatcatataattcgtggtattaataatggtgaaatagctaccgattagttttctcgtttgcatcctgtaaatttgcaggcataacaattgtagcttcttctctgcaatttgttctcgtctcgctttctttcatcatgtaaaattcagtgcaagatgagtggaagtaacatgaatacataatcttgggagt

SEQ ID NO: 66590 - DNA, 1491 bp, Oryza sativa
  Clone ID: PAT_MRT4530_67526C.1
atgaagttcagcaccttagatgaggcttgtaaattctgggagtactatgaaggtcagattgggtttagtgtcagaaagaggaaacatgccaccttatgccatcacaacgaaagatttctgaagtccaggctttcgaaattgaaatggccaatgattcaggacaaagtcactgaaaatccatctttccattatgctgtacaactggattgtgaagaccaaatcacaaatatattttgggctgatgctaaaatgattgttgactatgctcattttggtgatgttataacttttgacactacttttgaaacaaacagggagtataggccatttggtgtattcactggattcaataattttagagaaactgctatttttggtgctgccctcttatatgatgagacatttgagtcattcaaatggctttttgatacttttctggcaacacataatcaaaagcaacatagaactatatacacagaccaagatattgcaatgggaaaggcaattgagcatgtatttacagaagcatggcatggattatgcacttttcatataatgcaaaatgccaccaagcatttacctagtaataggaacagtgaaacaaatatgcttacagaattcagttcttgcatgtatgaccatgatgataaagtgaagtttgaagaagcttttgatgctatgagaaagaaagtacaaaaacaaacatggcttgatagtatatataaagtaagggagaagtgggcagaatgctacatgagagatgtttttacattgggcatgcgaagcacacaattaagtgagagcctgaacaatgacctgaaaattcacttgaaatcgaatcttgatattattcgatttttcaatcattttgaaagggttgtgaaaggcaagagggacaatgaactgaaatcagaatatgaatccagggaaaaactacctagaatcaagatgaggtcacccatgttgctccaagcaagatatgagagatctactgtggcatgcactaatgtattagatgggaactaccagttcacagtagcaattggtattctttctgatgatccaatatttgaagaggaatacaatgttattggcaatatttctacagagacagcttcatgcagctgtggtcagtttgagagaatagggatattatgtgcccatcgatgggctcgtcctgcacggtctggaactattcaggattgtagaggaaagaatattattgaaaatccaaatttggctgcaatacttcgttacaaagttctttctcataaatttgtcaatttggctactgaagcagccaactctgaagaatgttgtattcttattgagaatacactcgatagccttagcaagcaagttaaaggccgaatgaatgcatgccaaagtaatcatgatgctgaatgtgatgagcaaatgatcctagaagcaccaaaagtacatctaagagctgcacggctgaagaagaaccagttcagaataaaagcttaa

SEQ ID NO: 66591 - DNA, 373 bp, Oryza sativa
  Clone ID: PAT_MRT4530_67527C.1
gacctctctttttatgagctcttctagtttgagtgagagagcaacagaaagacgtagtgcaagatgcctatccgcaccatctccatggagagccaccaggaggtgtaccacccgggtgcactcaaggaggagttggacgagttcatgtacaccctcatcttcttcttacccggccaggtcttccggatggccttcagcaagctgaccggctgaggagcgacgacccccgcccgtctgatcgaggaggaggttgtccacgccttcgccctgttcgaggcggtgctcgtcggggccaacatattcggcggccacgtgaacccggtcgtgaccttgagcgccttcatcatgcgcaacatctccctgttccagggtc

SEQ ID NO: 66592 - DNA, 1268 bp, Oryza sativa
  Clone ID: PAT_MRT4530_67528C.1
ctaatgcgccatcctccaggaatcattgcctggctccctcgacaccccaacatccaggagctcgccgttgagggccgccacgtcctcatggcctccgccccatcggaggcggagccctgccgccgcctcctcgccggaggcccaccgaaccccctccacctcctcacgaaccaaccgccgcagtataaaggaggggagcgccagaccaccacacatcgctcccccgttcaccaagaccaccaccaccttatccctttcgcacgaccgcatctcccgcacacgcgcagtgatccggccgcttcccccgttgccgctctcttgggcggacgcgtggtgttgcctcgcctagctagctgctggcctggccggcgtcgcgtgccttcatggcctcgctcctacccagtccggtgttccccaccgccgccgccgccgcggcgtccacatcctcgtcctcgaggtgccggtgccggtgccgcatcacaacgtcatcttcggcgcacggttggtccaactgtcagggctggagactccatcaccgggtttgggccgcccaggctgctgatcagcaaggaggggtgcagcagcagcaacaacaagaagaaaatgaagacggtgtagtcgacagcaacgccttttattacgacaagaaggccgtaatgtcgaatgaggagttcgataacctcaaggaggagcttatgtgggaaggaagcagcgttgtgatgctaagaaaaagagaaaatgattgccctgatgagcaaagacttttggaagcatccatggcttatgtggctggcaaccccattatgacagatgctgaatttgatgaactaaagctgagattaagggtctacagtgacttgactgtcgattacttcaagatgttcctgctaaatgttccagcagcagttttagctctgacactatttcgtcttcacagattcttcttcctggatgatttgacaggttttgagatcacatatcttcttgagttgccagagcctttcagtttcatcttcacatggtttgccgcactgcctctaatattttgggtagcacaggcaattacgagtgccatagtgaaggactttttaattttgaagggaccgtgcccgaactgtggcaatgaaaatctttccttctttgggactatactgtctgtgcctagcggtggtgcaagaaacagtgtgaaatgtgcaaattgtagcagttcattggtatacgattctgcatcccgattgattacactcccagaaacagctgaggcttga

SEQ ID NO: 66593 - DNA, 455 bp, Oryza sativa
  Clone ID: PAT_MRT4530_67529C.1
atctcctcctgcgccttcacttccgccgctgtgtgttgctcgccggcggcggcggcggcggcggcgctatggatggtgccgctgccgccgccttcggcccaccggagcccggcggaggcaggggcgcctgtggccctggacgacgacgagccggcgccgtagccgaaggcgtcggccgggtacacagggcgttcggcggcggcgtgacgggcggcgatcccctgcagggaggatggcgggctgggtgctccacccgtggtgcaccgggccgaaaaaggcgccgctggcacccatggcgccgccgccggggaagcggaccccggacgaagaaggggtttgatctggcgatccggcggttgtgggtaaggttcaaaggggcggaaccgaaggggggaggaacaaatggatatgggaccttcatagggggggtagagggtaagaagagtggagaagag

SEQ ID NO: 66594 - DNA, 4848 bp, Oryza sativa
  Clone ID: PAT_MRT4530_6752C.1
atggccgagaagctgccaccttcgccatcctcggctagcccgggtactgttaaagagaaaatccaaagaccaggattgagcgaagtcaatgaagggaatattgtggctattgatccggaaaagctcacacctgaccagaagaaggacttcgaagcaatgatgcaacaagcacgagaacagttcttcaaatcattcacacagactcgcaagggaaaatttcctgagaccagtacctttaaggagggagaagggaaaagagttttagatggctcggctcaagagaatcagggtgacgactctcagggggcacatgcagttcaaggtgatggtgctcacgagccacaacgaggaaatcttaatcagaatggtgagacagcacaagatttcttcaacaatttccaagatcgagtggactacgccgtacacaatgctttgatcaatcaatctggagtgttagtcaacaccttgtctaacatgatgaagacgatagccgatggatcaatagttgagcatcaagctgcaggcccggtttacttgccgggaggtgtttttccgaattatcgatctttgatcactgatgttcagccgcttgctcaggcagttcttccgagtgcaccatcggctcagccgatggcaccgccattgacttctttgcctgctccatcagcgtcgacaccaggccagccgattaatcctcggctattgatgagggagcagccacagcatagcggacagacgatggtacgacgatgcctcagattgtgccagagcacttggtgcaaagtattcagccaaattaacagaatttattcagccaaattaacagaattaccaatgaggcaatataatcagtttgaaccaatacagcaacagtcgcaaggagcaggtcaacaacgaccatgggctgatgtaattgccgatgtgatgagagaacaatttgggcttaagccgaaagatactggaaaattgtatcggcaaccttaccctaaatggtttgagaaagttcctcttcccaaccgatttaaaatcccagacttctccaaattttcgggacaagatgattttgatagcctgtcgcatctcgtacagaagataacattgcatgaacagaggtttgcagaggccaggagaagctctaagagggttaatcatgtctgcccttacatgtatggatcggatgatgacgatgatgactccgaaatagctgcagccgaatgggtaaggagtaaaaaggttataccttgtcagtgggaaaagaattctggaaaagaggagagatatgattttgatattaccaaagctgacaagatttttgatatgctactccgggagaagcaaattcaactccccgctggtcatgtaattccatcggctaaggaactaggcaaaaggaggtattgcaaatggcataattctggatctcattctactaatgattgcaaggtctttagacagcagattcaagtagccattgaaggagggaagattaagtttgatgattccaaaaagccgatgaaggtcgatggtaatcctttccttgttaacatggtgcataccgttggtcggacagccgatgtgggacgagcgagaggtttttgcgtgaattcggctagaattataaataagtatcagaggaaatacgacaaacaacaagagaggcattatgaagaagataatgatggtttcgatccttattggaattgtgagttctttcggttctactggaacgaaggtatgaggctaccatctattgaagactgtcctgagtgcagtgatattacagagagttcaagccgatcgtacaatagaggcaatcggctgaagcaagctagagttcccgttcatcaaaggttgggcccggcaaatcaaaatgattacttggaggaagacgagaacgcgaagactcagtggtgtccttctgatatttttacaaagaatcagaaaagaagggttcaaaggttgaggaatagggagcgctttcaggaggtcgagcaagaaattggtcatcggctgaggaaagcaaagccaaggaaggagtggcgtgttaagaatcaagttcttggagccgatgatattgcagccgatgaagcaaagaggttggcaaaagggaaaagtattgtaacggcgccaattaacatggtctttactttgccagccgaattcgggattgaccaagccgatgttgacgaactggaagaggaattggctaagttggttctatcaccagaacgagcagtttttgaaaagcctgaagggacagaaaatcggcatcttaaaccattgtatataaatggctatgtcaatgggaagccgatgtctaagatgatggtcgatggtggggctgcggtaaatttgatgccttatactacgttcagaaagttaggtagaactactgaggatctcatcaagacaaacatggtgcttaaagactttggtggcaaccaatcggaaacaaagggtgttctgaatgtagaattgacagtcggcagtaaaactatccctaccacattttttgtcatcgatgggaaaggttcttacagcttgttgcttggaagggattggattcatgccaattgttgtattccttcgaccatgcaccaatgcttgattcaatggcaaggcgacaaggttgagattgtaccagccgacagccgattgaagatgaagaacccaagctattattttgagggcgtcgtggagggttcaagcgtctacgccaaggacacggtagatgatctcgatgacaagcaagaatttagaaccaagctgatggagcttttgaaagagtttagagattgctttgcttgggagtattatgagatgccaggactcagccgatcgatcgtcgagcatcgattacctttaaagccagggattagaccacaccagcagcctccgagaagatgcaaagccgatatgcttgaacctgtcaaggctgaaatcaaacgtttgtatgatgctggttttattcgtccttaccgatatgctgaatgggtttctggtatagttcctgttatcaagaaaaatggtaaggtgagggtttgcattgatttcagggatttgaataaagctaccccaaaggatgaatatccgatgccagtggccgatcagttggttgatgctgcttcaggacataagatactaagttttatggatgggaacgcaggatataatcaaatctttatggccgaagaagatatccataagacagccttcagaaaactggaaccttttacaccattgttaagattgagagctgatcagcaattcacttggggggcaaaacaacagaaagctttggataatattaaagaatatttaagttctcctccagtattgatccctccacaaaaagggattcctttccggttatatttgtcggccggtgataagtcaatcggcttggtcttgattcaggaacttgaaggaaaagagagggttgtgttttatttaagccgtcggctcttagatgcagaaacaagtcatggttatggtatcggcttggttataattgcgccttggggggcaagttttgaatttgcctatgctatcaaacaccgtgtgactaatcatcaggctgagtatgaggcggtcttaaaagggttacagttgcttcaggaagttgcagccgatgctattgaaatcatgggtgattcgttgttggtgattagtcaattggcaggggagtatgaatgcaaggatgatacattgatggtttattatgaaaagtgccgaacgttgataagtgaatttaggatggtgactttgaagcacatatatcgagaacagaatatagaggctaatgatttggctcaaagagcgtcgggatataagccaatgacaaaagatatcgagatagagattgctacaattacagccgatgattggagatatgatgtgtttcagtatttacagaatccatctcaatcggcttcgcagaaattgcgttataaggccttgaaatatactttattggatgatgacctctattatcggatgattgatggagtgttgcttaaatgtttgagtgccgatcaggcaaaagttgcaatcggcgaagttcatgaagggatatgtggtacacatcagtcggctcataaaatgaagtggttgctccgacgtgctggatatttttggccgacaatactggaggattgtttaagatattataaaggttgtcaagattgtcagaagtttggagcgatccaaagggcgccagcatcggctatgaatcctattattaaaccgtggccttttagaggttggggaattgatatgatcggtatgattaatccaccctcgagtaaaggacataagtttatattggtggcaaccgattattttaccaagtgggtagaggcgattcctttaaagaaagttgattctggggatgctatacagttcgttcaagagcatataatctatcaatttggtatccctcaaactattacgactgatcaaggttcaatttttgtatctgatgagtttgttcaatttgccgatagcatgggaattaaattgttgaattcttcaccgtattatgcacaagctaatggacaggccgaggcatctaataagagtttgatcaagttgattaagaggaagatttctgattatcctcggcaatggcatactcggctggctgaagcattgtggtcttatcggatggcttgtcatggatcgatacaggttcctccttataaacttgtttatggtcatgaggctgttctgccatgggaagttcgaatcggctcgaggagaacagagttgcaaaatactttaacagccgatgagtattataaccttatggccgatgaaagggaagatctggttcaatcacggctatga

SEQ ID NO: 66595 - DNA, 1426 bp, Oryza sativa
  Clone ID: PAT_MRT4530_67530C.1
ggtccccggcctgcggggtccccgccctcccggcgcgccgcgcgccgccggcccgccccctcccccgcccgccccccccgcctgctttctcgacgtcttcgcatgtgggagccgccgctcctaatgcgccatcctccaggaatcattgcctggctccctcgacaccccaacatccaggagctcgccgttgagggccgccacgtcctgcatggcctccgccccatcggaggcggagccctgccgccgcctcctcgccggaggcccaccgaaccccctccacctcctcacgaaccaacccccgcctacgacctggcccatctatcgggagatgaattaaacccgcctccgtgaaatcaggcagacggtgaagtcgacagggccgtaatcccgaactagggcttcgaccacctcgagaaggagattatttgggaggtaggccgcgttgtgctcctggccccgcatgccctttattacgacgagaaggccgtaatgtcgaacgaggagttcgataacctcaaggaggagcttatgtgggaaggaagcagcgttgtgatgctaagccctgatgagcaaagacttttggaagcatccatggcttatgtggctggcaaccccattatgacagatgctgaatttgatgaactaaagctgcgactaaggaatcagggaagtgaaatcgtacaagaaggtccaagatgcagtcttcgaagtcgaaaggtctacagtgaccgcgccgccctctgcgtcccgccggccctgcggcctgcccccgcggctgttccccgcccgcacccccgccttctccctcgatgatttgacaggttttgcagatcacatatcgtctctgagctgccagagcctttcagtttcatcttcacatggtttgccgcactgcctctaatattttgggtagcacaggcaattacgagtgccatagtgaaggactttttaattttgaagggaccgtgcccgaactgtggcaatgaaaatctttccttctttgggactatactgtctgtgcctagcggtggtgcaagaaacagtgtgaaatgtgcaaattgtagcagttcattggtatacgattctgcatcccgattgattacactcccagaaacagctgaggcttgattgaagatcacttcggacaggagctgcaccaaagcaattccttgtatctaccatggagagcaagatgaacttttcatcttgtgacaatcgtgttgtgaagcatccttttttatactccttagtctgcctctttaaatattgtatatatttgcatttattaaaagtttaagaaatagctatgactatatatactgtataaacactttggaaagtttatattgtacatgaactaaactgtcgtcatatcaaaaaaaaaaaaaaaaaaaaacatgcttattgagtaaaaaaaaaaaaaaaa

SEQ ID NO: 66596 - DNA, 325 bp, Oryza sativa
  Clone ID: PAT_MRT4530_67531C.1
cgatgcaggcctcctgcagctgggagcctcctgagcggcggccccccttttatttgtgttttttaaaaacatgggggtaaaccccctccacttatttttctattgcattttctgtcttttttaaaccccaccggaatgggaaccccttaacttacacaggaaaaagaggacccagggtccaaaaccggggctatactaaagaattaaaatatttttttatgaccccgcaaacaatggagtgttggtgggaaacacatgcattctaaaaaaggggaacgaaaatcgtcaaccaagggggcttttttggggggggcccaactaaaaa

SEQ ID NO: 66597 - DNA, 204 bp, Oryza sativa
  Clone ID: PAT_MRT4530_67532C.1
atggcggcgccagccatattggcgccgagcccgtgccaccgtggcactagggctgtcgtggagggtggctggtgccgccctcctcccccgcccgaaacccttttgcctccgggcctcggctggcgccgcctcatggaccacggcgccagggtgcatggcgccgccctcctccccccaccgaaacccttctgcctccgggcctag

SEQ ID NO: 66598 - DNA, 485 bp, Oryza sativa
  unsure (1)..(485): unsure at all n locations
  Clone ID: PAT_MRT4530_67533C.1
aatggaaataccnaccgtaccacgatctgtaggttgaactttgctcaatttatttgtctagctatagctacccgtaggcttcctttatttcctgtatacaatcctgtagatttctcaccttatatgtactgaaaattagtagtcatgtacttctattgtatcttgcacaatcaaagctcgtgaatcttgaatacactccgctgagtgaacattaggagtcatgtatcttgcagcgggtgcaggagcacatgtcaaagtctgacaagtacatgtaaaacacttgattagtgtttcctaatcagtcatgtagagttctgtaatctatccttttgttttccttttactaggtttttgcgacttatcctgagagatgttccaattatgaataagttcatgatttaaaattgcccctgatgtatgggaactactatagaagacattcccctncntgaataagttcttgatttaaaaaaaaaaaaaaaaaa

SEQ ID NO: 66599 - DNA, 345 bp, Oryza sativa
  unsure (1)..(345): unsure at all n locations
  Clone ID: PAT_MRT4530_67534C.1
gcgttcgcagngctgagcttttatcacatgcgtttgttngaggggtcactattggatgtccccatgggagacttatttttgatagagaagtttattggaaaactaggaaggtagcccgcgcattcgcgcgggcatgtgtcctatgctaagtttgagatatttgtaagagtgaaatgttacatgtaccgcattggtcncataaattgttttcatcggctttnaaaaattnaaaaaanaaaaacctcttctgtttttttttttctattttcttttggtgttgtcctccccnccctcacatggggcggccgctctggggggccccggcttccctccccgtgcttgcgc

SEQ ID NO: 66600 - DNA, 354 bp, Oryza sativa
  Clone ID: PAT_MRT4530_67535C.1
gggccggaatacctgggacgtcccttgcgaccgtgacttctgggcatagcccatcgtccccggggggggttgacttgaaaaggggggggctcaaccagccagtgaagaaggagaagaaagagaagacagagaaaaaagaaaagaaggagaagaaaaaagagaaaaaggcgtcgtcctgcgagcccaaacgcaagatcgcaggacttctactcggtttcaaacatcgtagcttggtcgaggcgcatgctacattgtgcatctggccaagcgcaacgagaccggcgactagggtgctgccaaagtgatctgcaagaaagatcttgggagggactatcaaaaagaatttgagcgcga

SEQ ID NO: 66601 - DNA, 535 bp, Oryza sativa
  Clone ID: PAT_MRT4530_67536C.1
aagccggaaaagcccccaaatggcaaaaaattttttaaaaaaagcggggaaaaaagggcggaaaaaaaaaaaaaacaaaaagggggggattgaaccccaaaaaaccaaaaaaggatcgaaattaaagcaagttcaagaaaaaaaagcaaaaaacgggggaggaaatccaaatacaaggggcaaaaacaaaactaagggggcaagatttttttggggaaaatttttcaaaagaataacccttcggtttgagaaaggcttgggaaaaaaaaacaaaagcgtccaaaacgttaaacaaggggggaaaaaagaacggggggaggacccccccccccggatgctaaagggggaaaggttaaagggaaaaggtccctgccaaggaaacccggtggtaaaagagcccacccaaaaaacaaaaaaatgccccaaaagggaccaaactggggaacatcctttgggggacacccggaaagttaaaaacaagtcctgggaaaaaacaaacccccccaggatgggaaaataaaatttttcccccggg

SEQ ID NO: 66602 - DNA, 651 bp, Oryza sativa
  Clone ID: PAT_MRT4530_67537C.1
atggatcacacggacgggtgggtggtggctgcgttgacggggcagtctcgcgcgcgcgggggagacgggagacggacggcgcggcgccgacgcagcgaaagcctgagaggagaggacaacgtgccgcttcgctggcgcatactacagccggccacggccggcgcggaagttggtgtaagccgtggcggagccaccgcccaccgccgggcgaccccgggcactcgtggcagtgaacatgaatgccacgcctcccctccccctcctccggccatcgcgcctcccccttcctcctcctgctatcgcgccttcctgataagcgacggcgccgggcggcccaagcggcgacagatctggctgcggatcaagcctccccctcccctcctcctccggccaccgcgcccctcctcatcctccggccagcgtggagtggagctcgccaatgtggatctagtggtgggcaacctcgacctcctctccggtggtgcggatttggtggttggccggtggctacaaggggaaatcaacgttggcaccgccctccctcccctcccctcccctcccctctcccctcccactgccggccggcacctcttaggagaagatgcggaggcggtggtcggcgacacagattgggcggtgacaaaaatcccg

SEQ ID NO: 66603 - DNA, 212 bp, Oryza sativa
  Clone ID: PAT_MRT4530_67538C.1
gttcgtggaggaaagggcgccggacatcgtcgctgtcgttgcggctcgacgtggacggcggcgacggtgtgcttggtgccaatggcggtgatgcagcagcggtcgcaggcagtgacgcggttgcggcagcgatggtgtcgacgacgaggcgtggcgcggcggtggacttcccgtcactggctacgcccccctcgagatcggtttaggggttt

SEQ ID NO: 66604 - DNA, 262 bp, Oryza sativa
  Clone ID: PAT_MRT4530_67539C.1
ggatagaaaattattttattttcattcaaagcatattattattcagactgataagcgtcgaacaaaggtacgtagccaccttggatacgttcccctacacctgcacctatacacacacggacacggtacacgtgaggagtataaaaagaaaaataacaagcccgatccgatgcaacggttgcgatgacttggccgggggcacttggggtcggcgggggcttgtggaatcgagtggagcccctgggcgacgatcttggcggca

SEQ ID NO: 66605 - DNA, 251 bp, Oryza sativa
  Clone ID: PAT_MRT4530_6753C.1
gccacaagttcgttgcgggccgctcgcgcccccctcccccaccacgcgagtagccatggatgccctgtccctcctgctactccccgtcgcgcgccccgcgcgccccgcgctccacctacgcgacgccgccggcgccgccgtcggcgcccgcgtcccgccgccttggctgccgtggagccgcgccccggcgaggcggctggtgaagacgtcgggtgcggccgaggagcccgaaacgccgcaagcggaggacc

SEQ ID NO: 66606 - DNA, 175 bp, Oryza sativa
  unsure (1)..(175): unsure at all n locations
  Clone ID: PAT_MRT4530_67540C.1
aatttgatcctctatatcgccccccccctttttttttgtgttttttttaaacatagggcgtacaaacctacacaggttcaatacaacaacgtctactacctaacacactaccacattttatcagcacttatcaacaaannacaaacttcccacgtaacctctcgcaatatcccaa

SEQ ID NO: 66607 - DNA, 4431 bp, Oryza sativa
  Clone ID: PAT_MRT4530_67541C.1
atgggggacgatctcaagtccaccctggagaccctcgccaagaccctggcctccctgcaatcttcatccgaagccacgaccaaggcgatcgaggacaacacacaggccatcgcggccctgtccgttgctcggactaccgagaaggcttccacggaatcatcggggacacctgcaccagatcggccgccgaagcattggcgtccggagttccccaagtacgatggcaagaccgatccgctcgccttcatcaatcgatgcgagtcattcttcatccagcaacacgtcatcccggcggaacgcacgtggatggcttcgtacaatctgcaggacggcgcgcaactgtggtacatgcacgtccaggacaacgagggtacgccgacgtgggagcgtttcaaggaactcctcaacctccgctacgggcccccgctccgctccgtgccgctattcgagctctcggcgtgccgccgcacgagcaccgtggaagactaccaagatcggttccaggccctgcttccccgcgccggtcgtctcgaggaagcccagcaggtacagctgttcaccgggggcctcctcccgccgctcagcctccaggtccagcagcagaagccggcatccctggaagaggccatgagtctcgcccgacagttcgagctcatggagccctacctgttcccggccacgacatccgcgcgcggcgtactcccgacgccggccccccggccatcgaccggccccgtcgtcaagccggcaccggccaccgtcaccgtcgagggtcgcccggtcaagcggctctcccaagcccagcaggaggagcgccgtcgcctcgggctgtgctacaactgtgacgagaaatacagccgctcccacaacaaggtatgcaaacggttgttttttgtggagggtggtgcaatcgaagaaggcgacgacacggtggaggatgacaccgaagaggcgactgtcgaggcgcccgtgttctccttgcacgcggtggctggcatcccgttgggcaaaccgatcctgctccaagtgacgctcggtgccgcctccctcgttgccctggtggacacgggctccacccacaacttcatcggtgaggacgccgcgctccgcaccggcctgcccgtccagccgcgtccacggctcactgcgacggtggcgaacggggagaaggtttcctgtccgggtgtgctgcggcgggcaccgatcaccatccagggcatggcgttcgacgtcgacctttacgtcatgcccctcgccggctacgacatggtgctgggcactcagtggatggcccacctgggcaccaccatcgcctgggacgtgaccacggggaccgtgtccttccaacatcaagggcgcaccgtctcgtggcagagcctacccccgcaccagcgcgccgatgtccacgccgtcagcaccgggacgagcctcgttgcggccaccgggtcctcctccagcaccccggcgcccacgacggagcctgccctcctcgacggcctcctgggctccttcgacgacgtcttcgccgagccacggggcctgccaccaccacggggccgcgaccacgccatccacctcctgccaggcgccccgcccgtcgccgtgcgtccctaccgctacccggtggcgcacaaggatgaacttgagcggcagtgtgccgtcatgatggagcagggcctcattcgccggagcacgtcggcgttctcgtcccccgtcctgttggtcaagaaagccgacggctcgtggcgtttctgcgtcgactacagggccctcaacgccatcaccatcaaggacgcctacccgatcccggtggtggacgagctgctggacgagctgcacggcgccaagttcttcaccaagctcgatctgcgctcgggctatcatcaagtccggatgcgggctgaagacgtcgccaagacggcgttccggacgcacgatggcctctacgagttcttggtcatgccattcgggctgtgcaacgccccggcgacgttccaagcactaatgaacgacatcctccgcatatatcttcgccgttttgtccttgtgttttttgacgatattctcatctacagcaacacctgggcagaccatctgaggcacatccgggcggtgctcctcctgctgcgtcagcatcgcctgttcgtcaagcgttcaaagtgcgctttcggcgtcagctccatctcctacctgggccacatcatcggcgcgacgggcgtgtccatggacccggccaaggtgcaggctgtcgtggactggccgcaaccgcgctcggcccgcaccgtccggggcttcctggggctcgcgggctactaccgcaagttcgtccacgactacgggaccatcgccgcccccctcaccgcgctgaccaagaaggaggggttccggtggtccgacgaggtggcgactgcgttccacgccctcaagcacgccgtcaccacggccccggttctggcgctacccgacttcgtcaagccattcgtcgtcgagtgtgacgcctctacgcatgggttcggcgcggtactcctgcaggacaagcacccgctggcgttcttcagccgccccgtcgcgccgcgccaccgtgcgctcgctgcctacgagcgggagttgatcggcctcgtcctcgccatccgccactggcggccgtatctgtgggggcgtgcgttcgtggtgcggacggaccactacagcctcaagtacctgctcgatcaacgcctggcgaccatcccccaacaccattgggtgggcaagctcctcggcttcgacttcacggtggagtacaagtcgggcgcctccaacgtggtggccgatgccctctcgcgccgcgacacggacgagggtgccgtcttggcactgtcggcgccacggttcgactacatcgagcggttgcgggcagcccagaccacggagcctgctctcgtggccatccgcgacgccatccaggccggcacccgcagcgcgccgtgggcgcttcgcgacgggatggtgatgttcgactcccggctgtacattccgccatcgtcaccactgctccacgagatcttggcggcaatccacaccgacggacatgaaggcgtgcagcgtaccctgcacaggctgcgccgcgatttccactctcccgccatgcgccgggtggttcaggagttcgtccgggcgtgcgacacatgccagcgcaacaagtctgagcatttgcacccgggcggcctgcttcttcccctgccggttccaactacggtgtgggccgacattggcctcgacttcgtggaagctctgccccgtgtgggtgggaagacagtgatcctcaccgtcgtcgaccggttcagcaagtactgtcatttcatccctttggctcacccctacacagctgaatcagtagctcaggcgttctacgcggacattgtgcgcctccacggcataccccagtccatggtgtcggaccgggatccggtgttcacgtcatccttttggcgcgagttgatgcggctgaccggtacaaagatgcacatgacgacggccatccacccacaatctgatggccagacggaggccgccaacaaggtcatcgtcatgtacctgcggtgcttcaccggcgaccgacctcggcagtgggttcggtggctcccgtgggcggaatacatctacaataccgcctatcagacatctctccgcgacacgccgttccgggtggtatacgggcgcgacccgccgatcatcaggtcctacgagcccggcgagacgcgcgtggcggccgtcgctcgctccatggcggaccgtgacgagttcttggccgacgtgcgctaccggctagagcaggcccaggcgacgcacaagaagtactacgacaaaggccaccgtgcggtgtcctacgaggtgggcgacctcgttctcctgcgcctccgtcaccgcgccccggcatcgctgccccaagtgtccaagggcaagctcaagccccgctacttcgggccctaccgcgtcgtcgaggtgatcaaccccgtcgccgtccgcctcgagctcccgcctcgcgcaaagctccacgacgtgttccacgtgggcctactcaagaagttcgtgggagctgcgccaccatcgcctccggcactgcctgctgtccaccacggtgccattgatcccgagccagagcgcgtcacccgttctcggctagctcggggcgttcgtcaagttctggtccactggaagggggaatcggctgcgtccgccacatgggaagacctggacaccttcaaggagcgttacccggcgttccagctcgaggacgagctggctctcgaggaggggagagatgtcatgtggggccgaacctatgccaggcgccacagggcacgggacgtgcgccgagccggcgaacgcgccgcggcgcgcgcgcagagcacgtccagggagccacagggccaagtcaacaatagtggctag

SEQ ID NO: 66608 - DNA, 487 bp, Oryza sativa
  Clone ID: PAT_MRT4530_67542C.1
ttaaattgtcttagagataagagtcgtgtccagcaagtacatgttatgtacttcgggtataaatatgacccgacaccatgtaatcaaaggacgatagttcaataatacttcggtgcattgccacccttttctattttcattgtttcgatgagtttttttgctttcgagttgagctgcatcgggtacgatcttcgacgaagagcgtgtcccattggattggattacgtatcgttaacatctacagtcgatcaagtacacccaacaatctccaagtttaatctgcctctgccgatctgacgcaagttacatcggcatggcctcggatgatacgtcatcggcaatcctaccgattggctaccgatcaaaccagctggcatgctcagaacctgaaggcaatttctttggacctgcactatagttaagcagatctctcaggccagtgcataacatgtatgctatggtcaaagttatattagagctaaaaagc

SEQ ID NO: 66609 - DNA, 255 bp, Oryza sativa
  Clone ID: PAT_MRT4530_67543C.1
atggcggcggaggtggaggcggcggcgctaggggaagacggaggcgaaggcggaggtggcggcggcggcggaggcgcgaggcgatgcggacgacgatggcggcggcgcgaagcggaggcgtcagctggatggaggaagcgggagctgggggcggcagccagtggcagactagtggaggcgggagagtcggcgcttgggatagggtggcggctggtggcagaggcggggcccggaataggggtgatgttagaataa

SEQ ID NO: 66610 - DNA, 574 bp, Oryza sativa
  Clone ID: PAT_MRT4530_67544C.1
ctctcttgttctttcttcctagatccgccactgccgccaggtcccctgcgggtgtggggttgggaaaggttttttacgtggttgacaatacgggggcggggggcgggggcattcttgttcaacccgtccccgtcccaccctgctgccacccctattaaggagggtggtaggcggtcctcttatttgtttatatgaatttgttttcgaagttttaaaagcttataaatcttacattaaacataatatatttatgatcaggctacttatgaaaatgtcatgttctatgagagagttcaaggtgctttctgataaaaatgtacttcaactttattacaaactaattgaaccacattgggtttatttcagaaaattgacctttttcatccacattgtattcctggtgtatagaacatgggggccacgtgcacgtgggcaaatatttgcccaaatcgtaggagaattgatatgtagccctaccgtggaaatgtccgtacgattatactctatctgtttagagcatatctttaggagtgatatggttgtttatatatagtagtatatctttccatattaa

SEQ ID NO: 66611 - DNA, 957 bp, Oryza sativa
  Clone ID: PAT_MRT4530_67545C.1
ccggccgggaccgtgcacagtaactctgaaccagagctacccccaccaaccggagtatcggactccggaagccggaagcgacggcgccgcccgatatggaggcggagtcggcggcggcgaggcaggcgaaggagtcgctggagctggcgttccagatgtctcagatcctcgacaccggcctcgaccgccacacgctgtcgctgctcatggcgctctgcgaccgcggcgccaaccccgaggccctcgccgccctcgtccgcgagctctcctccgcggctcctccgaccaccgccgccgccgcacccagccccgcgtccaacgccaccgcggcgccgtccgcaaaagccgcgtcgcttttcccctccggtcttcgcaaaccctagggttcgtgcccccttctctcagacgagatcacactatcacttgatcctacattacgttgtcttagaatgtaaactagcggatcgttctgctctgtagattcgttttagccgcaacaccttcctggcttgtatcctcaagagattatgcacaatttttctatcagaactccttaattttaggagatcgtgacatggatccgttcagagatatggggatatcggtatgacatgaataaaagataagaaaaaaaaaaaaaaatgctgtagaatgcatttctgatgctgtggtggcctgtttccccaaggaaggtgtggttcatggaacgctgcgtgatttgcttgagttgtggaagataagagtttagtaatcgtgggaacgttgcctttcctatttccaatagccaattttgcctattattaattatcctctcttgacctagaagtcctttgctttgtcatgtgcttatccaagaagggatctgtcatcgccattggtcgaactctcattttcagataataattgaaagcaatgagtgatatctctattccacctggttcaaaaaaaaaaaaaaaa

SEQ ID NO: 66612 - DNA, 256 bp, Oryza sativa
  Clone ID: PAT_MRT4530_67546C.1
gccagtgcgggatccttcttcgcgagagcgcgcttttcaccgggagcgagctcatgatgagtccatggcaagacacaaaggctggaggtcattctgtctctccgcaagacagcgcaggaggagcaggcgcgccgcaatctggaatgcatccgcgccgagtccttgaaggagtgaggcctggggactcccccccggtggcagtcctcttccctttctggctgaccaccacggcgcgctcggtgcccgcgggagcgga

SEQ ID NO: 66613 - DNA, 342 bp, Oryza sativa
  Clone ID: PAT_MRT4530_67547C.1
tgcccaatggcagtccagccgccactcttgctcccggctgtcgcgaccgcgagacgcctccacggtggcggggccggcgtgcggcggacggcgacgacggtgacggtgacgcgtgcggcggacggcgacggcgggggctcggcggcgcgaggcgacgacgtgcggcggacggtgacgagcggaaccggcggcgcggaccttggtgcggacgggtcacggtgacggctggaactctgcggctcgaggcgacggcgtgcggtgatcggatacaccggcctaagggcggtcggatccgtggtcggaagccctggtgccgcgggatccgaggtagtgaggctaccg

SEQ ID NO: 66614 - DNA, 2865 bp, Oryza sativa
  Clone ID: PAT_MRT4530_67548C.1
atggcggcggcgctggaagcattcgcggccaagctggcgaacgtcctggtggggatggcgaaggaggaggtggagacgctcctgggcgtgcccggcgcgatcgccaagctcgagacgacgctcgccgacctgagcagcatcctggccgacgccgaccggaggcgcatccacgacccgggcgtggagcggtgggtgagggagctcaaggacgccatgtacgacgccgacgacatccttgacctcttccgcgccatggagggcggagaagaccccggctcaccgccaagagctgctccggcgccgtcggcgtgctggagcgccctctgccgccgcagccctgccgctacgcgcaagatcgggaggaagatccaggagctcaaccggagggtggaggagatcgcgaagaggagctcccgctttggatttgtctcccaaatcgtcaggcgatgtcatcgccgtcgctatcaccggcgctgggggataggcaagaccacgcttgccaggatggtcttcaacgacgccgtgttggagagccacttcgacaagaaggtatggctgagcgtgaatcaggaggtcaacgaggttcacctcctgcacggcgtgatcgccgcgtttgggggaagctaccatggctgcgccggggacaaggccctgctcgaggacacgttgaagcatgccgtgaggcagaagaggttcctgctggtgatggatgacgtgtggagcgatagggtgtggagcgatctgctccgagcaccgctcggtgcttgtgctcctggaagccgagtgttggtgacgacgaggaacgacggagttgctcgtgggatgagagcccagcacctccaccgggttgagaagctggatctaggtgattcttggtcactgctaaagaagcaggtagttctgaacgagggcgatgaatctgagattgatggactagaggacatcggattgaagatcgtagaaagatgtgatggcttgccacttgcgattaaggttgtgggtggactcttactgaacaagggcaaaacgagagatgcttgggtgaacgtctctaatcactttgcatggtcaatgacaagaagcaatgacgacatcaacaaagcggtctatctgagctacgaagagctgcctccgcatttgaaacagtgcttcgtgttctgctcacttttccctaaagatgaactgatcataagaggagtaatagtcaggatgtggattgcacaaggttacggacatgacataatgagatcgacgctacctgaagatttgggagttgaatattacaatgagttggtgtcacggaatcttctagagccatacaaacgatcctatgatctatcagcaagcacaatgcatgatgttattcgctcctttgctcaacagatagttaaagatgaaggactacttgtcaatgacagacaagatgtgcatggtattgcaggtgcttcaaagctgcgtcacttgtctgtatccaaaactgcaatagagcgggtcgctatacaaaagcaagtgtcattgaggacattgttgctctttgggagatgtataactgagttgacgtatttcaggaacaatatctcttgcctaagagtactacatttacaaggtgtagatcttgttgacctgccggactatatatgccatctcaagcatctaagatacttggggcttgcaaatacaggcatatctgcaatccctcgaggcataggaaatctaaaatttctacagttcattgaccttatggggtgtcggaattttcatcagcttcctgacagcatcttgaagctacagaatatgaggtttctcgacttcaggggcacgaggttaacctcaattcctccaggtatgggaaagctagaaaacttggtgaacatgttggggttcccaacttatttggatgacaggggacatgcctggagcagcttggaagaactacggtctttgtcgaacctaaaatggcttgatttaagaggtctagagcttgcatcttcaggctctatggctgctacagcaatgctcaacagtaaaaagcacttgaaaatcttagacttgacatttgccagtaggctcaccgacaacgggatgatcgaaggaaccagcaatgtaatcgaggagcaggaacgagccgaggttgtgttgagtaatctctgtcctccgccttgcgtagaatgtcttacggtcaatggttactttggatatcgactaccccgatggatgagaacaatgtcggactttccaagcttaaggcgtttggagctgaaggactacgtatgctgcaagcagctgcctgtcggcttgggccagctcccttttcttgattatatttggattgatcatgctccatccatcgtgagcattggccatgatctcctcttcctctcctcctctagtgctgatgaccagaaagtcacaactggaacaaggatcactaggaagctgcagctccatggtctttctcgcgagaacttcccgtcacttgtggagctcacgtcagctgacaacccgaagctgcagaggatctccaacagtccaagactgcgacatatcgtcgttatcagatgcccagggctgaaggtagtgaaggatttgcaatcacttaggagcgtcatttggaaggatttggatgctgatgccctcccagagtacctacgagagacagagctaaataagctggacgtgtactgcagtctaagattgcttaaactcatatccttgcaagatggcagctatgagtgggaaaagatccagcacgtccagctactgaaggcatatgggaagagatcaacggaggataaggttgaccggcacatcttctacactaaggatccgtactcgtttgaagcagatatgggcgaagatctatga

SEQ ID NO: 66615 - DNA, 300 bp, Oryza sativa
  Clone ID: PAT_MRT4530_67549C.1
cacacccaaacctacagttactgcatactggatcacacgattgagtccttcatggtccacattggtaaaacctttttcggactaaagatacatggtatccacatatactcagcaactgcgcccggtaaacaagacattacgattgcgtttcatttcccctgatgctcaataaaggcacatggcttaagacctaatgttgaatgggatcacccttttcctcacctcttgttaaactgcaaccagggcaccaccacctaagggaccaacccaaaatatccactgcacactttatatcccaaa

SEQ ID NO: 66616 - DNA, 4788 bp, Oryza sativa
  Clone ID: PAT_MRT4530_6754C.1
atggctcggctcaaccgagtgacaaaggtgcttcagatggttctcaaggaaatcaaggtgataactctcaaggagtatagggagttcaaggtgatggtactcagggagttcaaggtgaaggccctaatcaagatggcaatacagcacagttgcagttcaacaacttccaagatcaggttgtggaaccaactcagcaagcagacgccaccgagacggcaggttttgcagccgattcagcagacgccatttaggcaacaggttgttctgccgattcagcagcaaggctcaatgaatgcatcgtcttggtttgcaacgcttggtggtcagcctatgcagcatgctgcaaatcaagctgtcccagagcacttagttcatcacgtacaaccagatggcacggtgatacctcagcagcctcaaggaacgcctcaacaacaaccatgggccgatctaatcgcagatgtcatgaaggagcagtttgggcttaggccgaaagatgctggaaatttataccgacagccatatcctgaatggtttgagagagttcctctacctaaccggttcaaggttccagatttttcaaagttctcagggcaagatagcacatcaacttatgaacatgttagccgattcttagctcaatgtggtgaagcatcggctgtggatgccttgaaggttaggttgtttcggttgtctttgtctggatcggctttcacttggttttcttctttgccatatgggtcaattaacagttgggccgatttggagaagcattttcacagctatttctatagtggggtacatgagatgaaattgtctgatttgacggcaattaagcaaagacatgatgagcctatgcatgagtatattcagaggttcagagagatgaggaataagtgctacagcttaagtttgactgatgcccaattagccgatttagcttttcagggtatgattgctccgattagagagaaattctcatctgaagactttgaaagcttgtcccatctaacacagaaggtaaccttgtatgaacaaaggtttgcagaggcgagaaataattctagaaagattaatcatgtctgtccttatgtatgtggatcggatgatgaggatgagatagctgcagccaaatgggtaagaagtaaaaatgttataccatgccaatgggtaaagaactcagggaaagaggaaaggtatgactttgatatcaccaaggctgacaaaatttttgacttgctactccgagagaagcagattccacttcctgccggtcacacaattccatcggctgaagaattgagcaagaaaaggccgatgaaagttgatggcaatccttttcctgtcaatatggtgcatacagctggccgaacagccgatgggggtcgtgccataggatttcagggaaagtatgataaacaacaggagaggcattatgaagaagatgatgatggctttgatcctcattggagttgcgagttctttatattttgttggaatgaaggtatgaggttgccatctattgaggactgtcctgggtgcagtgatattgcggagagttcaagccaattgtttagtaggggcagtcggctaaggcagacaagagttcctgttcatcaaagattgggtccagtaaaccaagatcgtggccaggaggacagtgaaaacataaaaactcaatggtgtccttctggtatctttacgaagaatcaaaagagaagggttcaaagattgaggaatagggagcgctttttggaagtcgagcaggaaatcaaccatcggctgatgaaaacgaagccgaggcaggagtggcgtgttaagaatcaagttcctgtagccgatgaagccacagccgatgaagcaagaaggttggctaagggaaaaagtgttgtaactgcttcggtcaacatggttttcacgttgcctgccgagtttgggatcaagcaagccgatatcgacgaagttgaagaagaatcggctaaattaattttgtcaccagagcaggcagttttcgagaaactagaggggtcggagaattggcatcttaagccattgtatataaatggttatgtaaatgggaaaccgatgtccaagatgatggttgatggtggggctgcagtaaacttgatgccttacactacattcaggaagttgggcagaaacgctgaagatctcatcaagacaaacatggtgctcaaagactttggcggcaatccatcagaaaccaaaggagttttgaatgtggagctgacagtcggcaagaaaaccatccctacaacgttctttgtcatcgatgggaagggttcttatagcttgttgcttggaagggattggtggcaaggcgacaagattgaaattgtgccagccaacaggtcagtgaatgttgccagtgccgatttagctctttgggagatggatggtcttgattgtttatctggaaaagtttgggatggagattttctaaaagtgtccgattctgatatacaacaattgaagatggagaacccaaactattattttgagggcgtcatggagggttcaaacgtctacaccgaggacacagtagatgatctcgatgacaaacaaggacagggtttcatgtcggctgatgagttggaagaaattgatataggtccaggtgatcggccaaggccgacatttattagtaagaatttgtcctcggaattcacaaccaagttgatagagctgttgaaagaattcagagattgcttcgcgtgggagtattatgaaatgcctggactcagccgatcaattgttgaacatcggctacctatcaaatcagggattaggccacaccaacaacctccgaggagatgcaaagccgatatgcttgaacttgtcaaggttgagattaaacgattatatgatgctggttttattcgtccttgtcgatatgctgagtgggtttctagtatagttcttgttatcaagaagaacggcaagattttgagttttatggatggtaatgcaggatacaatcaaatctttatggccgaagaagatatccataagacagcttttaggtgtcctggtgcaatcggcttatttgaatgggttgtgatgactttcggcttgaagagtgctggagctacatatcaaagagccatgaattacatatatcatgatctaatcggctggttggttgaggtttatattgatgatgtggttgttaagtctaaggagatagaagaccacatagcctatttcaggaaggtttttgagagaaccagaaaatatggcctgaagatgagcccgacaaaatgtgcttttggcatatcggctggccagtttttgagatttcttgttcatgagagggggatcaagaaaggaataccttttatattatatctatcagctggtgagaagttaatcggctcagtcttgattcaggagcttgaaggaaaagaaagagttgtattctacctcagtcgtcgactcttggatgcaaaaactagatattcccctttggagaagttatgcttgtgcttatatttttcatgtacaaggttggggcattatctgttgtccaatgaatgcaccgtcatctgcaaagccgatgtcgttaagtacatgttatcggcttcgattttgaaaggaaggattggaaagtggatattttccttaactgagtttgatcttcggtatgaatcgccgaaggcgattaaaggacaagctatagccgattttatcgtggaacaccgtgatgattcaatcggctcggtcgagattgtgccatggactttattttttgatggatcggtgtatactcatggttgtggtatcggcttagttataatttcccctaggggggcatgtttcgagtttgcttatactatcaaaccttatgaaactaataatcaagctgagtatgaggcagtgctcaaaggattgcaattactcaaagaagttgaagccgatactattgaaatcatgggggattctttgctggagtttcggctggttactttgaagcatgtatctcgagaacaaaatattgaagctaatgatttggcccaaggggcatcggggtataagtcaatgatcaaagatgttaaggtcgaagtcgcagcaataacagccgatgattggaggtatgatgtgcatcaatatttacagaatccatctcaatcggcttctcggaaattaagatataaggcgttgaagtacactttattggatgatgagctctattatcggacgattgatggggtgttgcttaagtgtttgagtgccgatcaggctaaggttgcaatcggtgaagttcatgaagggatttgtggtactcatcaatcggctcataagatgaagtggttacttcggcgtgctgggtatttttggccgacaatgctggaagattgtttcagatattacaaagggtgtcaagattgtcagaaatttagagcaatccagcgagcgccggcgtcgtctatgaatcctatcattaaaccatggccgttcagaggttggggcattgatatgatcggcatgattaatccaccatcgagtaaaggacataagtttatattggtggcgaccgattatttcaccaaatgggtagaggcgattcctttgaagaaggtccctccttataaacttgtttatggccatgaggctgttctgccgtgggagacaaggatcggctccaggagaacggaactacaaaaggatttaagagttgatgagtattacaatcttatggccgataagagggaagatctggttcaatcgcggttgcgagcccttgcaaaggttactagggataaggagtga

SEQ ID NO: 66617 - DNA, 2871 bp, Oryza sativa
  Clone ID: PAT_MRT4530_67550C.1
ttagacggaggaaaaggaagaagagggcggggcggcgttggcgttggcggaggtgggcatggacctgtgactgtgactgtccatgtccagccgcctcccgcagctgctgctgtcttcgttcatcatcttcttcctccgcttcacctccgcctccttcatgtccacgaacgtcatcaggtcccggatgctggccagccgcgccggccgccgcgagctcatcctctcgccgccatccaccgggaacggcgttgccttgttctcgctgtcgtcgtcgtcgtcgatgtcggcgtggccgtggtatctgaagtactggcgcagcgtgcggaagaagaagatgaggagggcaatgaagcaggcgacgccgcagatgaggaagagtccccagaagctgctgaggttgaggcggtcggcgccgacgtcggtgccctgcgacgcgcactgccccgggctcagccacttatcgtggatcctctgcaggtcgccgttctccgacagcgtcaggatcgccgtcgaaaggtccacggccagaggggagtcgcgctggaaagcgaatccccatccgctctttgtgaactcctgccccactgtcctgaactggcagttgatggagaggaagagctccacgtatggcagctcgtcgacgatggccgccacgacgccgctctgcaggctggaggagtagtcggtgatggcgagctcccggaggcgggactcgggcacgcccagctcctgcatgaggtagctcttggcgaaggagccgacctggaagccgatggggtcggagctggcgatgaggccgtccagaccctggatgtccgtggacagctgctgcacggtgaggatggaggtgaggctggcggtgtagctggagttgatgatgagcacgacgaagagccagatgatgagcaccagcctccccagcgtgctcaccgtgttctcccggtgggcgaagaacatggtggagaagctgaaccagaagacggtgaccagctgcttccgcggcgagcccctgaagtcggtgttggagcggtgctccagcacccagaccaccgccccgacgaagaggaagaatccccccgtgaccgcccacatctccctcgtgaagggcttgaggaacgcccacgcgctggacgccctctccctcaccgccgtcacgatcaccagcccggactccacgtacggctgcgtgaagtccaccacccgcgtcctgttggtcacgatcgatatgtcccccaccgccgcgtccagctccccctccgccacccgctgcaccagctccccgtagctcgggttcttcaccccgtcccccaccaccacgtacgacaccggcaccgggtacgccagcagcgccaccgccgccttgaacacgtcgatgcagtacccgctcgcgccgtccggcccccccgcgtccttggacacgaactgcttgtacgtcgtccggtacggcaccccgatccgcagcgccttcccgttgttcgggaacacccacccgcgcggcgtcgacgctgtctcccccggccagatcacgctgtaaagctcctccccctgctgcttcttcttcttgccgttctgctcctgctcgggcgccgtcaccgacagccgcgtgcggttcgaccagtaccccacccgccggaccccggtgccgcccacgttcagcacctcgtacgccgggtcggccaggttcctgtcgtcgccgaaccgcacctgcccggtgacgccggtgaagttgagcgttttcatcttgctcagcagctgctcgccctggtcgaacaccttgagtgcgcccaggcggagcgcgctcccggtctcgttctcggcgcgcagcctggcgtcgtcggagaaggagacgttggagccgtcgacgaggagctggtcgacggcgcgcgccgccatccacacggcgtcgtaggcgaagagcacgtacgcgttgatgccgccagtggtgttgtgggcctgcagccgcgcggcgaacctggacatgagcgacctcttggcgtcggagtccggggtgtactggcggagcgtgacgacaccctggagcagggccagggcggtggtcttcctgggaggcgacgagtcggagtcgagcagcgcggcgagccactcggtggcgatccagacgtagccgctggacatcatgccgagcgactgcgcggcggcgaagatgtcgaggccggagtccgggttggcgtggacgacgatgacgcgggactccatcatgctgacgcggaggaggaggtcggtgatggcggcgcggtcggcggcgggggggagcggggcacggtaggagaccttggagcgcatggactggaggtggtcgccgagggcgtcgagggcggcgcggccgtagtcgttgtcgacgtagatgagggtggcctcgcgccaggcgtagtgggagatgatgtcggcgacggcggccatctggaagaagtcgctgtgggtggcgcggaggaagtaagggtattgggaggagcccagcgtcggatcggtggcggcgaacgacaccagcgggatgcgcagctcgtcggcgacgtgcgacaccacgtgtccgatccccgacgactgtggccccaccaccgccaccaccttcttctccatcacctgcagaccttggatgatgccgatgaatccgctgcacttggtgtcctgctccaccacgctcaggtatgtcccgttgagaacgccgtcgtcgcggttcacgtcggcgacggccagctcgatggcgaccttggccgccctcccgatgacggagtcgaaggtgaagagcgcgccgatgctgacgttcgccggcctggccgccagccccggcaccgccagcgccaccacccacaggaggaacaggagccgccggagcagctgatcacccgccat

SEQ ID NO: 66618 - DNA, 384 bp, Oryza sativa
  Clone ID: PAT_MRT4530_67551C.1
ttctccacctacaaagttaaatgtacatgtcaaacagcccccctggtccctggcggctggtcgcgctgccgcctggttggagaggatgccgcagccgcagctttgcgccctggagacctcacccagccctccagcgcgtggcgagcaccgcagcagccgccgtccactgatggggattggggaaggggattgatggattgggggagggtggaggagatgatttcgctcgtcttctcacgatgctgcgtcgccattctctctgacccggttgttgctctgtgcggaggagtacgaggaagggggaagggggggtggtcagcaggcggcacgaggtacggcgagcgccacacctcgccctactgagccctccgccctggtcccagg

SEQ ID NO: 66619 - DNA, 129 bp, Oryza sativa
  Clone ID: PAT_MRT4530_67552C.1
atgactgatttcctgttcaacctcctgaaaacgttcccgcgggaacaccactccacaggcatcctcgactacacggacgaagcctactcctcggagaaaccttcatctgacacatactcgtgctctggg

SEQ ID NO: 66620 - DNA, 192 bp, Oryza sativa
  Clone ID: PAT_MRT4530_67553C.1
atgcacgtggtgatgaagaaatccatatgtcaaaaagtttcaatctacatcttcgagtttgtcatctaccggtgtttctgggtcccgatggtgtccgggcggtttgaccagcgaggcgttggcggtctgaccggcggcaggagggcggttcgatcggcggcaataggacttcatcatcgtcttcgttcgagg

SEQ ID NO: 66621 - DNA, 981 bp, Oryza sativa
  Clone ID: PAT_MRT4530_67554C.1
tcatccctggcttccagagtgaaggaagcttcttgctgagctcagtgtgagctgcccttgcgagtggtcgaggctatctacaggaaactgctcggctgcagcctctttcacggcgaatccgccgccttccggcgagtagaagacgaactgatgatgagagcccggtgccaaggacagcagcgacgggaacggcgagttgtgagccgaaggcgagacgccatggctgacatcatggtggtggccaccattgccgccgttgccccaagattcggcggcggcgtagtacgccgcggcgtgatgatggtggtggtggtgagcggccaacgtcgccggcatggtggcggcgttgagcaggccgagggagttgctcaggctcatgaacgccttcatgccgccgccgccggcggccttgtcgccgtcctccagcatcgacgacgcggaggcgccgtggtggccgtcgcctccgttcgcgaacggcggcggcgccatggacgaggcggcggcggcgacgaggtcgtggtcgtgcggcgggaactggagcggcggaagcttgtcgatctcggcctgggcggcgttgatcagccagtcgaccaccttgctcggctggctgagccccagccggtcctgcaggtcgtagagctggatcgccgtcggcaccgacagccgcacccgccggtcgcggagccccttcaccgtcctcaccttgctgtgacggtccttgccgccgaacaccctcgacacgcgcacgatccgcgactccgtcgacgccgaccagtgccgcgagctcgccacggcggcggcggcgccgccgccgccgctcggcttgtcggccgccttcctgccgccgccgccgagctcctcattcgtgctgttattgcttgtcatcttgagctgctcatgattagacctggctgccgccagcccgcgcccggccgcctccatcccgccaccgccggccggccactgccagcccgcgcccat

SEQ ID NO: 66622 - DNA, 132 bp, Oryza sativa
  Clone ID: PAT_MRT4530_67555C.1
agcaccgacctaagaattcaataagcatcacgcaaatgtttacaaaagattatcattgctctagcaagaatgcccaagacattatggcagaccaaagcttaacatgccaagagttaaactgctattgtaata

SEQ ID NO: 66623 - DNA, 342 bp, Oryza sativa
  Clone ID: PAT_MRT4530_67556C.1
atgtcatacgatggagatattgtgtgcgtgtgggatgcggagttcggcggtctaaccggtgagacaccggcggtcagaccggtggcatcacggcgatcagacaggcgggtacatggcggtcagaccagcgacggcgacagggagcagaggcgacttcagagcgatcggaccgagcgatctacaccggtcagaccggcggcgcaggagcagtcagaccgactgatcaacctcgcgactggcagtgctgtaacaccccagataaatgtgtatataagggtgctacttcccgcccatgcataaaatagtgaatacatcctagcatttgccggcaaagccgagtaa

SEQ ID NO: 66624 - DNA, 325 bp, Oryza sativa
  unsure (1)..(325): unsure at all n locations
  Clone ID: PAT_MRT4530_67557C.1
ggatgaagcaactgcttgtatgtatcattgtacccctttcctctctatgtccgacaaaaacaaaaatgcttgtgaggaggatcaagacgttttgtatgtatgtacataaactttgaattactgtggcacattaaacttggcttcatagggtattttcaaggccaagttcgtcctcaatatcgtcaccatcttcgaacagcttgagaaaccgggcctgctcttgttgccgnttcttctttctccaatacttgtnacctaccaagagtcccaccgcaactacacctaacaagagttctacaatcagtaccaccattccaggatgcat

SEQ ID NO: 66625 - DNA, 629 bp, Oryza sativa
  Clone ID: PAT_MRT4530_67558C.1
gattggtacgactccattttggtggttgtgtggttgacgaaagtatcggtggaagccaatttgagaggatgactcttaattaggccgttagtgtttcgtgccaaacctacatttgaggagttaattttccgcatgaaggatgaattggattggagcatgagtcggttggtatgcaagggagacacgatgtgggcgccgatcccatatcacataagtatgtgttagatttgaatggacaggtggaatggaaaacatatgtagatataatattgggctcacagtttaaatcgcttgaggtgtttgcttgaaagatagaccacagtgaatcgaaaaaagaaatttcagacctcaatgaaaatccacgcatacagtcatgaaccgaagaatgatgtgtttgtggttgatcggaaggaagaattaattaattaagatatggaggtagggtttaggaggatgtggatgtatgggtagaagtaccagatgagaaggatgtggaggtaggaaggctttgttagaatcaattaaggaagaagtggaggtaggagaggaagtacaggttgaggagaatgcagaggtatggtcggaagtaccggatgagaaggatgtgaacgtagggaaggatttgtcag

SEQ ID NO: 66626 - DNA, 670 bp, Oryza sativa
  Clone ID: PAT_MRT4530_67559C.1
acatgccggacccacgggtcagcggcttaagggggaggtccgcggtggaccgggtccacggaccgggaaggagacggcgcaccacgtggtgcacacgtcgcgccgacgtggcgcacacgtggcggccacgtggcagccacgcgggcggcgggtcgggtagatcggacggcgggggcggctcacggccggccgcacgggctcggctcaagccggcccgacgccatggcgcgcggcggcgcggctcgacgcagcggcggcgaccgggggcgaccggccgacggcggagggcggcggcgtcgcggcaacgcggacggcgctagcggcggctaagcagctaggtggcggcgcaaggctaagcggcgcgggagagagaggaagggaggaggggccccaccgacgacgattgacgacggcgagcgacggagggcgacggcgatggcaggacgagctccgagaccacctagcgaacacgaagaaaggggttagagagagagaggaagatggaagagggcgaggaagccgacctaatgctgcagctatggcggtgctcaccggcgcacggtgcggaatgggttccgacggcggaatccgacgggagaggggtggacggggtggcccgctcgacggcgaacgcggcggcgtcgacggcacggctcggcacggcggctag

SEQ ID NO: 66627 - DNA, 609 bp, Oryza sativa
  Clone ID: PAT_MRT4530_6755C.1
atgtcatggcacagggccggtgtcctgctgctaggggctcagtcctgcctgcctgtcccgggggttccggccgtaggtgggattgggtcggtactcttgtctatggctaggatgggttggaaactatgtcacgtcttccgtctgtataccgtggtggctgaaatcaaacgtttgtatgatgctggttttattcgtccttgccgatatgctgaaagggtttctagtgtagttcctgttatcaagaaaaatggtaaggtcaatattgatgatgtggttgttaaatccaaagaaatagaggaccacatagccgatttgagaaaggttttcgagaggactaggaaatatggtttgaagatgaatccgacaaaatgtgcttttggtgtatcggctggccagttcttgggatttcttgttcatgaaagggggattgaaatacctcagaggagtatcaatgcgatcaaaaagattaagcctccgggaaacaagacagagttgcaggagatgatcggcaaaattaattttgttcgaaggtttatttctaatttgtctggaaaactggaaccttttacaccattgttaagattgagagccgatcagcaattcacttag

SEQ ID NO: 66628 - DNA, 3629 bp, Oryza sativa
  Clone ID: PAT_MRT4530_67560C.1
ttttttttttttttttttttgtacacaggtaataccaaaaggtaaattgtttactcacaggtaagtcttatatgtacagaaaaccgcatgggcgtggaagcaaacgttgatatatgtacagtaaaaccaacaaaaaaagtagtgcagctgaggctttttgagtatgttcgacttatttctaacaagtgggacaatgttgattgaacctatataaggctgtcaggatactctccattgccctctccagcgaatgtccctgaaggttttgattgatcatttagacatgcatgatgcatgtcgcttaggacagaagcatacgactctggaggaattggcggatcatccatatcaagcaaagactcatcatcaaccagctcgttcttggaagaagcatatgcatccaatggtgttggcagatcaactacatcaattataggttcatcagtgcgaggagcttcatcatctgaagacgagaatgtactaaacaacctagctgaacttaagccagcatcattgtcagtgtccttcgcatcagaaatttccgcttccgaatcagatgattcagcaagtaggacttcgagagaagggctgctcttacttgttttctttgccacgaaagccatgcctaaaacatcatcattgtactcgtaaagcaagtcacacaccttttgcagctcttcgcctgcagttgggtttacagtagaactacctgtaaaaggatcatcaacacaatttccagctgtgacaccacctgagccgacagcttctctagcaggttctgcactaaatgattccatactacacaaatctgacaaggagtgctctacctctgattttgtaaagctatcattgaggcttgcctccaagccgctgctctcaatgcatcttttcttggaatcagtaaaggctctaagacaacaagagttcatcccaccagaaacagaaaacttagcactgtcatcctcattaacctctagagctttctgcagcagaagttgattgatatcctttatattcttagcagattccatcgatgttctcttgaaggtatgcatttcagcaccaccattactagataatgcttcagaaatcacattcttactaaagttagcatttcttgccacaagaaactctgccaaggacaaggtagatctgttgccattcaactgttgtccatcattaatagattccaagacagtaggaagctgagaaggagcgatgatgtgctcagtgtttgcaatggattgcatcatgtatgaactagagccattattctttagatttgcttggcttccaacatctttagattcctcaactgtgtgaagctgtggaacacacaagggttctgtgctttcagcaaatgccatcatgttcaaatcgagaacattattcagatcgtttacctcagccttcaagtttgccttagagatataagtttgtggaactgcatctgcttcctcacaagatatgaaggtattgaccttatttgcatcaacgaatgtaccagataattggccagccgagccatcattagtggatgtctcatcaacttgttcagaagaaaatgggcaggtagaagaatcagtagtattttcagcagttgaattactggcagggcaagcagcagattgcgaagatggtgttttcttggttgaaccaagaagtgcctccaaggctgatgctagagcaccatcgacagatacatgagatttgcttttgaagctgtcaacagtgctttcactcaaagcagcatcagattttgtatgaccatcatcatgatcaccaacttctgtttctttctcttcctccaattcatcatctgaatcatttggaaattctggaaccttgacaactaaacctggggaagttttaggttctttctcagaagacagagcaaaatcaactggtgagaaagacccatcatgaagcttctcacaagcaaactcagattcagaaacaaaatcaggagccttaacaagaagccttggcaccatgctcggtccacgtaaggtaactgcattttcattggacttatcgcaactgaaggattcttctaaagaaaactctggtgctctgacaaccagacctggctgcctgttggttgtggaagcagaattttcagccttaccatcattatctgttttatcctgtggattaatcatatcagataaaccatctggggctgtcattcttgcagaagaagcttgtaaagtcttaatctccatagagaacacatcaaactgttgttccaatcgctgaagccttgactcgatgctacagataggcctcatcataccatcgtcaaacctggagcagtatagttccatcttctccatcttagagagaagagtatccagctttccctcaatgcgactgtaaggatttggattttcatccatgagaggagtaacaggctgatctgtatttgacacactctggttctttgtcaaaggagcttgtgtattttctgttgtttgtataggcaatagaatagacttggaatcctttagctcataatggttgcctttttcataagttattgtatcgccatctatagcatttagtttgctttccatccctgctgacttgaaatttaaatcatctgtgctacacggctctgcatctcgcactacattttcacatggactattattcactgccattgcacaaccttgggaaagctgagtccttgaggcatcagaaaaatatttattgtccgttttctggttccttgatttggacatttgcatgaggctagggacaagcatagccaacaaagaactacctcccatgtttccaggacgtgtttctgattcatcattggttggctcaacaggatcagcaaatatgtaaatctcctcgatgtgcactgatgtttttgactgaagtgaaaggaggcgaacagttagagatacacatgggcttgcatcagttatctcagcagttgcttcatagtgtgccagagtggtttcctgtttgactccaattgcattaggttcttgagatttagatctgttcttttccacatgtaactctgggattttgacatcaacccagctatcttcatcaatactactgcttacgcttttggtttcatgctcatgcttttcactagttgaggcatcactactccattggggcatactttcttcagcagaggggagtggctctttaactgcaggtccacaacgcacagtgcatagataatccttagagctatccttggggtcagttgtatagtatatttcataaatccgagctgtgcttcgcacatacaccctgtgaatctcatactttccccgcttaccactgatggaaaaatcaaatctaaagtagtaaaaacttagccagatattttccagcctactagggtttatccgaccataagctagactagatgctgcaaaactaaaattcacaacagtgagtgcaccagtgacctcgcagggaggagcgtcgccgtcgccatcaggggaagggcgttcaaggaagacggcggaggggacggcctccgcgtcgtcggcggacgtctcgaacgagacggcgtcctccacggccgcgccgccagccggagcccaggtggcggacaccgtccatggccgccccggctcggatcccgacgcctccat

SEQ ID NO: 66629 - DNA, 198 bp, Oryza sativa
  Clone ID: PAT_MRT4530_67561C.1
gccggccccacgtactatgcaggccacagtgttcttgccagcgccctcgcgtacgcagaacgacaacgtagcccacgggtatgggcccctggtatcatacgcgttccaggttctagcgtacgcactcccaccttccgcactgccccagccgcaacaagcaaccatgcatgccggggcacggccaggggggcatcctat

SEQ ID NO: 66630 - DNA, 239 bp, Oryza sativa
  Clone ID: PAT_MRT4530_67562C.1
aagaatctcgtgcaggtggagcatacagggagatgcgcaacatggcaagaaatgaacgggaaagctcatcatcctcaacacccgtgagacaggttgggaaccaactggggatgcacccggatggacccaagctccacgctacagcatcggagtctcaagctgggcaagtgccagtgaggaccgatggcgtgcgcctcatgacatacaatggggggacgaccaacctcccagatcaagtg

SEQ ID NO: 66631 - DNA, 758 bp, Oryza sativa
  Clone ID: PAT_MRT4530_67563C.1
gccttcacttccccgctcagctcagcagctcaggtcagtctcctcagcattgtttcagctgcaatgccatgctcagaatctcttctcttaattttttggtttccatgagttccagtatgatgtttcatgggttggtcgtcttggaggcagccatttgtttagggcgcatttggatctgttcctcgcagttcttggcccgaggaaagaacagatctttgcgcctctcttgagcttggcgtctcttcttggtgctctgcgtttatgttccttcaggttgaagggaaatgctaatgcaaagcttagcacttaactgttcttggctcccaaattccagagatttggatgcttccagtggtgctgagatctgcaggatgtagtagtaggagtactgtttttgttcttgtgttagattatgtggtctcctgatttggttggtggcacctaacagttgaagtagtagtataatgcagttgtcaattcggactagatcgagtcttgaaagtgccccatcttgtgcatttgtctctcttggtgacagggaaagggccattaatttgtgctaaatttcagtaatctgaaaactctgctctaggagctagaaagatctgaacaataatgagcctggttaaaattctcaatgttcagaattaccacgaactgtagtaatctgaagcacaagaagttggttttctggcttttcagaatacagaacaacattacagatctcttgtatgttgatttgaactttagtactctac

SEQ ID NO: 66632 - DNA, 174 bp, Oryza sativa
  Clone ID: PAT_MRT4530_67564C.1
atggaggaggacgatgacaccgtggcggttgatggcggtggccggtggtggttgaggcgacggcactacttcgggcctcgctgtcggacgctgggcagcaccttaaccaagaaggagtcacaagacacagacaatcctcttcatccttatggcaagatccagcaaagccactag

SEQ ID NO: 66633 - DNA, 876 bp, Oryza sativa
  Clone ID: PAT_MRT4530_67565C.1
atgggtcgcaaccggatggctcgtcagagacttctctcgatacacgcgccgagcaccgggtccggcggcagcatccgcttcttcctccgccggccggcgccgcctcccccagccaccttccgaccgtcggtcgactcctcctccgccaccccaccgccgcctgccagatccggcggtagccgcctcaactgcggcctctccccaccgcggatccggcgcctctcccccgccggtcgcctcctcctccgccaccccaccgccgcctgccagatccggcggcagccacctccagtacggcctctccccaccgtggatccggctcctctccaccgtcggtcccctcctcctccgccaccccaccgtcgcctgccagatccggcggctgccgcctccaccgcaccgcaaactgtcggatccggcgtctctccaccaccggtcgcctcctcctccgccaccccaccgcggatccagcgcctctcccccggcggtcgcctcctcctccgcccccccaccgtcgcctgccagatccggcagcagccgcctccactgcggcctctccccaccgcggatccggcgcctctccaccgccggtcccctcctcctccgccacctcaccgccgcctgccagatccggcggctgccgcctccaccgcaccgccaaccgtcggatcaggcgtctctccaccgccggtcgcctcctcctccgccaccccaccgccgcatgccaaatccggcggctgccgcctccaccgcaccgccaaccgtcggatccggcgcctctccaccgccgccgcctccaccgcatcaccaaccgtcagatccggcggcctctacccccgaccggcggcgtcgtccaccatctcctccacccgctag

SEQ ID NO: 66634 - DNA, 382 bp, Oryza sativa
  Clone ID: PAT_MRT4530_67566C.1
aaggatgctctatgagggaacgtttgcggattttgataaggcgaaggatgagttagttaacatagcgtatatgatcttggaagtctcttgtgagtgcaactgcatgaacatgctcaagcctttttgtttggggatgccggagcataccacctaggaaaagtgtggctgctttctacaagagcttgacaatctactagaactgagcattctggctgtaaggcacttgtctgacggcggatgagcttgaattcaaggccttcctgttggtaccaaagagagcgccattcgacctctttgtcaccaggaagaactaaaacaacatcaagctgtacgtactcaggctgtttttgatgatcaactgtgagcagttgatcccagagtg

SEQ ID NO: 66635 - DNA, 612 bp, Oryza sativa
  Clone ID: PAT_MRT4530_67567C.1
atggcggcggcgctagcgggtggaggagatggtggacgacgccgccggtcgggggtagaggccgccggatccgacggcggcggtggggtggtggaggaggaggcaaccggcggtggagaggcgctggatccaatggttggcggtgcggtggaggcggcagccgccggatctagcatgcggcggtggggtggcggaggaggaggcgaccgacggtggagaggtgccggatccgacggttggcggtgcggtggaggcggcagccgccggatctggcaggcggcggtggggtggcggaggaggaggggaccggcggtggagaggcgcccaaccatgcggtggaggcggcagccgccggatctggcaggcggcaatggggtggcggaggaggaggggaccggcggtggagaggcgccggatctgcggtggggagaggccgcagtggaggcggctaccgccggatctagcaggcggcggtggggtggcggaggaggagttgaccgacggtcggaaggtggccgggggaggcggcgccggccggtggaggaggaagcagatgccgctgccgaacccggtgctcggcgcgtgtattgagagaagtctctgacgggccat

SEQ ID NO: 66636 - DNA, 368 bp, Oryza sativa
  Clone ID: PAT_MRT4530_67568C.1
gaaaagttacggtgacaacattcgacctccggggcttcgtcaatacataatcacacacgtaatactgtccgtgagttatagaggggcagtcggttaacggtacaattcttaccagccacaaatgagcgaactttgacattctactaacaaaccaagagaaaagcacgctgtacacacagccctgatcagaaccaggagatacccgcagctcagggctagggctatcatgcatggagctttgctaaggcttcgctgtgaagtttcaaagcaacaacacacgcctttttagcattcaaattcctataaacatcattcaaaatactaatagcatcatcaatccctctagctttctgcaggaacatcctact

SEQ ID NO: 66637 - DNA, 1050 bp, Oryza sativa
  Clone ID: PAT_MRT4530_67569C.1
atggcggagaagaggctgctgctgctgccggtggcgctggcgatggcgcagaagcatgggggaggaggggagagggtgtgggcgcggccgtggaggtgggccaagacggcgttcttcgtcgtcgccatgatcgcgtcgctgctgctcgtctgcgcgccgccggtgctcgtcgtgatactcgacctcgccctcccgcccgcgctcctctccgcgcgcctccgcggcggcgggggcggggacgacgcgtcgttcgtggcggccgtcgtcgcgcaggcgcgggcgttcgacttccgctcgtcgctcgtcgacctcctcgccgtctccgccgcgcgcgcgctgctcatactcggcgcgtacatggcgtgcggcggcggaggcgcggcgtacctgtgggtggtggcgacgagcgcggcggggtcggtgtcctacgtgctggccaaggccgccgccgccgtgctcccgcgccgcggcgtcgcgccggcaccggaggggaagggcccggagcccatgctcctgctgtcggttgcgctcgccgccgcgcacctcgccgtcgcgtaccgcaccagctgccgcgagcgccgccgcctgctcgtctaccggatcgacgtcgaggcgaatgtgaagaagttgagccagaatttgatacagaacacttctctcctgcctgtaatttctgaaggatttgatctggagttgttgattgctggaggcagcagcagcaatctgagaggatacacgatcagtttggtggacttgtggacaataacaacctgcctggttaactgggcccaaagtttggcaaaaagaaaaagagtttggcagagcggcttgggcagcatggcaagcgaaacttcggaccagagcagagcatgcatcgacgcaacacgcatgacgaagctgctgccgacggcggatcaggcgagacacgatcgcggcggcggcggcggcgcgtcgccggcgggcgcgcatgacattggcgctgctggtgtcgttcccggcgatgacggtgtccgctggctttctgatgctggcgtggcgccacaggcctaa

SEQ ID NO: 66638 - DNA, 1797 bp, Oryza sativa
  Clone ID: PAT_MRT4530_6756C.1
atgaccaacttttacacgaattttcaagtggatgagatcggtcgagtggtctcagttggagatgggattgcacgtgtttatggattgaacgagattcaagctggagaaatggtggaatttgccagcggtgtgaaaggaatagccttgaatcttgagaatgagaatgtaggtattgttgtctttggtagtgataccgctattaaagaaggagatcttgtcaagcgcactggatctattgtggatgttcctgcgggaaaggccatgttaggccgtgtggtcgacgccttgggagtacctattgatggaaaaggggctctaagcgatcacgaacgaagacgtgtcgaagtgaaagccccagggattattgaacgtaaatctgtgcacgaacccatgcaaacaggcttaaaagcagtggatagcctggttcctataggccgtggtcaacgagaacttataatcggggacagacaaactggaaaaacagcaatagctatcgatactatattaaaccaaaagcaaatgaactcaaggggcacaaatgagagtgagacattgtattgtgtctatgttgcgattggacaaaaacgctcgactgtggcacaattagttcaaattctttcagaagcgaatgctttggaatattccattcttgtagcagccaccgcttcggatcctgctcctctgcaatttctggccccatattcagggtgtgccatgggggaatatttccgcgataatggaatgcacgcattaattatatatgatgatctaagtaaacaggcggtggcatatcgacaaatgtcattattgttacgccgaccaccaggccgtgaggctttcccaggggatgttttctatttacattcccgtctcttagaaagagccgctaaacgatcggaccagacaggtgcaggtagcttgactgcgttacccgtgattgaaacacaagctggagacgtatcggcctatatccccaccaatgtgatctccattacagatggacaaatctgtttggaaacagagctcttttatcgcggaattagacctgctattaacgttggcttatccgtcagtcgcgtcgggtctgccgctcagttgaaagctatgaaacaagtctgcggtagttcaaaactggaattggcacaatatcgcgaagtggccgccttcgctcaatttgggtcagaccttgatgctgcgactcaggcattactcaatagaggtgcaaggcttacagaagtgcccaaacaaccacaatatgaaccacttccaattgaaaaacaaattgttgtgatttatgctgctgtcaacggcttctgtgatcgaatgccactagacagaatttctcaatatgaaaaagccattctaagaagccatgccgtttggagaagagcaccaagtggggggagtgtggagtccccgaaagaggagctttctaaaggcaagagaaaagctccgatggagcccttggagctacagggaccaccaacccttcgcagcttggacgatttgattcttgtgccactcagccctgaggagggcgcctgctcgacccagtcagaattcaaaataaaggaggatttaattcggttgctttatgaaggccgacgccgtgccgatagatacgttatacacgaaacgaaaatagccagtacggtggacgcgttcctttccaaaaagggattatcaggagctcccagtgccgagggggtagttcaactcaagaaggagcggtactttctggaaaatcccgggaggaatggagctcctttgtatagggaactcgaagaactcttctaa

SEQ ID NO: 66639 - DNA, 567 bp, Oryza sativa
  Clone ID: PAT_MRT4530_67570C.1
taactattctcactgcttgctggacaataaaactggatatgatcatacaattgtgtttggtgctaggtgtatgatggctttagtttatgtgataagtagttctcagctagtttggggaacattaagtggttacttattttaaaatcatatcgttgtgttgtaagtgcatttgctgtttgcactattaatttcttggagatctgcatgcatgctgacatctgatagaaaatgaaccacttcccttcagcatttgctttgcttctttggtcctgtgttggtttcgacttcctttaaagtgaattctatcagaaggcctgtaaaaatgatttttataggttgatgtgttgatactagagatgttcttcactgagatgtttctgtcagaatgctcattgaactgttagatacttctcttagttttggaattggtttcacaattgtttgaaagcttgaagcaataatcaacacagtagatccaaataggcgaaactggtaatgtcagttgggttaatgtgagtccacatgtctctatgttttctgaattcagaagcttatgttcattccttt

SEQ ID NO: 66640 - DNA, 320 bp, Oryza sativa
  unsure (1)..(320): unsure at all n locations
  Clone ID: PAT_MRT4530_67571C.1
gccgcgaccatcagatcggccattacttgggccggcaaccacatggagatccggccacgctttgccctcggcggagacagagaataagccagctgtcgccggcggcgaggagatcggatgggggcggggtgactgcagtaatagccatagcggcggtggggctgggctggattaccatcgagatggcctggaagccgtgcttngactccagtcggagcgccatggaccgagcgctggacgcgaactacgacaccggcgagtccaccgggaccggtgccgccgctaacgagcctctcttggcggaactatctgacgcctcc

SEQ ID NO: 66641 - DNA, 485 bp, Oryza sativa
  Clone ID: PAT_MRT4530_67572C.1
agcaatcccagccatggccgccgctcctatcacgctgctcgtgctgtcactcctcctcctcgccgtcgccgccgccaccgccgccacattccccaccaccgtgaacgcctacacccccgccaccggcgtcgcggacgccggcgcggcggccggcgaggcggccggcgccaacgccgcctcgaacatcgccgccggcgccgcggcggggcatggccgcggacgccgcggactcggcggcggcgaacatcggcgcctatataccggaggccgggtacaacccggggaagctgtgcgacaacgcggtggtgatggactcgtgcgtggaggtgctcccgaggatccccggcgcgctgacggcgccggactaccgcgcgctcgccgtgatcctggacgcgtacgcgtggaagctggtgcaggggtcgcggcagatcgccgactccatgcgcgccgccgagaagctgggccacaccatggacaagtgcatc

SEQ ID NO: 66642 - DNA, 361 bp, Oryza sativa
  Clone ID: PAT_MRT4530_67573C.1
tttttttttttttttttgttttttttttttttttttttttttttggagaagatcagtcctactttattcatgccatgaccatgcatccatatgggctttcacagacccatgaagaattttcttggccgaaaccgaaacatacatttttaggggttttcaaggggggggggcaaaattaaaaagatcaagcgcaacccttgcctgccgtgggtgctcccccaaaatttaaaggccattcgaaaattttttaagcccccgggggcctttttttaaaactaaaaagagggtcatcccaaaagagggtcccaaaaaaaagggcctgacaaaaagggacatggcccctagaagaggctcccactac

SEQ ID NO: 66643 - DNA, 221 bp, Oryza sativa
  Clone ID: PAT_MRT4530_67574C.1
taggatcacacagagcccgagagctaactgtgcggcgtgctatggaggtcgagggaatagtgaagctccgaccgctgtacgcatcgaggcgtggggtgccaggagcagcacttcgaccttaggtttggttttgccgggctttacaaccaacggtccgacgtcggggccagtagaccgcgaacgtccccatggaaggcgtaaagttccaaccggcggctttt

SEQ ID NO: 66644 - DNA, 3471 bp, Oryza sativa
  Clone ID: PAT_MRT4530_67575C.1
atggcggccgaggcggcggcggcgaaggaggaggagccgtgctgcatctcccacgcattcgaccgcgccgcccgccggaaccctaccggcctcgccgtcatccatgcggcctcctcctcctcctccggctccgacagcgagcgccacttcacctgcgccgacctcctcgccgccgtctccaccctctcccgccacatcgccgcggagctcagctcgtctacctcccgccaccgtgatgaatcgcctggctgttcgggtcgccccgtggaagccgccgcggcgcctagggttgtgggggtttacgcctcgccttcggtggagtacatcgccgccgtcctcgccgtgctcagatgcggggaggcgttcctgccgctggacccatcgtggccagaggagaggattcgatgggccacctcgtcgtcgaatgcggtgctcgttgtatcatcagggggtttgggagcagctcatgtgtttgcgagcagctcttgctctgttattcacatggacgacgacttatggcaagtgtttgaggatgaaaagggtgggattggtcgagatgagcttgcttggccgtgcaagtacaagaagccgagggagttctgctacgtgatgttcacatctggttccactggaaaacccaagggtgtttgtggaacagagaaaggcatagagtatctgaaattacatggtagcaaaaatatatgttaccagcgaaacattaaatggctcatgtttttttatcttttgctttgtaatttcttatttaaggcatatggtatatcaaggatgaatttggttccatcattgatggagataatactaccttccctggagaaaaatctttcatggggacataacccgcttaagatgctaatatttagtggcgagaatctatccatattgttgtggaagagagtgcatgaaattctgccagagactactattgtaaatctgtatggaacgacagaggtttctggtgactgtacattttttgattgcacagatctgcctatacttttaaagcgagaagaattaactagtgtaccaattggatttcctatttcaaattgtgaagtttgtattgcaaccgacgccgaggtagcagatgaaggagaaatgcatgtcactggagcatgtttatttgctggatatttagaagagtccatggcgagtaatcacactgaagacaatggaagttcaacatactacagaaccggtgactttgctcgacgcttaaagagtggtgaatttattttccttgggagaaaggaccgtactgtaaaaatttatgggcagcgtttttcactgcaggaagtggaatctaccttaaatgaacatccagatgtcagtgctgctgctgttacttttcaaaataatgaatttctggattttagggcatacctggtgcttaagagtagcgccgcatctgtggaagactgtcagcggcgtaaaagatacaaatcttttgaagttatcatgccatcaattcgaagttggctcataatgaagcttccaccagccatgattccaaggtttttccttcccatggaatcattacctctgacttcttcaggaaagattgattatatgaagctatcaagcttgaagtgtgccttggagtcctgtgaaactgaaactgaaagaattacagttaatccacatttgcaagttatcaaaaaggcattttctgatgccttacttgttgatgaagtttccgagtttgatgatttcttcaccttgggtggtaattcaatttctgctgcgcacgtagcccacaagctggagattgacatgaggatgctttatatatattccaccccttctaagctcttggatgctttatttacaaagcacggttgtttactttcttctagtcatgagcctcaccctaagaagggattggacatatcttccagcatacatagctcatttaatccgatcgctacaagtgtagatgataactttcctgaagtaaaagcacatataaatggagatggagagtgtgcacatgatgccatttcagggaattatgcaaatgaagtagatggccagcttaacagaaatgtgcctttatctaatgatagataccagacaaaatccctcttgttggatacatgctcaaatgacagaaacagtgtcgatgtcagtccatggatcttgaatttttgtttagtaaagaaatggtctattggacgttgcaatagatttatgcatggatacgaagataagctgcaaattgaagatgtttgctcatatgttccctacaacaaaagaggttatcttcaggccctttggaacattcctctcggttcatgtgttgacgcgtcacctttgcttgtctccaacaatggcatgctgagtatatttatcgggtcccattcacacagatttctctgcattgatggctgtagtggttctgtgaggtggagtgtcaaattggaaggacgtgtagagtgttctgctgctataacaggtgacttttcagaggttgtagttggatgttataaagggaaaatctacttccttgatctgttaactggaaaacaagcttggaccattcagactgatggagagattgtagaagttcctcccattaagcatcagctggaaagatatatagtggcaggtgtctatctcttcttaaagaaagagcatccaaaaagaatgttgtcactgttcatgtctcacaatctcagattgaggtatctatcttcttgcaggtgtggctcttatgaccaccatttatatgcgttaaattacaaagatcgttgctgcacttacaaaatttcttgtggtggaagcatttatggttctcctgctatagacatgacacacaacatgatatatgttgcatctacgagtggccttgtgactgcaatatcacttgaggtatcgtcatttaagataatttggcaatatgaagccggggcaccaattttcggttctcttgctatacatcatcatggtggaaaagttatctgctgcctggtgaatggtctggtgattgcattgaactcacatggctctgtcgtttggaaggcatctgttggtggtcctatttttgctggtgcatgtttgtcatctggccttcctactcaggtgttgataccttcccgtgacggaagattatactcttttgatactacatctggtgctcttctttggaaatatgaagttggagaccctattaccgcatctgcttttgtcgatgaagtgttaacagcaacctcacctggagcatctgaaagattcgcttgtatctgcacgagttcgggacaggtccatgtcattaggattagagctgatgctaaggaagagaaagttaatggaagtatttgtaatgacttggtgcaaggatttgctgcaatagatcttcctggggacatcttctcatcgcccttgatggttggtggacgcatctttgttggatgcagagatgatcaactacactgtctcacaatcagctcatag

SEQ ID NO: 66645 - DNA, 620 bp, Oryza sativa
  Clone ID: PAT_MRT4530_67577C.1
gtgcgctcccgtccaagccgctgccgagtgcgattttgattctacctggggtgaatcgcgccaaatcttgccgcacggttgaattgagaatagacaggggtttcccctctcacaattcaaaccattcacccccgagccggccgttttcacctacgccgccgccgcgcgtcgcgcccggattggcgccctcacgtcgccagctaattccaaccgcggtcaagtcaatccttcgccgcataataagccctaaccaaagcactgcgtcaagttttacctcgccgcaccaagccgagcaccgccacccccgcactgctctgttcttcgccgccgcgaagtttttccggccgcaattcgtcgtttcaaccgatctcgccgctaagccgtccacacctcaaattaactcctccgccgccactcgccatcgccggagatccctagctccctcccctcctcggtcgcaaccactttctccctctaacgccgccttgggggaacggccggaggttgaagaagagaagagagagagagagagactgacaggtcttaaggattcctttgacactctagataatatcaatcaatctcaggacatcgagcaaggcaagttaccatatacctat

SEQ ID NO: 66646 - DNA, 2376 bp, Oryza sativa
  Clone ID: PAT_MRT4530_67578C.1
atggtcatgcggatcgagttcctggtggtggtcacggccgtattgttcctcctgatgtctatcttggacatgttccgtcatcggtcacgccacaacctcatcaagtattttctattgatcctagacggcataagcgattccacgttgatctacacaattgggctgatgcagagtgtgccttcgctgaagaaagacctgttcccggtgtgggcgctgatgctggtcaacctccggagcagcgtctgcttcatctcggcgtacggcatccctgaccaacagaaccgccggtttacagaggtagcaagggtgatggcacttataggggtggcattcttgaacacaacgttcaacagccggttcaagcatcctatctgggcactttgggcgatgcaggtagtgagatgtggctacctcttaagggtgtacaggctcgccacaaggtcctacttgcatggctggagctcaccgcttctgacagcatacatgggcacccccgatggcgttgctgcgaacggtgatacagccacaatgcgaggatacaagtacttggtatctggagatcagaagcaaacagttgaagtgaagcctcctgagtacaagttcactctgtttgtcccagagcacagaaggaaaatgctcgtcacacttgacaaggtttggcagcaggatgcaagcgacactagttcgactgacatcctaacaccacagatgaaagacatgtgcctgtcttttgcattataccgcttactccgttgcagatttgatgacttgagcctgccaagtgacagtgtcgtcaacaccagaagattaatcagtaaaatcatcggcaaaggcaacgcggatttcgctacacaaataagcaactacagcgagaagaccttcaggattgtgagatcagagctcgcgttcctcaacgactacttctacacaagataccccgtcctcttctggcgtggcttcccaatctttgcttcctgccaccctgtgctaacaattgctttcactgtttggcttggaaaggatctccataaaatttacaagcctaagcaggggggcgccaacgttgatatcatcattacgtgggggttcatgttcatcatcgtgttcaaggagctttggaagatgatcatctacttgctgtcagactggaccaaggtgatggtgctgtgcgagtacactgccgacagctttaagcatgctccacgatggctttgcaagggctttctctggcttctatgcactcgaaggtccaaaattgtccaccattggcacaataaggtaaatcagtatgaattccttcaatcatttaattacaggccttgcaagtggaacattctctactatggaacccttggattgttcgcaagacgaagagatggcgagaaaccaggcaaatcaatcgagctgccagaagacgtgaagtcagccattttgaggtctctctgctcacaaaaccttgagcgagattctttggagccaaatttcccaatattgttttcgacatttggacttccatgctcccacatcatcctcgtgtggcatatagcaacgaccctatgcgagattgagctttctcaacgttacaacggatgcttaactgattctgagctgcagcatgcagtcaaggctggtaagaactcccagccatacgttgtaaaggaagaaaggctggaaggtgcactgcaagctaattacatagtcgcaagttgtatttcaagatactgtgcctatctgcttgtctcagagccagatttgctacctgatacctacttaagttctgcggaggtatttgaaagcaccgtgaaagaggcttcagatgttctaaagggatctgacaacctgcagagcatatacagaaaactgatgtatcatggggatgttgtgaatgtcgataatatgaacagacgtcacccaagtgtgatactcgcgagaagtgcacaagttgctaagtccttggttgaaactgaagtcatggatcgttgggagatgttggctggggtgtgggccgaaatgttagtacatatagctccctcttggaatgcagcagctcacaagaaatgcctttcaaccggtggcgagttcgtaactcaaatctgggccattctttctcattgcaacatacaagaaagcaatctctggccacagcaggaatctccaaatgataatgaagcagagcagcaggaagaaagtgtaagtggcaatcaggcatctttttcagcacaacagcgggcagctgctggtcatggtggagtaagggatgatgaagctggaccgagtgggacaaagccaaatgatgaaacaaaagacgatgacgaaaagaagatgtcggttaatttgagttcaagaacaccaataaaacgtgacagtgtgagttag

SEQ ID NO: 66647 - DNA, 1518 bp, Oryza sativa
  Clone ID: PAT_MRT4530_67579C.1
atgctgctgccaccatcgccgccgccaacggcgtgggcgccaaatctatggccatggaccgccgcccaccggtgccgcacggcctccctcgcccacgcgccctcccacgccgccagtggcgtgttgaggatgactagcgaccagcaacgatgccacatctccaaagctcccgatcacatccgaagcagcaacccggagcattacaagccactggccttccccgtcggcccttaccatgcccgctccggcgtgccggcgccggagaaggcccagaggctgaaggagcaatgcgtcgacgaggtcgtccagctgagcggcaggagccgccacgacttgctcgagcagatgaggagcgtgctggatcgagcaaaggagtactacgccgacgagatcggcatggacgacgaggcgctggcgcagatgctcctcctcgacggctgcttcgtcctcgtctcgctccgcgggacggagcggctcaagcagctgactccaggatggaaggcggaggagagtacggagagcttgttgtcggagaactcggacgatcgttgctccgattgctcggatcagcagggcgacgaggagaatcagatcgccgcggcgaacaacggcggcggtggcggcgacgatagctggcaccatttcaacgtcgcgcgtgatctcttcctcgcggagaaccagatcccgttcttcgtggtgcagaagatctacgagcttctcgtcaagaaccgtccatacgcggagcgcggcgtcgtgggcgccgtggaggcgtacgtgcgggaggtgatggccgtgtacgcggatggagccggcgcgcaggcgcagccacccgccgccgaccacgtccaccatctgcttcacctcagccacatgtacctgagaccaaggacccggcgccagagctcgcgttggagcggcggcggcggcgcgaccgtgggccggctgcgccgcgcgacgcagctccgcgagctcatggtgcggctcaagaagctggagatcggaggcaaggcggctccggcgggcagcatcctggacgtggcgttccacggcggcgtgctggagatcccgcggctggagatcgacggcggcacgtggaggcagatggcgaacctcatcctgctggagcaagggagcccgcacgtggggctctacgtcacggcgtactgcgccttcatgtcgcagctcgccggcaccgccgaggacgtggcgctgctctgcgagtccggggtcatcgagcaccagctcggcggcgacggcgacgtcgccgacgggctcaggaggctctgcgacggcatcatcttcgacgccgacgacgacgcatacaactacctcaggccggtgtaccgggcggtcgaggagcactgccgcagccgcacgctgaggctgctctgctgggtgcgaggacacgccaactgccccaacccatggctgcttctcggcatcgttgccatcatcactctgctttgcttcatcgtgcagcagctgcagcacgccactctgaggaagaacgcaacttag

SEQ ID NO: 66648 - DNA, 4803 bp, Oryza sativa
  Clone ID: PAT_MRT4530_6757C.1
taaaaagaaaaactctaaaaagtcccctttccctccctctccctcttgggccggctcggcccatctccctccccctccctctcctgtccccgcggcccatccggcctctccccgcgcgcgcgccgctgacgggcgggcccgcccgccaccctcgctgatgggtggggcccacccatcatccccttcctcccgctgcctcgcccgcgccctagcgccgccgccgccgcgaatcccgccacctcccgccgtctccgcgtgcaataaagagggggaaatcactccccgtgatcccctctccctttaaccccatttttccctctctctctcgcgttcaaacgggcggatttgcccccgcatatctcgccggcgccattgatggcggccggacctcccgcgccggtttcctcccttccccggccaccctctcccgacccagctctatttaaaccctccccgcacctcctccgtccgtttccgcctctcgccgcccttcctcctcgccggaatcgagctcgcgccgtcgctctctctctccgccgtcgctgtcgagctccggtccgccgccgtcgtcgccccggaccacctcccaccttggcgccgcctccttcggcttcgccgcatcctcgccgacctcgtccacccctccgtttcgctcgccgaccgccagaacgccgtcgacccgagccgcgccgccgccttcctccgctccggccgcctttttcgtcgtcgccgtcgacctagggtgagccgtggaccgccgcttcttttcccccttcccttcccctctctcggccgccgctccgccgtgcctatggccaccgccggcgaccataggggcgcgggcgctgcctcccgccggctgcgccggcttggccgccctcgggcgcgccgagtggctgccgcgtggggcctggctcggccatataaggaccggtcttcgggcctctgttgcaaagaactaccgtacttccacatgtctagtgggtaaggcttagtttgtggctcagtcttgcctcctgggacaaggaataatgcacgcacgtaaggaacgcccgttgggttatttccggtcgtgacaatccccctttcatgaacaagaaatcccaaaaactggccagccgatacaccaaaagcacattttgtcgggttcatcttcaggccatattttttggttctcttgaaaaccttcctcaaatcggctatatggtcctctatttctttagacttaacaaccacatcatcgatgtagacttcaaccaaccagccgattaaatcatgatatatgtaattcatggctctttgatatgtagctccagcactcttcaagccgaaagtcatgacaacccattcaaataagccgattgcaccagggcatctaaaagctgtcttatggatatcttcttcagccataaagatttgattatatccagcgtttccatccataaaactcaaaattttgttccctgatgtagcatcaaccagctgatcagctattggcattgggtattcatccttcgttgtagccttattcagatctcggaaatcaatgcacaccctgaccttgccattcttcttaataactggaactatactagaaacccattcagcatatcggcaaggacgaataaaaccagcatcatacaatcgtttaatctcagctttgacaggttcaagcatatcggctttacatctcctcggaggttgctggcgtggtctaacccctagtttgataggtagccgatgttcaacaatcaatcggctgagtccaggcatctcataatactcccaagcgaagcaatctctaaactctcttaacagctctattagcttggttctaaactctggagataagttcttactaataaatgtcggccttggccgatcgtctggacctatgtctatttcttccaaatcatcggccgacatgaaaccttgaccttgcttgtcatcgagatcatctactgtatccttagtgtagacatttgaaccctccacgatgtcctcaaaataatagcttgggttctccatcttcaattggctgtcagctggcacgatctctatcttgtcgccttgccattgaatcaaacattgatgcatagttgaagggatgcaacaactagcatgaatccaatcccttccaagcaataagctgtaagaacccttcccatcgatgacaaaaaaagtagtaggaatagttttactgccgactgtcagctccacattcagaacacctttggtttccgatggattaccaccaaagtctttgagcaccatatttgtcttgatgagatcctcggcatttctacccaactttctgaacgtagcatagggcatcaaatttaccgcggccccaccatcaaccatcattttagacatcggcttcccattgacatagccgtttatatacaatggtttaagatgccgattctctgtcccctcaggtttctcgaacactgcctgttctggtgacagaaccaacttagctgattcctcttccacctcgtcgacatcggcttgatcgatcccgaattcggctggcagggtaaagaccatgttaaccggtgccatcacaacactcttcccttttgccaacctctttgcctcatcggctgcaacatcatcggctagagtaacctgattcttaacacgccactcctgccttggctttgctttcttcagccgatgattaatttcttgttcaacctcctgaaggcgctccctgtttctcaatctttgaacccttctcttctgattcttcatgaaaataccagaatgacaccattgattcttcctgattacattgtcctcttggccatgatcttgattcactggaccaaatctttgatgaacagaaattcttgtctgccttagccgattactcctattatatgatcggcttgatctctcaatgatatcactgcacccagggcagttttcaatagatggcaacctcatgctctcattccagcagaatctaaagaattcacaatcccaatgagtatcaaaaccatcatcgtattcttcatgatgcttctcctgctgcttgtcatacttcctctgatatttatcgataatcatagccgaattcgcctgaaaacccgttgcacggaccctattggctgtttggccagctgtatgcaccatattaacaggaaaagggttaccatcgaccttcatcggctttttggaatcatcaaacctaatcttgcctccctcaatggccacctgaatttgctgtctaaaaaccttgcaatcgttaatagaatgagacccagaattatgccacttgcaatacctctttttgcctaattcctcagccgatgggattgtatgaccagcaggaagttgaatttgcttctctcggagtagcagatcaaagatcttgtcagctttagtaatatcaaagtcatacttctcctcttttccagaactttttacccattggcatggtatgacctttttactcctcacccattcggctgcagctatttcagaatcatcgtcatcatcatccgacccatacatgtacggacaaacatgattaacattcttagagcttttcctaacttccgcagacctatgctcatgcaaggttactttctgtatcatatgtgacaagctatcaaagtcttcagacgagaacttctccctaatcggagcaatcataccctgaaaggccagatcggctaactgggcatcggttaaactcaagctgaagcatttgttcctcatctccctgaatctcatcttgtcccaaaaatttagagaagtccggaactttgaaccgattgggaagaggaactctctctcaaaccactcagggtaaggctgccgatacaagctcccagtctcttttggtttaagcccaaactgttccctcattacgtcagcaatcacatcggcccatggtcgttgctgagctgccccttgtgactgttgttgcatgggtccgaactgaccgtattgagatgcaaactgaggttgagccaatccccctgggtgatattgggcttgcggggaaggaggcaagtgctcaggaacaacttgaggcattactgtgccatctggctgtacgtggtgaaccaagtgttctgggacaacttgatttaaaaattgttgtacaggctgaccaccaggcgttgcaaacccggccgatgtgcttactgaaccctggtgctggatcggctgaacgatttgctgtcttaatggcgttcgctgaatcggctgcagaggctgttgccttggtggtgtttgcggaactggttgcatgacctgttgctggattggttgtacaaccgcgtaatcaacccgatcttggaagttattgaaaaaatcctgtgccacatcactattctgattaagatttcctccctgcagcccctgagcaccatcaccttgaactccatgcaccccgtcaccttgtactccatggactccttgagaattgtcgccttgatttcctagagagccgtcggtagcacctttgatactcggctgagccgagccgtctggagcttgtttcccatctccatccttagaagaactggtcccaggatcatcagcaaccacttttattttgtacttctgaacaagtgtccccttgcgggtctgcatgaatgagttcaagaactgatcccgtgcttgctgcaacattgcttcaaactctttcttctgttcaggtgtgaatttttctggatcgatcggcacgacgtttccttcattgacatcagtcaatcccaatttcagcatcttttccttaacagagcctgggctagatggtggtggtggttgtttctcggccat

SEQ ID NO: 66649 - DNA, 873 bp, Oryza sativa
  Clone ID: PAT_MRT4530_67580C.1
atggcgcgcgcaaagacggtgtcgaagtgcatcacggagacggcggagggaagccacgtgttcagcatcaccgagtacagccagaagagggggatgggcgtcggcaaaggtgtcgaggtgcacgcgtcctccgacctgaggctgctcgaccacaccaccggcctgtctacttcagtgacaaagacattgcccaaagcatcggcgtatctccgcgacgatcgcctcgacatcgagtgtgttgtcactgtcatgaaagagccacgggtgtctcagaccaaatcttcccccaaagtcgcggtgccgccgtcagacatcgcggcgcatcttggcaagctgctggaatcgaaggaggcggccgatgtcacattctatgtcggggaggatacctttgcggcgcacaaggtcgtgctcgcgatgcgatcaccggtcttcaaggcggagctctttggcccgatgagggaggcgggggcacaggtcttacccatcaaagacattcagcctgatgttttcaaggccctgctccatttcatctacactgattcattgtctatcattgatgatcttgtgggagatgaccgtggtgaaatgattcggcacttgctcgtggccgcggatcgttacgccatggagaggctgaagctgatatgtgaaagtgacctctgtgagaatcttaatgtgcagactgtggcagctaccttggctctagctgatcaacatcattgtgcgtcactcagggatgcttgcattgagtttatgtcctcttcttcaatggatgatattgtggcgacacaggggtttgtagatctcaaaacaaattgtccttcagtcttggtggatgcatttgtgaacatgagtatgctcaacaaaaggtag

SEQ ID NO: 66650 - DNA, 155 bp, Oryza sativa
  Clone ID: PAT_MRT4530_67581C.1
gaacgggagttggggggggactaatttgtgattttagtgaggcgaattgaaacttggcgtaaatttggtgaaagttgtatcggggggaaaattgttattgggtaaaatttgtgataaaataggggccagaaaaataaaatggttagtgtgggggg

SEQ ID NO: 66651 - DNA, 189 bp, Oryza sativa
  Clone ID: PAT_MRT4530_67582C.1
atgtctactggtggtggtgcttccggagcggcaggaggtggtgcgccaggaactggaggcgcaccaatcgacaacaccaacggaggcaattctgcctcacaatccagcggagagactttcacagggggctcgaggccttgctggatccgcatgaagcgcatgaagagatggggaggggggaagaggtag

SEQ ID NO: 66652 - DNA, 944 bp, Oryza sativa
  Clone ID: PAT_MRT4530_67583C.1
gcacgaggccccttttttttttttttttttttttttttttttttgggctatcactttgatcttatggtttaggatttggaagcaattttcagtctagtaccacatcagtttaacattaatccaggatacaaccaagctgcagtccactaaaaactgaagccaatttaatcccttccaagggaagagcagctaaaactgacattatgtatcctctctttgaccaacctaaacaccagttttctctgcgcctaccaaattacagcaactttaaatttacctgtatatcaagaacgaaaaaaaaaactaacaaattctgccagaatggagcagcattcaacagcatcaatggagggaaggggagctttgagtatggcacagccgctttcttttgagtatatgtcatcaggggagaagagaatcctcctcccatatatggtgatatgttttcccgggtggcggaacttcacgaccttgtgccaaatccggtgatcgtcgacaggtgggacatctgaagatggttcgtttcaagactatgcggcctttggccgcccgtaggatatcaccatcacatagtctcccccggaggagccgaccacagtctgcaaggtgcgagctgggccgaacctcagccaccgctctattaaattgcgcaggggttgaattgggttcactggctgaccgcagcagcttatttcaacctcagtctcacttggaagactgagcttctgcatgatatacttttggatggatgacgcgggcatattgtcatctcttctaatctgctggtatgttggtttattctcaaataatgggttggtatctgcggcaagggtggagcacctttctagacactgcagcggctgggggttgtgcaggtttcctcccccggccaggtcctttccttttaaacggaactgttgccacaggaacttctttcttctcat

SEQ ID NO: 66653 - DNA, 1162 bp, Oryza sativa
  Clone ID: PAT_MRT4530_67584C.1
atgcagaccgggcccgcatcgccggacggcgaaggaggaggaggaggtggtggaggaggaggacgacgaggaggagggggaggaggatgggggagagcagccgcggcgggagcgggagcgggagcggcggaggcggaggcggaggaagcgggaggcggcggcggcggcgagcgaggtggtgatgtttgtagaaagtgtatctataagaagattaatgatgaagagctagagcactgtccagtctgtaaaattgatcttggctgtgctcccctcgagaagcttagagctgatcacaatatacaagatgtgaggtcaaaaatatttccattgaaaagaaagaaggttaatgctgaagaggttgaatctcctattgcgccgcctgctaaaaggaaagagagatctatctcttcattggtggtcaatacacctgaaataacaccaaagagtttgacagggcgccgaacaagggcatctaccaggaagtctgctgccgcattacgtgaccttggtcctatcattcctcctgtgaaaaaggatagtgataacaccaataagaatgctgataattcaagcttgctggacagcttgagcaaagtacctcaaacaagaagacaggtattgtcaaatgcggaaacatcgagtcatccctccagtaaagataaaggaggtgacgataaggacttggacaagtcagagctctggagacctttaaattgtcttgtagaggctgcaagcaaaacaaagtcctatagatcaagttcagctgctaggggaaatcagcccactgaatctcctagtagtgcaaatgctagcagaactaaggctagggagtatctgcttaagtccaaagttcaagatgagaagaaagaagttcctgtggcaacagttccgtttaaaaggaaaggacctggccgggggaggaaacctgcacaacccccagccgctgcagtgtctagtcattcagctagcaagcatgaaaaattattaacccctgtatggttttcattgattgcatcatttgaccagaaaggtgctccacccttgccgcagataccaacccattatttgagaataaaagatgacaatatgcccgcgtcatccatcccaaagtatatcatgcagaagctcagtcttccaagtgagactgaggttgaaataagct

SEQ ID NO: 66654 - DNA, 173 bp, Oryza sativa
  Clone ID: PAT_MRT4530_67585C.1
acgcaagaaagcgtaagcaacagacgggatcaactgatgactcacttagctaattaaatcttctaccatgtcggacaagtgcggggtctgaaactgtcctgacaagatccagtgcatgaagaaaggtaccagctgtggagtcgccaggctgaatctgattctaaaccttgcac

SEQ ID NO: 66655 - DNA, 261 bp, Oryza sativa
  Clone ID: PAT_MRT4530_67586C.1
gtccggtggtatcaattcttttatctgtacctgaagggcgttgtctaatacctaattaaggttgatctatgagcatctgagacttaatgaaggctagcttgaactactagatcggttaaaactgtagctcatgtgcggaactaccatgaggcactgatagtgtagaccattgctcccatacttattgaggtctatcaggtgatcaatacggtggcatatttagatgtgtggatcataatggaacctgtagaatcctcccat

SEQ ID NO: 66656 - DNA, 505 bp, Oryza sativa
  Clone ID: PAT_MRT4530_67587C.1
agaagatagaaaaaatgacgccaatagaccactgcaccttaagaaactctccgtagctacagacactgaaagacaaaccggactaacactgggggaccaatccataaatccgccccttatacaccaaacaaccgaataacatcattcacccacggcatgctgctcaggctgaccagacatattacccaacagcatcaccccatgaacctccgccgactaccttgcgagtgatgcgcctgttgccctaacccttgagcataaagcacaacgccgaggggatccttcatagcgacactctgtgacgcatgaactcttacgcctgcagacacttgttaatgcatagccttattactgcgggccatatatggagcgaggatcgatcctaccgaacaagggtaccttgctagatctctaccgcacgaagtatatcatgctggcactcgaactgagtgggctatgcgtgtaccgccgaccaaaacagggactcccggatcatcgtgaacac

SEQ ID NO: 66657 - DNA, 426 bp, Oryza sativa
  Clone ID: PAT_MRT4530_67588C.1
gacatattcctaataaactcccctttatgtcccaccagacccgaaactaagacagccgcggggcctattgactgctctgtatcttacgattaagaagtcaagctcttatccatggctcgcaaaagccctcccttaggcatcctaggccattgaaaaacatcacgatcatactctgcgtcgctatctgaggactgacacacatcctcattactgaatgttggtcacggctctctgagctgagcacaacgatcacctacatacacaccctagtgctacaactctccctcagtgagcagcgatgtccatgattgatcctgatggcatcgccaatatatcttaagctgctactactcaggaacaaaggacttcattgaacagtcacagggcctcaacatattgcagcactatgtacagccccactagata

SEQ ID NO: 66658 - DNA, 393 bp, Oryza sativa
  Clone ID: PAT_MRT4530_67589C.1
gaccggcatgtacatgtcgaacacatttaaaaggtcaatgtaattacagcttacgaagttacaagccaatgagaaattcgttctttaccaggcaggtaccatacagaaatcttatggaacccaccagcttgccctgtacaagtcatgtgttacagtgttaggacgcagttgctctggccagtgtttatgaacagcacattgaaatgttaccaacgatcccatttgaagccacgaatatattcatcatgatggcgcattggcacttcaaccattcattcccacccaatattggatggaacaaaaccaaaagatacctcctggtttgttggagaggattttgaagttcctactttctgtttttagttcatgaaatcagggtctgttcctcgtgcc

SEQ ID NO: 66659 - DNA, 2745 bp, Oryza sativa
  Clone ID: PAT_MRT4530_6758C.1
atgcaacaacagtcacagggagcagctcagcaacaaccgtgggccgatgtgattgctgacgtaatgagggaacagtttgagcttaaaccaaaagagactggaagcttgtatcagcagccttaccctgagtggtttgagagggttcctcttcccaatcggttcaaagttccagatttctccaagttttcgagacaagatggtgtgtcaacttttgagcacattagccgattcttagctcagtgtggtgaagcatcggctgtagatgctctgaagggtatgattgctccgattagggagaaattctcgtctgaagactttgatagcttatcacatctgaaacagatggtaaccttgcacgagcataggtctgcggaagtcaggaaaagctctaagaaggacgattctgaaatagctgcagccgaatgggtgaggagtaaaaaggtcataccgtgccaatgggtaaagagtcctggaaaagaagagaaatatgattttgatattactaaggctgacaagatctttgatctgctactccgagagaagcaaattcaactccctgctggtcatacaattccatcggctgaggaattaggcaagaagaggtattgcaaatggcataattctggatcccattctactaatgattacaaggtttttagacagcagaatcaggtggccattgagggaggcaagattaggtttgatgattctaaaaagccgatgaaggtcgatgctggccaaacagccgatagggtccgtgcgaagggttttcaggtgaattcggctaagattattaacaaatatcagaggaagtatgacaaacagcaagagaagcatcatgaagaatatgatgatggttttgatcctcattggggttgggttaggccgcaccagcagtctccgaggagatgcaaagccgatatgcttgaacctgtcaaggcagagattaagcgtttatatgatgctggttttattcgtccttgccgatatgctgagtgggtttctagcatagttcctgttatcaagaaggatggaaacacaggatataatcaaatctttatggctgaagaagatatccataaaacagcttttagatatcctggtgcaatcagcttatttgagtgggttgttatgagtttcggcttgaagagtgctggagctacatatcaaagggccatgaattatatttatcatgatctgatcggctggctggttgaggtctatattgatgatgtggttgttaaatctaaggaaataggagaccacatagctgatttaagaaaagtttttgagagaaccaggaaatatggcttgaagatgaatccgacaaagtgtgcttttggtgtatcggctggccagttcttgggatttcttgtccatgagaggggaattgagataactcaaagaagtatcaatgcgatcaaaaagattaagtccccggaaaacaagaccgatttgcaggagatgatcggcaagattatttttgttcgaaggttgaggcattatctactatccaacgagtgtactgttatatgtaaggccgacgttgtcaaatacatgctgtcggctccaatattgaaaggaagggttggaaagtggatattttccttaaccgagtttgatcttcggtatgagtcgccgaaggcgattaagggacaagctatagccgattttattatggaacatcgtgatgattcaatcggctcagttgaaatagtgccatggactttattctttgatggatcggagagtatgaatgcaagaatgatattttccttaaccgagtttgatcttcggtatgagtcgccgaaggcgattaagggacaagctatagccgattttattgtggaacatcgtgatgattcaatcggctcagttgaaatagtgccatggactttattctttgatggatcggtgtatactcatggttgtggtattggcctagttataatttctcctaggggggcatgtttcgagtttgcttatactattaaaccgtatgcgactaataatcaagctgagtatgaggcagtgctcaaagggttgcaattacttatggaagttgaagccgatgccattgaaatcatgcgggattctttgctagtaatcagtcaattggcaggagagtatgaatgcaagaatgatacattaatgatttataataagaaatgccaagaactgatgaaggagtttcggctggttactttaaagcatgcatctcgagaacaaaatattgaagctaatgatttggcccaaggggcatcggggtataagccaatgatcaaagatgttaaggttgaaattgcagcaataacaaccgatgattggaggtatgatgtgtaccagtatttgcagaatccatctcaatcgacttctaggaaattgagatataaggcgctgaagtatactctattggatgatgagctttactatcggacgattgatggggtgttgcttaagtgtttgagtactgatcaggctaaagttgcaattggcgaagtccatgagggaatttgtggtactcatcaatcggctcataagatgaagtggttacttcggcgtgcagggtatttttggccgacaatgctggaggattgtttcagatattataaggggtgtcaagaatgtcagaagtttggggcaattcagcgagcgccggcgtcggctatgaatcctattattaagccatggccattcagaggttgggcaattgatatgatctatgataaacccaccgtcaagtaa

SEQ ID NO: 66660 - DNA, 291 bp, Oryza sativa
  Clone ID: PAT_MRT4530_67590C.1
atggtgcagcacacaagccgtctcgaccttttcttggtctgcaccgtcgtcgtcgtggttgtggcgctgcaccacgccacggcggtgcacggcctgacgagagccgagctcgtcctggctccggctccggctatggcgccggcgccggcgcctccggccaacaatgtcgtcggcgtcgacgcggcgaaggagcgagacaaaacttttgtgtccagagatgatgagaagaagaagaagaagctcatgaggattctggacaagattaatagattatgtgctcctccggtttag

SEQ ID NO: 66661 - DNA, 600 bp, Oryza sativa
  Clone ID: PAT_MRT4530_67591C.1
atggggatcttcactcgatcatggatgaaggaacatatgtgcagcataatcataaatcagggttgggcagttgctcctctgctctgctcgagccttgcttgcagcgagccttcctaccgactgccgcactgccatcgccctacacctccatggctccctgccaccttcgtagtggtcgccgccaacctccttgcaagctcgaggaaacctatctttggccaaatatggcgctccaaccttcgtgttggctggatctggtggatgggatggcagagtggagccattgtagggagggggatagcaccaaaggatgaggagagcggaggagatggcggccgacagtgtcggccctcaagcaggagcagaagagatggtgtccatgtccgcgctcggccgcaagatattccgaaattgaattctatttctgaagaaaatgttgttaacaaaattgtggagattcaaattattcagcaggagacaaaagacaaactctatttgaaacataattctagtggaatctgcaacaccaaaagtgcttataaggaggtagttaaaagagaaaatcaaaacactaaccagatgtggacagttggaatctga

SEQ ID NO: 66662 - DNA, 417 bp, Oryza sativa
  unsure (1)..(417): unsure at all n locations
  Clone ID: PAT_MRT4530_67592C.1
tnngncccnncannanctcaaggacggtntntnccgncaagggcttctacaccaagcagtttcatctcctactcgcctcgcgcggcgtggttcatttctcactctcctccttcactcatcttctttccaatccttcatantttatcaccccttcgtaccgtgacctccttaactacaagtgctcccaggccgccaacccggacgtcgttaacaacgtccgcgacgaggactcctccgtcgtctccaggatcatgccggtcttcgtcagctcgatccccaagatcatcgatttcctcgacaacacctactaccacaacatcctcgccaagatcgtaacctttcactccaactggcagttgctcacgaacgccacgtctctcttcaaggtccacgaatactccgacaatgccacccttt
